United States Patent Application Publication US 2022/0389077 A1 - sequence listing, part 2

SEQ ID NO: 4231 - protein, 1181 aa, Homo Sapiens
MAVAVAMAGALIGSEPGPAEELAKLEYLSLVSKVCTELDNHLGINDKDLAEFVISLAEKNTTFDTFKASLVKNGAEFTDSLISNLLRLIQTMRPPAKPSTSKDPVVKPKTEKEKLKELFPVLCQPDNPSVRTMLDEDDVKVAVDVLKELEALMPSAAGQEKQRDAEHRDRTKKKKRSRSRDRNRDRDRDRERNRDRDHKRRHRSRSRSRSRTRERNKVKSRYRSRSRSQSPPKDRKDRDKYGERNLDRWRDKHVDRPPPEEPTIGDIYNGKVTSIMQFGCFVQLEGLRKRWEGLVHISELRREGRVANVADVVSKGQRVKVKVLSFTGTKTSLSMKDVDQETGEDLNPNRRRNLVGETNEETSMRNPDRPTHLSLVSAPEVEDDSLERKRLTRISDPEKWEIKQMIAANVLSKEEFPDFDEETGILPKVDDEEDEDLEIELVEEEPPFLRGHTKQSMDMSPIKIVKNPDGSLSQAAMMQSALAKERRELKQAQREAEMDSIPMGLNKHWVDPLPDAEGRQIAANMRGIGMMPNDIPEWKKHAFGGNKASYGKKTQMSILEQRESLPIYKLKEQLVQAVHDNQILIVIGETGSGKTTQITQYLAEAGYTSRGKIGCTQPRRVAAMSVAKRVSEEFGCCLGQEVGYTIRFEDCTSPETVIKYMTDGMLLRECLIDPDLTQYAIIMLDEAHERTIHTDVLFGLLKKTVQKRQDMKLIVTSATLDAVKFSQYFYEAPIFTIPGRTYPVEILYTKEPETDYLDASLITVMQIHLTEPPGDILVFLTGQEEIDTACEILYERMKSLGPDVPELIILPVYSALPSEMQTRIFDPAPPGSRKVVIATNIAETSLTIDGIYYVVDPGFVKQKVYNSKTGIDQLVVTPISQAQAKQRAGRAGRTGPGKCYRLYTERAYRDEMLTTNVPEIQRTNLASTVLSLKAMGINDLLSFDFMDAPPMETLITAMEQLYTLGALDDEGLLTRLGRRMAEFPLEPMLCKMLIMSVHLGCSEEMLTIVSMLSVQNVFYRPKDKQALADQKKAKFHQTEGDHLTLLAVYNSWKNNKFSNPWCYENFIQARSLRRAQDIRKQMLGIMDRHKLDVVSCGKSTVRVQKAICSGFFRNAAKKDPQEGYRTLIDQQVVYIHPSSALFNRQPECPKHFLPVVAVAVSLEQCLSKFEDLNKELGLVTC

SEQ ID NO: 4232 - protein, 53 aa, Homo Sapiens
MAVAVAMAGALIGSEPGPAEELAKLEYLSLVSKVCTELDNHLGINDKDLGFSY

SEQ ID NO: 4233 - protein, 33 aa, Homo Sapiens
  misc_feature (1)..(1): Xaa can be any naturally occurring amino acid
XYRTLIDQQVVYIHPSSALFNRQPEWTVPMGHV

SEQ ID NO: 4234 - protein, 6 aa, Homo Sapiens
MGILSV

SEQ ID NO: 4235 - protein, 6 aa, Homo Sapiens
MGILSV

SEQ ID NO: 4236 - protein, 56 aa, Homo Sapiens
MGILSVDLLITLQILPPSANWWKSSPQWLTSCWSTLMRLIHQMAGRYRGTPLCLLR

SEQ ID NO: 4237 - protein, 55 aa, Homo Sapiens
MGILSVDLLITLQILPVFFSNCLFLALYDSVILLKHVVLLLSRSKSTRGEWRRML

SEQ ID NO: 4238 - protein, 145 aa, Homo Sapiens
MGILSVDLLITLQILPVFFSNCLFLALYDSVILLKHVVLLLSRSKSTRGEWRRMLTSEGLRCVWKSFLLDAYKQLNCPPSGFSKDGHILLVYEAYKSRLLVYSHLDLWMTDSVVLTLNFPRQISLCFGKNSAAELYIVSKKEKVP

SEQ ID NO: 4239 - protein, 306 aa, Homo Sapiens
MGILSVDLLITLQILPVFFSNCLFLALYDSVILLKHVVLLLSRSKSTRGEWRRMLTSEGLRCVWKSFLLDAYKQLNCPPSGFSKDGHILLVYEAYKSRLLVYSHLDLWMVKLGEDAPNSSVVHVSSTEGGDNSGNGTQEKIAEGATCHLLDFASPERPLVVNFGSATPPFTSQLPAFRKLVEEFSSVADFLLVYIDEAHPSDGWAIPGDSSLSFEVKKHQNQEDRCAAAQQLLERFSLPPQCRVVADRMDNNANIAYGVAFERVCIVQRQKIAYLGGKGPFSYNLQEVRHWLEKNFSKRKKTRLAG

SEQ ID NO: 4240 - protein, 271 aa, Homo Sapiens
MGILSVDLLITLQILPVFFSNCLFLALYDSVILLKHVVLLLSRSKSTRGEWRRMLTSEGLRCVWKSFLLDAYKQVKLGEDAPNSSVVHVSSTEGGDNSGNGTQEKIAEGATCHLLDFASPERPLVVNFGSATPPFTSQLPAFRKLVEEFSSVADFLLVYIDEAHPSDGWAIPGDSSLSFEVKKHQNQEDRCAAAQQLLERFSLPPQCRVVADRMDNNANIAYGVAFERVCIVQRQKIAYLGGKGPFSYNLQEVRHWLEKNFSKRKKTRLAG

SEQ ID NO: 4241 - protein, 271 aa, Homo Sapiens; identical to SEQ ID NO: 4240

SEQ ID NO: 4242 - protein, 37 aa, Homo Sapiens
  misc_feature (1)..(1): Xaa can be any naturally occurring amino acid
XMLTSEGLRCVWKSFLLDAYKQLNCPPSGFSKDGHIL

SEQ ID NO: 4243 - protein, 58 aa, Homo Sapiens
  misc_feature (1)..(1): Xaa can be any naturally occurring amino acid
XMLTSEGLRCVWKSFLLDAYKQTDSVVLTLNFPRQISLCFGKNSAAELYIVSKKEKVP

SEQ ID NO: 4244 - protein, 77 aa, Homo Sapiens
MEEAKKMISGLQALLLNGSLPEDEQERPLALCEPGVNPEEQLIIIQSRLDQSMEENQDLKKELLKCKQEARNLQGIK

SEQ ID NO: 4245 - protein, 472 aa, Homo Sapiens
MGGTQVKCLTSPSPIHSAKSESIITQSEEKADFVIIPAEGIENRTEGTDSPLSRDWRPGSPGTYLETSWEEQLLEQQEYLEKEMEEAKKMISGLQALLLNGSLPEDEQERPLALCEPGVNPEEQLIIIQSRLDQSMEENQDLKKELLKCKQEARNLQGIKDALQQRLTQQDTSVLQLKQELLRANMDKDELHNQNVDLQRKLDERNRLLGEYKKELGQKDRLLQQHQAKLEEALRKLSDVSYHQVDLERELEHKDVLLAHCMKREADEATNYNSHNSQSNGFLLPTAGKGATSVSNRGTSDLQLVRDALRSLRNSFSGHDPQHHTIDSLEQGISSLMERLHVMETQKKQERKVRVKSPRTQVGSEYRESWPPNSKLPHSQSSPTVSSTCTKVLYFTDRSLTPFMVNIPKRLEEVTLKDFKAAIDREGNHRYHFKALDPEFGTVKEEIFHDDDAIPGWEGKIVAWVEEDHGEN

SEQ ID NO: 4246 - protein, 218 aa, Homo Sapiens
MGTQVVMRFNNSLLPTEPSQQLQAYVAWVNAQLKKRPAVKPVQDLRQDLRDGVILAYLIEIVAGEKLSGVQLSPGNQQEMKNNVEKVLQFVASKKIRMHQTSAKDIVDGNLKSIMRLVLALAAHFKPGSSRTVNQGRDSRAPLQSHRPHCATAVAQGAAAALADVCHDMSRSGRDVFRYRQRNSSMDEEIENPYWSVRALVQQYEGQQRSPSESSCSR

SEQ ID NO: 4247 - protein, 683 aa, Homo Sapiens
MLACLTRGNLLDVLQEGFNEQQLQAYVAWVNAQLKKRPAVKPVQDLRQDLRDGVILAYLIEIVAGEKLSGVQLSPGNQQEMKNNVEKVLQFVASKKIRMHQTSAKDIVDGNLKSIMRLVLALAAHFKPGSSRTVNQGRDSRAPLQSHRPHCATAVAQGAAAALADVCHDMSRSGRDVFRYRQRNSSMDEEIENPYWSVRALVQQYEGQQRSPSESSCSSLTSPSPIHSAKSESIITQSEEKADFVIIPAEGIENRTEGTDSPLSRDWRPGSPGTYLETSWEEQLLEQQEYLEKEMEEAKKMISGLQALLLNGSLPEDEQERPLALCEPGVNPEEQLIIIQSRLDQSMEENQDLKKELLKCKQEARNLQGIKDALQQRLTQQDTSVLQLKQELLRANMDKDELHNQNVDLQRKLDERNRLLGEYKKELGQKDRLLQQHQAKLEEALRKLSDVSYHQVDLERELEHKDVLLAHCMKREADEATNYNSHNSQSNGFLLPTAGKGATSVSNRGTSDLQLVRDALRSLRNSFSGHDPQHHTIDSLEQGISSLMERLHVMETQKKQERKVRVKSPRTQVGSEYRESWPPNSKLPHSQSSPTVSSTCTKVLYFTDRSLTPFMVNIPKRLEEVTLKDFKAAIDREGNHRYHFKALDPEFGTVKEEIFHDDDAIPGWEGKIVAWVEEDHGEN

SEQ ID NO: 4248 - protein, 266 aa, Homo Sapiens
MMALGAAGATRVFVAMVAAALGGHPLLGVSATLNSVLNSNAIKNLPPPLGGAAGHPGSAVSAAPGILYPGGNKYQTIDNYQPYPCAEDEECGTDEYCASPTRGGDAGVQICLACRKRRKRCMRHAMCCPGNYCKNGICVSSDQNHFRGEIEETITESFGNDHSTLDGYSRRTTLSSKMYHTKGQEGSVCLRSSDCASGLCCARHFWSKICKPVLKEGQVCTKHRRKGSHGLEIFQRCYCGEGLSCRIQKDHHQASNSSRLHTCQRH

SEQ ID NO: 4249 - protein, 259 aa, Homo Sapiens
MAALMRSKDSSCCLLLLAAVLMVESSQIGSSRAKLNSIKSSLGGETPGQAANRSAGMYQGLAFGGSKKGKNLGQAYPCSSDKECEVGRYCHSPHQGSSACMVCRRKKKRCHRDGMCCPSTRCNNGICIPVTESILTPHIPALDGTRHRDRNHGHYSNHDLGWQNLGRPHTKMSHIKGHEGDPCLRSSDCIEGFCCARHFWTKICKPVLHQGEVCTKQRKKGSHGLEIFQRCDCAKGLSCKVWKDATYSSKARLHVCQKI

SEQ ID NO: 4250 - protein, 213 aa, Homo Sapiens
MTLRIDYCQGLLVGVSSSGLNIIQIQCQAYPCSSDKECEVGRYCHSPHQGSSACMVCRRKKKRCHRDGMCCPSTRCNNGICIPVTESILTPHIPALDGTRHRDRNHGHYSNHDLGWQNLGRPHTKMSHIKGHEGDPCLRSSDCIEGFCCARHFWTKICKPVLHQGEVCTKQRKKGSHGLEIFQRCDCAKGLSCKVWKDATYSSKARLHVCQKI

SEQ ID NO: 4251 - protein, 159 aa, Homo Sapiens
MVCRRKKKRCHRDGMCCPSTRCNNGICIPVTESILTPHIPALDGTRHRDRNHGHYSNHDLGWQNLGRPHTKMSHIKGHEGDPCLRSSDCIEGFCCARHFWTKICKPVLHQGEVCTKQRKKGSHGLEIFQRCDCAKGLSCKVWKDATYSSKARLHVCQKI

SEQ ID NO: 4252 - protein, 132 aa, Homo Sapiens
MQRLGATLLCLLLAAAVPTAPAPAPTATSAPVKPGPALSYPQEEATLNEMFREVEELMEDTQHKLRSAVEEMEAEEAAAKASSEVNLANLPPSYHNETNTDTKVGNNTIHVHREIHKECIIDEDCGPSMYCQ

SEQ ID NO: 4253 - protein, 183 aa, Homo Sapiens
MQRLGATLLCLLLAAAVPTAPAPAPTATSAPVKPGPALSYPQEEATLNEMFREVEELMEDTQHKLRSAVEEMEAEEAAAKASSEVNLANLPPSYHNETNTDTKVGNNTIHVHREIHKECIIDEDCGPSMYCQFASFQYTCQPCRGQRMLCTRDSECCGDQLCVWGHCTKMATRGSNGTICDNQ

SEQ ID NO: 4254 - protein, 235 aa, Homo Sapiens
MQRLGATLLCLLLAAAVPTAPAPAPTATSAPVKPGPALSYPQEEATLNEMFREVEELMEDTQHKLRSAVEEMEAEEAAAKASSEVNLANLPPSYHNETNTDTKVGNNTIHVHREIHKITNNQTGQMVFSETVITSVGDEEGRRSHECIIDEDCGPSMYCQFASFQYTCQPCRGQRMLCTRDSECCGDQLCVWGHCTKMATRGSNGTICDNQRDCQPGLCCAFQRGLLFPVCTPLP

SEQ ID NO: 4255 - protein, 350 aa, Homo Sapiens
MQRLGATLLCLLLAAAVPTAPAPAPTATSAPVKPGPALSYPQEEATLNEMFREVEELMEDTQHKLRSAVEEMEAEEAAAKASSEVNLANLPPSYHNETNTDTKVGNNTIHVHREIHKITNNQTGQMVFSETVITSVGDEEGRRSHECIIDEDCGPSMYCQFASFQYTCQPCRGQRMLCTRDSECCGDQLCVWGHCTKMATRGSNGTICDNQRDCQPGLCCAFQRGLLFPVCTPLPVEGELCHDPASRLLDLITWELEPDGALDRCPCASGLLCQPHSHSLVYVCKPTFVGSRDQDGEILLPREVPDEYEVGSFMEEVRQELEDLERSLTEEMALREPAAAAAALLGGEEI

SEQ ID NO: 4256 - protein, 350 aa, Homo Sapiens; identical to SEQ ID NO: 4255

SEQ ID NO: 4257 - protein, 364 aa, Homo Sapiens
MQRLGATLLCLLLAAAVPTAPAPAPTATSAPVKPGPALSYPQEEATLNEMFREVEELMEDTQHKLRSAVEEMEAEEAAAKASSEVNLANLPPSYHNETNTDTKVGNNTIHVHREIHKITNNQTGQMVFSETVITSVGDEEGRRSHECIIDEDCGPSMYCQFASFQYTCQPCRGQRMLCTRDSECCGDQLCVWGHCTKMATRGSNGTICDNQRDCQPGLCCAFQRGLLFPVCTPLPVEGELCHDPASRLLDLITWELEPDGALDRCPCASGLLCQPHRLPRLEPGFVPSLPSHSLVYVCKPTFVGSRDQDGEILLPREVPDEYEVGSFMEEVRQELEDLERSLTEEMALREPAAAAAALLGGEEI

SEQ ID NO: 4258 - protein, 224 aa, Homo Sapiens
MVAAVLLGLSWLCSPLGALVLDFNNIRSSADLHGARKGSQCLSDTDCNTRKFCLQPRDEKPFCATCRGLRRRCQRDAMCCPGTLCVNDVCTTMEDATPILERQLDEQDGTHAEGTTGHPVQENQPKRKPSIKKSQGRKGQEGESCLRTFDCGPGLCCARHFWTKICKPVLLEGQVCSRRGHKDTAQAPEIFQRCDCGPGLLCRSQLTSNRQHARLRVCQKIEKL

SEQ ID NO: 4259 - protein, 125 aa, Homo Sapiens
MDFRGLPGNYHKEENQEHQLGNNTLSSHLQIDKMTDNKTGEVLISENVVASIQPAEGSFEGDLKVPRMEEKEALVPIQKATDSFHTELHPRVAFWIIKLPRRRSHQDALEGGHWLSEKRHRLQAI

SEQ ID NO: 4260 - protein, 146 aa, Homo Sapiens
MDFRGLPGNYHKEENQEHQLGNNTLSSHLQIDKMTDNKTGEVLISENVVASIQPAEGSFEGDLKVPRMEEKEALVPIQKATDSFHTELHPRVAFWIIKLPRRRSHQDALEGGHWLSEKRHRLQAIRDGLRKGTHKDVLEEGTESSS

SEQ ID NO: 4261 - protein, 100 aa, Homo Sapiens
MEEKEALVPIQKATDSFHTELHPRVAFWIIKLPRRRSHQDALEGGHWLSEKRHRLQAIRDGLRKGTHKDVLEEGTESSSHSRLSPRKTHLLYILRPSRQL

SEQ ID NO: 4262 - protein, 242 aa, Homo Sapiens
MGEASPPAPARRHLLVLLLLLSTLVIPSAAAPIHDADAQESSLGLTGLQSLLQGFSRLFLKGNLLRGIDSLFSAPMDFRGLPGNYHKEENQEHQLGNNTLSSHLQIDKMTDNKTGEVLISENVVASIQPAEGSFEGDLKVPRMEEKEALVPIQKATDSFHTELHPRVAFWIIKLPRRRSHQDALEGGHWLSEKRHRLQAIRDGLRKGTHKDVLEEGTESSSHSRLSPRKTHLLYILRPSRQL

SEQ ID NO: 4263 - protein, 199 aa, Homo Sapiens
MGEASPPAPARRHLLVLLLLLSTLVIPSAAAPIHDADAQESSLGLTGLQSLLQGFSRLFLKGNLLRGIDSLFSAPMDFRGLPGNYHKEENQEHQLGNNTLSSHLQIDKVPRMEEKEALVPIQKATDSFHTELHPRVAFWIIKLPRRRSHQDALEGGHWLSEKRHRLQAIRDGLRKGTHKDVLEEGTESSSHSRLSPRKT

SEQ ID NO: 4264 - protein, 137 aa, Homo Sapiens
  misc_feature (1)..(1): Xaa can be any naturally occurring amino acid
XAAAPIHDADAQESSLGLTGLQSLLQGFSRLFLKVPRMEEKEALVPIQKATDSFHTELHPRVAFWIIKLPRRRSHQDALEGGHWLSEKRHRLQAIRDGLRKGTHKDVLEEGTESSSHSRLSPRKTHLLYILRPSRQL

SEQ ID NO: 4265 - protein, 724 aa, Homo Sapiens
MDCLCIVTTKKYRYQDEDTPPLEHSPAHLPNQANSPPVIVNTDTLEAPGYELQVNGTEGEMEYEEITLERGNSGLGFSIAGGTDNPHIGDDPSIFITKIIPGGAAAQDGRLRVNDSILFVNEVDVREVTHSAAVEALKEAGSIVRLYVMRRKPPAEKVMEIKLIKGPKGLGFSIAGGVGNQHIPGDNSIYVTKIIEGGAAHKDGRLQIGDKILAVNSVGLEDVMHEDAVAALKNTYDVVYLKVAKPSNAYLSDSYAPPDITTSYSQHLDNEISHSSYLGTDYPTAMTPTSPRRYSPVAKDLLGEEDIPREPRRIVIHRGSTGLGFNIVGGEDGEGIFISFILAGGPADLSGELRKGDQILSVNGVDLRNASHEQAAIALKNAGQTVTIIAQYKPEEYSRFEAKIHDLREQLMNSSLGSGTASLRSNPKRGFYIRALFDYDKTKDCGFLSQALSFRFGDVLHVIDASDEEWWQARRVHSDSETDDIGFIPSKRRVERREWSRLKAKDWGSSSGSQGREDSVLSYETVTQMEVHYARPIIILGPTKDRANDDLLSEFPDKFGSCVPHTTRPKREYEIDGRDYHFVSSREKMEKDIQAHKFIEAGQYNSHLYGTSVQSVREVAEQGKHCILDVSANAVRRLQAAHLHPIAIFIRPRSLENVLEINKRITEEQARKAFDRATKLEQEFTECFSAIVEGDSFEEIYHKVKRVIEDLSGPYIWVPARERL

SEQ ID NO: 4266 - protein, 721 aa, Homo Sapiens
MDCLCIVTTKKYRYQDEDTPPLEHSPAHLPNQANSPPVIVNTDTLEAPGYVNGTEGEMEYEEITLERGNSGLGFSIAGGTDNPHIGDDPSIFITKIIPGGAAAQDGRLRVNDSILFVNEVDVREVTHSAAVEALKEAGSIVRLYVMRRKPPAEKVMEIKLIKGPKGLGFSIAGGVGNQHIPGDNSIYVTKIIEGGAAHKDGRLQIGDKILAVNSVGLEDVMHEDAVAALKNTYDVVYLKVAKPSNAYLSDSYAPPDITTSYSQHLDNEISHSSYLGTDYPTAMTPTSPRRYSPVAKDLLGEEDIPREPRRIVIHRGSTGLGFNIVGGEDGEGIFISFILAGGPADLSGELRKGDQILSVNGVDLRNASHEQAAIALKNAGQTVTIIAQYKPEEYSRFEAKIHDLREQLMNSSLGSGTASLRSNPKRGFYIRALFDYDKTKDCGFLSQALSFRFGDVLHVIDASDEEWWQARRVHSDSETDDIGFIPSKRRVERREWSRLKAKDWGSSSGSQGREDSVLSYETVTQMEVHYARPIIILGPTKDRANDDLLSEFPDKFGSCVPHTTRPKREYEIDGRDYHFVSSREKMEKDIQAHKFIEAGQYNSHLYGTSVQSVREVAEQGKHCILDVSANAVRRLQAAHLHPIAIFIRPRSLENVLEINKRITEEQARKAFDRATKLEQEFTECFSAIVEGDSFEEIYHKVKRVIEDLSGPYIWVPARERL

SEQ ID NO: 4267 - protein, 296 aa, Homo Sapiens
MDCLCIVTTKKYRYQDEDTPPLEHSPAHLPNQANSPPVIVNTDTLEAPGYVNGTEGEMEYEEITLERGNSGLGFSIAGGTDNPHIGDDPSIFITKIIPGGAAAQDGRLRVNDSILFVNEVDVREVTHSAAVEALKEAGSIVRLYVMRRKPPAEKVMEIKLIKGPKGLGFSIAGGVGNQHIPGDNSIYVTKIIEGGAAHKDGRLQIGDKILAVNSVGLEDVMHEDAVAALKNTYDVVYLKVAKPSNAYLSDSYAPPDITTCESPSNTKVPHDPSRLTHDMQSHDIPVAVPLQIFPMK

SEQ ID NO: 4268 - protein, 234 aa, Homo Sapiens
MDCLCIVTTKKYRYQDEDTPPLEHSPAHLPNQVNAPELVHVAERNLSHLEAGHGVVGHAHLSPFKANSPPVIVNTDTLEAPGYVNGTEGEMEYEEITLERGNSGLGFSIAGGTDNPHIGDDPSIFITKIIPGGAAAQDGRLRVNDSILFVNEVDVREVTHSAAVEALKEAGSIVRLYVMRRKPPAEKVMEIKLIKGPKGLGFSIAGGVGNQHIPGDNSIYVTKIIEGGAAHKDG

SEQ ID NO: 4269 - protein, 91 aa, Homo Sapiens
MEYEEITLERGNSGLGFSIAGGTDNPHIGDDPSIFITKIIPGGAAAQDGRLRVNDSILFVNEVDVREVTHSAAVEALKEAGSIVRLYVMRR

SEQ ID NO: 4270 - protein, 116 aa, Homo Sapiens
MEYEEITLERGNSGLGFSIAGGTDNPHIGDDPSIFITKIIPGGAAAQDGRLRVNDSILFVNEVDVREVTHSAAVEALKEAGSIVRLYVMRRKPPAEKVMEIKLIKGPKGLGFSIAG

SEQ ID NO: 4271 - protein, 281 aa, Homo Sapiens
MPINGVNLAWKYRYQDEDTPPLEHSPAHLPNQVNAPELVHVAERNLSHLEAGHGVVGHAHLSPFKANSPPVIVNTDTLEAPGYELQVNGTEGEMEYEEITLERGNSGLGFSIAGGTDNPHIGDDPSIFITKIIPGGAAAQDGRLRVNDSILFVNEVDVREVTHSAAVEALKEAGSIVRLYVMRRKPPAEKVMEIKLIKGPKGLGFSIAGGVGNQHIPGDNSIYVTKIIEGGAAHKDGRLQIGDKILAVNSVGLEDVMHEDAVAALKNTYDVVYLKVAKPSN

SEQ ID NO: 4272 - protein, 767 aa, Homo Sapiens
MSQRPRAPRSALWLLAPPLLRWAPPLLTVLHSDLFQALLDILDYYEASLSESQKYRYQDEDTPPLEHSPAHLPNQANSPPVIVNTDTLEAPGYELQVNGTEGEMEYEEITLERGNSGLGFSIAGGTDNPHIGDDPSIFITKIIPGGAAAQDGRLRVNDSILFVNEVDVREVTHSAAVEALKEAGSIVRLYVMRRKPPAEKVMEIKLIKGPKGLGFSIAGGVGNQHIPGDNSIYVTKIIEGGAAHKDGRLQIGDKILAVNSVGLEDVMHEDAVAALKNTYDVVYLKVAKPSNAYLSDSYAPPDITTSYSQHLDNEISHSSYLGTDYPTAMTPTSPRRYSPVAKDLLGEEDIPREPRRIVIHRGSTGLGFNIVGGEDGEGIFISFILAGGPADLSGELRKGDQILSVNGVDLRNASHEQAAIALKNAGQTVTIIAQYKPEEYSRFEAKIHDLREQLMNSSLGSGTASLRSNPKRGFYIRALFDYDKTKDCGFLSQALSFRFGDVLHVIDASDEEWWQARRVHSDSETDDIGFIPSKRRVERREWSRLKAKDWGSSSGSQGREDSVLSYETVTQMEVHYARPIIILGPTKDRANDDLLSEFPDKFGSCVPHTTRPKREYEIDGRDYHFVSSREKMEKDIQAHKFIEAGQYNSHLYGTSVQSVREVAEQGKHCILDVSANAVRRLQAAHLHPIAIFIRPRSLENVLEINKRITEEQARKAFDRATKLEQEFTECFSAIVEGDSFEEIYHKVKRVIEDLSGPYIWVPARERL

SEQ ID NO: 4273 - protein, 85 aa, Homo Sapiens
  misc_feature (1)..(1): Xaa can be any naturally occurring amino acid
XGPTKDRANDDLLSEFPDKFGSCVPHTTRPKREYEIDGRDYHFVSSREKMEKDIQAHKFIEAGQYNSHLYGTSVQSVREVAEQRD

SEQ ID NO: 4274 - protein, 97 aa, Homo Sapiens
MTATEALLRVLLLLLAFGHSTYGAECFPACNPQNGFCEDDNVCRCQPGWQGPLCDQCVTSPGCLHGLCGEPGQCICTDGWDGELCDRDVRACSSAPC

SEQ ID NO: 4275 - protein, 310 aa, Homo Sapiens
MTATEALLRVLLLLLAFGHSTYGAECFPACNPQNGFCEDDNVCRCQPGWQGPLCDQCVTSPGCLHGLCGEPGQCICTDGWDGELCDRDVRACSSAPCANNRTCVSLDDGLYECSCAPGYSGKDCQKKDGPCVINGSPCQHGGTCVDDEGRASHASCLCPPGFSGNFCEIVANSCTPNPCENDGVCTDIGGDFRCRCPAGFIDKTCSRPVTNCASSPCQNGGTCLQHTQGQAICFTILGVLTSLVVLGTVGIVFLNKCETWVSNLRYNHMLRKKKNLLLQYNSGEDLAVNIIFPEKIDMTTFSKEAGDEEI

SEQ ID NO: 4276 - protein, 383 aa, Homo Sapiens
MTATEALLRVLLLLLAFGHSTYGAECFPACNPQNGFCEDDNVCRCQPGWQGPLCDQCVTSPGCLHGLCGEPGQCICTDGWDGELCDRDVRACSSAPCANNRTCVSLDDGLYECSCAPGYSGKDCQKKDGPCVINGSPCQHGGTCVDDEGRASHASCLCPPGFSGNFCEIVANSCTPNPCENDGVCTDIGGDFRCRCPAGFIDKTCSRPVTNCASSPCQNGGTCLQHTQVSYECLCKPEFTGLTCVKKRALSPQQVTRLPSGYGLAYRLTPGVHELPVQQPEHRILKVSMKELNKKTPLLTEGQAICFTILGVLTSLVVLGTVGIVFLNKCETWVSNLRYNHMLRKKKNLLLQYNSGEDLAVNIIFPEKIDMTTFSKEAGDEEI

SEQ ID NO: 4277 - protein, 136 aa, Homo Sapiens
MTATEALLRVLLLLLAFGHSTYGAECFPACNPQNGFCEDDNVCRCQPGWQGPLCDQCVTSPGCLHGLCGEPGQCICTDGWDGELCDRGWHSPLFTSALRPYLPALAPTTSSQSPVAGVPHFLIPAHSVPCILKICL

SEQ ID NO: 4278 - protein, 54 aa, Homo Sapiens
MGSRCALALAVLSALLCQVWSSGVFELKLQEFVNKKGLLGNRNCCRGGAGPPPC

SEQ ID NO: 4279 - protein, 723 aa, Homo Sapiens
MGSRCALALAVLSALLCQVWSSGVFELKLQEFVNKKGLLGNRNCCRGGAGPPPCACRTFFRVCLKHYQASVSPEPPCTYGSAVTPVLGVDSFSLPDGGGADSAFSNPIRFPFGFTWPGTFSLIIEALHTDSPDDLATENPERLISRLATQRHLTVGEEWSQDLHSSGRTDLKYSYRFVCDEHYYGEGCSVFCRPRDDAFGHFTCGERGEKVCNPGWKGPYCTEPICLPGCDEQHGFCDKPGECKCRVGWQGRYCDECIRYPGCLHGTCQQPWQCNCQEGWGGLFCNQDLNYCTHHKPCKNGATCTNTGQGSYTCSCRPGYTGATCELGIDECDPSPCKNGGSCTDLENSYSCTCPPGFYGKICELSAMTCADGPCFNGGRCSDSPDGGYSCRCPVGYSGFNCEKKIDYCSSSPCSNGAKCVDLGDAYLCRCQAGFSGRHCDDNVDDCASSPCANGGTCRDGVNDFSCTCPPGYTGRNCSAPVSRCEHAPCHNGATCHERGHRYVCECARGYGGPNCQFLLPELPPGPAVVDLTEKLEGQGGPFPWVAVCAGVILVLMLLLGCAAVVVCVRLRLQKHRPPADPCRGETETMNNLANCQREKDISVSIIGATQIKNTNKKADFHGDHSADKNGFKARYPAVDYNLVQDLKGDDTAVRDAHSKRDTKCQPQGSSGEEKGTPTTLRGGEASERKRPDSGCSTSKDTKYQSVYVISEEKDECVIATEV

SEQ ID NO: 4280 - protein, 220 aa, Homo Sapiens
MVSPRMSGLLSQTVILALIFLPQTRPAGVFELQIHSFGPGPGPGAPRSPCSARLPCRLFFRVCLKPGLSEEAAESPCALGAALSARGPVYTEQPGAPAPDLPLPDGLLQVPFRDAWPGTFSFIIETWREELGDQIGGGLCLDLGHALRCRCRAGFAGPRCEHDLDDCAGRACANGGTCVEGGGAHRCSCALGFGGRDCRERADPCAARPCAHGGRCYAHF

SEQ ID NO: 4281 - protein, 618 aa, Homo Sapiens
MVSPRMSGLLSQTVILALIFLPQTRPAGVFELQIHSFGPGPGPGAPRSPCSARLPCRLFFRVCLKPGLSEEAAESPCALGAALSARGPVYTEQPGAPAPDLPLPDGLLQVPFRDAWPGTFSFIIETWREELGDQIGGPAWSLLARVAGRRRLAAGGPWARDIQRAGAWELRFSYRARCEPPAVGTACTRLCRPRSAPSRCGPGLRPCAPLEDECEAPLVCRAGCSPEHGFCEQPGECRCLEGWTGPLCTVPVSTSSCLSPRGPSSATTGCLVPGPGPCDGNPCANGGSCSETPRSFECTCPRGFYGLRCEVSGVTCADGPCFNGGLCVGGADPDSAYICHCPPGFQGSNCEKRVDRCSLQPCRNGGLCLDLGHALRCRCRAGFAGPRCEHDLDDCAGRACANGGTCVEGGGAHRCSCALGFGGRDCRERADPCAARPCAHGGRCYAHFSGLVCACAPGYMGARCEFPVHPDGASALPAAPPGLRPGDPQRYLLPPALGLLVAAGVAGAALLLVHVRRRGHSQDAGSRLLAGTPEPSVHALPDALNNLRTQEGSGDGPSSSVDWNRPEDVDPQGIYVISAPSIYAREVATPLFPPLHTGRAGQRQHLLFPYPSSILSVK

SEQ ID NO: 4282 - protein, 587 aa, Homo Sapiens
MVSPRMSGLLSQTVILALIFLPQTRPAGVFELQIHSFGPGPGPGAPRSPCSARLPCRLFFRVCLKPGLSEEAAESPCALGAALSARGPVYTEQPGAPAPDLPLPDGLLQVPFRDAWPGTFSFIIETWREELGDQIGGPAWSLLARVAGRRRLAAGGPWARDIQRAGAWELRFSYRARCEPPAVGTACTRLCRPRSAPSRCGPGLRPCAPLEDECEAPLVCRAGCSPEHGFCEQPGECRCLEGWTGPLCTVPVSTSSCLSPRGPSSATTGCLVPGPGPCDGNPCANGGSCSETPRSFECTCPRGFYGLRCEVSGVTCADGPCFNGGLCVGGADPDSAYICHCPPGFQGSNCEKRVDRCSLQPCRNGGLCLDLGHALRCRCRAGFAGPRCEHDLDDCAGRACANGGTCVEGGGAHRCSCALGFGGRDCRERADPCAARPCAHGGRCYAHFSGLVCACAPGYMGARCEFPVHPDGASALPAAPPGLRPGDPQRYLLPPALGLLVAAGVAGAALLLVHVRRRGHSQDAGSRLLAGTPEPSVHALPDALNNLRTQEGSGDGPSSSVDWNRPEDVDPQGIYVISAPSIYAREA

SEQ ID NO: 4283 - protein, 1785 aa, Homo Sapiens
MGISTVILEMCLLWGQVLSTGGWIPRTTDYASLIPSEVPLDPTVAEGSPFPSESTLESTVAEGSPISLESTLESTVAEGSLIPSESTLESTVAEGSDSGLALRLVNGDGRCQGRVEILYRGSWGTVCDDSWDTNDANVVCRQLGCGWAMSAPGNAWFGQGSGPIALDDVRCSGHESYLWSCPHNGWLSHNCGHGEDAGVICSAAQPQSTLRPESWPVRISPPVPTEGSESSLALRLVNGGDRCRGRVEVLYRGSWGTVCDDYWDTNDANVVCRQLGCGWAMSAPGNAQFGQGSGPIVLDDVRCSGHESYLWSCPHNGWLTHNCGHSEDAGVICSAPQSRPTPSPDTWPTSHASTAGPESSLALRLVNGGDRCQGRVEVLYRGSWGTVCDDSWDTSDANVVCRQLGCGWATSAPGNARFGQGSGPIVLDDVRCSGYESYLWSCPHNGWLSHNCQHSEDAGVICSAAHSWSTPSPDTLPTITLPASTVGSESSLALRLVNGGDRCQGRVEVLYQGSWGTVCDDSWDTNDANVVCRQLGCGWAMSAPGNARFGQGSGPIVLDDVRCSGHESYLWSCPHNGWLSHNCGHSEDAGVICSASQSRPTPSPDTWPTSHASTAGSESSLALRLVNGGDRCQGRVEVLYRGSWGTVCDDYWDTNDANVVCRQLGCGWAMSAPGNARFGQGSGPIVLDDVRCSGHESYLWSCPHNGWLSHNCGHHEDAGVICSASQSQPTPSPDTWPTSHASTAGSESSLALRLVNGGDRCQGRVEVLYRGSWGTVCDDYWDTNDANVVCRQLGCGWATSAPGNARFGQGSGPIVLDDVRCSGHESYLWSCPHNGWLSHNCGHHEDAGVICSASQSQPTPSPDTWPTSRASTAGSESTLALRLVNGGDRCRGRVEVLYQGSWGTVCDDYWDTNDANVVCRQLGCGWAMSAPGNAQFGQGSGPIVLDDVRCSGHESYLWSCPHNGWLSHNCGHHEDAGVICSAAQSQSTPRPDTWLTTNLPALTVGSESSLALRLVNGGDRCRGRVEVLYRGSWGTVCDDSWDTNDANVVCRQLGCGWAMSAPGNARFGQGSGPIVLDDVRCSGNESYLWSCPHKGWLTHNCGHHEDAGVICSATQINSTTTDWWHPTTTTTARPSSNCGGFLFYASGTFSSPSYPAYYPNNAKCVWEIEVNSGYRINLGFSNLKLEAHHNCSFDYVEIFDGSLNSSLLLGKICNDTRQIFTSSYNRMTIHFRSDISFQNTGFLAWYNSFPSDATLRLVNLNSSYGLCAGRVEIYHGGTWGTVCDDSWTIQEAEVVCRQLGCGRAVSALGNAYFGSGSGPITLDDVECSGTESTLWQCRNRGWFSHNCNHREDAGVICSGNHLSTPAPFLNITRPNTDYSCGGFLSQPSGDFSSPFYPGNYPNNAKCVWDIEVQNNYRVTVIFRDVQLEGGCNYDYIEVFDGPYRSSPLIARVCDGARGSFTSSSNFMSIRFISDHSITRRGFRAEYYSSPSNDSTNLLCLPNHMQASVSRSYLQSLGFSASDLVISTWNGYYECRPQITPNLVIFTIPYSGCGTFKQADNDTIDYSNFLTAAVSGGIIKRRTDLRIHVSCRMLQNTWVDTMYIANDTIHVANNTIQVEEVQYGNFDVNISFYTSSSFLYPVTSRPYYVDLNQDLYVQAEILHSDAVLTLFVDTCVASPYSNDFTSLTYDLIRSGCVRDDTYGPYSSPSLRIARFRFRAFHFLNRFPSVYLRCKMVVCRAYDPSSRCYRGCVLRSKRDVGSYQEKVDVVLGPIQLQTPPRREEEPR

SEQ ID NO: 4284 - protein, 2413 aa, Homo Sapiens
MGISTVILEMCLLWGQVLSTGGWIPRTTDYASLIPSEVPLDPTVAEGSPFPSESTLESTVAEGSPISLESTLESTVAEGSLIPSESTLESTVAEGSDSGLALRLVNGDGRCQGRVEILYRGSWGTVCDDSWDTNDANVVCRQLGCGWAMSAPGNAWFGQGSGPIALDDVRCSGHESYLWSCPHNGWLSHNCGHGEDAGVICSAAQPQSTLRPESWPVRISPPVPTEGSESSLALRLVNGGDRCRGRVEVLYRGSWGTVCDDYWDTNDANVVCRQLGCGWAMSAPGNAQFGQGSGPIVLDDVRCSGHESYLWSCPHNGWLTHNCGHSEDAGVICSAPQSRPTPSPDTWPTSHASTAGPESSLALRLVNGGDRCQGRVEVLYRGSWGTVCDDSWDTSDANVVCRQLGCGWATSAPGNARFGQGSGPIVLDDVRCSGYESYLWSCPHNGWLSHNCQHSEDAGVICSAAHSWSTPSPDTLPTITLPASTVGSESSLALRLVNGGDRCQGRVEVLYRGSWGTVCDDSWDTNDANVVCRQLGCGWAMLAPGNARFGQGSGPIVLDDVRCSGNESYLWSCPHNGWLSHNCGHSEDAGVICSGPESSLALRLVNGGDRCQGRVEVLYRGSWGTVCDDSWDTNDANVVCRQLGCGWATSAPGNARFGQGSGPIVLDDVRCSGHESYLWSCPNNGWLSHNCGHHEDAGVICSAAQSRSTPRPDTLSTITLPPSTVGSESSLTLRLVNGSDRCQGRVEVLYRGSWGTVCDDSWDTNDANVVCRQLGCGWATSAPGNARFGQGSGPIVLDDVRCSGHESYLWSCPHNGWLSHNCGHHEDAGVICSVSQSRPTPSPDTWPTSHASTAGPESSLALRLVNGGDRCQGRVEVLYRGSWGTVCDDSWDTSDANVVCRQLGCGWATSAPGNARFGQGSGPIVLDDVRCSGYESYLWSCPHNGWLSHNCQHSEDAGVICSAAHSWSTPSPDTLPTITLPASTVGSESSLALRLVNGGDRCQGRVEVLYQGSWGTVCDDSWDTNDANVVCRQLGCGWAMSAPGNARFGQGSGPIVLDDVRCSGHESYLWSCPHNGWLSHNCGHSEDAGVICSASQSRPTPSPDTWPTSHASTAGSESSLALRLVNGGDRCQGRVEVLYRGSWGTVCDDYWDTNDANVVCRQLGCGWAMSAPGNARFGQGSGPIVLDDVRCSGHESYLWSCPHNGWLSHNCGHHEDAGVICSASQSQPTPSPDTWPTSHASTAGSESSLALRLVNGGDRCQGRVEVLYRGSWGTVCDDYWDTNDANVVCRQLGCGWATSAPGNARFGQGSGPIVLDDVRCSGHESYLWSCPHNGWLSHNCGHHEDAGVICSASQSQPTPSPDTWPTSHASTAGSESSLALRLVNGGDRCQGRVEVLYRGSWGTVCDDYWDTNDANVVCRQLGCGWATSAPGNARFGQGSGPIVLDDVRCSGHESYLWSCPHNGWLSHNCGHHEDAGVICSASQSQPTPSPDTWPTSRASTAGSESTLALRLVNGGDRCRGRVEVLYQGSWGTVCDDYWDTNDANVVCRQLGCGWAMSAPGNAQFGQGSGPIVLDDVRCSGHESYLWSCPHNGWLSHNCGHHEDAGVICSAAQSQSTPRPDTWLTTNLPALTVGSESSLALRLVNGGDRCRGRVEVLYRGSWGTVCDDSWDTNDANVVCRQLGCGWAMSAPGNARFGQGSGPIVLDDVRCSGNESYLWSCPHKGWLTHNCGHHEDAGVICSATQINSTTTDWWHPTTTTTARPSSNCGGFLFYASGTFSSPSYPAYYPNNAKCVWEIEVNSGYRINLGFSNLKLEAHHNCSFDYVEIFDGSLNSSLLLGKICNDTRQIFTSSYNRMTIHFRSDISFQNTGFLAWYNSFPSDATLRLVNLNSSYGLCAGRVEIYHGGTWGTVCDDSWTIQEAEVVCRQLGCGRAVSALGNAYFGSGSGPITLDDVECSGTESTLWQCRNRGWFSHNCNHREDAGVICSGNHLSTPAPFLNITRPNTDYSCGGFLSQPSGDFSSPFYPGNYPNNAKCVWDIEVQNNYRVTVIFRDVQLEGGCNYDYIEVFDGPYRSSPLIARVCDGARGSFTSSSNFMSIRFISDHSITRRGFRAEYYSSPSNDSTNLLCLPNHMQASVSRSYLQSLGFSASDLVISTWNGYYECRPQITPNLVIFTIPYSGCGTFKQADNDTIDYSNFLTAAVSGGIIKRRTDLRIHVSCRMLQNTWVDTMYIANDTIHVANNTIQVEEVQYGNFDVNISFYTSSSFLYPVTSRPYYVDLNQDLYVQAEILHSDAVLTLFVDTCVASPYSNDFTSLTYDLIRSGCVRDDTYGPYSSPSLRIARFRFRAFHFLNRFPSVYLRCKMVVCRAYDPSSRCYRGCVLRSKRDVGSYQEKVDVVLGPIQLQTPPRREEEPR

SEQ ID NO: 4285 - protein, 2403 aa, Homo Sapiens
MGISTVILEMCLLWGQVLSTGGWIPRTTDYASLIPSEVPLDPTVAEGSPFPSESTLESTVAEGSPISLESTLESTVAEGSLIPSESTLESTVAEGSDSGLALRLVNGDGRCQGRVEILYRGSWGTVCDDSWDTNDANVVCRQLGCGWAMSAPGNAWFGQGSGPIALDDVRCSGHESYLWSCPHNGWLSHNCGHGEDAGVICSAAQPQSTLRPESWPVRISPPVPTEGSESSLALRLVNGGDRCRGRVEVLYRGSWGTVCDDYWDTNDANVVCRQLGCGWAMSAPGNAQFGQGSGPIVLDDVRCSGHESYLWSCPHNGWLTHNCGHSEDAGVICSAPQSRPTPSPDTWPTSHASTAGPESSLALRLVNGGDRCQGRVEVLYRGSWGTVCDDSWDTSDANVVCRQLGCGWATSAPGNARFGQGSGPIVLDDVRCSGYESYLWSCPHNGWLSHNCQHSEDAGVICSDTLPTITLPASTVGSESSLALRLVNGGDRCQGRVEVLYRGSWGTVCDDSWDTNDANVVCRQLGCGWAMLAPGNARFGQGSGPIVLDDVRCSGNESYLWSCPHNGWLSHNCGHSEDAGVICSGPESSLALRLVNGGDRCQGRVEVLYRGSWGTVCDDSWDTNDANVVCRQLGCGWATSAPGNARFGQGSGPIVLDDVRCSGHESYLWSCPNNGWLSHNCGHHEDAGVICSAAQSRSTPRPDTLSTITLPPSTVGSESSLTLRLVNGSDRCQGRVEVLYRGSWGTVCDDSWDTNDANVVCRQLGCGWATSAPGNARFGQGSGPIVLDDVRCSGHESYLWSCPHNGWLSHNCGHHEDAGVICSVSQSRPTPSPDTWPTSHASTAGPESSLALRLVNGGDRCQGRVEVLYRGSWGTVCDDSWDTSDANVVCRQLGCGWATSAPGNARFGQGSGPIVLDDVRCSGYESYLWSCPHNGWLSHNCQHSEDAGVICSAAHSWSTPSPDTLPTITLPASTVGSESSLALRLVNGGDRCQGRVEVLYQGSWGTVCDDSWDTNDANVVCRQLGCGWAMSAPGNARFGQGSGPIVLDDVRCSGHESYLWSCPHNGWLSHNCGHSEDAGVICSASQSRPTPSPDTWPTSHASTAGSESSLALRLVNGGDRCQGRVEVLYRGSWGTVCDDYWDTNDANVVCRQLGCGWAMSAPGNARFGQGSGPIVLDDVRCSGHESYLWSCPHNGWLSHNCGHHEDAGVICSASQSQPTPSPDTWPTSHASTAGSESSLALRLVNGGDRCQGRVEVLYRGSWGTVCDDYWDTNDANVVCRQLGCGWATSAPGNARFGQGSGPIVLDDVRCSGHESYLWSCPHNGWLSHNCGHHEDAGVICSASQSQPTPSPDTWPTSHASTAGSESSLALRLVNGGDRCQGRVEVLYRGSWGTVCDDYWDTNDANVVCRQLGCGWATSAPGNARFGQGSGPIVLDDVRCSGHESYLWSCPHNGWLSHNCGHHEDAGVICSASQSQPTPSPDTWPTSRASTAGSESTLALRLVNGGDRCRGRVEVLYQGSWGTVCDDYWDTNDANVVCRQLGCGWAMSAPGNAQFGQGSGPIVLDDVRCSGHESYLWSCPHNGWLSHNCGHHEDAGVICSAAQSQSTPRPDTWLTTNLPALTVGSESSLALRLVNGGDRCRGRVEVLYRGSWGTVCDDSWDTNDANVVCRQLGCGWAMSAPGNARFGQGSGPIVLDDVRCSGNESYLWSCPHKGWLTHNCGHHEDAGVICSATQINSTTTDWWHPTTTTTARPSSNCGGFLFYASGTFSSPSYPAYYPNNAKCVWEIEVNSGYRINLGFSNLKLEAHHNCSFDYVEIFDGSLNSSLLLGKICNDTRQIFTSSYNRMTIHFRSDISFQNTGFLAWYNSFPSDATLRLVNLNSSYGLCAGRVEIYHGGTWGTVCDDSWTIQEAEVVCRQLGCGRAVSALGNAYFGSGSGPITLDDVECSGTESTLWQCRNRGWFSHNCNHREDAGVICSGNHLSTPAPFLNITRPNTDYSCGGFLSQPSGDFSSPFYPGNYPNNAKCVWDIEVQNNYRVTVIFRDVQLEGGCNYDYIEVFDGPYRSSPLIARVCDGARGSFTSSSNFMSIRFISDHSITRRGFRAEYYSSPSNDSTNLLCLPNHMQASVSRSYLQSLGFSASDLVISTWNGYYECRPQITPNLVIFTIPYSGCGTFKQADNDTIDYSNFLTAAVSGGIIKRRTDLRIHVSCRMLQNTWVDTMYIANDTIHVANNTIQVEEVQYGNFDVNISFYTSSSFLYPVTSRPYYVDLNQDLYVQAEILHSDAVLTLFVDTCVASPYSNDFTSLTYDLIRSGCVRDDTYGPYSSPSLRIARFRFRAFHFLNRFPSVYLRCKMVVCRAYDPSSRCYRGCVLRSKRDVGSYQEKVDVVLGPIQLQTPPRREEEPR

SEQ ID NO: 4286 - protein, 2542 aa, Homo Sapiens
MGISTVILEMCLLWGQVLSTGGWIPRTTDYASLIPSEVPLDPTVAEGSPFPSESTLESTVAEGSPISLESTLESTVAEGSLIPSESTLESTVAEGSDSGLALRLVNGDGRCQGRVEILYRGSWGTVCDDSWDTNDANVVCRQLGCGWAMSAPGNAWFGQGSGPIALDDVRCSGHESYLWSCPHNGWLSHNCGHGEDAGVICSAAQPQSTLRPESWPVRISPPVPTEGSESSLALRLVNGGDRCRGRVEVLYRGSWGTVCDDYWDTNDANVVCRQLGCGWAMSAPGNAQFGQGSGPIVLDDVRCSGHESYLWSCPHNGWLTHNCGHSEDAGVICSAPQSRPTPSPDTWPTSHASTAGPESSLALRLVNGGDRCQGRVEVLYRGSWGTVCDDSWDTSDANVVCRQLGCGWATSAPGNARFGQGSGPIVLDDVRCSGYESYLWSCPHNGWLSHNCQHSEDAGVICSAAHSWSTPSPDTLPTITLPASTVGSESSLALRLVNGGDRCQGRVEVLYRGSWGTVCDDSWDTNDANVVCRQLGCGWAMLAPGNARFGQGSGPIVLDDVRCSGNESYLWSCPHNGWLSHNCGHSEDAGVICSGPESSLALRLVNGGDRCQGRVEVLYRGSWGTVCDDSWDTNDANVVCRQLGCGWATSAPGNARFGQGSGPIVLDDVRCSGHESYLWSCPNNGWLSHNCGHHEDAGVICSAAQSRSTPRPDTLSTITLPPSTVGSESSLTLRLVNGSDRCQGRVEVLYRGSWGTVCDDSWDTNDANVVCRQLGCGWATSAPGNARFGQGSGPIVLDDVRCSGHESYLWSCPHNGWLSHNCGHHEDAGVICSVSQSRPTPSPDTWPTSHASTAGPESSLALRLVNGGDRCQGRVEVLYRGSWGTVCDDSWDTSDANVVCRQLGCGWATSAPGNARFGQGSGPIVLDDVRCSGYESYLWSCPHNGWLSHNCQHSEDAGVICSAAHSWSTPSPDTLPTITLPASTVGSESSLALRLVNGGDRCQGRVEVLYQGSWGTVCDDSWDTNDANVVCRQLGCGWAMSAPGNARFGQGSGPIVLDDVRCSGHESYLWSCPHNGWLSHNCGHSEDAGVICSASQSRPTPSPDTWPTSHASTAGSESSLALRLVNGGDRCQGRVEVLYRGSWGTVCDDYWDTNDANVVCRQLGCGWAMSAPGNARFGQGSGPIVLDDVRCSGHESYLWSCPHNGWLSHNCGHHEDAGVICSASQSQPTPSPDTWPTSHASTAGSESSLALRLVNGGDRCQGRVEVLYRGSWGTVCDDYWDTNDANVVCRQLGCGWATSAPGNARFGQGSGPIVLDDVRCSGHESYLWSCPHNGWLSHNCGHHEDAGVICSASQSQPTPSPDTWPTSHASTAGSESSLALRLVNGGDRCQGRVEVLYRGSWGTVCDDYWDTNDANVVCRQLGCGWATSAPGNARFGQGSGPIVLDDVRCSGHESYLWSCPHNGWLSHNCGHHEDAGVICSASQSQPTPSPDTWPTSHASTAGSESSLALRLVNGGDRCQGRVEVLYRGSWGTVCDDYWDTNDANVVCRQLGCGWATSAPGNARFGQGSGPIVLDDVRCSGHESYLWSCPHNGWLSHNCGHHEDAGVICSASQSQPTPSPDTWPTSRASTAGSESTLALRLVNGGDRCRGRVEVLYQGSWGTVCDDYWDTNDANVVCRQLGCGWAMSAPGNAQFGQGSGPIVLDDVRCSGHESYLWSCPHNGWLSHNCGHHEDAGVICSAAQSQSTPRPDTWLTTNLPALTVGSESSLALRLVNGGDRCRGRVEVLYRGSWGTVCDDSWDTNDANVVCRQLGCGWAMSAPGNARFGQGSGPIVLDDVRCSGNESYLWSCPHKGWLTHNCGHHEDAGVICSATQINSTTTDWWHPTTTTTARPSSNCGGFLFYASGTFSSPSYPAYYPNNAKCVWEIEVNSGYRINLGFSNLKLEAHHNCSFDYVEIFDGSLNSSLLLGKICNDTRQIFTSSYNRMTIHFRSDISFQNTGFLAWYNSFPSDATLRLVNLNSSYGLCAGRVEIYHGGTWGTVCDDSWTIQEAEVVCRQLGCGRAVSALGNAYFGSGSGPITLDDVECSGTESTLWQCRNRGWFSHNCNHREDAGVICSGNHLSTPAPFLNITRPNTDYSCGGFLSQPSGDFSSPFYPGNYPNNAKCVWDIEVQNNYRVTVIFRDVQLEGGCNYDYIEVFDGPYRSSPLIARVCDGARGSFTSSSNFMSIRFISDHSITRRGFRAEYYSSPSNDSTNLLCLPNHMQASVSRSYLQSLGFSASDLVISTWNGYYECRPQITPNLVIFTIPYSGCGTFKQADNDTIDYSNFLTAAVSGGIIKRRTDLRIHVSCRMLQNTWVDTMYIANDTIHVANNTIQVEEVQYGNFDVNISFYTSSSFLYPVTSRPYYVDLNQDLYVQAEILHSDAVLTLFVDTCVASPYSNDFTSLTYDLIRSGCVRDDTYGPYSSPSLRIARFRFRAFHFLNRFPSVYLRCKMVVCRAYDPSSRCYRGCVLRSKRDVGSYQEKVDVVLGPIQLQTPPRREEEPR

SEQ ID NO: 4287 - protein, 1785 aa, Homo Sapiens; identical to SEQ ID NO: 4283

SEQ ID NO: 4288 - protein, 2403 aa, Homo Sapiens; identical to SEQ ID NO: 4285

SEQ ID NO: 4289 - protein, 2413 aa, Homo Sapiens; identical to SEQ ID NO: 4284

SEQ ID NO: 4290 - protein, 33 aa, Homo Sapiens
MFNFDTFWKNFKSKLGFINWDAINKDQRSSRIP

SEQ ID NO: 4291 - protein, 33 aa, Homo Sapiens; identical to SEQ ID NO: 4290

SEQ ID NO: 4292 - protein, 95 aa, Homo Sapiens
MFNFDTFWKNFKSKLGFINWDAINKNQVPPPSTRALLYFSRLWEDFKQNTPFLNWKAIIEGADASSLQKRAGRDDQNYNYNQHAYPTAYGGKYSV

SEQ ID NO: 4293 - protein, 123 aa, Homo Sapiens
MFNFDTFWKNFKSKLGFINWDAINKNQVPPPSTRALLYFSRLWEDFKQNTPFLNWKAIIEGADASSLQKRAGRDDQNYNYNQHAYPTAYGGKYSVKTPAKGGVSPSSSASRVQPGLLQWVKFW

SEQ ID NO: 4294 - protein, 123 aa, Homo Sapiens; identical to SEQ ID NO: 4293

SEQ ID NO: 4295 - protein, 476 aa, Homo Sapiens
MKFQGPLACLLLALCLGSGEAGPLQSGEESTGTNIGEALGHGLGDALSEGVGKAIGKEAGGAAGSKVSEALGQGTREAVGTGVRQVPGFGVADALGNRVGEAAHALGNTGHEIGRQAEDVIRHGADAVRGSWQGVPGHNGAWETSGGHGIFGSQGGLGGQGQGNPGGLGTPWVHGYPGNSAGSFGMNPQGAPWGQGGNGGPPNFGTNTQGAVAQPGYGSVRASNQNEGCTNPPPSGSGGGSSNSGGGSGSQSGSSGSGSNGDNNNGSSSGGSSSGSSSGGSSGGSSGGSSGNSGGSRGDSGSESSWGSSTGSSSGNHGGSGGGNGHKPGCEKPGNEARGSGESGIQNSETSPGMFNFDTFWKNFKSKLGFINWDAINKNQVPPPSTRALLYFSRLWEDFKQNTPFLNWKAIIEGADASSLQKRAGRDDQNYNYNQHAYPTAYGGKYSVKTPAKGGVSPSSSASRVQPGLLQWVKFW

SEQ ID NO: 4296 - protein, 386 aa, Homo Sapiens
MKFQGPLACLLLALCLGSGEAGPLQSGEESTGTNIGEALGHGLGDALSEGVGKAIGKEAGGAAGSKVSEALGQGTREAVGTGVRQVPGFGVADALGNRVGEAAHALGNTGHEIGRQAEDVIRHGADAVRGSWQGVPGHNGAWETSGGHGIFGSQGGLGGQGQGNPGGLGTPWVHGYPGNSAGSFGMNPQGAPWGQGGNGGPPNFGTNTQGAVAQPGYGSVRASNQNEGCTNPPPSGSGGGSSNSGGGSGSQSGSSGSGSNGDNNNGSSSGGSSSGSSSGGSSGGSSGGSSGNSGGSRGDSGSESSWGSSTGSSSGNHGGSGGGNGHKPGCEKPGNEARGSGESGIQNSETSPGMFNFDTFWKNFKSKLGFINWDAINKDQRSSRIP

SEQ ID NO: 4297 - protein, 436 aa, Homo Sapiens
MKFQGPLACLLLALCLGSGEAGPLQSGEESTGTNIGEALGHGLGDALSEGVGKAIGKEAGGAAGSKVSEALGQGTREAVGTGVRQVPGFGVADALGNRVGEAAHALGNTGHEIGRQAEDVIRHGADAVRGSWQGVPGHNGAWETSGGHGIFGSQGGLGGQGQGNPGGLGTPWVHGYPGNSAGSFGMNPQGAPWGQGGNGGPPNFGTNTQGAVAQPGYGSVRASNQNEGCTNPPPSGSGGGSSNSGGGSGSQSGSSGSGSNGDNNNGSSSGGSSSGSSSGGSSGGSSGGSSGNSGGSRGDSGSESSWGSSTGSSSGNHGGSGGGNGHKPGCEKPGNEARGSGESGIQGFRGQGVSSNMREISKEGNRLLGGSGDNYRGQGSSWGSGGGDAVGGVNTVNSETSPGMFNFDTFWKNFKSKLGFINWDAINKDQRSSRIP

SEQ ID NO: 4298 - protein, 398 aa, Homo Sapiens
MKFQGPLACLLLALCLGSGEAGPLQSGEESTGTNIGEALGHGLGDALSEGVGKAIGKEAGGAAGSKVSEALGQGTREAVGTGVRQVPGFGVADALGNRVGEAAHALGNTGHEIGRQAEDVIRHGADAVRGSWQGVPGHNGAWETSGGHGIFGSQGGLGGQGQGNPGGLGTPWVHGYPGNSAGSFGMNPQGAPWGQGGNGGPPNFGTNTQGAVAQPGYGSVRASNQNEGCTNPPPSGSGGGSSNSGGGSGSQSGSSGSGSNGDNNNGSSSGGSSSGSSSGGSSGGSSGGSSGNSGGSRGDSGSESSWGSSTGSSSGNHGGSGGGNGHKPGCEKPGNEARGSGESGIQGFRGQGVSSNMRNSETSPGMFNFDTFWKNFKSKLGFINWDAINKDQRSSRIP

SEQ ID NO: 4299 - protein, 369 aa, Homo Sapiens
MKFQGPLACLLLALCLGSGEAGPLQSGEESTGTNIGEALGHGLGDALSEGVGKAIGKEAGGAAGSKVSEALGQGTREAVGTGVRQVPGFGVADALGNRVGEAAHALGNTGHEIGRQAEDVIRHGADAVRGSWQGVPGHNGAWETSGGHGIFGSQGGLGGQGQGNPGGLGTPWVHGYPGNSAGSFGMNPQGAPWGQGGNGGPPNFGTNTQGAVAQPGYGSVRASNQNEGCTNPPPSGSGGGSSNSGGGSGSQSGSSGSGSNGDNNNGSSSGGSSSGSSSGGSSGGSSGGSSGNSGGSRGDSGSESSWGSSTGSSSGNHGGSGGGNGHKPGNSETSPGMFNFDTFWKNFKSKLGFINWDAINKDQRSSRIP

SEQ ID NO: 4300 - protein, 449 aa, Homo Sapiens
MKFQGPLACLLLALCLGSGEAGPLQSGEESTGTNIGEALGHGLGDALSEGVGKAIGKEAGGAAGSKVSEALGQGTREAVGTGVRQVPGFGVADALGNRVGEAAHALGNTGHEIGRQAEDVIRHGADAVRGSWQGVPGHNGAWETSGGHGIFGSQGGLGGQGQGNPGGLGTPWVHGYPGNSAGSFGMNPQGAPWGQGGNGGPPNFGTNTQGAVAQPGYGSVRASNQNEGCTNPPPSGSGGGSSNSGGSSTGSSSGNHGGSGGGNGHKPGCEKPGNEARGSGESGIQGQGSSWGSGGGDAVGGVNTVNSETSPGMFNFDTFWKNFKSKLGFINWDAINKNQVPPPSTRALLYFSRLWEDFKQNTPFLNWKAIIEGADASSLQKRAGRDDQPGAGWQEVAAVTSKNYNYNQHAYPTAYGGKYSVKTPAKGGVSPSSSASRVQPGLLQWVKFW

SEQ ID NO: 4301 - protein, 465 aa, Homo Sapiens
MKFQGPLACLLLALCLGSGEAGPLQSGEESTGTNIGEALGHGLGDALSEGVGKAIGKEAGGAAGSKVSEALGQGTREAVGTGVRQVPGFGVADALGNRVGEAAHALGNTGHEIGRQAEDVIRHGADAVRGSWQGVPGHNGAWETSGGHGIFGSQGGLGGQGQGNPGGLGTPWVHGYPGNSAGSFGMNPQGAPWGQGGNGGPPNFGTNTQGAVAQPGYGSVRASNQNEGCTNPPPSGSGGGSSNSGGSSTGSSSGNHGGSGGGNGHKPGCEKPGNEARGSGESGIQGFRGQGVSSNMREISKEGNRLLGGSGDNYRGQGSSWGSGGGDAVGGVNTVNSETSPGMFNFDTFWKNFKSKLGFINWDAINKNQVPPPSTRALLYFSRLWEDFKQNTPFLNWKAIIEGADASSLQKRAGRDDQNYNYNQHAYPTAYGGKYSVKTPAKGGVSPSSSASRVQPGLLQWVKFW

SEQ ID NO: 4302 - protein, 36 aa, Homo Sapiens
MLGITSCSDQQAKEGEGIQHRLLLRQPRWERRRKWT

SEQ ID NO: 4303 - protein, 36 aa, Homo Sapiens; identical to SEQ ID NO: 4302

SEQ ID NO: 4304 - protein, 36 aa, Homo Sapiens; identical to SEQ ID NO: 4302

SEQ ID NO: 4305 - protein, 36 aa, Homo Sapiens; identical to SEQ ID NO: 4302

SEQ ID NO: 4306 - protein, 36 aa, Homo Sapiens; identical to SEQ ID NO: 4302

SEQ ID NO: 4307 - protein, 36 aa, Homo Sapiens; identical to SEQ ID NO: 4302

SEQ ID NO: 4308 - protein, 36 aa, Homo Sapiens; identical to SEQ ID NO: 4302

SEQ ID NO: 4309 - protein, 36 aa, Homo Sapiens; identical to SEQ ID NO: 4302

SEQ ID NO: 4310 - protein, 36 aa, Homo Sapiens; identical to SEQ ID NO: 4302

SEQ ID NO: 4311 - protein, 36 aa, Homo Sapiens; identical to SEQ ID NO: 4302

SEQ ID NO: 4312 - protein, 36 aa, Homo Sapiens; identical to SEQ ID NO: 4302

SEQ ID NO: 4313 - protein, 36 aa, Homo Sapiens; identical to SEQ ID NO: 4302

SEQ ID NO: 4314 - protein, 36 aa, Homo Sapiens; identical to SEQ ID NO: 4302

SEQ ID NO: 4315 - protein, 36 aa, Homo Sapiens; identical to SEQ ID NO: 4302

SEQ ID NO: 4316 - protein, 36 aa, Homo Sapiens; identical to SEQ ID NO: 4302

SEQ ID NO: 4317 - protein, 36 aa, Homo Sapiens; identical to SEQ ID NO: 4302

SEQ ID NO: 4318 - protein, 36 aa, Homo Sapiens; identical to SEQ ID NO: 4302

SEQ ID NO: 4319 - protein, 253 aa, Homo Sapiens
MLGITSCSDQQAKEGEGLEGSSTGSSSGNHGGSGGGNGHKPGCEKPGNEARGSGESGIQGFRGQGVSSNMREISKEGNRLLGGSGDNYRGQGSSWGSGGGDAVGGVNTVNSETSPGMFNFDTFWKNFKSKLGFINWDAINKNQVPPPSTRALLYFSRLWEDFKQNTPFLNWKAIIEGADASSLQKRAGRDDQPGAGWQEVAAVTSKNYNYNQHAYPTAYGGKYSVKTPAKGGVSPSSSASRVQPGLLQWVKFW

SEQ ID NO: 4320 - protein, 131 aa, Homo Sapiens
MLGITSCSDQQAKEGEGLEGSSTGSSSGNHGGSGGGNGHKPGCEKPGNEARGSGESGIQGFRGQGVSSNMRGQGSSWGSGGGDAVGGVNTVNSETSPGMFNFDTFWKNFKSKLGFINWDAINKDQRSSRIP

SEQ ID NO: 4321 - protein, 201 aa, Homo Sapiens
MLGITSCSDQQAKEGEGLEGSSTGSSSGNHGGSGGGNGHKPGCEKPGNEARGSGESGIQGFRGQGVSSNMRNSETSPGMFNFDTFWKNFKSKLGFINWDAINKNQVPPPSTRALLYFSRLWEDFKQNTPFLNWKAIIEGADASSLQKRAGRDDQNYNYNQHAYPTAYGGKYSVKTPAKGGVSPSSSASRVQPGLLQWVKFW

SEQ ID NO: 4322 - protein, 116 aa, Homo Sapiens
MLGITSCSDQQAKEGEGLEGSSTGSSSGNHGGSGGGNGHKPGCEKPGNEARGSGESGIQGQGSSWGSGGGDAVGGVNTVNSETSPGMFNFDTFWKNFKSKLGFINWDAINKDQRSS

SEQ ID NO: 4323 - protein, 184 aa, Homo Sapiens
MLGITSCSDQQAKEGEGLEGSSTGSSSGNHGGSGGGNGHKPGCEKPGNEARGSGESGIQNSETSPGMFNFDTFWKNFKSKLGFINWDAINKDFKQNTPFLNWKAIIEGADASSLQKRAGRDDQPGAGWQEVAAVTSKNYNYNQHAYPTAYGGKYSVKTPAKGGVSPSSSASRVQPGLLQWVKFW

SEQ ID NO: 4324 - protein, 99 aa, Homo Sapiens
MLGITSCSDQQAKEGEGLEGSSTGSSSGNHGGSGGGNGHKPGCEKPGNEARGSGESGIQNSETSPGMFNFDTFWKNFKSKLGFINWDAINKDQRSSRIP

SEQ ID NO: 4325 - protein, 189 aa, Homo Sapiens
MLGITSCSDQQAKEGEGLEGSSTGSSSGNHGGSGGGNGHKPGCEKPGNEARGSGESGIQNSETSPGMFNFDTFWKNFKSKLGFINWDAINKNQVPPPSTRALLYFSRLWEDFKQNTPFLNWKAIIEGADASSLQKRAGRDDQNYNYNQHAYPTAYGGKYSVKTPAKGGVSPSSSASRVQPGLLQWVKFW

SEQ ID NO: 4326 - protein, 203 aa, Homo Sapiens
MLGITSCSDQQAKEGEGLEGSSTGSSSGNHGGSGGGNGHKPGCEKPGNEARGSGESGIQNSETSPGMFNFDTFWKNFKSKLGFINWDAINKNQVPPPSTRALLYFSRLWEDFKQNTPFLNWKAIIEGADASSLQKRAGRDDQPGAGWQEVAAVTSKNYNYNQHAYPTAYGGKYSVKTPAKGGVSPSSSASRVQPGLLQWVKFW

SEQ ID NO: 4327 - protein, 203 aa, Homo Sapiens; identical to SEQ ID NO: 4326

SEQ ID NO: 4328 - protein, 82 aa, Homo Sapiens
MLGITSCSDQQAKEGEGLEGSSTGSSSGNHGGSGGGNGHKPGNSETSPGMFNFDTFWKNFKSKLGFINWDAINKDQRSSRIP

SEQ ID NO: 4329 - protein, 172 aa, Homo Sapiens
MLGITSCSDQQAKEGEGLEGSSTGSSSGNHGGSGGGNGHKPGNSETSPGMFNFDTFWKNFKSKLGFINWDAINKNQVPPPSTRALLYFSRLWEDFKQNTPFLNWKAIIEGADASSLQKRAGRDDQNYNYNQHAYPTAYGGKYSVKTPAKGGVSPSSSASRVQPGLLQWVKFW

SEQ ID NO: 4330 - protein, 90 aa, Homo Sapiens
MNMKPATASALLLLLLGLAWTQGSHGWGADASSLQKRAGRDDQNYNYNQHAYPTAYGGKYSVKTPAKGGVSPSSSASRVQPGLLQWVKFW

SEQ ID NO: 4331 - protein, 36 aa, Homo Sapiens
SGNHGGSGGGNGHKPGISRLWLTKWVLLSSHISLVP

SEQ ID NO: 4332 - protein, 152 aa, Homo Sapiens
SSTGSSSGNHGGSGGGNGHKPGNSETSPGMFNFDTFWKNFKSKLGFINWDAINKNQVPPPSTRALLYFSRLWEDFKQNTPFLNWKAIIEGADASSLQKRAGRDDQNYNYNQHAYPTAYGGKYSVKTPAKGGVSPSSSASRVQPGLLQWVKFW

SEQ ID NO: 4333 - protein, 74 aa, Homo Sapiens
  misc_feature (1)..(1): Xaa can be any naturally occurring amino acid
XALLLLLLGLAWTQGSHGWGADASSLQKRAGRDDQNYNYNQHAYPTAYGGKYSVKTPAKASRVQPGLLQWVKFW

SEQ ID NO: 4334 - protein, 201 aa, Homo Sapiens
  misc_feature (1)..(1): Xaa can be any naturally occurring amino acid
XGGGNGHKPGCEKPGNEARGSGESGIQGFRGQGVSSNMREISKEGNRLLGGSGDNYRNSETSPGMFNFDTFWKNFKSKLGFINWDAINKNQVPPPSTRALLYFSRLWEDFKQNTPFLNWKAIIEGADASSLQKRAGRDDQPGAGWQEVAAVTSKNYNYNQHAYPTAYGGKYSVKTPAKGGVSPSSSASRVQPGLLQWVKFW

SEQ ID NO: 4335 - protein, 109 aa, Homo Sapiens
  misc_feature (1)..(1): Xaa can be any naturally occurring amino acid
XPATASALLLLLLGLAWTQGSHGWVGTAGCTGCGRVITAETCRQRRSELQLQPACVSHCLWWEVLSQDPCKGGSLTFFLGFPGATWPAAVGEVLVGNFLQPPPRPRKAL

SEQ ID NO: 4336 - protein, 96 aa, Homo Sapiens
  misc_feature (1)..(1): Xaa can be any naturally occurring amino acid
XPPPSTRALLYFSRLWEDFKQNTPFLNWKAIIEGADASSLQKRAGRDDQNYNYNQHAYPTAYGGKYSVKTPAKGGVSPSSSASRVQPGLLQWVKFW

SEQ ID NO: 4337 - protein, 497 aa, Homo Sapiens
MKISILLMFLWGLSCALPVTRYQNNESEDSEEWKGHLAQAPTPPLANEDPSDSTQSEEGLGSDDHQYIYRLAGGFSRSTGKGGDDKDDDEDDSGDDTFGDDDSGPGPKDRQEGGNSRLGSDEDSDDTIQASEESAPQGQDSAQDTTSESRELDNEDRVDSKPEGGDSTQESESEEHWVGGGSDGESSHGDGSELDDEGMQSDDPESIRSERGNSRMNSAGMKSKESGENSEQANTQDSGGSQLLEHPSRKIFRKSRISEEDDRSELDDNNTMEEVKSDSTENSNSRDTGLSQPRRDSKGDSQEDSKENLSQEESQNVDGPSSESSQEANLSSQENSSESQEEVVSESRGDNPDPTTSYVEDQEDSDSSEEDSSHTLSHSKSESREEQADSESSESLNFSEESPESPEDENSSSQEGLQSHSSSAESQSEESHSEEDDSDSQDSSRSKEDSNSTESKSSSEEDGQLKNIEIESRKLTVDAYHNKPIGDQDDNDCQDGY

SEQ ID NO: 4338 - protein, 513 aa, Homo Sapiens
MKISILLMFLWGLSCALPVTRYQNNESEDSEEWKGHLAQAPTPPLESSESSEGSKVSSEEQANEDPSDSTQSEEGLGSDDHQYIYRLAGGFSRSTGKGGDDKDDDEDDSGDDTFGDDDSGPGPKDRQEGGNSRLGSDEDSDDTIQASEESAPQGQDSAQDTTSESRELDNEDRVDSKPEGGDSTQESESEEHWVGGGSDGESSHGDGSELDDEGMQSDDPESIRSERGNSRMNSAGMKSKESGENSEQANTQDSGGSQLLEHPSRKIFRKSRISEEDDRSELDDNNTMEEVKSDSTENSNSRDTGLSQPRRDSKGDSQEDSKENLSQEESQNVDGPSSESSQEANLSSQENSSESQEEVVSESRGDNPDPTTSYVEDQEDSDSSEEDSSHTLSHSKSESREEQADSESSESLNFSEESPESPEDENSSSQEGLQSHSSSAESQSEESHSEEDDSDSQDSSRSKEDSNSTESKSSSEEDGQLKNIEIESRKLTVDAYHNKPIGDQDDNDCQDGY

SEQ ID NO: 4339 - protein, 542 aa, Homo Sapiens
MELRSELPSVPGAATAAAATATGPPVASVASVAAAAAAAASLPVSVAGGLLRGPPLLLRAAEKYPRTPKCARCRNHGVVSALKGHKRYCRWKDCLCAKCTLIAERQRVMAAQVALRRQQAQEENEARELQLLYGTAEGLALAAANGIIPPRPAYEVFGSVCAADGGGPGAGAPAGTGGGAAGAGGSEAKLQKFDLFPKTLLQAGRPGSPLPPPVKPLSPDGADSGPGTSSPEVRPGSGSENGDGESFSGSPLARASKEAGGSCPGSAGPGGGGEEDSPGSASPLGSESGSEADKEEGEAAPAPGLGGGSGPRQRTPLDILTRVFPGHRRGVLELVLQGCGGDVVQAIEQVLNHHRGGLAAGLGPAAPPDKAAVGAAAAADDAWPSRVDAAAAAAAAAGGPGLPAPLQAGPAAPPHHRPLLAGAMAPGALGSLSSRSAFSPLQPNASHFGADAGAYPLGAPLGLSPLRLAYSAAAAHSRGLAFMAPYSTAGLVPTLGFRPPMDYAFSDLMRDRSAAAAAAVHKEPTYGGGLYGPMVNGAPEKQ

SEQ ID NO: 4340 - protein, 542 aa, Homo Sapiens; identical to SEQ ID NO: 4339

SEQ ID NO: 4341 - protein, 855 aa, Homo Sapiens
MAALGVAEAVAAPHPAEGAETAEAVELSRALSRLLPGLEADSKPGRRRALEALRRALEEPGPAADPTAFQGPWARLLLPRLLRCLSDPAEGCRALAVHLLDLGLRRAARPRDALPRLLPALAARLAGPVPARRPPEACEELRLALVQLLGLAVDLCGAALAPHLDDALRALRCSLLDPFAAVRRESCSCAAALAQATPDHFHMQSESLIGPLMQTISHQHWKVRVAAIEATGAVIHFGNGKSVDDVLSHFAQRLFDDVPQVRRAVASVVGGWLLCLRDRYSFFHKLIPLLLSSLNDEVPEVRQLAASLWEDVGLQWQKENEEDLKDKLDFAPPTPPHYPPHERRPVLGCRELVFRNLSKILPALCHDITDWVVGTRVKSAQLLPVLLLHAEDHATQHLEVVLRTLFQACTDEEAAVVQSCTRSAELVGTFVSPEVFLKLILSTLKKTPSASGLLVLASAMRGCPREALQPHLAAIATELAQAHICQASENDLYLERLLLCVQALVSVCHEDCGVASLQLLDVLLTIVALAGATGLRDKAQETMDSLAMVEGVSSCQDLYRKHIGPLLERVTASHLDWTAHSPELLQFSVIVAQSGPALGEALPHVVPTLRACLQPSQDPQMRLKLFSILSTVLLRATDTINSQGQFPSYLETVTKDILAPNLQWHAGRTAAAIRTAAVSCLWALTSSEVLSAEQIRDVQETLMPQVLTTLEEDSKMTRLISCRIINTFLKTSGGMTDPEKLIRIYPELLKRLDDVSNDVRMAAASTLVTWLQCVKGANAKSYYQSSVQYLYRELLVHLDDPERAIQDAILEVLKEGSGLFPDLLVRETEAVIHKHRSATYCEQLLQHVQAVPATQ

SEQ ID NO: 4342 - protein, 280 aa, Homo Sapiens
MTGGAREKAHIARSPATAQGPALGEALPHVVPTLRACLQPSQDPQMRLKLFSILSTVLLRATDTINSQGQFPSYLETVTKDILAPNLQWHAGRTAAAIRTAAVSCLWALTSSEVLSAEQIRDVQETLMPQVLTTLEEDSKMTRLISCRIINTFLKTSGGMTDPEKLIRIYPELLKRLDDVSNDVRMAAASTLVTWLQCVKGANAKSYYQSSVQYLYRELLVHLDDPERAIQDAILEVLKEGSGLFPDLLVRETEAVIHKHRSATYCEQLLQHVQAVPATQ

SEQ ID NO: 4343 - protein, 196 aa, Homo Sapiens
  misc_feature (1)..(1): Xaa can be any naturally occurring amino acid
XLCARCAAPCSTPSPPCAARAAAAPPPWRRPRPVRRAVASVVGGWLLCLRDRYSFFHKLIPLLLSSLNDEVPEVRQLAASLWEDVGLQWQKENEEDLKDKLDFAPPTPPHYPPHERRPVLGCRELVFRNLSKILPALCHDITDWVVGTRVKSAQLLPVLLLHAEDHATQHLEVVLRTLFQACTDEEAAVVQSCTRS

SEQ ID NO: 4344 - protein, 657 aa, Homo Sapiens
  misc_feature (1)..(1): Xaa can be any naturally occurring amino acid
XSPPCAARAAAAPPPWRRPRPHWKVRVAAIEATGAVIHFGNGKSVDDVLSHFAQRLFDDVPQVRRAVASVVGGWLLCLRDRYSFFHKLIPLLLSSLNDEVPEVRQLAASLWEDVGLQWQKENEEDLKDKLDFAPPTPPHYPPHERRPVLGCRELVFRNLSKILPALCHDITDWVVGTRVKSAQLLPVLLLHAEDHATQHLEVVLRTLFQACTDEEAAVVQSCTRSAELVGTFVSPEVFLKLILSTLKKTPSASGLLVLASAMRGCPREALQPHLAAIATELAQAHICQASENDLYLERLLLCVQALVSVCHEDCGVASLQLLDVLLTIVALAGATGLRDKAQETMDSLAMVEGVSSCQDLYRKHIGPLLERVTASHLDWTAHSPELLQFSVIVAQSGPALGEALPHVVPTLRACLQPSQDPQMRLKLFSILSTVLLRATDTINSQGQFPSYLETVTKDILAPNLQWHAGRTAAAIRTAAVSCLWALTSSEVLSAEQIRDVQETLMPQVLTTLEEDSKMTRLISCRIINTFLKTSGGMTDPEKLIRIYPELLKRLDDVSNDVRMAAASTLVTWLQCVKGANAKSYYQSSVQYLYRELLVHLDDPERAIQDAILEVLKEGSGLFPDLLVRETEAVIHKHRSATYCEQLLQHVQAVPATQ

SEQ ID NO: 4345 - protein, 68 aa, Homo Sapiens
AEGEGLVLPKKIRVRSAVEQWLVNVEKSMFDVLKKFLSQGIEDWNCQMFSQWVLSHPGQVVLTVTFAI

SEQ ID NO: 4346 - protein, 130 aa, Homo Sapiens
DYLEVKRLIFPRFYFLSNAELLDILADSRNPESVQPHLVKCFENIKQLLIWKQDIGPPAVKMLISAEGEGLVLPKYDKCYKLFRFCTTSLFKISALKFLIYYKSALSKLFLQRLYPYVNILLPFHIPYNT

SEQ ID NO: 4347 - protein, 430 aa, Homo Sapiens
METFIPIDLTTENQEMDKEETKTKPRLLRYEEKKYEDVKPLETQPAEIAEKETLEYKTVRTFSESLKSEKTEDYLRESIIQQHMVSPEPASLKEKGKSRRKKDQTHACPNVRKARPVSYDRTEPKDDDVIRNIIRLREKLGWQTILPQHSLKYGSSKIAIQKITLKKPLEDDGEFVYCLPRKSPKSLYNPYDLQVINIVGSVKEVELIPTLEWLSERRHYYLLRQFKIFSDFRMNKAFVTWKLNVKRIKTEKSRSFLYHHLFLADDLFQTCLVYIRGLCEDAINLKNYNDHENNLSAICLVKLDSSRTYSLDEFCEEQLQQATQALKQLEDIRNKAISEMKSTFLKVAEKNEIKEYFESKLSEDDTTHFKLPKYRRLLETFFKFVMLVDYIFQELIRQLMNTAVTLLLELFNGSAGMPFSVEKKNENLIR

SEQ ID NO: 4348 - protein, 228 aa, Homo Sapiens
METFIPIDLTTENQEMDKEETKTKPRLLRYEEKKYEDVKPLETQPAEIAEKETLEYKTVRTFSESLKSEKTEDYLRESIIQQHMVSPEPASLKEKGKSRRKKDQTHACPNVRKARPVSYDRTEPKDDDVIRNIIRLREKLGWQTILPQHSLKYGSSKIAIQKITLKKPLEDDGEFVYCLPRKSPKSLYNPYDLQVVSAHTAKHCKEFWVITASFISKRYLVICGAVYI

SEQ ID NO: 4349 - protein, 228 aa, Homo Sapiens; identical to SEQ ID NO: 4348

SEQ ID NO: 4350 - protein, 4515 aa, Homo Sapiens
METFIPIDLTTENQEMDKEETKTKPRLLRYEEKKYEDVKPLETQPAEIAEKETLEYKTVRTFSESLKSEKTEDYLRESIIQQHMVSPEPASLKEKGKSRRKKDQTHACPNVRKARPVSYDRTEPKDDDVIRNIIRLREKLGWQTILPQHSLKYGSSKIAIQKITLKKPLEDDGEFVYCLPRKSPKSLYNPYDLQVVSAHTAKHCKEFWVITASFISKVINIVGSVKEVELIPTLEWLSERRHYYLLRQFKIFSDFRMNKAFVTWKLNVKRIKTEKSRSFLYHHLFLADDLFQTCLVYIRGLCEDAINLKNYNDHENNLSAICLVKLDSSRTYSLDEFCEEQLQQATQALKQLEDIRNKAISEMKSTFLKVAEKNEIKEYFESKLSEDDTTHFKLPKYRRLLETFFKFVMLVDYIFQELIRQLMNTAVTLLLELFNGSAGMPFSVEKKNENLIRTFKDNSFPTGKTTNDCEELVDNSKLHAISVQKSEVKTDTDINEILNSVEVGKDLRKTYAPIFEVNLCLRIPAESDSSENSKENFHESDQCPEECVMFEDEMSENKDNCVKKHSSEELLPKAKKSKEISYNLEDIISDTEIETEFENKYMYYEFPEFPTNLFIDPNRLEFSVKIQNMLTNMEKCITTITPLCQDPQLSIFIDLVSIMDLPNKTGSIIHYKEQTRWPDCHILFETDPAYQNIIVNLLTIIGNSMGLVNAYSHKFIKYCTMTEKAKIMSMKISSMGELTSKEFEAILNRFRNYFRHIVNMAIEKRIGIFNVVSLDYQSECLLYIDNVIHMSHTLIQSVIEKKNKNLLEVVESSLQQLECDPTEIEEFLEHFIFLNAISSKISKLEKEFLTMSQLYSVAKHHQIHISEEQIAIFQVLLLKFSQLKSSMKLSKINKDTAITKFRDNLEACISGLHVDVGNLKAKIRTPLLLCAGTQVSTAMEMIQTLSGEAASLTNKAKAYSHYQDCFSDSQSHMHSVNVEEITQIVLSEISDIEGDLTLRKKLWEAQEEWKRASWEWRNSSLQSIDVESVQRNVSKLMHIISVLEKGLPKSDMVTHLKQVVTEFKQELPIIIALGNPCLKPRHWEALQEIIGKSVPLDKNCKVENLLALKMFQYENEINDMSTSATNEAALEKMLFKIIDFWNTTPLPLILHHTEIYSIFIIPSIDDISAQLEESQVILATIKGSPHIGPIKDLVNEWDQNLTLFSYTLEEWMNCQRNWLYLEPVFHSSEIRRQLPAETELFSQVISMWKKIMSKIQNKQNALQITTSAGVLEILQNCNIHLEHIKKSLEDYLEVKRLIFPRFYFLSNAELLDILADSRNPESVQPHLVKCFENIKQLLIWKQDIGPPAVKMLISAEGEGLVLPKKIRVRSAVEQWLVNVEKSMFDVLKKERYIYNIILLFQSQIMFYNDCVKSFVSSYSREKLEKVHAGLMCHLEEVADLVVLDTSNSRTKAILGALLILYVHCRDIVINLLLKNIFNAEDFEWTRHLQYKWNEKQKLCYVSQGNASFTYGYEYLGCTSRLVITPLTDRCWLTLMEALHLNLGGCPAGPAGTGKTETVKDLAKSLGKHCVVFNCFEDLDYKIVRKFFFGLVQSGAWSCFDEFNLIDLEVLSVIASQILTIKAAKDNYSARFVLEGKEIRINMSCAVFITMNPRYGGGVELPDNLKSLFRPVAMMVPHYQMIAEIILFSFGFKSANSLSGKLTNLYELARKQLSQQDHYNFGLRSLKIVLIMAGTKKREFKCLSEADETLIVIEAIREASLPKCPPEDVPLFENIIGDIFPEVTVLKVNQLALEKVIYTATQQLGLQNWSSQKEKIIQFYNQLQVCVGVMLVGPTGGGKTTVRRILEKALTLLPIADFLSVAERKSASKISERKGKVDICVLNPKCVTLSELYGQLDPNTMEWTDGLLSATIRSYVYFNTPKNTKKDIDLRLKSRISDLSNVFKLDSSDTTETDDNIFEEIEKVVKIPENHNFDWQWIILDGPVDTFWVENLNSVLDDTRTLCLANSERIALTNKIRVIFEVDNLSQASPATVSRCAMVYMDPVDLGWEPYVKSWLLKTSKIISQSGVDCLEFMIKNSVTDGLQFIRNRQKFQPYPMEDITVVITLCRILDAFFDFMGKNGGFEQSDDLNDTSSKEANSQRESVTFKDIEKRDENTWYPEKNPDKLTKIIQKLFVFAFTWAFGGALNREDEHRENIPFCPSLEPDSLAKVTYDFDKLVHELFGNSSQVGWKHWGQSQGRRRKGNCINLPTGECSIFGYFVDIEQCEFIPWSDLVPNDQTLIQRGTSLLTNLQRSGGNFLKITECGECINYTATRDTTCLSFLMSLLLKNSCPVLLTGESGVGKTAAINQMLEKLEGPGAFDIKHGSILGDTLLYSEIKKSSSLKQNITILIPETHKTATGSSDNPTKKPEVRTNKKLLKNNDHKGVVVSTINFSTNVTAAKTKEMILKKLIRRTKDTLGAPKNNRILIFIDDMNMPVSDMYGAQPPLELIRQLLDLGGVYDTEKNTWKNIQDLSIVAACVPVVNDISPRLLKHFSMLVLPHPSQDILCTIFQAHLGIYFSINNFTPEVQKSKDQIISCSLAIYHQVRQNMLPTPTKCHYMFNLRDMFKLLLGLLQADRTVVNSKEMAALLFVHEATRVFHDRLIDFTDKSLFYRLLSRELENCFQIGIDGCGKKTCATLACYLTDNKLYRVPISHKCAYIEFKEVFKKVFIHAGLKGKPTVLMVPNLNIEQDSFLEDLNYIISSGRIPDLFENVELDSIAMKIRYLTEQSGHMDNRQSLLSFFQKRIYKNLHIFVIMSPEGPSFRQNCRVYPSMISSCTIDWYERWPEEALLIVANSFLKEKVNFENRENLKEKLAPTCVQIHKSMKDLNRKYFEETGRFYYTTPNSYLQFMETFAHILRAREEEMQTKRDRFHMGLSTILEATTLVTEMQEELLILGPQVEQKTKETETLMEKLRKDSQVVEKVQMLVKQDEEIVAEEVRIVEDYAQKTANELKSVLPAFDKAIVALNALDKADVAELRVYTRPPFLVLTVMNAVCILLQKKPNWATAKLLLSETGFLKKLINLDKDSIPDKVFVKLKKIVTLPDFNPHKISLVSVACCSLCQWVIALNNYHEVQKVVGPKQIQVAEAQNVLKIARQRLAEKQRGLQLVEEHLLFLQAAYKDTVAEKQLLANRKTMASRRFQCASVLLTVLEDEKTRWQETINQIDNKLEGILGDILLSAACIVYSGILTPEFRQLIVNKWETFCIENGISLSSKFSLIKVMAQKYEISRWHNQGLPHGQYSVENAILIKNGQQWPLLIDPHRQAHKWIRQMEGSRLQKLSIEDSNYTKKIENAMKTGGSVLLQNLLETLAPGLKAILKKDIYQKKGHYFIRVGDAEFEYNSNFRLYLSTEIDNPHFLPSVYNFVTMINFTVTFQGLQDQLLSTVVTHEVPHLEDQRSKLLESISLDAITLEELEEKTLNLLQKALGSILDDDKIVDTLRKSKMTSNEISKRIEATKKAESEIQAIRKNYLPIATRGALLYFLVADLTQINYMYQFSLDWFHQVFVSSVVSKSKEQEHSFKREKVSPKEVHEFISISKEPNLENEKNLLDKHIKSAIDMLTKSIFKVVSSALFNEDKLCFSFRLCTVIMQNNANGNLIQDDIGFLPEEEWNIFLYSGILINIKSALSQSRLTSTFEIGESQHLQWLSDSRWRQCQYVSTHLEPFSLLCKSLLSNVSQWDTFKNSKAVYSLISTPFSSENASLEENTKPPEETELLNENKETCNPINFPWEKLTSFQRLILVKVLRPESLNNSVRKFITEKMGNKYLQRTGVNLKDAYKGSNARTPLILIQTHGIDLTNILLRFAQELKGTTHHVTIISLGRDQAAKAEDLILKALTKTQQWVFLQNCHLATSFMPRLCTIVESFNSPNVTIDPEFRLWLSSKSYSSFPIPVLKKGLKIAVESPQGLKSNLLQTFGCTGSGEVTEEIFENPDCGQWWKKLLFSLCFFNAVINERKNYGILGWNIAYKFNSSDLGVAIKVLENSLRGQPSISWQALRYLIGEVIYGGRVIDNWDKRCLKTLLYKFCNPEVLKDDFSFSRSASIKDYIHIIQSLPDDDLPEVLGIHPEAIRSCWETQGEKFIENLIAMQPKTTTANLMIRPEQSKDELVMEILSDLLKRLPLTVEKEEIAVGTPSTLKSMMSSSIWESLSKNLKDHDPLIHCVLLTFLKQEIKRFDKLLFVIHKSLKDLQLAIKGEIILTQELEEIFNSFLNMRVPTLWQKHAYRSCKPLSSWIDDLIQRLNFFNTWAKVAYTAIQRRYMRFVTVWKQSIPSTSQKCKHPEDSENNFFEGFPSRYWLPAFFFPQAFLAAVLQDYGRSRGIAVDALTFTHHVISNTTDKDEKFSVFMPKKLNIVRRAFKGSASSHTGVYIFGLFIEGARWNREQKILEDSLPLEMCCDFPDIYFLPTKISTKTPNASNQTDSELYAFECPVYQTPERSRILATTGLPTNFLTSVYLSTKKPPSHWITMRVALLCEKNEK

SEQ ID NO: 4351 - protein, 453 aa, Homo Sapiens
METFIPIDLTTENQEMDKEETKTKPRLLRYEEKKYEDVKPLETQPAEIAEKETLEYKTVRTFSESLKSEKTEDYLRESIIQQHMVSPEPASLKEKGKSRRKKDQTHACPNVRKARPVSYDRTEPKDDDVIRNIIRLREKLGWQTILPQHSLKYGSSKIAIQKITLKKPLEDDGEFVYCLPRKSPKSLYNPYDLQVVSAHTAKHCKEFWVITASFISKVINIVGSVKEVELIPTLEWLSERRHYYLLRQFKIFSDFRMNKAFVTWKLNVKRIKTEKSRSFLYHHLFLADDLFQTCLVYIRGLCEDAINLKNYNDHENNLSAICLVKLDSSRTYSLDEFCEEQLQQATQALKQLEDIRNKAISEMKSTFLKVAEKNEIKEYFESKLSEDDTTHFKLPKYRRLLETFFKFVMLVDYIFQELIRQLMNTAVTLLLELFNGSAGMPFSVEKKNENLIR

SEQ ID NO: 4352 - protein, 4515 aa, Homo Sapiens; identical to SEQ ID NO: 4350

SEQ ID NO: 4353 - protein, 3507 aa, Homo Sapiens
MGRRSQWIWAMRCQMLVPVLSLHIGLARALGCGCIASKIECLIRCNAPFPLLDAVGSVASQELQSLTGTVGVTSGAAAYPRWNLARARAPPHLPGTQDPLRRVRDPTPIVASSPGRRRGSWSGGYGQEASEPGVVGLCCAVLPIHPSLALAGVGGPDLRRFQEGPQRPSDHGAAEKHMETFIPIDLTTENQEMDKEETKTKPRLLRYEEKKYEDVKPLETQPAEIAEKETLEYKTVRTFSESLKSEKTEEPKDDDVIRNIIRLREKLGWQTILPQHSLKYGSSKIAIQKITLKKPLEDDGEFVYCLPRKSPKSLYNPYDLQVVSAHTAKHCKEFWVITASFISKLDSSRTYSLDEFCEEQLQQATQALKQLEDIRNKAISEMKSTFLKVAEKNEIKEYFESKLSEDDTTHFKLPKYRRLLETFFKFVMLVDYIFQELIRQLMNTAVTLLLELFNGSAGMPFSVEKKNENLIRTFKDNSFPTGKTTNDCEELVDNSKLHAISVQKSEVKTDTDINEILNSVEVGKDLRKTYAPIFEVNLCLRIPAESDSSENSKENFHESDQCPEECVMFEDEMSENKDNCVKKHSSEELLPKAKKSKEISYNLEDIISATITPLCQDPQLSIFIDLVSIMDLPNKTGSIIHYKEQTRWPDCHILFETDPAYQNIIVNLLTIIGNSMGLVNAYSHKFIKYCTMTEKAKIMSMKISSMGELTSKEFEAILNRFRNYFRHIVNMAIEKRIGIFNVVVESSLQQLECDPTEIEEFLEHFIFLNAISSKISKLEKEFLTMSQLYSVAKHHQIHISEEQIAIFQVLLLKFSQLKSSMKLSKINKDTAITKFRDNLEACISGLHVDVGNLKAKIRTPLLLCAGTQVSTAMEMIQTLSGEAASLTNKAKAYSHYQDCFSDSQSHMHSVNVEEITQIVLSEISDIEGDLTLRKKLWEAQEEWKRASWEWRNSSLQSIDVESVQRNVSKLMHIISVLEKEIYSIFIIPSIDDISAQLEESQVILATIKGSPHIGPIKSQIMFYNDCVKSFVSSYSREKLEKVHAGLMCHLEEVADLVVLDTSNSRTKAILGALLILYVHCRDIVINLLLKNIFNAEDFEWTRHLQYKWNEKQKLCYVSQGNASFTYGYEYLGCTSRLVITPLTDRCWLTLMEALHLNLGGCPAGPAGTGKTETVKDLAKCALFAFKCNTALIKLPNSLIVLTCFGLEKTVLVMNTVMSFRFVLEGKEIRINMSCAVFITMNPRYGGGVELPDNLKSLFRPVAMMVPHYQMIAEIILFSFGFKSANSLSGKLTNLYELARKQLSQQDHYNFGLRSLKIVLIMAGTKKREFKCDTSDSLSEADETLIVIEAIREASLPKCPPEDVPLFENIIGDIFPEVTVLKVNQLALEKVIYTATQQLGLQNWSSQKEKIIQFYNQLQVCVGVMLVGPTGGGKTTVRRILEKALTLLPIADFLSVAERKSASKISERKGKVDICVLNPKCVTLSELYGQLDPNTMEWTDGLLSATIRSYVYFNTPKNTKKDIDLRLKSRISDLSNVFKLDSSDTTETDDNIFEEIEKVVKIPENHNFDWQWIILDGPVDTFWVENLNSVLDDTRTLCLANSERIALTNKIRVIFEVDNLSQASPATVSRCAMVYMDPVDLGWEPYVKSWLLKTSKIISQSGVDCLEFMIKNSVTDGLQFIRNRQKFQPYPMEDITVVITLCRILDAFFDFMGKNGGFEQSDDLNDTSSKEANSQRESVTFKDIEKRDENTWYPEKNPDKLTKIIQKLFVFAFTWAFGGALNREDEHRENIPFCPSLEPDSLAKVTYDFDKLVHELFGNSSQVGINLPTGECSIFGYFVDIEQCEFIPWSDLVPNDQTLIQRDNPTKKPEVRTNKKLLKNNDHKGVVVSTINFSTNVTAAKTKEMILKKLIRRTKDTLGAPKNNRILIFIDDMNMPVSDMYGAQPPLELIRQLLDLGGVYDTEKNTWKNIQDLSIVAACVPVVNDISPRLLKHFSMLVLPHPSQDILCTIFQIGIDGCGKKTCATLACYLTDNKLYRVPISHKCAYIEFKEVFKKVFIHAGLKGKPTVLMVPNLNIEQDSFLEDLNYIISSGRIPDLFENVELDSIAMKIRYLTEQSGHMDNRQSLLSFFQKRIYKNLHIFVIMSPEGPSFRQNCRVYPSMISSCTIDWYERWPEEALLIVANSFLKEKVNFENRENLKEKLAPTCVQIHKSMKDLNRKYFEETGRFYYTTPNSYLQFMETFAHILRAREEEMQTKRDRFHMGLSTILEATTLVTEMQEELLILGPQVEQKTKETETLMEKLRKDSQVVEKVQMLVKQDEEIVAEEVRIVEDYAQKTANELKSVLPAFDKAIVALNALDKADVAELRVYTRPPFLVLTVMNAVCILLQKKPNWATAKLLLSETGFLKKLINLDKDSIPDKVFVKLKKIVTLPDFNPHKISLVSVACCSLCQWVIALNNYHEVQKVVGPKQIQVAEAQNVLKIARQRLAEKQRGLQLISRWHNQGLPHGQYSVENAILIKNGQQWPLLIDPHRQAHKWIRQMEGSRLQKLSIEDSNYTKKIENAMKTGGSVLLQSCQASTWRKKLYLSTEIDNPHFLPSVYNFVTMINFTVTFQGLQDQLLSTVVTHEVPHLEDQRSKLLESISLDAITLEELEEKTLNLLQKALGSILDDDKIVDTLRKSKMTSNEISKRIEATKKAESEIQAIRKNYLPIATRGALLYFLVADLTQINYMYQFSLDWFHQVFVSSVVSKSKEQEHSFKREKVSPKEVHEFISISKEPNLENEKNLLDKHIKSAIDMLTKSIFKVVSSALFNEDKLCFSFRLCTVIMQNNANGNLIQDDIGFLPEEEWNIFLYSGILINIKSALSQSRLTSTFEIGESQHLQWLSDSRWRQCQYVSTHLEPFSLLCKSLLSNVSQWDTFKNSKAVYSLISTPFSSENASLEENTKPPEEKHTFCLLLRAINHTGTDLGPVGRGQWLTSTACDRHTDVCSFSFALNDGVPDVEHVQDIFYGHCVDKYHVKVLRPESLNNSVRKFITEKMGNKYLQRTGVNLKDAYKGSNARTPLILIQTHGSASIKDYIHIIQSLPDDDLPEVLGIHPEAIRSCWETQGEKFIENLIAMQPKTTTANLMIRPEQSKDELVMEILSDLLKRLPLTVEKEEIAVGTPSTLKSMMSSSIWESLSKNLKDHDPLIHCVLLTFLKQEIKRFDKLLFVIHKSLKDLQLAIKGEIILTQELEEIFNSFLNMRVPTLWQKHAYRSCKPLSSWIDDLIQRLNFFNTWAKVAYTAIQRRYMRFVTVWKQSIPSTSQKCKHPEDSENNFFEGFPSRYWLPAFFFPQAFLAAVLQDYGRSRGIAVDALTFTHHVISNTTDKDEKFSVFMPKKLNIVRRAFKGSASSHTGVYIFGLFIEGARWNREQKILEDSLPLEMCCDFPDIYFLPTKISTKTPNASNQTDSELYAFECPVYQTPERSRILATTGLPTNFLTSVYLSTKKPPSHWITMRVALLCEKNEK

SEQ ID NO: 4354 - protein, 1481 aa, Homo Sapiens
  misc_feature (1)..(1): Xaa can be any naturally occurring amino acid
XELFGNSSQVGINLPTGECSIFGYFVDIEQCEFIPWSDLVPNDQTLIQRGTSLLTNLQRSGGNFLKITECGECINYTATRDTTCLSFLMSLLLKNSCPVLLTGESGVGKTAAINQMLEKLEGPGAFDIKHGSILGDTLLYSEIKKSSSLKQNITILIPETHKTATGSSDNPTKKPEVRTNKKLLKNNDHKGVVVSTINFSTNVTAAKTKEMILKKLIRRTKDTLGAPKNNRILIFIDDMNMPVSDMYGAQPPLELIRQLLDLGGVYDTEKNTWKNIQDLSIVAACVPVVNDISPRLLKHFSMLVLPHPSQDILCTIFQLLLGLLQADRTVVNSKEMAALLFVHEATRVFHDRLIDFTDKSLFYRLLSRELENCFQIQWTQENLMNHSTVFLDFLDINKTHRKKIYQNTSDYNKLASVLDEFQMKLGSISLELSHSMVFFKEAIEHIIRATRVLRQPGSHMLLIGIDGCGKKTCATLACYLTDNKLYRVPISHKCAYIEFKEVFKKVFIHAGLKGKPTVLMVPNLNIEQDSFLEDLNYIISSGRIPDLFENVELDSIAMKIRYLTEQSGHMDNRQSLLSFFQKRIYKNLHIFVIMSPEGPSFRQNCRVYPSMISSCTIDWYERWPEEALLIVANSFLKEKVNFENRENLKEKLAPTCVQIHKSMKDLNRKYFEETGRFYYTTPNSYLQFMETFAHILRAREEEMQTKRDRFHMGLSTILEATTLVTEMQEELLILGPQVEQKTKETETLMEKLRKDSQVVEKVQMLVKQDEEIVAEEVRIVEDYAQKTANELKSVLPAFDKAIVALNALDKADVAELRVYTRPPFLVLTVMNAVCILLQKKPNWATAKLLLSETGFLKKLINLDKDSIPDKVFVKLKKIVTLPDFNPHKISLVSVACCSLCQWVIALNNYHEVQKVVGPKQIQVAEAQNVLKIARQRLAEKQRGLQLVEEHLLFLQAAYKDTVAEKQLLANRKTMASRRFQCASVLLTVLEDEKISRWHNQGLPHGQYSVENAILIKNGQQWPLLIDPHRQAHKWIRQMEGSRLQKLSIEDSNYTKKIENAMKTGGSVLLQNLLETLAPGLKAILKKDIYQKKGHYFIRVGDAEFEYNSNFRLYLSTEIDNPHFLPSVYNFVTMINFTVTFQGLQDQLLSTVVTHEVPHLEDQRSKLLESISLDAITLEELEEKTLNLLQKALGSILDDDKIVDTLRKSKMTSNEISKRIEATKKAESEIQAIRKNYLPIATRGALLYFLVADLTQINYMYQFSLDWFHQVFVSSVVSKSKEQEHSFKREKVSPKEVHEFISISKEPNLENEKNLLDKHIKSAIDMLTKSIFKVVSSALFNEDKLCFSFRLCTVIMQNNANGNLIQDDIGFLPEEEWNIFLYSGILINIKSALSQSRLTSTFEIGESQHLQWLSDSRWRQCQYVSTHLEPFSLLCKSLLSNVSQWDTFKNSKAVYSLISTPFSSENASLEENTKPPEESKSS

SEQ ID NO: 4355 - protein, 1477 aa, Homo Sapiens
  misc_feature (1)..(1): Xaa can be any naturally occurring amino acid
XELFGNSSQVGINLPTGECSIFGYFVDIEQCEFIPWSDLVPNDQTLIQRGTSLLTNLQRSGGNFLKITECGECINYTATRDTTCLSFLMSLLLKNSCPVLLTGESGVGKTAAINQMLEKLEGPGAFDIKHGSILGDTLLYSEIKKSSSLKQNITILIPETHKTATGSSDNPTKKPEVRTNKKLLKNNDHKGVVVSTINFSTNVTAAKTKEMILKKLIRRTKDTLGAPKNNRILIFIDDMNMPVSDMYGAQPPLELIRQLLDLGGVYDTEKNTWKNIQDLSIVAACVPVVNDISPRLLKHFSMLVLPHPSQDILCTIFQLLLGLLQADRTVVNSKEMAALLFVHEATRVFHDRLIDFTDKSLFYRLLSRELENCFQIQWTQENLMNHSTVFLDFLDINKTHRKKIYQNTSDYNKLASVLDEFQMKLGSISLELSHSMVFFKEAIEHIIRATRVLRQPGSHMLLIGIDGCGKKTCATLACYLTDNKLYRVPISHKCAYIEFKEVFKKVFIHAGLKGKPTVLMVPNLNIEQDSFLEDLNYIISSGRIPDLFENVELDSIAMKIRYLTEQSGHMDNRQSLLSFFQKRIYKNLHIFVIMSPEGPSFRQNCRVYPSMISSCTIDWYERWPEEALLIVANSFLKEKVNFENRENLKEKLAPTCVQIHKSMKDLNRKYFEETGRFYYTTPNSYLQFMETFAHILRAREEEMQTKRDRFHMGLSTILEATTLVTEMQEELLILGPQVEQKTKETETLMEKLRKDSQVVEKVQMLVKQDEEIVAEEVRIVEDYAQKTANELKSVLPAFDKAIVALNALDKADVAELRVYTRPPFLVLTVMNAVCILLQKKPNWATAKLLLSETGFLKKLINLDKDSIPDKVFVKLKKIVTLPDFNPHKISLVSVACCSLCQWVIALNNYHEVQKVVGPKQIQVAEAQNVLKIARQRLAEKQRGLQLVEEHLLFLQAAYKDTVAEKQLLANRKTMASRRFQCASVLLTVLEDEKISRWHNQGLPHGQYSVENAILIKNGQQWPLLIDPHRQAHKWIRQMEGSRLQKLSIEDSNYTKKIENAMKTGGSVLLQNLLETLAPGLKAILKKDIYQKKGHYFIRVGDAEFEYNSNFRLYLSTEIDNPHFLPSVYNFVTMINFTVTFQGLQDQLLSTVVTHEVPHLEDQRSKLLESISLDAITLEELEEKTLNLLQKALGSILDDDKIVDTLRKSKMTSNEISKRIEATKKAESEIQAIRKNYLPIATRGALLYFLVADLTQINYMYQFSLDWFHQVFVSSVVSKSKEQEHSFKREKVSPKEVHEFISISKEPNLENEKNLLDKHIKSAIDMLTKSIFKVVSSALFNEDKLCFSFRLCTVIMQNNANGNLIQDDIGFLPEEEWNIFLYSGILINIKSALSQSRLTSTFEIGESQHLQWLSDSRWRQCQYVSTHLEPFSLLCKSLLSNVSQWDTFKNSKAVYSLISTPFSSENASLEENTKPPEE

SEQ ID NO: 4356 - protein, 126 aa, Homo Sapiens
  misc_feature (1)..(1): Xaa can be any naturally occurring amino acid
XLEYKTVRTFSESLKSEKTEEPKDDDVIRNIIRLREKLGWQTILPQHSLKYGSSKIAIQKITLKKPLEDDGEFVYCLPRKSPKSLYNPYDLQVVSAHTAKHCKEFWVITASFISKRYLVICGAVYI

SEQ ID NO: 4357 - protein, 204 aa, Homo Sapiens
  misc_feature (1)..(1): Xaa can be any naturally occurring amino acid
XMLISAEGEGLVLPKKIRVRSAVEQWLVNVEKSMFDVLKKFLSQGIEDWNCQMFSQWVLSHPGQVVLTVSQIMFYNDCVKSFVSSYSREKLEKVHAGLMCHLEEVADLVVLDTSNSRTKAILGALLILYVHCRDIVINLLLKNIFNAEDFEWTRHLQYKWNEKQKLCYVSQGNASFTYGYEYLGCTSRLVITPLTDRCWLTLME

SEQ ID NO: 4358 - protein, 219 aa, Homo Sapiens
  misc_feature (1)..(1): Xaa can be any naturally occurring amino acid
XRFVTVWKQSIPSTSQKCKHPEDSENNFFEGFPSRYWLPAFFFPQAFLAAVLQDYGRSRGIAVDALTFTHHVISNTTDKDEKFSVFMPKKLNIVRRAFKGSASSHTGVYIFGLFIEGARWNREQKILEDSLPLEMCCDFPDIYFLPTKISTKTPNASNQTDSELYAFECPVYQTPERSRILATTGLPTNFLTSVYLSTKKPPSHWITMRVALLCEKNEK

SEQ ID NO: 4359 - protein, 300 aa, Homo Sapiens
  misc_feature (1)..(1): Xaa can be any naturally occurring amino acid
XTGVSHRADGERGTVGINLPTGECSIFGYFVDIEQCEFIPWSDLVPNDQTLIQRGTSLLTNLQRSGGNFLKITECGECINYTATRDTTCLSFLMSLLLKNSCPVLLTGESGVGKTAAINQMLEKLEGPGAFDIKHGSILGDTLLYSEIKKSSSLKQNITILIPETHKTATGSSDNPTKKPEVRTNKKLLKNNDHKGVVVSTINFSTNVTAAKTKEMILKKLIRRTKDTLGAPKNNRILIFIDDMNMPVSDMYGAQPPLELIRQLLDLGGVYDTEKNTWKNIQDLSIVAACVPVVNDISPR

SEQ ID NO: 4360 - protein, 358 aa, Homo Sapiens
MAPQNLSTFCLLLLYLIGAVIAGRDFYKILGVPRSASIKDIKKAYRKLALQLHPDRNPDDPQAQEKFQDLGAAYEVLSDSEKRKQYDTYGEEGLKDGHQSSHGDIFSHFFGDFGFMFGGTPRQQDRNIPRGSDIIVDLEVTLEEVYAGNFVEVVRNKPVARQAPGKRKCNCRQEMRTTQLGPGRFQMTQEVVCDECPNVKLVNEERTLEVEIEPGVRDGMEYPFIGEGEPHVDGEPGDLRFRIKVVKHPIFERRGDDLYTNVTISLVESLVGFEMDITHLDGHKVHISRDKITRPGAKLWKKGEGLPNFDNNNIKGSLIITFDVDFPKEQLTEEAREGIKQLLKQGSVQKVYNGLQGY

SEQ ID NO: 4361 - protein, 358 aa, Homo Sapiens; identical to SEQ ID NO: 4360

SEQ ID NO: 4362 - protein, 223 aa, Homo Sapiens
MATPQSIFIFAICILMITELILASKSYYDILGVPKSASERQIKKAFHKLAMKYHPDKNKSPDAEAKFREIAEAYETLSDANRRKEYDTLGHSAFTSGKGQRGSGSSFEQSFNFNFDDLFKDFGFFGQNQNTGSKKRFENHFQTRQDGGSSRQRHHFQEFSFGGGLFDDMFEDMEKMFSFSGFDSTNQHTVQTENRFHGSSKHCRTVTQRRGNMVTTYTDCSGQ

SEQ ID NO: 4363 - protein, 153 aa, Homo Sapiens
MGAPLLSPGWGAGAAGRRWWMLLAPLLPALLLVRPAGALVEGLYCGTRDCYEVLGVSRSAGKAEIARAYRQLARRYHPDRYRPQPGDEGPGRTPQSAEEAFLLVATAYETLKVSQAAAELQQYCMQNACKDALLVGVPAGSNPFREPRSCALL

SEQ ID NO: 4364 - protein, 504 aa, Homo Sapiens
MVAPGSVTSRLGSVFPFLLVLVDLQYEGAECGVNADVEKHLELGKKLLAAGQLADALSQFHAAVDGDPDNYIAYYRRATVFLAMGKSKAALPDLTKVIQLKMDFTAARLQRGHLLLKQGKLDEAEDDFKKVLKSNPSENEEKEAQSQLIKSDEMQRLRSQALNAFGSGDYTAAIAFLDKILEVCVWDAELRELRAECFIKEGEPRKAISDLKAASKLKNDNTEAFYKISTLYYQLGDHELSLSEVRECLKLDQDHKRCFAHYKQVKKLNKLIESAEELIRDGRYTDATSKYESVMKTEPSIAEYTVRSKERICHCFSKDEKPVEAIRVCSEVLQMEPDNVNALKDRAEAYLIEEMYDEAIQDYETAQEHNENDQQIREGLEKAQRLLKQSQKRDYYKILGVKRNAKKQEIIKAYRKLALQWHPDNFQNEEEKKKAEKKFIDIAAAKEVLSDPEMRKKFDDGEDPLDAESQQGGGGNPFHRSWNSWQGFNPFSSGGPFRFKFHFN

SEQ ID NO: 4365 - protein, 453 aa, Homo Sapiens
MVAPGSVTSRLGSVFPFLLVLVDLQYEGAECGVNADVEKHLELGKKLLAAGQLADALSQFHAAVDGDPDNYIAYYRRATVFLAMGKSKAALPDLTKVIQLKMDFTAARLQRGHLLLKQGKLDEAEDDFKKVVCVWDAELRELRAECFIKEGEPRKAISDLKAASKLKNDNTEAFYKISTLYYQLGDHELSLSEVRECLKLDQDHKRCFAHYKQVKKLNKLIESAEELIRDGRYTDATSKYESVMKTEPSIAEYTVRSKERICHCFSKDEKPVEAIRVCSEVLQMEPDNVNALKDRAEAYLIEEMYDEAIQDYETAQEHNENDQQIREGLEKAQRLLKQSQKRDYYKILGVKRNAKKQEIIKAYRKLALQWHPDNFQNEEEKKKAEKKFIDIAAAKEVLSDPEMRKKFDDGEDPLDAESQQGGGGNPFHRSWNSWQGFNPFSSGGPFRFKFHFN

SEQ ID NO: 4366 - protein, 60 aa, Homo Sapiens
MRGMKLLGALLALAALLQGAVSLKIAAFNIQTFGETKMSNATLVSYIVQGCTRHLSLRGQ

SEQ ID NO: 4367 - protein, 60 aa, Homo Sapiens; identical to SEQ ID NO: 4366

SEQ ID NO: 4368 - protein, 60 aa, Homo Sapiens; identical to SEQ ID NO: 4366

SEQ ID NO: 4369 - protein, 282 aa, Homo Sapiens [sequence omitted]

SEQ ID NO: 4370 - protein, 282 aa, Homo Sapiens [sequence omitted]

SEQ ID NO: 4371 - protein, 86 aa, Homo Sapiens
MRGMKLLGALLALAALLQGAVSLKIAAFNIQTFGETKMSNATLVSYIVQILSRYDIALVQEVRDSHLTAVGKLLDNLNQWVTVAGS

SEQ ID NO: 4372 - protein, 108 aa, Homo Sapiens
NREPAIVRFFSRFTEVREFAIVPLHAAPGDAVAEIDALYDVYLDVQEKWGLEDVMLMGDFNAGCSYVRPSQWSSIRLWTSPTFQWLIPDSADTTATPTHCAYDRLPMA

SEQ ID NO: 4373 - protein, 72 aa, Homo Sapiens
SIRLWTSPTFQWLIPDSADTTATPTHCAYDRIVVAGMLLRGAVVPDSALPFNFQAAYGLSDQLVCVLPCTAT

SEQ ID NO: 4374 - protein, 90 aa, Homo Sapiens
  misc_feature (1)..(1): Xaa can be any naturally occurring amino acid
XHYVVSEPLGRNSYKERYLFVYRPDQVSAVDSYYYDDGCEPCGNDTFNREPAIVRFFSRFTGSVPHTTWLSPQRSGSLPLFPCMRPRGTQ

SEQ ID NO: 4375 - protein, 75 aa, Homo Sapiens
  misc_feature (1)..(1): Xaa can be any naturally occurring amino acid
XRYLFVYRPDQVSAVDSYYYDDGCEPCGNDTFNREPAIVRFFSRFTGSVPHTTWLSPQRSGSLPLFPCMRPRGTQ

SEQ ID NO: 4376 - protein, 65 aa, Homo Sapiens
  misc_feature (1)..(1): Xaa can be any naturally occurring amino acid
XTFQWLIPDSADTTATPTHCAYDRIVVAGMLLRGAVVPDSALPFNFQAAYGLSDQLVCVLPCTAT

SEQ ID NO: 4377 - protein, 26 aa, Homo Sapiens
MHYPTALLFLILANGAQAFRICAFNA

SEQ ID NO: 4378 - protein, 85 aa, Homo Sapiens
MHYPTALLFLILANGAQAFRICAFNAQRLTLAKVAREQVMDTLVRALNISDHYPVEVELKLSQAHSVQPLSLTVLLLLSLLSPQL

SEQ ID NO: 4379 - protein, 62 aa, Homo Sapiens
MHYPTALLFLILANGAQAFRICAFNAQRLTLAKVAREQVMDTLVRDVILLGDFNADCASLTK

SEQ ID NO: 4380 - protein, 104 aa, Homo Sapiens
MHYPTALLFLILANGAQAFRICAFNAQRLTLAKVAREQVMDTLVRILARCDIMVLQEVVDSSGSAIPLLLRELNRFDGSGPYSTLSSPQLGRSTYMETYVYFYR

SEQ ID NO: 4381 - protein, 208 aa, Homo Sapiens
MHYPTALLFLILANGAQAFRICAFNAQRLTLAKVAREQVMDTLVRILARCDIMVLQEVVDSSGSAIPLLLRELNRFDGSGPYSTLSSPQLGRSTYMETYVYFYRSHKTQVLSSYVYNDEDDVFAREPFVAQFSLPSNVLPSLVLVPLHTTPKAVEKELNALYDVFLEVSQHWQSKDVILLGDFNADCASLTKKRLDKLELRTEPGFHW

SEQ ID NO: 4382 - protein, 302 aa, Homo Sapiens
MHYPTALLFLILANGAQAFRICAFNAQRLTLAKVAREQVMDTLVRILARCDIMVLQEVVDSSGSAIPLLLRELNRFDGSGPYSTLSSPQLGRSTYMETYVYFYRSHKTQVLSSYVYNDEDDVFAREPFVAQFSLPSNVLPSLVLVPLHTTPKAVEKELNALYDVFLEVSQHWQSKDVILLGDFNADCASLTKKRLDKLELRTEPGFHWVIADGEDTTVRASTHCTYDRVVLHGERCRSLLHTAAAFDFPTSFQLTEEEALNISDHYPVEVELKLSQAHSVQPLSLTVLLLLSLLSPQLCPAA

SEQ ID NO: 4383 - protein, 302 aa, Homo Sapiens; identical to SEQ ID NO: 4382

SEQ ID NO: 4384 - protein, 302 aa, Homo Sapiens; identical to SEQ ID NO: 4382

SEQ ID NO: 4385 - protein, 302 aa, Homo Sapiens; identical to SEQ ID NO: 4382

SEQ ID NO: 4386 - protein, 302 aa, Homo Sapiens; identical to SEQ ID NO: 4382

SEQ ID NO: 4387 - protein, 302 aa, Homo Sapiens; identical to SEQ ID NO: 4382

SEQ ID NO: 4388 - protein, 278 aa, Homo Sapiens
MGGPRALLAALWALEAAGTAALRIGAFNIQSFGDSKVSDPACGSIIAKILAGYDLALVQEVRDPDLSAVSALMEQINSVSEHEYSFVSSQPLGRDQYKEMYLFVYRKDAVSVVDTYLYPDPEDVFSREPFVVKFSAPGTAQNLVLIPLHAAPHQAVAEIDALYDVYLDVIDKWGTDDMLFLGDFNADCSYVRAQDWAAIRLRSSEVFKWLIPDSADTTVGNSDCAYDRIVACGARLRRSLKPQSATVHDFQEEFGLDQTQALAISDHFPVEVTLKFHR

SEQ ID NO: 4389 - protein, 278 aa, Homo Sapiens; identical to SEQ ID NO: 4388

SEQ ID NO: 4390 - protein, 299 aa, Homo Sapiens
MGGPRALLAALWALEAAGTAALRIGAFNIQSFGDSKVSDPACGSIIAKILAGYDLALVQEVRDPDLSAVSALMEQINSVSEHEYSFVSSQPLGRDQYKEMYLFVYRKDAVSVVDTYLYPDPEDVFSREPFVVKFSAPGTGERAPPLPSRRALTPPPLPAAAQNLVLIPLHAAPHQAVAEIDALYDVYLDVIDKWGTDDMLFLGDFNADCSYVRAQDWAAIRLRSSEVFKWLIPDSADTTVGNSDCAYDRIVACGARLRRSLKPQSATVHDFQEEFGLDQTQALAISDHFPVEVTLKFHR

SEQ ID NO: 4391 - protein, 299 aa, Homo Sapiens; identical to SEQ ID NO: 4390

SEQ ID NO: 4392 - protein, 299 aa, Homo Sapiens; identical to SEQ ID NO: 4390

SEQ ID NO: 4393 - protein, 254 aa, Homo Sapiens
PRALLAALWALEAAGTAALRIGAFNIQSFGDSKVSDPACGSIIAKILAGYDLALVQEVRDPDLSAVSALMEQINSVSEHEYSFVSSQPLGRDQYKEMYLFVYRKDAVSVVDTYLYPDPEDVFSREPFVVKFSAPGTGERAPPLPSRRALTPPPLPAAAQNLVLIPLHAAPHQAVAEIDALYDVYLDVIDKWGTDDWAAIRLRSSEVFKWLIPDSADTTVGNSDCAYDRIVACGARLRRSLKPQSATVHDFQEEF

SEQ ID NO: 4394 - protein, 137 aa, Homo Sapiens
ADVFSREPFVVWFQSPHTAVKDFVIIPLHTTPETSVKEIDELVEVYTDVKHRWKAENFIFMGDFNAGCSYVPKKAWKNIRLRTDPRFVWLIGDQEDTTVKKSTNCAYDRPWMSATTFQLNLNYSLQGPSPTAKNLSL

SEQ ID NO: 4395 - protein, 275 aa, Homo Sapiens
MSRELAPLLLLLLSIHSALAMRICSFNVRSFGESKQEDKNAMDVIVKVIKRCDIILVMEIKDSNNRICPILMEKLNREKLVSVKRSYHYHDYQDGDADVFSREPFVVWFQSPHTAVKDFVIIPLHTTPETSVKEIDELVEVYTDVKHRWKAENFIFMGDFNAGCSYVPKKAWKNIRLRTDPRFVWLIGDQEDTTVKKSTNCAYDRIVLRGQEIVSSVVPKSNSVFDFQKAYKLTEEEALDVSDHFPVEFKLQSSRAFTNSKKSVTLRKKTKSKRS

SEQ ID NO: 4396 - protein, 100 aa, Homo Sapiens
MSRELAPLLLLLLSIHSALAMRICSFNVRSFGESKQEDKNAMDVIVKVIKRCDIILVMEIKDSNNRICPILMEKLNRNSRRGITYNYVISSRLGRNTYKE

SEQ ID NO: 4397 - protein, 158 aa, Homo Sapiens
MSRELAPLLLLLLSIHSALAMRICSFNVRSFGESKQEDKNAMDVIVKVIKRCDIILVMEIKDSNNRICPILMEKLNRNSRRGITYNYVISSRLGRNTYKEQYAFLYKEKLVSVKRSYHYHDYQDGDADVFSREPFVVWFQSPHTAVKDFVIIPLHTTP

SEQ ID NO: 4398 - protein, 305 aa, Homo Sapiens
MSRELAPLLLLLLSIHSALAMRICSFNVRSFGESKQEDKNAMDVIVKVIKRCDIILVMEIKDSNNRICPILMEKLNRNSRRGITYNYVISSRLGRNTYKEQYAFLYKEKLVSVKRSYHYHDYQDGDADVFSREPFVVWFQSPHTAVKDFVIIPLHTTPETSVKEIDELVEVYTDVKHRWKAENFIFMGDFNAGCSYVPKKAWKNIRLRTDPRFVWLIGDQEDTTVKKSTNCAYDRIVLRGQEIVSSVVPKSNSVFDFQKAYKLTEEEALDVSDHFPVEFKLQSSRAFTNSKKSVTLRKKTKSKRS

SEQ ID NO: 4399 - protein, 288 aa, Homo Sapiens
MSRELAPLLLLLLSIHSALAMRICSFNVRSFGESKQEDKNAMDVIVKVIKRCDIILVMEIKDSNNRICPILMEKLNRNSRRGITYNYVISSRLGRNTYKEQYAFLYKEKLVSVKRSYHYHDYQDGDADVFSREPFVVWFQSPHTAVKDFVIIPLHTTPETSVKEIDELVEVYTDVKHRWKAENFIFMGDFNAGCSYVPKKAWKNIRLRTDPRFVWLIGDQEDTTVKKSTNCAYDRIVLRGQEIVSSVVPKSNSVFDFQKAYKLTEEEVRLPSCLSMPLSWKDELAWAT

SEQ ID NO: 4400 - protein, 218 aa, Homo Sapiens
MIPLLLAALLCVPAGALTCYGDSGQPVDWFVVYKLPALRGSGEAAQRGLQYKYLDESSGGWRDGRALINSPEGAVGRSLQPLYRSNTSQLAFLLYNDQPPQPSKAQDSSMRGHTKGKQLTYTYPWVYNYQLEGIFAQEFPDLENVVKGHHVSQEPWNSSITLTSQAGAVFQSFAKFSKFGDDLYSGWLAAALGTNLQVQFWHKTVGILPSNCSDIWQV

SEQ ID NO: 4401 - protein, 360 aa, Homo Sapiens
MIPLLLAALLCVPAGALTCYGDSGQPVDWFVVYKLPALRGSGEAAQRGLQYKYLDESSGGWRDGRALINSPEGAVGRSLQPLYRSNTSQLAFLLYNDQPPQPSKAQDSSMRGHTKGVLLLDHDGGFWLVHSVPNFPPPASSAAYSWPHSACTYGQTLLCVSFPFAQFSKMGKQLTYTYPWVYNYQLEGIFAQEFPDLENVVKGHHVSQEPWNSSITLTSQAGAVFQSFAKFSKFGDDLYSGWLAAALGTNLQVQFWHKTVGILPSNCSDIWQVLNVNQIAFPGPAGPSFNSTEDHSKWCVSPKGPWTCVGDMNRNQGEEQRGGGTLCAQLPALWKAFQPLVKNYQPCNGMARKPSRAYKI

SEQ ID NO: 4402 - protein, 361 aa, Homo Sapiens
MKQKMMARLLRTSFALLFLGLFGVLGAATISCRNEEGKAVDWFTFYKLPKRQNKESGETGLEYLYLDSTTRSWRKSEQLMNDTKSVLGRTLQQLYEAYASKSNNTAYLIYNDGVPKPVNYSRKYGHTKGLLLWNRVQGFWLIHSIPQFPPIPEEGYDYPPTGRRNGQSGICITFKYNQYEAIDSQLLVCNPNVYSCSIPATFHQELIHMPQLCTRASSSEIPGRLLTTLQSAQGQKFLHFAKSDSFLDDIFAAWMAQRLKTHLLTETWQRKRQELPSNCSLPYHVYNIKAIKLSRHSYFSSYQDHAKWCISQKGTKNRWTCIGDLNRSPHQAFRSGGFICTQNWQIYQAFQGLVLYYESCK

SEQ ID NO: 4403 - protein, 153 aa, Homo Sapiens
MPQLCTRASSSEIPGRLLTTLQSAQGQKFLHFAKSDSFLDDIFAAWMAQRLKTHLLTETWQRKRQELPSNCSLPYHVYNIKAIKLSRHSYFSSYQDHAKWCISQKGTKNRWTCIGDLNRSPHQAFRSGGFICTQNWQIYQAFQGLVLYYESCK

SEQ ID NO: 4404 - protein, 107 aa, Homo Sapiens
MWSGWWLWPLVAVCTADFFRDEAERIMRDSPVIDGHNDLPWQLLDMFNNRLQDERANLTTLAGTHTNIPKLRAGFVGGQFWSVYTPCDTQNKDAVRRTLEQMDVVHR

SEQ ID NO: 4405 - protein, 111 aa, Homo Sapiens
MWSGWWLWPLVAVCTADFFRDEAERIMRDSPVIDGHNDLPWQLLDMFNNRLQDERANLTTLAGTHTNIPKLRAGFVGGQFWSVYTPCDTQNKDAVRRTLEQMDVVHRMCRM

SEQ ID NO: 4406 - protein, 411 aa, Homo Sapiens
MWSGWWLWPLVAVCTADFFRDEAERIMRDSPVIDGHNDLPWQLLDMFNNRLQDERANLTTLAGTHTNIPKLRAGFVGGQFWSVYTPCDTQNKDAVRRTLEQMDVVHRMCRMYPETFLYVTSSAGIRQAFREGKVASLIGVEGGHSIDSSLGVLRALYQLGMRYLTLTHSCNTPWADNWLVDTGDSEPQSQGLSPFGQRVVKELNRLGVLIDLAHVSVATMKATLQLSRAPVIFSHSSAYSVCASRRNVPDDVLRLVKQTDSLVMVNFYNNYISCTNKANLSQVADHLDHIKEVAGARAVGFGGDFDGVPRVPEGLEDVSKYPDLIAELLRRNWTEAEVKGALADNLLRVFEAVEQASNLTQAPEEEPIPLDQLGGSCRTHYGYSSGASSLHRHWGLLLASLAPLVLCLSLL

SEQ ID NO: 4407 - protein, 411 aa, Homo Sapiens; identical to SEQ ID NO: 4406

SEQ ID NO: 4408 - protein, 411 aa, Homo Sapiens; identical to SEQ ID NO: 4406

SEQ ID NO: 4409 - protein, 161 aa, Homo Sapiens
MKLQTLAVSVTALKFWSAYVPCQTQDRDALRLTLEQIDLIRRMCASYSELELVTSAKALNDTQKLACLIGVEGGHSLDNSLSILRTFYMLGVRYLTLTHTCNTPWAESSAKGVHSFYNNISGLTDFGEKVVAEMNRLGMMVDLSHVSDAVARRALEVSQAP

SEQ ID NO: 4410 - protein, 123 aa, Homo Sapiens
MQMIIIWALLDTEAESSAKGVHSFYNNISGLTDFGEKVVAEMNRLGMMVDLSHVSDAVARRALEVSQAPVIFSHSAARGVCNSARNVPDDILQLLKKNGGVVMVSLSMGVIQCNPSANVSTVA

SEQ ID NO: 4411 - protein, 114 aa, Homo Sapiens
MQPSGLEGPGTFGRWPLLSLLLLLLLLQPVTCAYTTPGPPRALTTLGAPRAHTMPGTYAPSTTLSSPSTQGLQEQARALMRDFPLVDGHNDLPLVLRQVYQKGLQDVNLRNFSY

SEQ ID NO: 4412 - protein, 137 aa, Homo Sapiens
MQPSGLEGPGTFGRWPLLSLLLLLLLLQPVTCAYTTPGPPRALTTLGAPRAHTMPGTYAPSTTLSSPSTQGLQEQARALMRDFPLVDGHNDLPLVLRQVYQKGLQDVNLRNFSYGQTSLDRLRDGLVGAQFWSAYVP

SEQ ID NO: 4413 - protein, 486 aa, Homo Sapiens
MQPSGLEGPGTFGRWPLLSLLLLLLLLQPVTCAYTTPGPPRALTTLGAPRAHTMPGTYAPSTTLSSPSTQGLQEQARALMRDFPLVDGHNDLPLVLRQVYQKGLQDVNLRNFSYGQTSLDRLRDGLVGAQFWSAYVPCQTQDRDALRLTLEQIDLIRRMCASYSELELVTSAKALNDTQKLACLIGVEGGHSLDNSLSILRTFYMLGVRYLTLTHTCNTPWAESSAKGVHSFYNNISGLTDFGEKVVAEMNRLGMMVDLSHVSDAVARRALEVSQAPVIFSHSAARGVCNSARNVPDDILQLLKKNGGVVMVSLSMGVIQCNPSANVSTVADHFDHIKAVIGSKFIGIGGDYDGAGKFPQGLEDVSTYPVLIEELLSRGWSEEELQGVLRGNLLRVFRQVEKVQEENKWQSPLEDKFPDEQLSSSCHSDLSRLRQRQSLTSGQELTEIPIHWTAKLPAKWSVSESSPHMAPVLAVVATFPVLILWL

SEQ ID NO: 4414 - protein, 486 aa, Homo Sapiens; identical to SEQ ID NO: 4413

SEQ ID NO: 4415 - protein, 258 aa, Homo Sapiens
MQPSGLEGPGTFGRWPLLSLLLLLLLLQPVTCAYTTPGPPRALTTLGAPRAHTMPGTYAPSTTLSSPSTQGLQEQARALMRDFPLVDGHNDLPLVLRQVYQKGLQDVNLRNFSYGQTSLDRLRDGLVGAQFWSAYVPCQTQDRDALRLTLEQIDLIRRMCASYSELELVTSAKALNDTQKLACLIGVEGGHSLDNSLSILRTFYMLGVRYLTLTHTCNTPWAESSAKGVHSFYNNISGLTDFGEMLWHGGPWKCHRHL

SEQ ID NO: 4416 - protein, 513 aa, Homo Sapiens
MIRTPLSASAHRLLLPGSRGRPPRNMQPTGREGSRALSRRYLRRLLLLLLLLLLRQPVTRAETTPGAPRALSTLGSPSLFTTPGVPSALTTPGLTTPGTPKTLDLRGRAQALMRSFPLVDGHNDLPQVLRQRYKNVLQDVNLRNFSHGQTSLDRLRDGLVGAQFWSASVSCQSQDQTAVRLALEQIDLIHRMCASYSELELVTSAEGLNSSQKLACLIGVEGGHSLDSSLSVLRSFYVLGVRYLTLTFTCSTPWAESSTKFRHHMYTNVSGLTSFGEKVVEELNRLGMMIDLSYASDTLIRRVLEVSQAPVIFSHSAARAVCDNLLNVPDDILQLLKKNGGIVMVTLSMGVLQCNLLANVSTVADHFDHIRAVIGSEFIGIGGNYDGTGRFPQGLEDVSTYPVLIEELLSRSWSEEELQGVLRGNLLRVFRQVEKVREESRAQSPVEAEFPYGQLSTSCHSHLVPQNGHQATHLEVTKQPTNRVPWRSSNASPYLVPGLVAAATIPTFTQWLC

SEQ ID NO: 4417 - protein, 357 aa, Homo Sapiens
MATVIHNPLKALGDQFYKEAIEHCRSYNSRLCAERSVRLPFLDSQTGVAQNNCYIWMEKRHRGPGLAPGQLYTYPARCWRKKRRLHPPEDPKLRLLEIKPEVELPLKKDGFTSESTTLEALLRGEGVEKKVDAREEESIQEIQRVLENDENVEEGNEEEDLEEDIPKRKNRTRGRARGSAGGRRRHDAASQEDHDKPYVCDICGKRYKNRPGLSYHYAHTHLASEEGDEAQDQETRSPPNHRNENHRPQKGPDGTVIPNNYCDFCLGGSNMNKKSGRPEELVSCADCGRSAHLGGEGRKEKEAAAAARTTEDLFGSTSESDTSTFHGFDEDDLEEPRSCRGRRSGRGSPTADKKGSC

SEQ ID NO: 4418 - protein, 357 aa, Homo Sapiens; identical to SEQ ID NO: 4417

SEQ ID NO: 4419 - protein, 378 aa, Homo Sapiens
MATVIHNPLKALGDQFYKEAIEHCRSYNSRLCAERSVRLPFLDSQTGVAQNNCYIWMEKRHRGPGLAPGQLYTYPARCWRKKRRLHPPEDPKLRLLEIKPEVELPLKKDGFTSESTTLEALLRGEGVEKKVDAREEESIQEIQRVLENDENVEEGNEEEDLEEDIPKRKNRTRGRARGSAGGRRRHDAASQEDHDKPYVCDICGKRYKNRPGLSYHYAHTHLASEEGDEAQDQETRSPPNHRNENHRPQKGPDGTVIPNNYCDFCLGGSNMNKKSGRPEELVSCADCGRSGHPTCLQFTLNMTEAVKTYKWQCIECKSCILCGTSENDDQLLFCDDCDRGYHMYCLNPPVAEPPEGSWSCHLCWELLKEKASAFGCQA

SEQ ID NO: 4420 - protein, 412 aa, Homo Sapiens
MFYGRINGRNFAASSLPVAFAATPLMLFLPNPQLIFSFPISSRNHITGLMPPGKLKLENLFHMCTRLGDQFYKEAIEHCRSYNSRLCAERSVRLPFLDSQTGVAQNNCYIWMEKRHRGPGLAPGQLYTYPARCWRKKRRLHPPEDPKLRLLEIKPEVELPLKKDGFTSESTTLEALLRGEGVEKKVDAREEESIQEIQRVLENDENVEEGNEEEDLEEDIPKRKNRTRGRARGSAGGRRRHDAASQEDHDKPYVCDICGKRYKNRPGLSYHYAHTHLASEEGDEAQDQETRSPPNHRNENHRPQKGPDGTVIPNNYCDFCLGGSNMNKKSGRPEELVSCADCGRSAHLGGEGRKEKEAAAAARTTEDLFGSTSESDTSTFHGFDEDDLEEPRSCRGRRSGRGSPTADKKGSC

SEQ ID NO: 4421 - protein, 412 aa, Homo Sapiens; identical to SEQ ID NO: 4420

SEQ ID NO: 4422 - protein, 367 aa, Homo Sapiens
MGFTDLEEPISGCPGGPWALGLGDQFYKEAIEHCRSYNSRLCAERSVRLPFLDSQTGVAQNNCYIWMEKRHRGPGLAPGQLYTYPARCWRKKRRLHPPEDPKLRLLEIKPEVELPLKKDGFTSESTTLEALLRGEGVEKKVDAREEESIQEIQRVLENDENVEEGNEEEDLEEDIPKRKNRTRGRARGSAGGRRRHDAASQEDHDKPYVCDICGKRYKNRPGLSYHYAHTHLASEEGDEAQDQETRSPPNHRNENHRPQKGPDGTVIPNNYCDFCLGGSNMNKKSGRPEELVSCADCGRSAHLGGEGRKEKEAAAAARTTEDLFGSTSESDTSTFHGFDEDDLEEPRSCRGRRSGRGSPTADKKGSC

SEQ ID NO: 4423 - protein, 367 aa, Homo Sapiens; identical to SEQ ID NO: 4422

SEQ ID NO: 4424 - protein, 170 aa, Homo Sapiens
MKTPWKVLLGLLGAAALVTIITVPVVLLNKGNDATADSRKTYTLTDYLKNTYRLKLYSLRWISDHEYLYKQENNILVFNAEYGNSSVFLENSTFDEFGHSINDYSISPDGQFILLEYNYVKQWRHSYTASYDIYDLNKRQLITEERIPNNTQWVTWSPVGHKLVSICLEQ

SEQ ID NO: 4425 - protein, 766 aa, Homo Sapiens
MKTPWKVLLGLLGAAALVTIITVPVVLLNKGTDDATADSRKTYTLTDYLKNTYRLKLYSLRWISDHEYLYKQENNILVFNAEYGNSSVFLENSTFDEFGHSINDYSISPDGQFILLEYNYVKQWRHSYTASYDIYDLNKRQLITEERIPNNTQWVTWSPVGHKLAYVWNNDIYVKIEPNLPSYRITWTGKEDIIYNGITDWVYEEEVFSAYSALWWSPNGTFLAYAQFNDTEVPLIEYSFYSDESLQYPKTVRVPYPKAGAVNPTVKFFVVNTDSLSSVTNATSIQITAPASMLIGDHYLCDVTWATQERISLQWLRRIQNYSVMDICDYDESSGRWNCLVARQHIEMSTTGWVGRFRPSEPHFTLDGNSFYKIISNEEGYRHICYFQIDKKDCTFITKGTWEVIGIEALTSDYLYYISNEYKGMPGGRNLYKIQLSDYTKVTCLSCELNPERCQYYSVSFSKEAKYYQLRCSGPGLPLYTLHSSVNDKGLRVLEDNSALDKMLQNVQMPSKKLDFIILNETKFWYQMILPPHFDKSKKYPLLLDVYAGPCSQKADTVFRLNWATYLASTENIIVASFDGRGSGYQGDKIMHAINRRLGTFEVEDQIEAARQFSKMGFVDNKRIAIWGWSYGGYVTSMVLGSGSGVFKCGIAVAPVSRWEYYDSVYTERYMGLPTPEDNLDHYRNSTVMSRAENFKQVEYLLIHGTADDNVHFQQSAQISKALVDVGVDFQAMWYTDEDHGIASSTAHQHIYTHMSHFIKQCFSLP

SEQ ID NO: 4426 - protein, 118 aa, Homo Sapiens
MKTPWKVLLGLLGAAALVTIITVPVVLLNKGTDDATADSRKTYTLTDYLKNTYRLKLYSLRWISDHEYLYKQENNILVFNAEYGNSSVFLENSTFHMAKWIFLSFLKCSLPWLLFSLL

SEQ ID NO: 4427 - protein, 118 aa, Homo Sapiens; identical to SEQ ID NO: 4426

SEQ ID NO: 4428 - protein, 86 aa, Homo Sapiens
  misc_feature (1)..(1): Xaa can be any naturally occurring amino acid
XDATADSRKTYTLTDYLKNTYRLKLYSLRWISDHEYLYKQENNILVFNAEYGNSSVFLENSTFHMAKWIFLSFLKCSLPWLLFSLL

SEQ ID NO: 4429 - protein, 272 aa, Homo Sapiens
APWAPVLLLALGLRGLQAGARRAPDPGFQERFFQQRLDHFNFERFGNKTFPQRFLVSDRFWVRGEGPIFFYTGNEGDVWAFANNSAFVAELAAERGALLVFAEHRYYGKSLPFGAQSTQRGHTELLTVEQALADFAELLRALRRDLGAQDAPAIAFGGRKPSHLSSQPPAQLGCAATLAAFPSESCTRTWPRVGICGSQKCRPPCGTCGPLRRKRGNGVLGAAALTLCPSPSYGGMLSAYLRMKYPHLVAGALAASAPVLAVAGLGDSNQFF

SEQ ID NO: 4430 - protein, 492 aa, Homo Sapiens [sequence omitted]

SEQ ID NO: 4431 - protein, 61 aa, Homo Sapiens
  misc_feature (1)..(1): Xaa can be any naturally occurring amino acid
XSGSEHCYDIYRLYHSCADPTGCGTGPDARAWDYQISEPPATSSSPTGTWTPGQGAGFGGT

SEQ ID NO: 4432 - protein, 155 aa, Homo Sapiens
  misc_feature (1)..(1): Xaa can be any naturally occurring amino acid
XTFPQRFLVSDRFWVRGEGPIFFYTGNEGDVWAFANNSAFVAELAAERGALLVFAEHRYYGKSLPFGAQSTQRGHTELLTVEQALADFAELLRALRRDLGAQDAPAIAFGGSLRHGPLGVRHLPAAVRREGPDPALHVRPECLHRAGHDGLPLPH

SEQ ID NO: 4433 - protein, 244 aa, Homo Sapiens
  misc_feature (1)..(1): Xaa can be any naturally occurring amino acid
XTVRWEFGTCQPLSDEKDLTQLFMFARNAFTVLAMMDYPYPTDFLGPLPANPVKVGCDRLLSEAQRITGLRALAGALPPAPDGCADPTGCGTGPDARAWDYQACTEINLTFASNNVTDMFPDLPFTDELRQRYCLDTWGVWPRPDWLLTSFWGGDLRAASNIIFSNGNLDPWAGGGIRRNLSASVIAVTIQGGAHHLDLRASHPEDPASVVEARKLEATIIGEWVKAARREQQPALRGGPRLSL

SEQ ID NO: 4434 - protein, 120 aa, Homo Sapiens
  misc_feature (1)..(1): Xaa can be any naturally occurring amino acid
XVLLLALGLRGLQAGARRAPDPGFQERFFQQRLDHFNFERFGNKTFPQRFLVSGSGSGARGPSSSTLGTRATCGPSPTTRPSSRSWRPSGGLYWSSRSTATTGSRCRSVRSPRSAGTRSC

SEQ ID NO: 4435 - protein, 201 aa, Homo Sapiens
MDLSLLWVLLPLVTMAWGQYGDYGYPYQQYHDYSDDGWVNLNRQGFSYQCPQGQVIVAVRSIFSKKEGSDRQWNYACMPTPQSLGEPTECWWEEINRAGMEWYQTCSNNGLVAGFQSRYFESVLDREWQFYCCRYSKRCPYSCWLTTEYPGHYGEEMDMISYNYDYYIRGATTTFSAVERDRQWKFIMCRMTEYDCEFANV

SEQ ID NO: 4436 - protein, 349 aa, Homo Sapiens
MAGPAIHTAPMLFLVLLLPLELSLAGALAPGTPARNLPENHIDLPGPALWTPQASHHRRRGPGKKEWGPGLPSQAQDGAVVTATRQASRLPEAEGLLPEQSPAGLLQDKDLLLGLALPYPEKENRPPGWERTRKRSREHKRRRDRLRLHQGRALVRGPSSLMKKAELSEAQVLDAAMEESSTSLAPTMFFLTTFEAAPATEESLILPVTSLRPQQAQPRSDGEVMPTLDMALFDWTDYEDLKPDGWPSAKKKEKHRGKLSSDGNETSPAEGEPCDHHQDCLPGTCCDLREHLCTPHNRGLNNKCFDDCMCVEGLRCYAKFHRNRRVTRRKGRCVEPETANGDQGSFINV

SEQ ID NO: 4437 - protein, 136 aa, Homo Sapiens
MRTHTRGAPSVFFIYLLCFVSAYITDENPEVMIPFTNANYDSHPMLYFSRAEVAELQLRAASSHEHIAARLTEAVHTMLSSPLEYLPPWDPKDYSARWNEIFGNNLGALAMFCVLYPENIEARDMAKDYMERMAAQ

SEQ ID NO: 4438 - protein, 139 aa, Homo Sapiens
MRTHTRGAPSVFFIYLLCFVSAYITDENPEVMIPFTNANYDSHPMLYFSRAEVAELQLRAASSHEHIAARLTEAVHTMLSSPLEYLPPWDPKDYSARWNEIFGNNLGALAMFCVLYPENIEARDMAKDYMERMAAQPSW

SEQ ID NO: 4439 - protein, 144 aa, Homo Sapiens
MRTHTRGAPSVFFIYLLCFVSAYITDENPEVMIPFTNANYDSHPMLYFSRAEVAELQLRAASSHEHIAARLTEAVHTMLSSPLEYLPPWDPKDYSARWNEIFGNNLGALAMFCVLYPENIEARDMAKDYMERMAAQPSWLVKDA

SEQ ID NO: 4440 - protein, 228 aa, Homo Sapiens
MRTHTRGAPSVFFIYLLCFVSAYITDENPEVMIPFTNANYDSHPMLYFSRAEVAELQLRAASSHEHIAARLTEAVHTMLSSPLEYLPPWDPKDYSARWNEIFGNNLGALAMFCVLYPENIEARDMAKDYMERMAAQPSWLVKDAPWDEVPLAHSLVGFATAYDFLYNYLSKTQQEKFLEVIANASGYMYETSYRRGWGFQYLHNHQPTNCMALLTGSLVLMNQGMMAA

SEQ ID NO: 4441 - protein, 228 aa, Homo Sapiens; identical to SEQ ID NO: 4440

SEQ ID NO: 4442 - protein, 958 aa, Homo Sapiens [sequence omitted]

SEQ ID NO: 4443 - protein, 308 aa, Homo Sapiens
MRTHTRGAPSVFFIYLLCFVSAYITDENPEVMIPFTNANYDSHPMLYFSRAEVAELQLRAASSHEHIAARLTEAVHTMLSSPLEYLPPWDPKDYSARWNEIFGNNLGALAMFCVLYPENIEARDMAKDYMERMAAQPSWLVKDAPWDEVPLAHSLVGFATAYDFLYNYLSKTQQEKFLEVIANASGYMYETSYRRGWGFQYLHNHQPTNCMALLTGSLVLMNQGYLQEAYLWTKQVLTIMEKSLVLLREVTDGSLYEGVAYGSYTTRSLFQYMFLVQRHFNINHFGHPWLKQHFAFMYRTILPGMMAA

SEQ ID NO: 4444 - protein, 958 aa, Homo Sapiens [sequence omitted]

SEQ ID NO: 4445 - protein, 958 aa, Homo Sapiens [sequence omitted]

SEQ ID NO: 4446 - protein, 1118 aa, Homo Sapiens
MARSPGRAYALLLLLICFNVGSGLHLQVLSTRNENKLLPKHPHLVRQKRAWITAPVALREGEDLSKKNPIAKIHSDLAEERGLKITYKYTGKGITEPPFGIFVFNKDTGELNVTSILDREETPFFLLTGYALDARGNNVEKPLELRIKVLDINDNEPVFTQDVFVGSVEELSAAHTLVMKINATDADEPNTLNSKISYRIVSLEPAYPPVFYLNKDTGEIYTTSVTLDREEHSSYTLTVEARDGNGEVTDKPVKQAQVQIRILDVNDNIPVVENKVLEGMVEENQVNVEVTRIKVFDADEIGSDNWLANFTFASGNEGGYFHIETDAQTNEGIVTLIKEVDYEEMKNLDFSVIVANKAAFHKSIRSKYKPTPIPIKVKVKNVKEGIHFKSSVISIYVSESMDRSSKGQIIGNFQAFDEDTGLPAHARYVKLEDRDNWISVDSVTSEIKLAKLPDFESRYVQNGTYTVKIVAISEDYPRKTITGTVLINVEDINDNCPTLIEPVQTICHDAEYVNVTAEDLDGHPNSGPFSFSVIDKPPGMAEKWKIARQESTSVLLQQSEKKLGRSEIQFLISDNQGFSCPEKQVLTLTVCECLHGSGCREAQHDSYVGLGPAAIALMILAFLLLLLVPLLLLMCHCGKGAKGFTPIPGTIEMLHPWNNEGAPPEDKVVPSFLPVDQGGSLVGRNGVGGMAKEATMKGSSSASIVKGQHEMSEMDGRWEEHRSLLSGRATQFTGATGAIMTTETTKTARATGASRDMAGAQAAAVALNEEFLRNYFTDKAASYTEEDENHTAKDCLLVYSQEETESLNASIGCCSFIEGELDDRFLDDLGLKFKTLAEVCLGQKIDINKEIEQRQKPATETSMNTASHSLCEQTMVNSENTYSSGSSFPVPKSLQEANAEKVTQEIVTERSVSSRQAQKVATPLPDPMASRNVIATETSYVTGSTMPPTTVILGPSQPQSLIVTERVYAPASTLVDQPYANEGTVVVTERVIQPHGGGSNPLEGTQHLQDVPYVMVRERESFLAPSSGVQPTLAMPNIAVGQNVTVTERVLAPASTLQSSYQIPTENSMTARNTTVSGAGVPGPLPDFGLEESGHSNSTITTSSTRVTKHSTVQHSYS

SEQ ID NO: 4447 - protein, 232 aa, Homo Sapiens
MARSPGRAYALLLLLICFNVGSGLHLQVLSTRNENKLLPKHPHLVRQKRAWITAPVALREGEDLSKKNPIAKIHSDLAEERGLKITYKYTGKGITEPPFGIFVFNKDTGELNVTSILDREETPFFLLTGYALDARGNNVEKPLELRIKVLDINDNEPVFTQDVFVGSVEELSAAHTLVMKINATDADEPNTLNSKISYRIVSLEPAYPPVFYLNKDTGEIYTTSVTLDREVS

SEQ ID NO: 4448 - protein, 1301 aa, Homo Sapiens
MKIITYFCIWAVAWAIPVPQSKPLERHVEKSMNLHLLARSNVSVQDELNASGTIKESGVLVHEGDRGRQENTQDGHKGEGNGSKWAEVGGKSFSTYSTLANEEGNIEGWNGDTGKAETYGHDGIHGKEENITANGIQGQVSIIDNAGATNRSNTNGNTDKNTQNGDVGDAGHNEDVAVVQEDGPQVAGSNNSTDNEDEIIENSCRNEGNTSEITPQINSKRNGTKEAEVTPGTGEDAGLDNSDGSPSGNGADEDEDEGSGDDEDEEAGNGKDSSNNSKGQEGQDHGKEDDHDSSIGQNSDSKEYYDPEGKEDPHNEVDGDKTSKSEENSAGIPEDNGSQRIEDTQKLNHRESKRVENRITKESETHAVGKSQDKGIEIKGPSSGNRNITKEVGKGNEGKEDKGQHGMILGKGNVKTQGEVVNIEGPGQKSEPGNKVGHSNTGSDSNSDGYDSYDFDDKSMQGDDPNSSDESNGNDDANSESDNNSSSRGDASYNSDESKDNGNGSDSKGAEDDDSDSTSDTNNSDSNGNGNNGNDDNDKSDSGKGKSDSSDSDSSDSSNSSDSSDSSDSDSSDSNSSSDSDSSDSDSSDSSDSDSSDSSNSSDSSDSSDSSDSSDSSDSSDSKSDSSKSESDSSDSDSKSDSSDSNSSDSSDNSDSSDSSNSSNSSDSSDSSDSSDSSSSSDSSNSSDSSDSSDSSNSSESSDSSDSSDSDSSDSSDSSNSNSSDSDSSNSSDSSDSSNSSDSSDSSDSSNSSDSSDSSDSSNSSDSSDSSDSSDSSDSSNSSDSNDSSNSSDSSDSSNSSDSSNSSDSSDSSDSSDSDSSNSSDSSNSSDSSDSSNSSDSSDSSDSSDGSDSDSSNRSDSSNSSDSSDSSDSSNSSDSSDSSDSNESSNSSDSSDSSNSSDSDSSDSSNSSDSSDSSNSSDSSESSNSSDNSNSSDSSNSSDSSDSSDSSNSSDSSNSSDSSNSSDSSDSNSSDSSDSSNSSDSSDSSDSSDSSDSSDSSNSSDSSDSSDSSDSSNSSDSSNSSDSSNSSDSSDSSDSSDSSDSSDSSDSSDSSNSSDSSDSSDSSDSSDSSDSSDSSDSSESSDSSDSSNSSDSSDSSDSSDSSDSSDSSDSSDSSDSSNSSDSSDSSDSSDSSDSSNSSDSSDSSESSDSSDSSDSSDSSDSSDSSDSSDSSDSSNSSDSSDSSDSSDSSDSSDSSDSSDSSDSSDSSDSSDSSDSSDSSDSSDSSDSNESSDSSDSSDSSDSSNSSDSSDSSDSSDSTSDSNDESDSQSKSGNGNNNGSDSDSDSEGSDSNHSTSDD

SEQ ID NO: 4449 - protein, 1301 aa, Homo Sapiens; identical to SEQ ID NO: 4448

SEQ ID NO: 4450 - protein, 123 aa, Homo Sapiens
EMTRKQPDVDKVTKTYKRRAADPSSLQSHIPVLDKGRAGRKRFPASSLYPSGSQTQIETKNPRVNLLVSKWQQVWLLALERRRKLNDALDRLEEVWKFIPSTPHCHLPSFLITHCHCQNLGIF

SEQ ID NO: 4451 - protein, 7461 aa, Homo Sapiens
MAGYLSPAAYLYVEEQEYLQAYEDVLERYKDERDKVQKKTFTKWINQHLMKVRKHVNDLYEDLRDGHNLISLLEVLSGDTLPREKGRMRFHRLQNVQIALDYLKRRQVKLVNIRNDDITDGNPKLTLGLIWTIILHFQISDIHVTGESEDMSAKERLLLWTQQATEGYAGIRCENFTTCWRDGKLFNAIIHKYRPDLIDMNTVAVQSNLANLEHAFYVAEKIGVIRLLDPEDVDVSSPDEKSVITYVSSLYDAFPKVPEGGEGIGANDVEVKWIEYQNMVNYLIQWIRHHVTTMSERTFPNNPVELKALYNQYLQFKETEIPPKETEKSKIKRLYKLLEIWIEFGRIKLLQGYHPNDIEKEWGKLIIAMLEREKALRPEVERLEMLQQIANRVQRDSVICEDKLILAGNALQSDSKRLESGVQFQNEAEIAGYILECENLLRQHVIDVQILIDGKYYQADQLVQRVAKLRDEIMALRNECSSVYSKGRILTTEQTKLMISGITQSLNSGFAQTLHPSLTSGLTQSLTPSLTSSSMTSGLSSGMTSRLTPSVTPAYTPGFPSGLVPNFSSGVEPNSLQTLKLMQIRKPLLKSSLLDQNLTEEEINMKFVQDLLNWVDEMQVQLDRTEWGSDLPSVESHLENHKNVHRAIEEFESSLKEAKISEIQMTAPLKLTYAEKLHRLESQYAKLLNTSRNQERHLDTLHNFVSRATNELIWLNEKEEEEVAYDWSERNTNIARKKDYHAELMRELDQKEENIKSVQEIAEQLLLENHPARLTIEAYRAAMQTQWSWILQLCQCVEQHIKENTAYFEFFNDAKEATDYLRNLKDAIQRKYSCDRSSSIHKLEDLVQESMEEKEELLQYKSTIANLMGKAKTIIQLKPRNSDCPLKTSIPIKAICDYRQIEITIYKDDECVLANNSHRAKWKVISPTGNEAMVPSVCFTVPPPNKEAVDLANRIEQQYQNVLTLWHESHINMKSVVSWHYLINEIDRIRASNVASIKTMLPGEHQQVLSNLQSRFEDFLEDSQESQVFSGSDITQLEKEVNVCKQYYQELLKSAEREEQEESVYNLYISEVRNIRLRLENCEDRLIRQIRTPLERDDLHESVFRITEQEKLKKELERLKDDLGTITNKCEEFFSQAAASSSVPTLRSELNVVLQNMNQVYSMSSTYIDKLKTVNLVLKNTQAAEALVKLYETKLCEEEAVIADKNNIENLISTLKQWRSEVDEKRQVFHALEDELQKAKAISDEMFKTYKERDLDFDWHKEKADQLVERWQNVHVQIDNRLRDLEGIGKSLKYYRDTYHPLDDWIQQVETTQRKIQENQPENSKTLATQLNQQKMLVSEIEMKQSKMDECQKYAEQYSATVKDYELQTMTYRAMVDSQQKSPVKRRRMQSSADLIIQEFMDLRTRYTALVTLMTQYIKFAGDSLKRLEEEEKSLEEEKKEHVEKAKELQKWVSNISKTLKDAEKAGKPPFSKQKISSEEISTKKEQLSEALQTIQLFLAKHGDKMTDEERNELEKQVKTLQESYNLLFSESLKQLQESQTSGDVKVEEKLDKVIAGTIDQTTGEVLSVFQAVLRGLIDYDTGIRLLETQLMISGLISPELRKCFDLKDAKSHGLIDEQILCQLKELSKAKEIISAASPTTIPVLDALAQSMITESMAIKVLEILLSTGSLVIPATGEQLTLQKAFQQNLVSSALFSKVLERQNMCKDLIDPCTSEKVSLIDMVQRSTLQENTGMWLLPVRPQEGGRITLKCGRNISILRAAHEGLIDRETMFRLLSAQLLSGGLINSNSGQRMTVEEAVREGVIDRDTASSILTYQVQTGGIIQSNPAKRLTVDEAVQCDLITSSSALLVLEAQRGYVGLIWPHSGEIFPTSSSLQQELITNELAYKILNGRQKIAALYIPESSQVIGLDAAKQLGIIDNNTASILKNITLPDKMPDLGDLEACKNARRWLSFCKFQPSTVHDYRQEEDVFDGEEPVTTQTSEETKKLFLSYLMINSYMDANTGQRLLLYDGDLDEAVGMLLEGCHAEFDGNTAIKECLDVLSSSGVFLNNASGREKDECTATPSSFNKCHCGEPEHEETPENRKCAIDEEFNEMRNTVINSEFSQSGKLASTISIDPKVNSSPSVCVPSLISYLTQTELADISMLRSDSENILTNYENQSRVETNERANECSHSKNIQNFPSDLIENPIMKSKMSKFCGVNETENEDNTNRDSPIFDYSPRLSALLSHDKLMHSQGSFNDTHTPESNGNKCEAPALSFSDKTMLSGQRIGEKFQDQFLGIAAINISLPGEQYGQKSLNMISSNPQVQYHNDKYISNTSGEDEKTHPGFQQMPEDKEDESEIEEYSCAVTPGGDTDNAIVSLTCATPLLDETISASDYETSLLNDQQNNTGTDTDSDDDFYDTPLFEDDDHDSLLLDGDDRDCLHPEDYDTLQEENDETASPADVFYDVSKENENSMVPQGAPVGSLSVKNKAHCLQDFLMDVEKDELDSGEKIHLNPVGSDKVNGQSLETGSERECTNILEGDESDSLTDYDIVGGKESFTASLKFDDSGSWRGRKEEYVTGQEFHSDTDHLDSMQSEESYGDYIYDSNDQDDDDDDGIDEEGGGIRDENGKPRCQNVAEDMDIQLCASILNENSDENENINTMILLDKMHSCSSLEKQQRVNVVQLASPSENNLVTEKSNLPEYTTEIAGKSKENLLNHEMVLKDVLPPIIKDTESEKTFGPASISHDNNNISSTSELGTDLANTKVKLIQGSELPELTDSVKGKDEYFKNMTPKVDSSLDHIICTEPDLIGKPAEESHLSLIASVTDKDPQGNGSDLIKGRDGKSDILIEDETSIQKMYLGEGEVLVEGLVEEENRHLKLLPGKNTRDSFKLINSQFPFPQITNNEELNQKGSLKKATVTLKDEPNNLQIIVSKSPVQFENLEEIFDTSVSKEISDDITSDITSWEGNTHFEESFTDGPEKELDLFTYLKHCAKNIKAKDVAKPNEDVPSHVLITAPPMKEHLQLGVNNTKEKSTSTQKDSPLNDMIQSNDLCSKESISGGGTEISQFTPESIEATLSILSRKHVEDVGKNDFLQSERCANGLGNDNSSNTLNTDYSFLEINNKKERIEQQLPKEQALSPRSQEKEVQIPELSQVFVEDVKDILKSRLKEGHMNPQEVEEPSACADTKILIQNLIKRITTSQLVNEASTVPSDSQMSDSSGVSPMTNSSELKPESRDDPFCIGNLKSELLLNILKQDQHSQKITGVFELMRELTHMEYDLEKRGITSKVLPLQLENIFYKLLADGYSEKIEHVGDFNQKACSTSEMMEEKPHILGDIKSKEGNYYSPNLETVKEIGLESSTVWASTLPRDEKLKDLCNDFPSHLECTSGSKEMASGDSSTEQFSSELQQCLQHTEKMHEYLTLLQDMKPPLDNQESLDNNLEALKNQLRQLETFELGLAPIAVILRKDMKLAEEFLKSLPSDFPRGHVEELSISHQSLKTAFSSLSNVSSERTKQIMLAIDSEMSKLAVSHEEFLHKLKSFSDWVSEKSKSVKDIEIVNVQDSEYVKKRLEFLKNVLKDLGHTKMQLETTAFDVQFFISEYAQDLSPNQSKQLLRLLNTTQKCFLDVQESVTTQVERLETQLHLEQDLDDQKIVAERQQEYKEKLQGICDLLTQTENRLIGHQEAFMIGDGTVELKKYQSKQEELQKDMQGSAQALAEVVKNTENFLKENGEKLSQEDKALIEQKLNEAKIKCEQLNLKAEQSKKELDKVVTTAIKEETEKVAAVKQLEESKTKIENLLDWLSNVDKDSERAGTKHKQVIEQNGTHFQEGDGKSAIGEEDEVNGNLLETDVDGQVGTTQENLNQQYQKVKAQHEKIISQHQAVIIATQSAQVLLEKQGQYLSPEEKEKLQKNMKELKVHYETALAESEKKMKLTHSLQEELEKFDADYTEFEHWLQQSEQELENLEAGADDINGLMTKLKRQKSFSEDVISHKGDLRYITISGNRVLEAAKSCSKRDGGKVDTSATHREVQRKLDHATDRFRSLYSKCNVLGNNLKDLVDKYQHYEDASCGLLAGLQACEATASKHLSEPIAVDPKNLQRQLEETKALQGQISSQQVAVEKLKKTAEVLLDARGSLLPAKNDIQKTLDDIVGRYEDLSKSVNERNEKLQITLTRSLSVQDGLDEMLDWMGNVESSLKEQGQVPLNSTALQDIISKNIMLEQDIAGRQSSINAMNEKVKKFMETTDPSTASSLQAKMKDLSARFSEASHKHKETLAKMEELKTKVELFENLSEKLQTFLETKTQALTEVDVPGKDVTELSQYMQESTSEFLEHKKHLEVLHSLLKEISSHGLPSDKALVLEKTNNLSKKFKEMEDTIKEKKEAVTSCQEQLDAFQVLVKSLKSWIKETTKKVPIVQPSFGAEDLGKSLEDTKKLQEKWSLKTPEIQKVNNSGISLCNLISAVTTPAKAIAAVKSGGAVLNGEGTATNTEEFWANKGLTSIKKDMTDISHGYEDLGLLLKDKIAELNTKLSKLQKAQEESSAMMQWLQKMNKTATKWQQTPAPTDTEAVKTQVEQNKSFEAELKQNVNKVQELKDKLTELLEENPDTPEAPRWKQMLTEIDSKWQELNQLTIDRQQKLEESSNNLTQFQTVEAQLKQWLVEKELMVSVLGPLSIDPNMLNTQRQQVQILLQEFATRKPQYEQLTAAGQGILSRPGEDPSLRGIVKEQLAAVTQKWDSLTGQLSDRCDWIDQAIVKSTQYQSLLRSLSDKLSDLDNKLSSSLAVSTHPDAMNQQLETAQKMKQEIQQEKKQIKVAQALCEDLSALVKEEYLKAELSRQLEGILKSFKDVEQKAENHVQHLQSACASSHQFQQMSRDFQAWLDTKKEEQNKSHPISAKLDVLESLIKDHKDFSKTLTAQSHMYEKTIAEGENLLLKTQGSEKAALQLQLNTIKTNWDTFNKQVKERENKLKESLEKALKYKEQVETLWPWIDKCQNNLEEIKFCLDPAEGENSIAKLKSLQKEMDQHFGMVELLNNTANSLLSVCEIDKEVVTDENKSLIQKVDMVTEQLHSKKFCLENMTQKFKEFQEVSKESKRQLQCAKEQLDIHDSLGSQAYSNKYLTMLQTQQKSLQALKHQVDLAKRLAQDLVVEASDSKGTSDVLLQVETIAQEHSTLSQQVDEKCSFLETKLQGIGHFQNTIREMFSQFAEFDDELDSMAPVGRDAETLQKQKETIKAFLKKLEALMASNDNANKTCKMMLATEETSPDLVGIKRDLEALSKQCNKLLDRAQAREEQVEGTIKRLEEFYSKLKEFSILLQKAEEHEESQGPVGMETETINQQLNMFKVFQKEEIEPLQGKQQDVNWLGQGLIQSAAKSTSTQGLEHDLDDVNARWKTLNKKVAQRAAQLQEALLHCGRFQDALESLLSWMVDTEELVANQKPPSAEFKVVKAQIQEQKLLQRLLDDRKSTVEVIKREGEKIATTAEPADKVKILKQLSLLDSRWEALLNKAETRNRQLEGISVVAQQFHETLEPLNEWLTTIEKRLVNCEPIGTQASKLEEQIAQHKVLQEDILLRKQNVDQALLNGLELLKQTTGDEVLIIQDKLEAIKARYKDITKLSTDVAKTLEQALQLARRLHSTHEELCTWLDKVEVELLSYETQVLKGEEASQAQMRPKELKKEAKNNKALLDSLNEVSSALLELVPWRAREGLEKMVAEDNERYRLVSDTITQKVEEIDAAILRSQQFDQAADAELSWITETEKKLMSLGDIRLEQDQTSAQLQVQKTFTMEILRHKDIIDDLVKSGHKIMTACSEEEKQSMKKKLDKVLKNYDTICQINSERYLQLERAQSLVNQFWETYEELWPWLTETQSIISQLPAPALEYETLRQQQEEHRQLRELIAEHKPHIDKMNKTGPQLLELSPGEGFSIQEKYVAADTLYSQIKEDVKKRAVALDEAISQSTQFHDKIDQILESLERIVERLRQPPSISAEVEKIKEQISENKNVSVDMEKLQPLYETLKQRGEEMIARSGGTDKDISAKAVQDKLDQMVFIWENIHTLVEEREAKLLDVMELAEKFWCDHMSLIVTIKDTQDFIRDLEDPGIDPSVVKQQQEAAETIREEIDGLQEELDIVINLGSELIAACGEPDKPIVKKSIDELNSAWDSLNKAWKDRIDKLEEAMQAAVQYQDGLQAVFDWVDIAGGKLASMSPIGTDLETVKQQIEELKQFKSEAYQQQIEMERLNHQAELLLKKVTEESDKHTVQDPLMELKLIWDSLEERIINRQHKLEGALLALGQFQHALDELLAWLTHTEGLLSEQKPVGGDPKAIEIELAKHHVLQNDVLAHQSTVEAVNKAGNDLIESSAGEEASNLQNKLEVLNQRWQNVLEKTEQRKQQLDGALRQAKGFHGEIEDLQQWLTDTERHLLASKPLGGLPETAKEQLNVHMEVCAAFEAKEETYKSLMQKGQQMLARCPKSAETNIDQDINNLKEKWESVETKLNERKTKLEEALNLAMEFHNSLQDFINWLTQAEQTLNVASRPSLILDTVLFQIDEHKVFANEVNSHREQIIELDKTGTHLKYFSQKQDVVLIKNLLISVQSRWEKVVQRLVERGRSLDDARKRAKQFHEAWSKLMEWLEESEKSLDSELEIANDPDKIKTQLAQHKEFQKSLGAKHSVYDTTNRTGRSLKEKTSLADDNLKLDDMLSELRDKWDTICGKSVERQNKLEEALLFSGQFTDALQALIDWLYRVEPQLAEDQPVHGDIDLVMNLIDNHKAFQKELGKRTSSVQALKRSARELIEGSRDDSSWVKVQMQELSTRWETVCALSISKQTRLEAALRQAEEFHSVVHALLEWLAEAEQTLRFHGVLPDDEDALRTLIDQHKEFMKKLEEKRAELNKATTMGDTVLAICHPDSITTIKHWITIIRARFEEVLAWAKQHQQRLASALAGLIAKQELLEALLAWLQWAETTLTDKDKEVIPQEIEEVKALIAEHQTFMEEMTRKQPDVDKVTKTYKRRAADPSSLQSHIPVLDKGRAGRKRFPASSLYPSGSQTQIETKNPRVNLLVSKWQQVWLLALERRRKLNDALDRLEELREFANFDFDIWRKKYMRWMNHKKSRVMDFFRRIDKDQDGKITRQEFIDGILSSKFPTSRLEMSAVADIFDRDGDGYIDYYEFVAALHPNKDAYKPITDADKIEDEVTRQVAKCKCAKRFQVEQIGDNKYRFFLGNQFGDSQQLRLVRILRSTVMVRVGGGWMALDEFLVKNDPCRVHHHGSKMLRSESNSSITTTQPTIAKGRTNMELREKFILADGASQGMAAFRPRGRRSRPSSRGASPNRSTSVSSQAAQAASPQVPATTTPKGTPIQGSKLRLPGYLSGKGFHSGEDSGLITTAAARVRTQFADSKKTPSRPGSRAGSKAGSRASSRRGSDASDFDISEIQSVCSDVETVPQTHRPTPRAGSRPSTAKPSKIPTPQRKSPASKLDKSSKR

SEQ ID NO: 4452 - protein, 5375 aa, Homo Sapiens
MAGYLSPAAYLYVEEQEYLQAYEDVLERYKDERDKVQKKTFTKWINQHLMKVRKHVNDLYEDLRDGHNLISLLEVLSGDTLPREKGRMRFHRLQNVQIALDYLKRRQVKLVNIRNDDITDGNPKLTLGLIWTIILHFQISDIHVTGESEDMSAKERLLLWTQQATEGYAGIRCENFTTCWRDGKLFNAIIHKYRPDLIDMNTVAVQSNLANLEHAFYVAEKIGVIRLLDPEDVDVSSPDEKSVITYVSSLYDAFPKVPEGGEGIGANDVEVKWIEYQNMVNYLIQWIRHHVTTMSERTFPNNPVELKALYNQYLQFKETEIPPKETEKSKIKRLYKLLEIWIEFGRIKLLQGYHPNDIEKEWGKLIIAMLEREKALRPEVERLEMLQQIANRVQRDSVICEDKLILAGNALQSDSKRLESGVQFQNEAEIAGYILECENLLRQHVIDVQILIDGKYYQADQLVQRVAKLRDEIMALRNECSSVYSKGRILTTEQTKLMISGITQSLNSGFAQTLHPSLTSGLTQSLTPSLTSSSMTSGLSSGMTSRLTPSVTPAYTPGFPSGLVPNFSSGVEPNSLQTLKLMQIRKPLLKSSLLDQNLTEEEINMKFVQDLLNWVDEMQVQLDRTEWGSDLPSVESHLENHKNVHRAIEEFESSLKEAKISEIQMTAPLKLTYAEKLHRLESQYAKLLNTSRNQERHLDTLHNFVSRATNELIWLNEKEEEEVAYDWSERNTNIARKKDYHAELMRELDQKEENIKSVQEIAEQLLLENHPARLTIEAYRAAMQTQWSWILQLCQCVEQHIKENTAYFEFFNDAKEATDYLRNLKDAIQRKYSCDRSSSIHKLEDLVQESMEEKEELLQYKSTIANLMGKAKTIIQLKPRNSDCPLKTSIPIKAICDYRQIEITIYKDDECVLANNSHRAKWKVISPTGNEAMVPSVCFTVPPPNKEAVDLANRIEQQYQNVLTLWHESHINMKSVVSWHYLINEIDRIRASNVASIKTMLPGEHQQVLSNLQSRFEDFLEDSQESQVFSGSDITQLEKEVNVCKQYYQELLKSAEREEQEESVYNLYISEVRNIRLRLENCEDRLIRQIRTPLERDDLHESVFRITEQEKLKKELERLKDDLGTITNKCEEFFSQAAASSSVPTLRSELNVVLQNMNQVYSMSSTYIDKLKTVNLVLKNTQAAEALVKLYETKLCEEEAVIADKNNIENLISTLKQWRSEVDEKRQVFHALEDELQKAKAISDEMFKTYKERDLDFDWHKEKADQLVERWQNVHVQIDNRLRDLEGIGKSLKYYRDTYHPLDDWIQQVETTQRKIQENQPENSKTLATQLNQQKMLVSEIEMKQSKMDECQKYAEQYSATVKDYELQTMTYRAMVDSQQKSPVKRRRMQSSADLIIQEFMDLRTRYTALVTLMTQYIKFAGDSLKRLEEEEKSLEEEKKEHVEKAKELQKWVSNISKTLKDAEKAGKPPFSKQKISSEEISTKKEQLSEALQTIQLFLAKHGDKMTDEERNELEKQVKTLQESYNLLFSESLKQLQESQTSGDVKVEEKIVAERQQEYKEKLQGICDLLTQTENRLIGHQEAFMIGDGTVELKKYQSKQEELQKDMQGSAQALAEVVKNTENFLKENGEKLSQEDKALIEQKLNEAKIKCEQLNLKAEQSKKELDKVVTTAIKEETEKVAAVKQLEESKTKIENLLDWLSNVDKDSERAGTKHKQVIEQNGTHFQEGDGKSAIGEEDEVNGNLLETDVDGQVGTTQENLNQQYQKVKAQHEKIISQHQAVIIATQSAQVLLEKQGQYLSPEEKEKLQKNMKELKVHYETALAESEKKMKLTHSLQEELEKFDADYTEFEHWLQQSEQELENLEAGADDINGLMTKLKRQKSFSEDVISHKGDLRYITISGNRVLEAAKSCSKRDGGKVDTSATHREVQRKLDHATDRFRSLYSKCNVLGNNLKDLVDKYQHYEDASCGLLAGLQACEATASKHLSEPIAVDPKNLQRQLEETKALQGQISSQQVAVEKLKKTAEVLLDARGSLLPAKNDIQKTLDDIVGRYEDLSKSVNERNEKLQITLTRSLSVQDGLDEMLDWMGNVESSLKEQGQVPLNSTALQDIISKNIMLEQDIAGRQSSINAMNEKVKKFMETTDPSTASSLQAKMKDLSARFSEASHKHKETLAKMEELKTKVELFENLSEKLQTFLETKTQALTEVDVPGKDVTELSQYMQESTSEFLEHKKHLEVLHSLLKEISSHGLPSDKALVLEKTNNLSKKFKEMEDTIKEKKEAVTSCQEQLDAFQVLVKSLKSWIKETTKKVPIVQPSFGAEDLGKSLEDTKKLQEKWSLKTPEIQKVNNSGISLCNLISAVTTPAKAIAAVKSGGAVLNGEGTATNTEEFWANKGLTSIKKDMTDISHGYEDLGLLLKDKIAELNTKLSKLQKAQEESSAMMQWLQKMNKTATKWQQTPAPTDTEAVKTQVEQNKSFEAELKQNVNKVQELKDKLTELLEENPDTPEAPRWKQMLTEIDSKWQELNQLTIDRQQKLEESSNNLTQFQTVEAQLKQWLVEKELMVSVLGPLSIDPNMLNTQRQQVQILLQEFATRKPQYEQLTAAGQGILSRPGEDPSLRGIVKEQLAAVTQKWDSLTGQLSDRCDWIDQAIVKSTQYQSLLRSLSDKLSDLDNKLSSSLAVSTHPDAMNQQLETAQKMKQEIQQEKKQIKVAQALCEDLSALVKEEYLKAELSRQLEGILKSFKDVEQKAENHVQHLQSACASSHQFQQMSRDFQAWLDTKKEEQNKSHPISAKLDVLESLIKDHKDFSKTLTAQSHMYEKTIAEGENLLLKTQGSEKAALQLQLNTIKTNWDTFNKQVKERENKLKESLEKALKYKEQVETLWPWIDKCQNNLEEIKFCLDPAEGENSIAKLKSLQKEMDQHFGMVELLNNTANSLLSVCEIDKEVVTDENKSLIQKVDMVTEQLHSKKFCLENMTQKFKEFQEVSKESKRQLQCAKEQLDIHDSLGSQAYSNKYLTMLQTQQKSLQALKHQVDLAKRLAQDLVVEASDSKGTSDVLLQVETIAQEHSTLSQQVDEKCSFLETKLQGIGHFQNTIREMFSQFAEFDDELDSMAPVGRDAETLQKQKETIKAFLKKLEALMASNDNANKTCKMMLATEETSPDLVGIKRDLEALSKQCNKLLDRAQAREEQVEGTIKRLEEFYSKLKEFSILLQKAEEHEESQGPVGMETETINQQLNMFKVFQKEEIEPLQGKQQDVNWLGQGLIQSAAKSTSTQGLEHDLDDVNARWKTLNKKVAQRAAQLQEALLHCGRFQDALESLLSWMVDTEELVANQKPPSAEFKVVKAQIQEQKLLQRLLDDRKSTVEVIKREGEKIATTAEPADKVKILKQLSLLDSRWEALLNKAETRNRQLEGISVVAQQFHETLEPLNEWLTTIEKRLVNCEPIGTQASKLEEQIAQHKVLQEDILLRKQNVDQALLNGLELLKQTTGDEVLIIQDKLEAIKARYKDITKLSTDVAKTLEQALQLARRLHSTHEELCTWLDKVEVELLSYETQVLKGEEASQAQMRPKELKKEAKNNKALLDSLNEVSSALLELVPWRAREGLEKMVAEDNERYRLVSDTITQKVEEIDAAILRSQQFDQAADAELSWITETEKKLMSLGDIRLEQDQTSAQLQVQKTFTMEILRHKDIIDDLVKSGHKIMTACSEEEKQSMKKKLDKVLKNYDTICQINSERYLQLERAQSLVNQFWETYEELWPWLTETQSIISQLPAPALEYETLRQQQEEHRQLRELIAEHKPHIDKMNKTGPQLLELSPGEGFSIQEKYVAADTLYSQIKEDVKKRAVALDEAISQSTQFHDKIDQILESLERIVERLRQPPSISAEVEKIKEQISENKNVSVDMEKLQPLYETLKQRGEEMIARSGGTDKDISAKAVQDKLDQMVFIWENIHTLVEEREAKLLDVMELAEKFWCDHMSLIVTIKDTQDFIRDLEDPGIDPSVVKQQQEAAETIREEIDGLQEELDIVINLGSELIAACGEPDKPIVKKSIDELNSAWDSLNKAWKDRIDKLEEAMQAAVQYQDGLQAVFDWVDIAGGKLASMSPIGTDLETVKQQIEELKQFKSEAYQQQIEMERLNHQAELLLKKVTEESDKHTVQDPLMELKLIWDSLEERIINRQHKLEGALLALGQFQHALDELLAWLTHTEGLLSEQKPVGGDPKAIEIELAKHHVLQNDVLAHQSTVEAVNKAGNDLIESSAGEEASNLQNKLEVLNQRWQNVLEKTEQRKQQLDGALRQAKGFHGEIEDLQQWLTDTERHLLASKPLGGLPETAKEQLNVHMEVCAAFEAKEETYKSLMQKGQQMLARCPKSAETNIDQDINNLKEKWESVETKLNERKTKLEEALNLAMEFHNSLQDFINWLTQAEQTLNVASRPSLILDTVLFQIDEHKVFANEVNSHREQIIELDKTGTHLKYFSQKQDVVLIKNLLISVQSRWEKVVQRLVERGRSLDDARKRAKQFHEAWSKLMEWLEESEKSLDSELEIANDPDKIKTQLAQHKEFQKSLGAKHSVYDTTNRTGRSLKEKTSLADDNLKLDDMLSELRDKWDTICGKSVERQNKLEEALLFSGQFTDALQALIDWLYRVEPQLAEDQPVHGDIDLVMNLIDNHKAFQKELGKRTSSVQALKRSARELIEGSRDDSSWVKVQMQELSTRWETVCALSISKQTRLEAALRQAEEFHSVVHALLEWLAEAEQTLRFHGVLPDDEDALRTLIDQHKEFMKKLEEKRAELNKATTMGDTVLAICHPDSITTIKHWITIIRARFEEVLAWAKQHQQRLASALAGLIAKQELLEALLAWLQWAETTLTDKDKEVIPQEIEEVKALIAEHQTFMEEMTRKQPDVDKVTKTYKRRAADPSSLQSHIPVLDKGRAGRKRFPASSLYPSGSQTQIETKNPRVNLLVSKWQQVWLLALERRRKLNDALDRLEELREFANFDFDIWRKKYMRWMNHKKSRVMDFFRRIDKDQDGKITRQEFIDGILSSKFPTSRLEMSAVADIFDRDGDGYIDYYEFVAALHPNKDAYKPITDADKIEDEVTRQVAKCKCAKRFQVEQIGDNKYRFFLGNQFGDSQQLRLVRILRSTVMVRVGGGWMALDEFLVKNDPCRVHHHGSKMLRSESNSSITTTQPTIAKGRTNMELREKFILADGASQGMAAFRPRGRRSRPSSRGASPNRSTSVSSQAAQAASPQVPATTTPKGTPIQGSKLRLPGYLSGKGFHSGEDSGLITTAAARVRTQFADSKKTPSRPGSRAGSKAGSRASSRRGSDASDFDISEIQSVCSDVETVPQTHRPTPRAGSRPSTAKPSKIPTPQRKSPASKLDKSSKR

SEQ ID NO: 4453 - protein, 5497 aa, Homo Sapiens
MAGYLSPAAYLYVEEQEYLQAYEDVLERYKDERDKVQKKTFTKWINQHLMKVRKHVNDLYEDLRDGHNLISLLEVLSGDTLPREKGRMRFHRLQNVQIALDYLKRRQVKLVNIRNDDITDGNPKLTLGLIWTIILHFQISDIHVTGESEDMSAKERLLLWTQQATEGYAGIRCENFTTCWRDGKLFNAIIHKYRPDLIDMNTVAVQSNLANLEHAFYVAEKIGVIRLLDPEDVDVSSPDEKSVITYVSSLYDAFPKVPEGGEGIGANDVEVKWIEYQNMVNYLIQWIRHHVTTMSERTFPNNPVELKALYNQYLQFKETEIPPKETEKSKIKRLYKLLEIWIEFGRIKLLQGYHPNDIEKEWGKLIIAMLEREKALRPEVERLEMLQQIANRVQRDSVICEDKLILAGNALQSDSKRLESGVQFQNEAEIAGYILECENLLRQHVIDVQILIDGKYYQADQLVQRVAKLRDEIMALRNECSSVYSKGRILTTEQTKLMISGITQSLNSGFAQTLHPSLTSGLTQSLTPSLTSSSMTSGLSSGMTSRLTPSVTPAYTPGFPSGLVPNFSSGVEPNSLQTLKLMQIRKPLLKSSLLDQNLTEEEINMKFVQDLLNWVDEMQVQLDRTEWGSDLPSVESHLENHKNVHRAIEEFESSLKEAKISEIQMTAPLKLTYAEKLHRLESQYAKLLNTSRNQERHLDTLHNFVSRATNELIWLNEKEEEEVAYDWSERNTNIARKKDYHAELMRELDQKEENIKSVQEIAEQLLLENHPARLTIEAYRAAMQTQWSWILQLCQCVEQHIKENTAYFEFFNDAKEATDYLRNLKDAIQRKYSCDRSSSIHKLEDLVQESMEEKEELLQYKSTIANLMGKAKTIIQLKPRNSDCPLKTSIPIKAICDYRQIEITIYKDDECVLANNSHRAKWKVISPTGNEAMVPSVCFTVPPPNKEAVDLANRIEQQYQNVLTLWHESHINMKSVVSWHYLINEIDRIRASNVASIKTMLPGEHQQVLSNLQSRFEDFLEDSQESQVFSGSDITQLEKEVNVCKQYYQELLKSAEREEQEESVYNLYISEVRNIRLRLENCEDRLIRQIRTPLERDDLHESVFRITEQEKLKKELERLKDDLGTITNKCEEFFSQAAASSSVPTLRSELNVVLQNMNQVYSMSSTYIDKLKTVNLVLKNTQAAEALVKLYETKLCEEEAVIADKNNIENLISTLKQWRSEVDEKRQVFHALEDELQKAKAISDEMFKTYKERDLDFDWHKEKADQLVERWQNVHVQIDNRLRDLEGIGKSLKYYRDTYHPLDDWIQQVETTQRKIQENQPENSKTLATQLNQQKMLVSEIEMKQSKMDECQKYAEQYSATVKDYELQTMTYRAMVDSQQKSPVKRRRMQSSADLIIQEFMDLRTRYTALVTLMTQYIKFAGDSLKRLEEEEKSLEEEKKEHVEKAKELQKWVSNISKTLKDAEKAGKPPFSKQKISSEEISTKKEQLSEALQTIQLFLAKHGDKMTDEERNELEKQVKTLQESYNLLFSESLKQLQESQTSGDVKVEEKIVAERQQEYKEKLQGICDLLTQTENRLIGHQEAFMIGDGTVELKKYQSKQEELQKDMQGSAQALAEVVKNTENFLKENGEKLSQEDKALIEQKLNEAKIKCEQLNLKAEQSKKELDKVVTTAIKEETEKVAAVKQLEESKTKIENLLDWLSNVDKDSERAGTKHKQVIEQNGTHFQEGDGKSAIGEEDEVNGNLLETDVDGQVGTTQENLNQQYQKVKAQHEKIISQHQAVIIATQSAQVLLEKQGQYLSPEEKEKLQKNMKELKVHYETALAESEKKMKLTHSLQEELEKFDADYTEFEHWLQQSEQELENLEAGADDINGLMTKLKRQKSFSEDVISHKGDLRYITISGNRVLEAAKSCSKRDGGKVDTSATHREVQRKLDHATDRFRSLYSKCNVLGNNLKDLVDKYQHYEDASCGLLAGLQACEATASKHLSEPIAVDPKNLQRQLEETKALQGQISSQQVAVEKLKKTAEVLLDARGSLLPAKNDIQKTLDDIVGRYEDLSKSVNERNEKLQITLTRSLSVQDGLDEMLDWMGNVESSLKEQGQVPLNSTALQDIISKNIMLEQDIAGRQSSINAMNEKVKKFMETTDPSTASSLQAKMKDLSARFSEASHKHKETLAKMEELKTKVELFENLSEKLQTFLETKTQALTEVDVPGKDVTELSQYMQESTSEFLEHKKHLEVLHSLLKEISSHGLPSDKALVLEKTNNLSKKFKEMEDTIKEKKEAVTSCQEQLDAFQVLVKSLKSWIKETTKKVPIVQPSFGAEDLGKSLEDTKKLQEKWSLKTPEIQKVNNSGISLCNLISAVTTPAKAIAAVKSGGAVLNGEGTATNTEEFWANKGLTSIKKDMTDISHGYEDLGLLLKDKIAELNTKLSKLQKAQEESSAMMQWLQKMNKTATKWQQTPAPTDTEAVKTQVEQNKSFEAELKQNVNKVQELKDKLTELLEENPDTPEAPRWKQMLTEIDSKWQELNQLTIDRQQKLEESSNNLTQFQTVEAQLKQWLVEKELMVSVLGPLSIDPNMLNTQRQQVQILLQEFATRKPQYEQLTAAGQGILSRPGEDPSLRGIVKEQLAAVTQKWDSLTGQLSDRCDWIDQAIVKSTQYQSLLRSLSDKLSDLDNKLSSSLAVSTHPDAMNQQLETAQKMKQEIQQEKKQIKVAQALCEDLSALVKEEYLKAELSRQLEGILKSFKDVEQKAENHVQHLQSACASSHQFQQMSRDFQAWLDTKKEEQNKSHPISAKLDVLESLIKDHKDFSKTLTAQSHMYEKTIAEGENLLLKTQGSEKAALQLQLNTIKTNWDTFNKQVKERENKLKESLEKALKYKEQVETLWPWIDKCQNNLEEIKFCLDPAEGENSIAKLKSLQKEMDQHFGMVELLNNTANSLLSVCEIDKEVVTDENKSLIQKVDMVTEQLHSKKFCLENMTQKFKEFQEVSKESKRQLQCAKEQLDIHDSLGSQAYSNKYLTMLQTQQKSLQALKHQVDLAKRLAQDLVVEASDSKGTSDVLLQVETIAQEHSTLSQQVDEKCSFLETKLQGIGHFQNTIREMFSQFAEFDDELDSMAPVGRDAETLQKQKETIKAFLKKLEALMASNDNANKTCKMMLATEETSPDLVGIKRDLEALSKQCNKLLDRAQAREEQVEGTIKRLEEFYSKLKEFSILLQKAEEHEESQGPVGMETETINQQLNMFKVFQKEEIEPLQGKQQDVNWLGQGLIQSAAKSTSTQGLEHDLDDVNARWKTLNKKVAQRAAQLQEALLHCGRFQDALESLLSWMVDTEELVANQKPPSAEFKVVKAQIQEQKLLQRLLDDRKSTVEVIKREGEKIATTAEPADKVKILKQLSLLDSRWEALLNKAETRNRQLEGISVVAQQFHETLEPLNEWLTTIEKRLVNCEPIGTQASKLEEQIAQHKALEDDIINHNKHLHQAVSIGQSLKVLSSREDKDMVQSKLDFSQVWYIEIQEKSHSRSELLQQALCNAKIFGEDEVELMNWLNEVHDKLSKLSVQDYSTEGLWKQQSELRVLQEDILLRKQNVDQALLNGLELLKQTTGDEVLIIQDKLEAIKARYKDITKLSTDVAKTLEQALQLARRLHSTHEELCTWLDKVEVELLSYETQVLKGEEASQAQMRPKELKKEAKNNKALLDSLNEVSSALLELVPWRAREGLEKMVAEDNERYRLVSDTITQKVEEIDAAILRSQQFDQAADAELSWITETEKKLMSLGDIRLEQDQTSAQLQVQKTFTMEILRHKDIIDDLVKSGHKIMTACSEEEKQSMKKKLDKVLKNYDTICQINSERYLQLERAQSLVNQFWETYEELWPWLTETQSIISQLPAPALEYETLRQQQEEHRQLRELIAEHKPHIDKMNKTGPQLLELSPGEGFSIQEKYVAADTLYSQIKEDVKKRAVALDEAISQSTQFHDKIDQILESLERIVERLRQPPSISAEVEKIKEQISENKNVSVDMEKLQPLYETLKQRGEEMIARSGGTDKDISAKAVQDKLDQMVFIWENIHTLVEEREAKLLDVMELAEKFWCDHMSLIVTIKDTQDFIRDLEDPGIDPSVVKQQQEAAETIREEIDGLQEELDIVINLGSELIAACGEPDKPIVKKSIDELNSAWDSLNKAWKDRIDKLEEAMQAAVQYQDGLQAVFDWVDIAGGKLASMSPIGTDLETVKQQIEELKQFKSEAYQQQIEMERLNHQAELLLKKVTEESDKHTVQDPLMELKLIWDSLEERIINRQHKLEGALLALGQFQHALDELLAWLTHTEGLLSEQKPVGGDPKAIEIELAKHHVLQNDVLAHQSTVEAVNKAGNDLIESSAGEEASNLQNKLEVLNQRWQNVLEKTEQRKQQLDGALRQAKGFHGEIEDLQQWLTDTERHLLASKPLGGLPETAKEQLNVHMEVCAAFEAKEETYKSLMQKGQQMLARCPKSAETNIDQDINNLKEKWESVETKLNERKTKLEEALNLAMEFHNSLQDFINWLTQAEQTLNVASRPSLILDTVLFQIDEHKVFANEVNSHREQIIELDKTGTHLKYFSQKQDVVLIKNLLISVQSRWEKVVQRLVERGRSLDDARKRAKQFHEAWSKLMEWLEESEKSLDSELEIANDPDKIKTQLAQHKEFQKSLGAKHSVYDTTNRTGRSLKEKTSLADDNLKLDDMLSELRDKWDTICGKSVERQNKLEEALLFSGQFTDALQALIDWLYRVEPQLAEDQPVHGDIDLVMNLIDNHKAFQKELGKRTSSVQALKRSARELIEGSRDDSSWVKVQMQELSTRWETVCALSISKQTRLEAALRQAEEFHSVVHALLEWLAEAEQTLRFHGVLPDDEDALRTLIDQHKEFMKKLEEKRAELNKATTMGDTVLAICHPDSITTIKHWITIIRARFEEVLAWAKQHQQRLASALAGLIAKQELLEALLAWLQWAETTLTDKDKEVIPQEIEEVKALIAEHQTFMEEMTRKQPDVDKVTKTYKRRAADPSSLQSHIPVLDKGRAGRKRFPASSLYPSGSQTQIETKNPRVNLLVSKWQQVWLLALERRRKLNDALDRLEELREFANFDFDIWRKKYMRWMNHKKSRVMDFFRRIDKDQDGKITRQEFIDGILSSKFPTSRLEMSAVADIFDRDGDGYIDYYEFVAALHPNKDAYKPITDADKIEDEVTRQVAKCKCAKRFQVEQIGDNKYRFFLGNQFGDSQQLRLVRILRSTVMVRVGGGWMALDEFLVKNDPCRAKGRTNMELREKFILADGASQGMAAFRPRGRRSRPSSRGASPNRSTSVSSQAAQAASPQVPATTTPKILHPLTRNYGKPWLTNSKMSTPCKAAECSDFPVPSAEGTPIQGSKLRLPGYLSGKGFHSGEDSGLITTAAARVRTQFADSKKTPSRPGSRAGSKAGSRASSRRGSDASDFDISEIQSVCSDVETVPQTHRPTPRAGSRPSTAKPSKIPTPQRKSPASKLDKSSKR

SEQ ID NO: 4454 - protein, 1674 aa, Homo Sapiens
MGKPLSRPDCLRQNPPCVGKGEEEEDLNIEDCYVPQRSIYDTVRLNEQIDSGSKGSLSSRHFTDRTLPYSHRTLDVSSLCSNGALTSSSVFELRGREANKLDEKMIFDALKLNSDIIRTTGLPKAKSHAEKKEHRRSWRMFVPANFMDYANKSESSFVEPADMSDAVTKASKCRWGTNSLTSEEDDSGLCSPPAEREEKQGILTGDQSRIKSLSSTEDILVTDQYRPFFSVNSISEQKIPLLSCQSAHPDENFKMILHDVSPLEEAKHVNGQREIHDENCCLQNNLKESPVKCDPLIMPRNRENEHIFNLGEEDETYGPGESQITAQSRELLKDSPQDLDLSHTDLGESDVDCGSTSLVENVTLLTQYDSGECNIASKEEVEAPLSAQESEMLYKKFSLKFVSARKKAAPRKTGAQAGILDTVCNGFQLVQVFQKEEIEPLQGKQQDVNWLGQGLIQSAAKSTSTQGLEHDLDDVNARWKTLNKKVAQRAAQLQEALLHCGRFQDALESLLSWMVDTEELVANQKPPSAEFKVVKAQIQEQKLLQRLLDDRKSTVEVIKREGEKIATTAEPADKVKILKQLSLLDSRWEALLNKAETRNRQLEGISVVAQQFHETLEPLNEWLTTIEKRLVNCEPIGTQASKLEEQIAQHKALEDDIINHNKHLHQAVSIGQSLKVLSSREDKDMVQSKLDFSQVWYIEIQEKSHSRSELLQQALCNAKIFGEDEVELMNWLNEVHDKLSKLSVQDYSTEGLWKQQSELRVLQEDILLRKQNVDQALLNGLELLKQTTGDEVLIIQDKLEAIKARYKDITKLSTDVAKTLEQALQLARRLHSTHEELCTWLDKVEVELLSYETQVLKGEEASQAQMRPKELKKEAKNNKALLDSLNEVSSALLELVPWRAREGLEKMVAEDNERYRLVSDTITQKVEEIDAAILRSQQFDQAADAELSWITETEKKLMSLGDIRLEQDQTSAQLQVQKTFTMEILRHKDIIDDLVKSGHKIMTACSEEEKQSMKKKLDKVLKNYDTICQINSERYLQLERAQSLVNQFWETYEELWPWLTETQSIISQLPAPALEYETLRQQQEEHRQLRELIAEHKPHIDKMNKTGPQLLELSPGEGFSIQEKYVAADTLYSQIKEDVKKRAVALDEAISQSTQFHDKIDQILESLERIVERLRQPPSISAEVEKIKEQISENKNVSVDMEKLQPLYETLKQRGEEMIARSGGTDKDISAKAVQDKLDQMVFIWENIHTLVEEREAKLLDVMELAEKFWCDHMSLIVTIKDTQDFIRDLEDPGIDPSVVKQQQEAAETIREEIDGLQEELDIVINLGSELIAACGEPDKPIVKKSIDELNSAWDSLNKAWKDRIDKLEEAMQAAVQYQDGLQAVFDWVDIAGGKLASMSPIGTDLETVKQQIEELKQFKSEAYQQQIEMERLNHQAELLLKKVTEESDKHTVQDPLMELKLIWDSLEERIINRQHKLEGALLALGQFQHALDELLAWLTHTEGLLSEQKPVGGDPKAIEIELAKHHVLQNDVLAHQSTVEAVNKAGNDLIESSAGEEASNLQNKLEVLNQRWQNVLEKTEQRKQQLDGALRQAKGFHGEIEDLQQWLTDTERHLLASKPLGGLPETAKEQLNVHMEVCAAFEAKEETYKSLMQKGQQMLARCPKSAETNIDQD

SEQ ID NO: 4455 - protein, 304 aa, Homo Sapiens
MGNVCGCVRAEKEEQYVDPAKTPLNPEKYSPGRKYFRRKPIKKTGGDKESVGANNENEGKKKSSSQPSKEQPAPLSRGLVQQESVTLNSALGDGIQQKKTEVVADSVKQKLLPSAVSSWSDCVNTSPAKDSETEVKVSELDERISEKDSTPYCAKRKKHLDDVNTSEITFQEKTDVFSFRKAASLSSIPSGIERSLEKSGFPEDPPKSYSSIQEKQNTERFCPHATQHFQFKKKRCHSLYTSMSSVSKDTDGNEISDIHVTGESEDMSAKERLLLWTQQATEGYAGIRCENFTTCWRDGKLFNA

SEQ ID NO: 4456 - protein, 5171 aa, Homo Sapiens
MHSSSYSYRSSDSVFSNTTSTRTSLDSNENLLLVHCGPTLINSCISFGSESFDGHRLEMLQQIANRVQRDSVICEDKLILAGNALQSDSKRLESGVQFQNEAEIAGYILECENLLRQHVIDVQILIDGKYYQADQLVQRVAKLRDEIMALRNECSSVYSKGRILTTEQTKLMISGITQSLNSGFAQTLHPSLTSGLTQSLTPSLTSSSMTSGLSSGMTSRLTPSVTPAYTPGFPSGLVPNFSSGVEPNSLQTLKLMQIRKPLLKSSLLDQNLTEEEINMKFVQDLLNWVDEMQVQLDRTEWGSDLPSVESHLENHKNVHRAIEEFESSLKEAKISEIQMTAPLKLTYAEKLHRLESQYAKLLNTSRNQERHLDTLHNFVSRATNELIWLNEKEEEEVAYDWSERNTNIARKKDYHAELMRELDQKEENIKSVQEIAEQLLLENHPARLTIEAYRAAMQTQWSWILQLCQCVEQHIKENTAYFEFFNDAKEATDYLRNLKDAIQRKYSCDRSSSIHKLEDLVQESMEEKEELLQYKSTIANLMGKAKTIIQLKPRNSDCPLKTSIPIKAICDYRQIEITIYKDDECVLANNSHRAKWKVISPTGNEAMVPSVCFTVPPPNKEAVDLANRIEQQYQNVLTLWHESHINMKSVVSWHYLINEIDRIRASNVASIKTMLPGEHQQVLSNLQSRFEDFLEDSQESQVFSGSDITQLEKEVNVCKQYYQELLKSAEREEQEESVYNLYISEVRNIRLRLENCEDRLIRQIRTPLERDDLHESVFRITEQEKLKKELERLKDDLGTITNKCEEFFSQAAASSSVPTLRSELNVVLQNMNQVYSMSSTYIDKLKTVNLVLKNTQAAEALVKLYETKLCEEEAVIADKNNIENLISTLKQWRSEVDEKRQVFHALEDELQKAKAISDEMFKTYKERDLDFDWHKEKADQLVERWQNVHVQIDNRLRDLEGIGKSLKYYRDTYHPLDDWIQQVETTQRKIQENQPENSKTLATQLNQQKMLVSEIEMKQSKMDECQKYAEQYSATVKDYELQTMTYRAMVDSQQKSPVKRRRMQSSADLIIQEFMDLRTRYTALVTLMTQYIKFAGDSLKRLEEEEKSLEEEKKEHVEKAKELQKWVSNISKTLKDAEKAGKPPFSKQKISSEEISTKKEQLSEALQTIQLFLAKHGDKMTDEERNELEKQVKTLQESYNLLFSESLKQLQESQTSGDVKVEEKIVAERQQEYKEKLQGICDLLTQTENRLIGHQEAFMIGDGTVELKKYQSKQEELQKDMQGSAQALAEVVKNTENFLKENGEKLSQEDKALIEQKLNEAKIKCEQLNLKAEQSKKELDKVVTTAIKEETEKVAAVKQLEESKTKIENLLDWLSNVDKDSERAGTKHKQVIEQNGTHFQEGDGKSAIGEEDEVNGNLLETDVDGQVGTTQENLNQQYQKVKAQHEKIISQHQAVIIATQSAQVLLEKQGQYLSPEEKEKLQKNMKELKVHYETALAESEKKMKLTHSLQEELEKFDADYTEFEHWLQQSEQELENLEAGADDINGLMTKLKRQKSFSEDVISHKGDLRYITISGNRVLEAAKSCSKRDGGKVDTSATHREVQRKLDHATDRFRSLYSKCNVLGNNLKDLVDKYQHYEDASCGLLAGLQACEATASKHLSEPIAVDPKNLQRQLEETKALQGQISSQQVAVEKLKKTAEVLLDARGSLLPAKNDIQKTLDDIVGRYEDLSKSVNERNEKLQITLTRSLSVQDGLDEMLDWMGNVESSLKEQGQVPLNSTALQDIISKNIMLEQDIAGRQSSINAMNEKVKKFMETTDPSTASSLQAKMKDLSARFSEASHKHKETLAKMEELKTKVELFENLSEKLQTFLETKTQALTEVDVPGKDVTELSQYMQESTSEFLEHKKHLEVLHSLLKEISSHGLPSDKALVLEKTNNLSKKFKEMEDTIKEKKEAVTSCQEQLDAFQVLVKSLKSWIKETTKKVPIVQPSFGAEDLGKSLEDTKKLQEKWSLKTPEIQKVNNSGISLCNLISAVTTPAKAIAAVKSGGAVLNGEGTATNTEEFWANKGLTSIKKDMTDISHGYEDLGLLLKDKIAELNTKLSKLQKAQEESSAMMQWLQKMNKTATKWQQTPAPTDTEAVKTQVEQNKSFEAELKQNVNKVQELKDKLTELLEENPDTPEAPRWKQMLTEIDSKWQELNQLTIDRQQKLEESSNNLTQFQTVEAQLKQWLVEKELMVSVLGPLSIDPNMLNTQRQQVQILLQEFATRKPQYEQLTAAGQGILSRPGEDPSLRGIVKEQLAAVTQKWDSLTGQLSDRCDWIDQAIVKSTQYQSLLRSLSDKLSDLDNKLSSSLAVSTHPDAMNQQLETAQKMKQEIQQEKKQIKVAQALCEDLSALVKEEYLKAELSRQLEGILKSFKDVEQKAENHVQHLQSACASSHQFQQMSRDFQAWLDTKKEEQNKSHPISAKLDVLESLIKDHKDFSKTLTAQSHMYEKTIAEGENLLLKTQGSEKAALQLQLNTIKTNWDTFNKQVKERENKLKESLEKALKYKEQVETLWPWIDKCQNNLEEIKFCLDPAEGENSIAKLKSLQKEMDQHFGMVELLNNTANSLLSVCEIDKEVVTDENKSLIQKVDMVTEQLHSKKFCLENMTQKFKEFQEVSKESKRQLQCAKEQLDIHDSLGSQAYSNKYLTMLQTQQKSLQALKHQVDLAKRLAQDLVVEASDSKGTSDVLLQVETIAQEHSTLSQQVDEKCSFLETKLQGIGHFQNTIREMFSQFAEFDDELDSMAPVGRDAETLQKQKETIKAFLKKLEALMASNDNANKTCKMMLATEETSPDLVGIKRDLEALSKQCNKLLDRAQAREEQVEGTIKRLEEFYSKLKEFSILLQKAEEHEESQGPVGMETETINQQLNMFKVFQKEEIEPLQGKQQDVNWLGQGLIQSAAKSTSTQGLEHDLDDVNARWKTLNKKVAQRAAQLQEALLHCGRFQDALESLLSWMVDTEELVANQKPPSAEFKVVKAQIQEQKLLQRLLDDRKSTVEVIKREGEKIATTAEPADKVKILKQLSLLDSRWEALLNKAETRNRQLEGISVVAQQFHETLEPLNEWLTTIEKRLVNCEPIGTQASKLEEQIAQHKALEDDIINHNKHLHQAVSIGQSLKVLSSREDKDMVQSKLDFSQVWYIEIQEKSHSRSELLQQALCNAKIFGEDEVELMNWLNEVHDKLSKLSVQDYSTEGLWKQQSELRVLQEDILLRKQNVDQALLNGLELLKQTTGDEVLIIQDKLEAIKARYKDITKLSTDVAKTLEQALQLARRLHSTHEELCTWLDKVEVELLSYETQVLKGEEASQAQMRPKELKKEAKNNKALLDSLNEVSSALLELVPWRAREGLEKMVAEDNERYRLVSDTITQKVEEIDAAILRSQQFDQAADAELSWITETEKKLMSLGDIRLEQDQTSAQLQVQKTFTMEILRHKDIIDDLVKSGHKIMTACSEEEKQSMKKKLDKVLKNYDTICQINSERYLQLERAQSLVNQFWETYEELWPWLTETQSIISQLPAPALEYETLRQQQEEHRQLRELIAEHKPHIDKMNKTGPQLLELSPGEGFSIQEKYVAADTLYSQIKEDVKKRAVALDEAISQSTQFHDKIDQILESLERIVERLRQPPSISAEVEKIKEQISENKNVSVDMEKLQPLYETLKQRGEEMIARSGGTDKDISAKAVQDKLDQMVFIWENIHTLVEEREAKLLDVMELAEKFWCDHMSLIVTIKDTQDFIRDLEDPGIDPSVVKQQQEAAETIREEIDGLQEELDIVINLGSELIAACGEPDKPIVKKSIDELNSAWDSLNKAWKDRIDKLEEAMQAAVQYQDGLQAVFDWVDIAGGKLASMSPIGTDLETVKQQIEELKQFKSEAYQQQIEMERLNHQAELLLKKVTEESDKHTVQDPLMELKLIWDSLEERIINRQHKLEGALLALGQFQHALDELLAWLTHTEGLLSEQKPVGGDPKAIEIELAKHHVLQNDVLAHQSTVEAVNKAGNDLIESSAGEEASNLQNKLEVLNQRWQNVLEKTEQRKQQLDGALRQAKGFHGEIEDLQQWLTDTERHLLASKPLGGLPETAKEQLNVHMEVCAAFEAKEETYKSLMQKGQQMLARCPKSAETNIDQDINNLKEKWESVETKLNERKTKLEEALNLAMEFHNSLQDFINWLTQAEQTLNVASRPSLILDTVLFQIDEHKVFANEVNSHREQIIELDKTGTHLKYFSQKQDVVLIKNLLISVQSRWEKVVQRLVERGRSLDDARKRAKQFHEAWSKLMEWLEESEKSLDSELEIANDPDKIKTQLAQHKEFQKSLGAKHSVYDTTNRTGRSLKEKTSLADDNLKLDDMLSELRDKWDTICGKSVERQNKLEEALLFSGQFTDALQALIDWLYRVEPQLAEDQPVHGDIDLVMNLIDNHKAFQKELGKRTSSVQALKRSARELIEGSRDDSSWVKVQMQELSTRWETVCALSISKQTRLEAALRQAEEFHSVVHALLEWLAEAEQTLRFHGVLPDDEDALRTLIDQHKEFMKKLEEKRAELNKATTMGDTVLAICHPDSITTIKHWITIIRARFEEVLAWAKQHQQRLASALAGLIAKQELLEALLAWLQWAETTLTDKDKEVIPQEIEEVKALIAEHQTFMEEMTRKQPDVDKVTKTYKRRAADPSSLQSHIPVLDKGRAGRKRFPASSLYPSGSQTQIETKNPRVNLLVSKWQQVWLLALERRRKLNDALDRLEELREFANFDFDIWRKKYMRWMNHKKSRVMDFFRRIDKDQDGKITRQEFIDGILSSKFPTSRLEMSAVADIFDRDGDGYIDYYEFVAALHPNKDAYKPITDADKIEDEVTRQVAKCKCAKRFQVEQIGDNKYRFFLGNQFGDSQQLRLVRILRSTVMVRVGGGWMALDEFLVKNDPCRAKGRTNMELREKFILADGASQGMAAFRPRGRRSRPSSRGASPNRSTSVSSQAAQAASPQVPATTTPKILHPLTRNYGKPWLTNSKMSTPCKAAECSDFPVPSAEGTPIQGSKLRLPGYLSGKGFHSGEDSGLITTAAARVRTQFADSKKTPSRPGSRAGSKAGSRASSRRGSDASDFDISEIQSVCSDVETVPQTHRPTPRAGSRPSTAKPSKIPTPQRKSPASKLDKSSKR

SEQ ID NO: 4457 - protein, 2649 aa, Homo Sapiens
MHSSSYSYRSSDSVFSNTTSTRTSLDSNENLLLVHCGPTLINSCISFGSESFDGHRLEMLQQIANRVQRDSVICEDKLILAGNALQSDSKRLESGVQFQNEAEIAGYILECENLLRQHVIDVQILIDGKYYQADQLVQRVAKLRDEIMALRNECSSVYSKGRILTTEQTKLMISGITQSLNSGFAQTLHPSLTSGLTQSLTPSLTSSSMTSGLSSGMTSRLTPSVTPAYTPGFPSGLVPNFSSGVEPNSLQTLKLMQIRKPLLKSSLLDQNLTEEEINMKFVQDLLNWVDEMQVQLDRTEWGSDLPSVESHLENHKNVHRAIEEFESSLKEAKISEIQMTAPLKLTYAEKLHRLESQYAKLLNTSRNQERHLDTLHNFVSRATNELIWLNEKEEEEVAYDWSERNTNIARKKDYHAELMRELDQKEENIKSVQEIAEQLLLENHPARLTIEAYRAAMQTQWSWILQLCQCVEQHIKENTAYFEFFNDAKEATDYLRNLKDAIQRKYSCDRSSSIHKLEDLVQESMEEKEELLQYKSTIANLMGKAKTIIQLKPRNSDCPLKTSIPIKAICDYRQIEITIYKDDECVLANNSHRAKWKVISPTGNEAMVPSVCFTVPPPNKEAVDLANRIEQQYQNVLTLWHESHINMKSVVSWHYLINEIDRIRASNVASIKTMLPGEHQQVLSNLQSRFEDFLEDSQESQVFSGSDITQLEKEVNVCKQYYQELLKSAEREEQEESVYNLYISEVRNIRLRLENCEDRLIRQIRTPLERDDLHESVFRITEQEKLKKELERLKDDLGTITNKCEEFFSQAAASSSVPTLRSELNVVLQNMNQVYSMSSTYIDKLKTVNLVLKNTQAAEALVKLYETKLCEEEAVIADKNNIENLISTLKQWRSEVDEKRQVFHALEDELQKAKAISDEMFKTYKERDLDFDWHKEKADQLVERWQNVHVQIDNRLRDLEGIGKSLKYYRDTYHPLDDWIQQVETTQRKIQENQPENSKTLATQLNQQKMLVSEIEMKQSKMDECQKYAEQYSATVKDYELQTMTYRAMVDSQQKSPVKRRRMQSSADLIIQEFMDLRTRYTALVTLMTQYIKFAGDSLKRLEEEEIKRCKETSEHGAYSDLLQRQKATVLENSKLTGKISELERMVAELKKQKSRVEEELPKVREAAENELRKQQRNVEDISLQKIRAESEAKQYRRELETIVREKEAAERELERVRQLTIEAEAKRAAVEENLLNFRNQLEENTFTRRTLEDHLKRKDLSLNDLEQQKNKLMEELRRKRDNEEELLKLIKQMEKDLAFQKQVAEKQLKEKQKIELEARRKITEIQYTCRENALPVCPITQATSCRAVTGLQQEHDKQKAEELKQQVDELTAANRKAEQDMRELTYELNALQLEKTSSEEKARLLKDKLDETNNTLRCLKLELERKDQAEKGYSQQLRELGRQLNQTTGKAEEAMQEASDLKKIKRNYQLELESLNHEKGKLQREVDRITRAHAVAEKNIQHLNSQIHSFRDEKELERLQICQRKSDHLKEQFEKSHEQLLQNIKAEKENNDKIQRLNEELEKSNECAEMLKQKVEELTRQNNETKLMMQRIQAESENIVLEKQTIQQRCEALKIQADGFKDQLRSTNEHLHKQTKTEQDFQRKIKCLEEDLAKSQNLVSEFKQKCDQQNIIIQNTKKEVRNLNAELNASKEEKRRGEQKVQLQQAQVQELNNRLKKVQDELHLKTIEEQMTHRKMVLFQEESGKFKQSAEEFRKKMEKLMESKVITENDISGIRLDFVSLQQENSRAQENAKLCETNIKELERQLQQYREQMQQGQHMEANHYQKCQKLEDELIAQKREVENLKQKMDQQIKEHEHQLVLLQCEIQKKSTAKDCTFKPDFEMTVKECQHSGELSSRNTGHLHPTPRSPLLRWTQEPQPLEEKWQHRVVEQIPKEVQFQPPGAPLEKEKSQQCYSEYFSQTSTELQITFDETNPITRLSEIEKIRDQALNNSRPPVRYQDNACEMELVKVLTPLEIAKNKQYDMHTEVTTLKQEKNPVPSAEEWMLEGCRASGGLKKGDFLKKGLEPETFQNFDGDHACSVRDDEFKFQGLRHTVTARQLVEAKLLDMRTIEQLRLGLKTVEEVQKTLNKFLTKATSIAGLYLESTKEKISFASAAERIIIDKMVALAFLEAQAATGFIIDPISGQTYSVEDAVLKGVVDPEFRIRLLEAEKAAVGYSYSSKTLSVFQAMENRMLDRQKGKHILEAQIASGGVIDPVRGIRVPPEIALQQGLLNNAILQFLHEPSSNTRVFPNPNNKQALYYSELLRMCVFDVESQCFLFPFGERNISNLNVKKTHRISVVDTKTGSELTVYEAFQRNLIEKSIYLELSGQQYQWKEAMFFESYGHSSHMLTDTKTGLHFNINEAIEQGTIDKALVKKYQEGLITLTELADSLLSRLVPKKDLHSPVAGYWLTASGERISVLKASRRNLVDRITALRCLEAQVSTGGIIDPLTGKKYRVAEALHRGLVDEGFAQQLRQCELVITGIGHPITNKMMSVVEAVNANIINKEMGIRCLEFQYLTGGLIEPQVHSRLSIEEALQVGIIDVLIATKLKDQKSYVRNIICPQTKRKLTYKEALEKADFDFHTGLKLLEVSEPLMTGISSLYYSS

SEQ ID NO: 4458 - protein, 3060 aa, Homo Sapiens
MHSSSYSYRSSDSVFSNTTSTRTSLDSNENLLLVHCGPTLINSCISFGSESFDGHRLEMLQQIANRVQRDSVICEDKLILAGNALQSDSKRLESGVQFQNEAEIAGYILECENLLRQHVIDVQILIDGKYYQADQLVQRVAKLRDEIMALRNECSSVYSKGRILTTEQTKLMISGITQSLNSGFAQTLHPSLTSGLTQSLTPSLTSSSMTSGLSSGMTSRLTPSVTPAYTPGFPSGLVPNFSSGVEPNSLQTLKLMQIRKPLLKSSLLDQNLTEEEINMKFVQDLLNWVDEMQVQLDRTEWGSDLPSVESHLENHKNVHRAIEEFESSLKEAKISEIQMTAPLKLTYAEKLHRLESQYAKLLNTSRNQERHLDTLHNFVSRATNELIWLNEKEEEEVAYDWSERNTNIARKKDYHAELMRELDQKEENIKSVQEIAEQLLLENHPARLTIEAYRAAMQTQWSWILQLCQCVEQHIKENTAYFEFFNDAKEATDYLRNLKDAIQRKYSCDRSSSIHKLEDLVQESMEEKEELLQYKSTIANLMGKAKTIIQLKPRNSDCPLKTSIPIKAICDYRQIEITIYKDDECVLANNSHRAKWKVISPTGNEAMVPSVCFTVPPPNKEAVDLANRIEQQYQNVLTLWHESHINMKSVVSWHYLINEIDRIRASNVASIKTMLPGEHQQVLSNLQSRFEDFLEDSQESQVFSGSDITQLEKEVNVCKQYYQELLKSAEREEQEESVYNLYISEVRNIRLRLENCEDRLIRQIRTPLERDDLHESVFRITEQEKLKKELERLKDDLGTITNKCEEFFSQAAASSSVPTLRSELNVVLQNMNQVYSMSSTYIDKLKTVNLVLKNTQAAEALVKLYETKLCEEEAVIADKNNIENLISTLKQWRSEVDEKRQVFHALEDELQKAKAISDEMFKTYKERDLDFDWHKEKADQLVERWQNVHVQIDNRLRDLEGIGKSLKYYRDTYHPLDDWIQQVETTQRKIQENQPENSKTLATQLNQQKMLVSEIEMKQSKMDECQKYAEQYSATVKDYELQTMTYRAMVDSQQKSPVKRRRMQSSADLIIQEFMDLRTRYTALVTLMTQYIKFAGDSLKRLEEEEKSLEEEKKEHVEKAKELQKWVSNISKTLKDAEKAGKPPFSKQKISSEEISTKKEQLSEALQTIQLFLAKHGDKMTDEERNELEKQVKTLQESYNLLFSESLKQLQESQTSGDVKVEEKLDKVIAGTIDQTTGEVLSVFQAVLRGLIDYDTGIRLLETQLMISGLISPELRKCFDLKDAKSHGLIDEQILCQLKELSKAKEIISAASPTTIPVLDALAQSMITESMAIKVLEILLSTGSLVIPATGEQLTLQKAFQQNLVSSALFSKVLERQNMCKDLIDPCTSEKVSLIDMVQRSTLQENTGMWLLPVRPQEGGRITLKCGRNISILRAAHEGLIDRETMFRLLSAQLLSGGLINSNSGQRMTVEEAVREGVIDRDTASSILTYQVQTGGIIQSNPAKRLTVDEAVQCDLITSSSALLVLEAQRGYVGLIWPHSGEIFPTSSSLQQELITNELAYKILNGRQKIAALYIPESSQVIGLDAAKQLGIIDNNTASILKNITLPDKMPDLGDLEACKNARRWLSFCKFQPSTVHDYRQEEDVFDGEEPVTTQTSEETKKLFLSYLMINSYMDANTGQRLLLYDGDLDEAVGMLLEGCHAEFDGNTAIKECLDVLSSSGVFLNNASGREKDECTATPSSFNKCHCGEPEHEETPENRKCAIDEEFNEMRNTVINSEFSQSGKLASTISIDPKVNSSPSVCVPSLISYLTQTELADISMLRSDSENILTNYENQSRVETNERANECSHSKNIQNFPSDLIENPIMKSKMSKFCGVNETENEDNTNRDSPIFDYSPRLSALLSHDKLMHSQGSFNDTHTPESNGNKCEAPALSFSDKTMLSGQRIGEKFQDQFLGIAAINISLPGEQYGQKSLNMISSNPQVQYHNDKYISNTSGEDEKTHPGFQQMPEDKEDESEIEEYSCAVTPGGDTDNAIVSLTCATPLLDETISASDYETSLLNDQQNNTGTDTDSDDDFYDTPLFEDDDHDSLLLDGDDRDCLHPEDYDTLQEENDETASPADVFYDVSKENENSMVPQGAPVGSLSVKNKAHCLQDFLMDVEKDELDSGEKIHLNPVGSDKVNGQSLETGSERECTNILEGDESDSLTDYDIVGGKESFTASLKFDDSGSWRGRKEEYVTGQEFHSDTDHLDSMQSEESYGDYIYDSNDQDDDDDDGIDEEGGGIRDENGKPRCQNVAEDMDIQLCASILNENSDENENINTMILLDKMHSCSSLEKQQRVNVVQLASPSENNLVTEKSNLPEYTTEIAGKSKENLLNHEMVLKDVLPPIIKDTESEKTFGPASISHDNNNISSTSELGTDLANTKVKLIQGSELPELTDSVKGKDEYFKNMTPKVDSSLDHIICTEPDLIGKPAEESHLSLIASVTDKDPQGNGSDLIKGRDGKSDILIEDETSIQKMYLGEGEVLVEGLVEEENRHLKLLPGKNTRDSFKLINSQFPFPQITNNEELNQKGSLKKATVTLKDEPNNLQIIVSKSPVQFENLEEIFDTSVSKEISDDITSDITSWEGNTHFEESFTDGPEKELDLFTYLKHCAKNIKAKDVAKPNEDVPSHVLITAPPMKEHLQLGVNNTKEKSTSTQKDSPLNDMIQSNDLCSKESISGGGTEISQFTPESIEATLSILSRKHVEDVGKNDFLQSERCANGLGNDNSSNTLNTDYSFLEINNKKERIEQQLPKEQALSPRSQEKEVQIPELSQVFVEDVKDILKSRLKEGHMNPQEVEEPSACADTKILIQNLIKRITTSQLVNEASTVPSDSQMSDSSGVSPMTNSSELKPESRDDPFCIGNLKSELLLNILKQDQHSQKITGVFELMRELTHMEYDLEKRGITSKVLPLQLENIFYKLLADGYSEKIEHVGDFNQKACSTSEMMEEKPHILGDIKSKEGNYYSPNLETVKEIGLESSTVWASTLPRDEKLKDLCNDFPSHLECTSGSKEMASGDSSTEQ

SEQ ID NO: 4459 - protein, 1143 aa, Homo Sapiens
MHSSSYSYRSSDSVFSNTTSTRTSLDSNENLLLVHCGPTLINSCISFGSESFDGHRLEMLQQIANRVQRDSVICEDKLILAGNALQSDSKRLESGVQFQNEAEIAGYILECENLLRQHVIDVQILIDGKYYQADQLVQRVAKLRDEIMALRNECSSVYSKGRILTTEQTKLMISGITQSLNSGFAQTLHPSLTSGLTQSLTPSLTSSSMTSGLSSGMTSRLTPSVTPAYTPGFPSGLVPNFSSGVEPNSLQTLKLMQIRKPLLKSSLLDQNLTEEEINMKFVQDLLNWVDEMQVQLDRTEWGSDLPSVESHLENHKNVHRAIEEFESSLKEAKISEIQMTAPLKLTYAEKLHRLESQYAKLLNTSRNQERHLDTLHNFVSRATNELIWLNEKEEEEVAYDWSERNTNIARKKDYHAELMRELDQKEENIKSVQEIAEQLLLENHPARLTIEAYRAAMQTQWSWILQLCQCVEQHIKENTAYFEFFNDAKEATDYLRNLKDAIQRKYSCDRSSSIHKLEDLVQESMEEKEELLQYKSTIANLMGKAKTIIQLKPRNSDCPLKTSIPIKAICDYRQIEITIYKDDECVLANNSHRAKWKVISPTGNEAMVPSVCFTVPPPNKEAVDLANRIEQQYQNVLTLWHESHINMKSVVSWHYLINEIDRIRASNVASIKTMLPGEHQQVLSNLQSRFEDFLEDSQESQVFSGSDITQLEKEVNVCKQYYQELLKSAEREEQEESVYNLYISEVRNIRLRLENCEDRLIRQIRTPLERDDLHESVFRITEQEKLKKELERLKDDLGTITNKCEEFFSQAAASSSVPTLRSELNVVLQNMNQVYSMSSTYIDKLKTVNLVLKNTQAAEALVKLYETKLCEEEAVIADKNNIENLISTLKQWRSEVDEKRQVFHALEDELQKAKAISDEMFKTYKERDLDFDWHKEKADQLVERWQNVHVQIDNRLRDLEGIGKSLKYYRDTYHPLDDWIQQVETTQRKIQENQPENSKTLATQLNQQKMLVSEIEMKQSKMDECQKYAEQYSATVKDYELQTMTYRAMVDSQQKSPVKRRRMQSSADLIIQEFMDLRTRYTALVTLMTQYIKFAGDSLKRLEEEEVIINSEHPVNIKELEMSSNYSVVWESKTCFMINLCGR

SEQ ID NO: 4460 - protein, 689 aa, Homo Sapiens
MIAAAFLVLLRPYSIQCALFLLLLLLGTIATIVFFCCWHRKLQKGRHPMKSVFSGRSRSRDAVLRSHHFRSEGFRASPRHLRRRVAAAAAARLEEVKPVVEVHHQSEQETSVRKRRIKKSSRVQPEFYHSVQGASIRRPSSGNASYRCSMSSSADFSDEDDFSQKSGSASPAPGDTLPWNLPKHERSKRKIQGGSVLDPAERAVLRIADERDKVQKKTFTKWINQHLMKVRKHVNDLYEDLRDGHNLISLLEVLSGDTLPREKGRMRFHRLQNVQIALDYLKRRQVKLVNIRNDDITDGNPKLTLGLIWTIILHFQISDIHVTGESEDMSAKERLLLWTQQATEGYAGIRCENFTTCWRDGKLFNAIIHKYRPDLIDMNTVAVQSNLANLEHAFYVAEKIGVIRLLDPEDVDVSSPDEKSVITYVSSLYDAFPKVPEGGEGIGANDVEVKWIEYQNMVNYLIQWIRHHVTTMSERTFPNNPVELKALYNQYLQFKETEIPPKETEKSKIKRLYKLLEIWIEFGRIKLLQGYHPNDIEKEWGKLIIAMLEREKALRPEVERLEMLQQIANRVQRDSVICEDKLILAGNALQSDSKRLESGVQFQNEAEIAGYILECENLLRQHVIDVQILIDGKYYQADQLVQRVAKLRDEIMALRNECSSVYSKGRILTTEQTKLMISGITQSLNSGFA

SEQ ID NO: 4461 - protein, 133 aa, Homo Sapiens
MKVRKHVNDLYEDLRDGHNLISLLEVLSGDTLPREKGRMRFHRLQNVQIALDYLKRRQVKLVNIRNDDITDGNPKLTLGLIWTIILHFQISDIHVTGESEDMSAKERLLLWTQQATEGYAGIRCENFTTCWRD

SEQ ID NO: 4462 - protein, 154 aa, Homo Sapiens
MMGQLMKNDQDWNAKLVGLMCCMDERDKVQKKTFTKWINQHLMKVRKHVNDLYEDLRDGHNLISLLEVLSGDTLPREKGRMRFHRLQNVQIALDYLKRRQVKLVNIRNDDITDGNPKLTLGLIWTIILHFQISDIHVTGESEDMSAKERLLLWT

SEQ ID NO: 4463 - protein, 5537 aa, Homo Sapiens
MSSGNASYRCSMSSSADFSDEDDFSQKSGSASPAPGDTLPWNLPKHERSKRKIQGGSVLDPAERAVLRIADERDKVQKKTFTKWINQHLMKVRKHVNDLYEDLRDGHNLISLLEVLSGDTLPREKGRMRFHRLQNVQIALDYLKRRQVKLVNIRNDDITDGNPKLTLGLIWTIILHFQISDIHVTGESEDMSAKERLLLWTQQATEGYAGIRCENFTTCWRDGKLFNAIIHKYRPDLIDMNTVAVQSNLANLEHAFYVAEKIGVIRLLDPEDVDVSSPDEKSVITYVSSLYDAFPKVPEGGEGIGANDVEVKWIEYQNMVNYLIQWIRHHVTTMSERTFPNNPVELKALYNQYLQFKETEIPPKETEKSKIKRLYKLLEIWIEFGRIKLLQGYHPNDIEKEWGKLIIAMLEREKALRPEVERLEMLQQIANRVQRDSVICEDKLILAGNALQSDSKRLESGVQFQNEAEIAGYILECENLLRQHVIDVQILIDGKYYQADQLVQRVAKLRDEIMALRNECSSVYSKGRILTTEQTKLMISGITQSLNSGFAQTLHPSLTSGLTQSLTPSLTSSSMTSGLSSGMTSRLTPSVTPAYTPGFPSGLVPNFSSGVEPNSLQTLKLMQIRKPLLKSSLLDQNLTEEEINMKFVQDLLNWVDEMQVQLDRTEWGSDLPSVESHLENHKNVHRAIEEFESSLKEAKISEIQMTAPLKLTYAEKLHRLESQYAKLLNTSRNQERHLDTLHNFVSRATNELIWLNEKEEEEVAYDWSERNTNIARKKDYHAELMRELDQKEENIKSVQEIAEQLLLENHPARLTIEAYRAAMQTQWSWILQLCQCVEQHIKENTAYFEFFNDAKEATDYLRNLKDAIQRKYSCDRSSSIHKLEDLVQESMEEKEELLQYKSTIANLMGKAKTIIQLKPRNSDCPLKTSIPIKAICDYRQIEITIYKDDECVLANNSHRAKWKVISPTGNEAMVPSVCFTVPPPNKEAVDLANRIEQQYQNVLTLWHESHINMKSVVSWHYLINEIDRIRASNVASIKTMLPGEHQQVLSNLQSRFEDFLEDSQESQVFSGSDITQLEKEVNVCKQYYQELLKSAEREEQEESVYNLYISEVRNIRLRLENCEDRLIRQIRTPLERDDLHESVFRITEQEKLKKELERLKDDLGTITNKCEEFFSQAAASSSVPTLRSELNVVLQNMNQVYSMSSTYIDKLKTVNLVLKNTQAAEALVKLYETKLCEEEAVIADKNNIENLISTLKQWRSEVDEKRQVFHALEDELQKAKAISDEMFKTYKERDLDFDWHKEKADQLVERWQNVHVQIDNRLRDLEGIGKSLKYYRDTYHPLDDWIQQVETTQRKIQENQPENSKTLATQLNQQKMLVSEIEMKQSKMDECQKYAEQYSATVKDYELQTMTYRAMVDSQQKSPVKRRRMQSSADLIIQEFMDLRTRYTALVTLMTQYIKFAGDSLKRLEEEEKSLEEEKKEHVEKAKELQKWVSNISKTLKDAEKAGKPPFSKQKISSEEISTKKEQLSEALQTIQLFLAKHGDKMTDEERNELEKQVKTLQESYNLLFSESLKQLQESQTSGDVKVEEKIVAERQQEYKEKLQGICDLLTQTENRLIGHQEAFMIGDGTVELKKYQSKQEELQKDMQGSAQALAEVVKNTENFLKENGEKLSQEDKALIEQKLNEAKIKCEQLNLKAEQSKKELDKVVTTAIKEETEKVAAVKQLEESKTKIENLLDWLSNVDKDSERAGTKHKQVIEQNGTHFQEGDGKSAIGEEDEVNGNLLETDVDGQVGTTQENLNQQYQKVKAQHEKIISQHQAVIIATQSAQVLLEKQGQYLSPEEKEKLQKNMKELKVHYETALAESEKKMKLTHSLQEELEKFDADYTEFEHWLQQSEQELENLEAGADDINGLMTKLKRQKSFSEDVISHKGDLRYITISGNRVLEAAKSCSKRDGGKVDTSATHREVQRKLDHATDRFRSLYSKCNVLGNNLKDLVDKYQHYEDASCGLLAGLQACEATASKHLSEPIAVDPKNLQRQLEETKALQGQISSQQVAVEKLKKTAEVLLDARGSLLPAKNDIQKTLDDIVGRYEDLSKSVNERNEKLQITLTRSLSVQDGLDEMLDWMGNVESSLKEQGQVPLNSTALQDIISKNIMLEQDIAGRQSSINAMNEKVKKFMETTDPSTASSLQAKMKDLSARFSEASHKHKETLAKMEELKTKVELFENLSEKLQTFLETKTQALTEVDVPGKDVTELSQYMQESTSEFLEHKKHLEVLHSLLKEISSHGLPSDKALVLEKTNNLSKKFKEMEDTIKEKKEAVTSCQEQLDAFQVLVKSLKSWIKETTKKVPIVQPSFGAEDLGKSLEDTKKLQEKWSLKTPEIQKVNNSGISLCNLISAVTTPAKAIAAVKSGGAVLNGEGTATNTEEFWANKGLTSIKKDMTDISHGYEDLGLLLKDKIAELNTKLSKLQKAQEESSAMMQWLQKMNKTATKWQQTPAPTDTEAVKTQVEQNKSFEAELKQNVNKVQELKDKLTELLEENPDTPEAPRWKQMLTEIDSKWQELNQLTIDRQQKLEESSNNLTQFQTVEAQLKQWLVEKELMVSVLGPLSIDPNMLNTQRQQVQILLQEFATRKPQYEQLTAAGQGILSRPGEDPSLRGIVKEQLAAVTQKWDSLTGQLSDRCDWIDQAIVKSTQYQSLLRSLSDKLSDLDNKLSSSLAVSTHPDAMNQQLETAQKMKQEIQQEKKQIKVAQALCEDLSALVKEEYLKAELSRQLEGILKSFKDVEQKAENHVQHLQSACASSHQFQQMSRDFQAWLDTKKEEQNKSHPISAKLDVLESLIKDHKDFSKTLTAQSHMYEKTIAEGENLLLKTQGSEKAALQLQLNTIKTNWDTFNKQVKERENKLKESLEKALKYKEQVETLWPWIDKCQNNLEEIKFCLDPAEGENSIAKLKSLQKEMDQHFGMVELLNNTANSLLSVCEIDKEVVTDENKSLIQKVDMVTEQLHSKKFCLENMTQKFKEFQEVSKESKRQLQCAKEQLDIHDSLGSQAYSNKYLTMLQTQQKSLQALKHQVDLAKRLAQDLVVEASDSKGTSDVLLQVETIAQEHSTLSQQVDEKCSFLETKLQGIGHFQNTIREMFSQFAEFDDELDSMAPVGRDAETLQKQKETIKAFLKKLEALMASNDNANKTCKMMLATEETSPDLVGIKRDLEALSKQCNKLLDRAQAREEQVEGTIKRLEEFYSKLKEFSILLQKAEEHEESQGPVGMETETINQQLNMFKVFQKEEIEPLQGKQQDVNWLGQGLIQSAAKSTSTQGLEHDLDDVNARWKTLNKKVAQRAAQLQEALLHCGRFQDALESLLSWMVDTEELVANQKPPSAEFKVVKAQIQEQKLLQRLLDDRKSTVEVIKREGEKIATTAEPADKVKILKQLSLLDSRWEALLNKAETRNRQLEGISVVAQQFHETLEPLNEWLTTIEKRLVNCEPIGTQASKLEEQIAQHKALEDDIINHNKHLHQAVSIGQSLKVLSSREDKDMVQSKLDFSQVWYIEIQEKSHSRSELLQQALCNAKIFGEDEVELMNWLNEVHDKLSKLSVQDYSTEGLWKQQSELRVLQEDILLRKQNVDQALLNGLELLKQTTGDEVLIIQDKLEAIKARYKDITKLSTDVAKTLEQALQLARRLHSTHEELCTWLDKVEVELLSYETQVLKGEEASQAQMRPKELKKEAKNNKALLDSLNEVSSALLELVPWRAREGLEKMVAEDNERYRLVSDTITQKVEEIDAAILRSQQFDQAADAELSWITETEKKLMSLGDIRLEQDQTSAQLQVQKTFTMEILRHKDIIDDLVKSGHKIMTACSEEEKQSMKKKLDKVLKNYDTICQINSERYLQLERAQSLVNQFWETYEELWPWLTETQSIISQLPAPALEYETLRQQQEEHRQLRELIAEHKPHIDKMNKTGPQLLELSPGEGFSIQEKYVAADTLYSQIKEDVKKRAVALDEAISQSTQFHDKIDQILESLERIVERLRQPPSISAEVEKIKEQISENKNVSVDMEKLQPLYETLKQRGEEMIARSGGTDKDISAKAVQDKLDQMVFIWENIHTLVEEREAKLLDVMELAEKFWCDHMSLIVTIKDTQDFIRDLEDPGIDPSVVKQQQEAAETIREEIDGLQEELDIVINLGSELIAACGEPDKPIVKKSIDELNSAWDSLNKAWKDRIDKLEEAMQAAVQYQDGLQAVFDWVDIAGGKLASMSPIGTDLETVKQQIEELKQFKSEAYQQQIEMERLNHQAELLLKKVTEESDKHTVQDPLMELKLIWDSLEERIINRQHKLEGALLALGQFQHALDELLAWLTHTEGLLSEQKPVGGDPKAIEIELAKHHVLQNDVLAHQSTVEAVNKAGNDLIESSAGEEASNLQNKLEVLNQRWQNVLEKTEQRKQQLDGALRQAKGFHGEIEDLQQWLTDTERHLLASKPLGGLPETAKEQLNVHMEVCAAFEAKEETYKSLMQKGQQMLARCPKSAETNIDQDINNLKEKWESVETKLNERKTKLEEALNLAMEFHNSLQDFINWLTQAEQTLNVASRPSLILDTVLFQIDEHKVFANEVNSHREQIIELDKTGTHLKYFSQKQDVVLIKNLLISVQSRWEKVVQRLVERGRSLDDARKRAKQFHEAWSKLMEWLEESEKSLDSELEIANDPDKIKTQLAQHKEFQKSLGAKHSVYDTTNRTGRSLKEKTSLADDNLKLDDMLSELRDKWDTICGKSVERQNKLEEALLFSGQFTDALQALIDWLYRVEPQLAEDQPVHGDIDLVMNLIDNHKAFQKELGKRTSSVQALKRSARELIEGSRDDSSWVKVQMQELSTRWETVCALSISKQTRLEAALRQAEEFHSVVHALLEWLAEAEQTLRFHGVLPDDEDALRTLIDQHKEFMKKLEEKRAELNKATTMGDTVLAICHPDSITTIKHWITIIRARFEEVLAWAKQHQQRLASALAGLIAKQELLEALLAWLQWAETTLTDKDKEVIPQEIEEVKALIAEHQTFMEEMTRKQPDVDKVTKTYKRRAADPSSLQSHIPVLDKGRAGRKRFPASSLYPSGSQTQIETKNPRVNLLVSKWQQVWLLALERRRKLNDALDRLEELREFANFDFDIWRKKYMRWMNHKKSRVMDFFRRIDKDQDGKITRQEFIDGILSSKFPTSRLEMSAVADIFDRDGDGYIDYYEFVAALHPNKDAYKPITDADKIEDEVTRQVAKCKCAKRFQVEQIGDNKYRFFLGNQFGDSQQLRLVRILRSTVMVRVGGGWMALDEFLVKNDPCRAKGRTNMELREKFILADGASQGMAAFRPRGRRSRPSSRGASPNRSTSVSSQAAQAASPQVPATTTPKILHPLTRNYGKPWLTNSKMSTPCKAAECSDFPVPSAEGTPIQGSKLRLPGYLSGKGFHSGEDSGLITTAAARVRTQFADSKKTPSRPGSRAGSKAGSRASSRRGSDASDFDISEIQSVCSDVETVPQTHRPTPRAGSRPSTAKPSKIPTPQRKSPASKLDKSSKR

SEQ ID NO: 4464 - protein, 1479 aa, Homo Sapiens
MSSGNASYRCSMSSSADFSDEDDFSQKSGSASPAPGDTLPWNLPKHERSKRKIQGGSVLDPAERAVLRIADERDKVQKKTFTKWINQHLMKVRKHVNDLYEDLRDGHNLISLLEVLSGDTLPREKGRMRFHRLQNVQIALDYLKRRQVKLVNIRNDDITDGNPKLTLGLIWTIILHFQISDIHVTGESEDMSAKERLLLWTQQATEGYAGIRCENFTTCWRDGKLFNAIIHKYRPDLIDMNTVAVQSNLANLEHAFYVAEKIGVIRLLDPEDVDVSSPDEKSVITYVSSLYDAFPKVPEGGEGIGANDVEVKWIEYQNMVNYLIQWIRHHVTTMSERTFPNNPVELKALYNQYLQFKETEIPPKETEKSKIKRLYKLLEIWIEFGRIKLLQGYHPNDIEKEWGKLIIAMLEREKALRPEVERLEMLQQIANRVQRDSVICEDKLILAGNALQSDSKRLESGVQFQNEAEIAGYILECENLLRQHVIDVQILIDGKYYQADQLVQRVAKLRDEIMALRNECSSVYSKGRILTTEQTKLMISGITQSLNSGFAQTLHPSLTSGLTQSLTPSLTSSSMTSGLSSGMTSRLTPSVTPAYTPGFPSGLVPNFSSGVEPNSLQTLKLMQIRKPLLKSSLLDQNLTEEEINMKFVQDLLNWVDEMQVQLDRTEWGSDLPSVESHLENHKNVHRAIEEFESSLKEAKISEIQMTAPLKLTYAEKLHRLESQYAKLLNTSRNQERHLDTLHNFVSRATNELIWLNEKEEEEVAYDWSERNTNIARKKDYHAELMRELDQKEENIKSVQEIAEQLLLENHPARLTIEAYRAAMQTQWSWILQLCQCVEQHIKENTAYFEFFNDAKEATDYLRNLKDAIQRKYSCDRSSSIHKLEDLVQESMEEKEELLQYKSTIANLMGKAKTIIQLKPRNSDCPLKTSIPIKAICDYRQIEITIYKDDECVLANNSHRAKWKVISPTGNEAMVPSVCFTVPPPNKEAVDLANRIEQQYQNVLTLWHESHINMKSVVSWHYLINEIDRIRASNVASIKTMLPGEHQQVLSNLQSRFEDFLEDSQESQVFSGSDITQLEKEVNVCKQYYQELLKSAEREEQEESVYNLYISEVRNIRLRLENCEDRLIRQIRTPLERDDLHESVFRITEQEKLKKELERLKDDLGTITNKCEEFFSQAAASSSVPTLRSELNVVLQNMNQVYSMSSTYIDKLKTVNLVLKNTQAAEALVKLYETKLCEEEAVIADKNNIENLISTLKQWRSEVDEKRQVFHALEDELQKAKAISDEMFKTYKERDLDFDWHKEKADQLVERWQNVHVQIDNRLRDLEGIGKSLKYYRDTYHPLDDWIQQVETTQRKIQENQPENSKTLATQLNQQKMLVSEIEMKQSKMDECQKYAEQYSATVKDYELQTMTYRAMVDSQQKSPVKRRRMQSSADLIIQEFMDLRTRYTALVTLMTQYIKFAGDSLKRLEEEEKSLEEEK

SEQ ID NO: 4465 - protein, 7 aa, Homo Sapiens
MVDTEEL

SEQ ID NO: 4466 - protein, 177 aa, Homo Sapiens
  misc_feature (1)..(1): Xaa can be any naturally occurring amino acid
XQLNQQKMLVSEIEMKQSKMDECQKYAEQYSATVKDYELQTMTYRAMVDSQQKSPVKRRRMQSSADLIIQEFMDLRTRYTALVTLMTQYIKFAGDSLKRLEEEEIAKNKQYDMHTEVTTLKQEKNPVPSAEEWMLEGCRASGGLKKGDFLKKGLEPETFQNFDGDHACSVRDDEFKF

SEQ ID NO: 4467 - protein, 259 aa, Homo Sapiens
  misc_feature (1)..(1): Xaa can be any naturally occurring amino acid
XTRQVAKCKCAKRFQVEQIGDNKYRFGDSQQLRLVRILRSTVMVRVGGGWMALDEFLVKNDPCRAKGRTNMELREKFILADGASQGMAAFRPRGRRSRPSSRGASPNRSTSVSSQAAQAASPQVPATTTPKGTPIQGSKLRLPGYLSGKGFHSGEDSGLITTAAARVRTQFADSKKTPSRPGSRAGSKAGSRASSRRGSDASDFDISEIQSVCSDVETVPQTHRPTPRAGSRPSTAKPSKIPTPQRKSPASKLDKSSKR

SEQ ID NO: 4468 - protein, 448 aa, Homo Sapiens
  misc_feature (1)..(1): Xaa can be any naturally occurring amino acid
XVVTTAIKEETEKVAAVKQLEESKTKIENLLDWLSNVDKDSERAGTKHKQVIEQNGTHFQEGDGKSAIGEEDEVNGNLLETDVDGQVGTTQENLNQQYQKVKAQHEKIISQHQAVIIATQSAQVLLEKQGQYLSPEEKEKLQKNMKELKVHYETALAESEKKMKLTHSLQEELEKFDADYTEFEHWLQQSEQELENLEAGADDINGLMTKLKRQKSFSEDVISHKGDLRYITISGNRVLEAAKSCSKRDGGKVDTSATHREVQRKLDHATDRFRSLYSKCNVLGNNLKDLVDKYQHYEDASCGLLAGLQACEATASKHLSEPIAVDPKNLQRQLEETKALQGQISSQQVAVEKLKKTAEVLLDARGSLLPAKNDIQKTLDDIVGRYEDLSKSVNERNEKLQITLTRSLSVQDGLDEMLDWMGNVESSLKEQDVGTGYCRSSEQYKCHE

SEQ ID NO: 4469 - protein, 43 aa, Homo Sapiens
MGFCLALAWTLLVGAWTPLGAQNPISWEVQRFDGWYNNLMEHR

SEQ ID NO: 4470 - protein, 1551 aa, Homo Sapiens
MGFCLALAWTLLVGAWTPLGAQNPISWEVQRFDGWYNNLMEHRWGSKGSRLQRLVPASYADGVYQPLGEPHLPNPRDLSNTISRGPAGLASLRNRTVLGVFFGYHVLSDLVSVETPGCPAEFLNIRIPPGDPMFDPDQRGDVVLPFQRSRWDPETGRSPSNPRDPANQVTGWLDGSAIYGSSHSWSDALRSFSRGQLASGPDPAFPRDSQNPLLMWAAPDPATGQNGPRGLYAFGAERGNREPFLQALGLLWFRYHNLWAQRLARQHPDWEDEELFQHARKRVIATYQNIAVYEWLPSFLQKTLPEYTGYRPFLDPSISSEFVAASEQFLSTMVPPGVYMRNASCHFQGVINRNSSVSRALRVCNSYWSREHPSLQSAEDVDALLLGMASQIAEREDHVLVEDVRDFWPGPLKFSRTDHLASCLQRGRDLGLPSYTKARAALGLSPITRWQDINPALSRSNDTVLEATAALYNQDLSWLELLPGGLLESHRDPGPLFSTIVLEQFVRLRDGDRYWFENTRNGLFSKKEIEEIRNTTLQDVLVAVINIDPSALQPNVFVWHKGDPCPQPRQLSTEGLPACAPSVVRDYFEGSGFGFGVTIGTLCCFPLVSLLSAWIVARLRMRNFKRLQGQDRQSIVSEKLVGGMEALEWQGHKEPCRPVLVYLQPGQIRVVDGRLTVLRTIQLQPPQKVNFVLSSNRGRRTLLLKIPKEYDLVLLFNLEEERQALVENLRGALKESGLSIQEWELREQELMRAAVTREQRRHLLETFFRHLFSQVLDINQADAGTLPLDSSQKVREALTCELSRAEFAESLGLKPQDMFVESMFSLADKDGNGYLSFREFLDILVVFMKGSPEEKSRLMFRMYDFDGNGLISKDEFIRMLRSFIEISNNCLSKAQLAEVVESMFRESGFQDKEELTWEDFHFMLRDHNSELRFTQLCVKGVEVPEVIKDLCRRASYISQDMICPSPRVSARCSRSDIETELTPQRLQCPMDTDPPQEIRRRFGKKVTSFQPLLFTEAHREKFQRSCLHQTVQQFKRFIENYRRHIGCVAVFYAIAGGLFLERAYYYAFAAHHTGITDTTRVGIILSRGTAASISFMFSYILLTMCRNLITFLRETFLNRYVPFDAAVDFHRLIASTAIVLTVLHSVGHVVNVYLFSISPLSVLSCLFPGLFHDDGSELPQKYYWWFFQTVPGLTGVVLLLILAIMYVFASHHFRRRSFRGFWLTHHLYILLYVLLIIHGSFALIQLPRFHIFFLVPAIIYGGDKLVSLSRKKVEISVVKAELLPSGVTHLRFQRPQGFEYKSGQWVRIACLALGTTEYHPFTLTSAPHEDTLSLHIRAAGPWTTRLREIYSAPTGDRCARYPKLYLDGPFGEGHQEWHKFEVSVLVGGGIGVTPFASILKDLVFKSSVSCQVFCKKIYFIWVTRTQRQFEWLADIIREVEENDHQDLVSVHIYITQLAEKFDLRTTMLYICERHFQKVLNRSLFTGLRSITHFGRPPFEPFFNSLQEVHPQVRKIGVFSCGPPGMTKNVEKACQLINRQDRTHFSHHYENF

SEQ ID NO: 4471 - protein, 1551 aa, Homo Sapiens; identical to SEQ ID NO: 4470

SEQ ID NO: 4472 - protein, 444 aa, Homo Sapiens
MGFCLALAWTLLVGAWTPLGAQNPISWEVQRFDGWYNNLMEHRWGSKGSRLQRLVPASYADGVYQPLGEPHLPNPRDLSNTISRGPAGLASLRNRTVLGVFFGYHVLSDLVSVETPGCPAEFLNIRIPPGDPMFDPDQRGDVVLPFQRSRWDPETGRSPSNPRDPANQVTGWLDGSAIYGSSHSWSDALRSFSRGQLASGPDPAFPRDSQNPLLMWAAPDPATGQNGPRGLYAFGAERGNREPFLQALGLLWFRYHNLWAQRLARQHPDWEDEELFQHARKRVIATYQNIAVYEWLPSFLQKTLPEYTGYRPFLDPSISSEFVAASEQFLSTMVPPGVYMRNASCHFQGVINRNSSVSRALRVCNSYWSREHPSLQSAEDVDALLLGMASQIAEREDHVLVEDVRGTGGHSCPVQPGLILARAAPWGTPGEPPGPWTSVQHHRP

SEQ ID NO: 4473 - protein, 1197 aa, Homo Sapiens
MWMHCCWAWPPRSQSERTMCWLKMCGVSLRLSLQVVNSWPLGRGSAGLPEPDFWPGPLKFSRTDHLASCLQRGRDLGLPSYTKARAALGLSPITRWQDINPALSRSNDTVLEATAALYNQDLSWLELLPGGLLESHRDPGPLFSTIVLEQFVRLRDGDRYWFENTRNGLFSKKEIEEIRNTTLQDVLVAVINIDPSALQPNVFVWHKGDPCPQPRQLSTEGLPACAPSVVRDYFEGSGFGFGVTIGTLCCFPLVSLLSAWIVARLRMRNFKRLQGQDRQSIVSEKLVGGMEALEWQGHKEPCRPVLVYLQPGQIRVVDGRLTVLRTIQLQPPQKVNFVLSSNRGRRTLLLKIPKEYDLVLLFNLEEERQALVENLRGALKESGLSIQEWELREQELMRAAVTREQRRHLLETFFRHLFSQVLDINQADAGTLPLDSSQKVREALTCELSRAEFAESLGLKPQDMFVESMFSLADKDGNGYLSFREFLDILVVFMKGSPEEKSRLMFRMYDFDGNGLISKDEFIRMLRSFIEISNNCLSKAQLAEVVESMFRESGFQDKEELTWEDFHFMLRDHNSELRFTQLCVKGVEVPEVIKDLCRRASYISQDMICPSPRVSARCSRSDIETELTPQRLQCPMDTDPPQEIRRRFGKKVTSFQPLLFTEAHREKFQRSCLHQTVQQFKRFIENYRRHIGCVAVFYAIAGGLFLERAYYYAFAAHHTGITDTTRVGIILSRGTAASISFMFSYILLTMCRNLITFLRETFLNRYVPFDAAVDFHRLIASTAIVLTVLHSVGHVVNVYLFSISPLSVLSCLFPGLFHDDGSELPQKYYWWFFQTVPGLTGVVLLLILAIMYVFASHHFRRRSFRGFWLTHHLYILLYVLLIIHGSFALIQLPRFHIFFLVPAIIYGGDKLVSLSRKKVEISVVKAELLPSGVTHLRFQRPQGFEYKSGQWVRIACLALGTTEYHPFTLTSAPHEDTLSLHIRAAGPWTTRLREIYSAPTGDRCARYPKLYLDGPFGEGHQEWHKFEVSVLVGGGIGVTPFASILKDLVFKSSVSCQVFCKKIYFIWVTRTQRQFEWLADIIREVEENDHQDLVSVHIYITQLAEKFDLRTTMLYICERHFQKVLNRSLFTGLRSITHFGRPPFEPFFNSLQEVHPQVRKIGVFSCGPPGMTKNVEKACQLINRQDRTHFSHHYENF

SEQ ID NO: 4474 - protein, 122 aa, Homo Sapiens
MARSLGVLVALPFPLPVGFNAEEAHNIVKECVDGVLGGEDYNHNNINQWTASIVEQSLTHLVKLGKAYKYIVTCAVVQKSAYGFHTASSCFWDTTSDGTCTVRWENRTMNCIVNVFAIAIVL

SEQ ID NO: 4475 - protein, 152 aa, Homo Sapiens
MEEYHRHCDEVGFNAEEAHNIVKECVDGVLGGEDYNHNNINQWTASIVEQSLTHLVKLGKAYKYIVTCAVVQKSAYGFHTASSCFWDTTSDGTCTVRWENRTMNCGVLLCRPGWSAVMQFRLTATSASQVQVILLPQPPEYLELQAHAITPG

SEQ ID NO: 4476 - protein, 116 aa, Homo Sapiens
MEEYHRHCDEVGFNAEEAHNIVKECVDGVLGGEDYNHNNINQWTASIVEQSLTHLVKLGKAYKYIVTCAVVQKSAYGFHTASSCFWDTTSDGTCTVRWENRTMNCIVNVFAIAIVL

SEQ ID NO: 4477 - protein, 346 aa, Homo Sapiens
MAAAEPASSGQQAPAGQGQGQRPPPQPPQAQAPQPPPPPQLGGAGGGSSRHEKSLGLLTTKFVSLLQEAKDGVLDLKAAADTLAVRQKRRIYDITNVLEGIDLIEKKSKNSIQWKGVGAGCNTKEVIDRLRYLKAEIEDLELKERELDQQKLWLQQSIKNVMDDSINNRFSYVTHEDICNCFNGDTLLAIQAPSGTQLEVPIPEMGQNGQKKYQINLKSHSGPIHVLLINKESSSSKPVVFPVPPPDDLTQPSSQSLTPVTPQKSSMATQNLPEQHVSERSQALQQTSATDISSAGSISGDIIDELMSSDVFPLLRLSPTPADDYNFNLDDNEGVCDLFDVQILNY

SEQ ID NO: 4478 - protein, 345 aa, Homo Sapiens
MAAAEPASSGQQAPAGQGQGQRPPPQPPQAQAPQPPPPPQLGGAGGGSSRHEKSLGLLTTKFVSLLQEAKDGVLDLKAAADTLAVRQKRRIYDITNVLEGIDLIEKKSKNSIQWKGVGAGCNTKEVIDRLRYLKAEIEDLELKERELDQQKLWLQQSIKNVMDDSINNRFSYVTHEDICNCFNGDTLLAIQAPSGTQLEVPIPEMGQNGQKKYQINLKSHSGPIHVLLINKESSSSKPVVFPVPPPDDLTQPSSQSLTPVTPQKSSMATQNLPEQHVSERSQALQQTSATDISSGSISGDIIDELMSSDVFPLLRLSPTPADDYNFNLDDNEGVCDLFDVQILNY

SEQ ID NO: 4479 - protein, 185 aa, Homo Sapiens
MDDSINNRFSYVTHEDICNCFNGDTLLAIQAPSGTQLEVPIPEMGQNGQKKYQINLKSHSGPIHVLLINKESSSSKPVVFPVPPPDDLTQPSSQSLTPVTPQKSSMATQNLPEQHVSERSQALQQTSATDISSAGSISGDIIDELMSSDVFPLLRLSPTPADDYNFNLDDNEGVCDLFDVQILNY

SEQ ID NO: 4480 - protein, 173 aa, Homo Sapiens
MKTSVIALMVSDTLLAIQAPSGTQLEVPIPEMGQNGQKKYQINLKSHSGPIHVLLINKESSSSKPVVFPVPPPDDLTQPSSQSLTPVTPQKSSMATQNLPEQHVSERSQALQQTSATDISSAGSISGDIIDELMSSDVFPLLRLSPTPADDYNFNLDDNEGVCDLFDVQILNY

SEQ ID NO: 4481 - protein, 182 aa, Homo Sapiens
SYDSTFSYVTHEDICNCFNGDTLLAIQAPSGTQLEVPIPEMGQNGQKKYQINLKSHSGPIHVLLINKESSSSKPVVFPVPPPDDLTQPSSQSLTPVTPQKSSMATQNLPEQHVSERSQALQQTSATDISSAGSISGDIIDELMSSDVFPLLRLSPTPADDYNFNLDDNEGVCDLFDVQILNY

SEQ ID NO: 4482 - protein, 249 aa, Homo Sapiens
  misc_feature (1)..(1): Xaa can be any naturally occurring amino acid
XLLQEAKDGVLDLKAAADTLAVRQKRRIYDITNVLEGIDLIEKKSKNSIQWKGVGAGCNTKEVIDRLRYLKAEIEDLELKERELDQQKLWLQQSIKNVMDDSINNRFSYVTHEDICNCFNGDTLLAIQAPSGTQLEVPIPEMGQNGQKKYQINLKSHSGPIHVLLINKESSSSKPVVFPVPPPDDLTQPSSQSLTPVTPQKSSMATQNLPEQHVSERSQALQQTSATDISSAGSISGDIIDELMSSDGK

SEQ ID NO: 4483 - protein, 130 aa, Homo Sapiens
  misc_feature (1)..(1): Xaa can be any naturally occurring amino acid
XNKESSSSKPVVFPVPPPDDLTQPSSQSLTPVTPQKSSMATQNLPEQHVSERSQALQQTSATDISSAGSISGDIIDELMSSDGGKLKDTTGHQKQVGQGLITCLIFLLPLNCLYFCMSFYPNRRSLPLVK

SEQ ID NO: 4484 - protein, 78 aa, Homo Sapiens
MAITQFRLFKFCTCLATVFSFLKRLICRSGRGRKLSGDQITLPTTVDYSSVPKQTDVEEWTSWDEDAPTSVKIEGGNG

SEQ ID NO: 4485 - protein, 197 aa, Homo Sapiens
MAITQFRLFKFCTCLATVFSFLKRLICRSGRGRKLSGDQITLPTTVDYSSVPKQTDVEEWTSWDEDAPTSVKIEGGNGNVATQQNSLEQLEPDYFKDMTPTIRKTQKIVIKKREPLNFGIPDGSTGFSSRLAATQDLPFIHQSSELGDLDTWQENTNAWEEEEDAAWQAEEVLRQQKLADREKRAAEQQRKKMEKEA

SEQ ID NO: 4486 - protein, 213 aa, Homo Sapiens
MAITQFRLFKFCTCLATVFSFLKRLICRSGRGRKLSGDQITLPTTVDYSSVPKQTDVEEWTSWDEDAPTSVKIEGGNGNVATQQNSLEQLEPDYFKDMTPTIRKTQKIVIKKREPLNFGIPDGSTGFSSRLAATQDLPFIHQSSELGDLDTWQENTNAWEEEEDAAWQAEEVLRQQKLADREKRAAEQQRKKMEKEAQRLMKKEQNKIGVKLS

SEQ ID NO: 4487 - protein, 213 aa, Homo Sapiens; identical to SEQ ID NO: 4486

SEQ ID NO: 4488 - protein, 213 aa, Homo Sapiens; identical to SEQ ID NO: 4486

SEQ ID NO: 4489 - protein, 258 aa, Homo Sapiens
MAITQFRLFKFCTCLATVFSFLKRLICRSGRGRKLSGDQITLPTTVDYSSVPKQTDVEEWTSWDEDAPTSVKIEGGNGNVATQQNSLEQLEPDYFKDMTPTIRKTQKIVIKKREPLNFGIPDGSTGFSSRLAATQDLPFIHQSSELGDLDTWQENTNAWEEEEDAAWQAEEVLRSRTNVCLLCSLLFHHPTPTSTPYINQSVKIERVSLGQWSYGKSKEQQKLADREKRAAEQQRKKMEKEAQRLMKKEQNKIGVKLS

SEQ ID NO: 4490 - protein, 258 aa, Homo Sapiens; identical to SEQ ID NO: 4489

SEQ ID NO: 4491 - protein, 153 aa, Homo Sapiens
MAITQFRLFKFCTCLATVFSFLKRLICRSGRGRKLSGDQITLPTTVDYSSVPKQTDVEEWTSWDEDAPTSVKIEGGNGNVATQQNSLEQLEPDYFKDMTPTIRKTQKIVIKKREPLNFGIPDGSTGFSSRLAATQDLPFIHQSTSHWVGATII

SEQ ID NO: 4492 - protein, 41 aa, Homo Sapiens
MTPTIRKTQKIVIKKREPLNFGIPDGSTGFSSRLAATQDLP

SEQ ID NO: 4493 - protein, 229 aa, Homo Sapiens
MTPQLLLALVLWASCPPCSGRKGPPAALTLPRVQCRASRYPIAVDCSWTLPPAPNSTSPVSFIATYRLGMAARGHSWPCLQQTPTSTSCTITDVQLFSMAPYVLNVTAVHPWGSSSSFVPFITEHIIKPDPPEGVRLSPLAERQLQVQWEPPGSWPFPEIFSLKYWIRYKRQGAARFHRVGPIEATSFILRAVRPRARYYVQVAAQDLTDYGELSDWSLPATATMSLGK

SEQ ID NO: 4494 - protein, 83 aa, Homo Sapiens
MAKSLLKTASLSGRTKLLHQTGLSLYSTSHGFYEEEVKKTLQQFPGGSIDLQKEDNGIGILTLNNPSRMNAFSEFREISLYQC

SEQ ID NO: 4495 - protein, 125 aa, Homo Sapiens
MAKSLLKTASLSGRTKLLHQTGLSLYSTSHGFYEEEVKKTLQQFPGGSIDLQKEDNGIGILTLNNPSRMNAFSGVMMLQLLEKVIELENWTEGKGLIVRGAKNTFSSGSDLNAVKSLGTPEANFL

SEQ ID NO: 4496 - protein, 135 aa, Homo Sapiens
MAKSLLKTASLSGRTKLLHQTGLSLYSTSHGFYEEEVKKTLQQFPGGSIDLQKEDNGIGILTLNNPSRMNAFSGVMMLQLLEKVIELENWTEGKGLIVRGAKNTFSSGSDLNAVKSLGTPEDGMAVCMFMQNTLT

SEQ ID NO: 4497 - protein, 139 aa, Homo Sapiens
MAKSLLKTASLSGRTKLLHQTGLSLYSTSHGFYEEEVKKTLQQFPGGSIDLQKEDNGIGILTLNNPSRMNAFSGVMMLQLLEKVIELENWTEGKGLIVRGAKNTFSSGSDLNAVKSLGTPEDGMAVCMFMQNTLTRFMR

SEQ ID NO: 4498 - protein, 151 aa, Homo Sapiens
MAKSLLKTASLSGRTKLLHQTGLSLYSTSHGFYEEEVKKTLQQFPGGSIDLQKEDNGIGILTLNNPSRMNAFSGVMMLQLLEKVIELENWTEGKGLIVRGAKNTFSSGSDLNAVKSLGTPEDGMAVCMFMQNTLTRFMRLPLISVALVQGW

SEQ ID NO: 4499 - protein, 301 aa, Homo Sapiens
MAKSLLKTASLSGRTKLLHQTGLSLYSTSHGFYEEEVKKTLQQFPGGSIDLQKEDNGIGILTLNNPSRMNAFSGVMMLQLLEKVIELENWTEGKGLIVRGAKNTFSSGSDLNAVKSLGTPEDGMAVCMFMQNTLTRFMRLPLISVALVQGWALGGGAEFTTACDFRLMTPESKIRFVHKEMGIIPSWGGTTRLVEIIGSRQALKVLSGALKLDSKNALNIGMVEEVLQSSDETKSLEEAQEWLKQFIQGPPEVIRALKKSVCSGRELYLEEALQNERDLLGTVWGGPANLEAIAKKGKFNK

SEQ ID NO: 4500 - protein, 301 aa, Homo Sapiens; identical to SEQ ID NO: 4499

SEQ ID NO: 4501 - protein, 301 aa, Homo Sapiens; identical to SEQ ID NO: 4499

SEQ ID NO: 4502 - protein, 179 aa, Homo Sapiens
MAKSLLKTASLSGRTKLLHQTGLSLYSTSHGFYEEEVKKTLQQFPGGSIDLQKEDNGIGILTLNNPSRMNAFSGVMMLQLLEKVIELENWTEGKGLIVRGAKNTFSSGSDLNAVKSLGTPEESCRWNTEFLYTLHPVSPFINILYSYGWNGRMHVHAKHLNKIYETSFNKCCAGSRLGI

SEQ ID NO: 4503 - protein, 125 aa, Homo Sapiens
MAKSLLKTASLSGRTKLLHQTGLSLYSTSHGFYEEEVKKTLQQFPGGSIDLQKEDNGIGILTLNNPSRMNAFSGVMMLQLLEKVIELENWTEGKGLIVRGAKNTFSSGSDLNAVKSLGTPEGDFL

SEQ ID NO: 4504 - protein, 145 aa, Homo Sapiens
MAKSLLKTASLSGRTKLLHQTGLSLYSTSHGFYEEEVKKTLQQFPGGSIDLQKEDNGIGILTLNNPSRMNAFSGVMMLQLLEKVIELENWTEGKGLIVRGAKNTFSSGSDLNAVKSLGTPETSFNKCCAGSRLGIGWRSRIYYSM

SEQ ID NO: 4505 - protein, 145 aa, Homo Sapiens; identical to SEQ ID NO: 4504

SEQ ID NO: 4506 - protein, 307 aa, Homo Sapiens
MALKQEMAKSLLKTASLSGRTKLLHQTGLSLYSTSHGFYEEEVKKTLQQFPGGSIDLQKEDNGIGILTLNNPSRMNAFSGVMMLQLLEKVIELENWTEGKGLIVRGAKNTFSSGSDLNAVKSLGTPEDGMAVCMFMQNTLTRFMRLPLISVALVQGWALGGGAEFTTACDFRLMTPESKIRFVHKEMGIIPSWGGTTRLVEIIGSRQALKVLSGALKLDSKNALNIGMVEEVLQSSDETKSLEEAQEWLKQFIQGPPEVIRALKKSVCSGRELYLEEALQNERDLLGTVWGGPANLEAIAKKGKFNK

SEQ ID NO: 4507 - protein, 226 aa, Homo Sapiens
MMLQLLEKVIELENWTEGKGLIVRGAKNTFSSGSDLNAVKSLGTPEDGMAVCMFMQNTLTRFMRLPLISVALVQGWALGGGAEFTTACDFRLMTPESKIRFVHKEMGIIPSWGGTTRLVEIIGSRQALKVLSGALKLDSKNALNIGMVEEVLQSSDETKSLEEAQEWLKQFIQGPPEVIRALKKSVCSGRELYLEEALQNERDLLGTVWGGPANLEAIAKKGKFNK

SEQ ID NO: 4508 - protein, 70 aa, Homo Sapiens
MMLQLLEKVIELENWTEGKGLIVRGAKNTFSSGSDLNAVKSLGTPETSFNKCCAGSRLGIGWRSRIYYSM

SEQ ID NO: 4509 - protein, 34 aa, Homo Sapiens
  misc_feature (1)..(1): Xaa can be any naturally occurring amino acid
XFMRLPLISVALVQGWALGGGAEFTTACDFSFRH

SEQ ID NO: 4510 - protein, 76 aa, Homo Sapiens
  misc_feature (1)..(1): Xaa can be any naturally occurring amino acid
XMLQLLEKVIELENWTEGKGLIVRGAKNTFSSGSDLNAVKSLGTPEDGMAVCMFMQNTLTRFMSRMCGEVVCIQRR

SEQ ID NO: 4511 - protein, 100 aa, Homo Sapiens
  misc_feature (1)..(1): Xaa can be any naturally occurring amino acid
XTPEVKKQRGKILLGLSRLPLISVALVQGWALGGGAEFTTACDFRLMTPESKIRFVHKEMGIIPSWGGTTRLVEIIGSRQALKVLSGALKLDSKNALNIG

SEQ ID NO: 4512 - protein, 255 aa, Homo Sapiens
  misc_feature (1)..(1): Xaa can be any naturally occurring amino acid
XTSHGFYEEEVKKTLQQFPGGSIDLQKEDNGIGILTLNNPSRMNAFSGVMMLQLLEKVIELENWTEGKGLIVRGAKNTFSSGSDLNAVKSLGTPEESCRWNTEFLYTLHPVSPFINILYSYGWNGRMHVHAKHLNKIYEVKKQRGKILLGLSRLPLISVALVQGWALGGGAEFTTACDFRLMTPESKIRFVHKEMGIIPSWGGTTRLVEIIGSRQALKVLSGALKLDSKNALNIGMVEEVLQSSDETKSLEEAQE

SEQ ID NO: 4513 - protein, 567 aa, Homo Sapiens
MGTTARAALVLTYLAVASAASEGGFTATGQRQLRPEHFQEVGYAAPPSPPLSRSLPMDHPDSSQHGPPFEGQSGKEGRGPRPHSQPWLGERVGCSHIPPSIVQPPPSQEATPLQQEKLLPAQLPAEKEVGPPLPQEAVPLQKELPSLQHPNEQKEGTPAPFGDQSHPEPESWNAAQHCQQDRSQGGWGHRLDGFPPGRPSPDNLNQICLPNRQHVVYGPWNLPQSSYSHLTRQGETLNFLEIGYSRCCHCRSHTNRLECAKLVWEEAMSRFCEAEFSVKTRPHWCCTRQGEARFSCFQEEAPQPHYQLRACPSHQPDISSGLELPFPPGVPTLDNIKNICHLRRFRSVPRNLPATDPLQRELLALIQLEREFQRCCRQGNNHTCTWKAWEDTLDKYCDREYAVKTHHHLCCRHPPSPTRDECFARRAPYPNYDRDILTIDIGRVTPNLMGHLCGNQRVLTKHKHIPGLIHNMTARCCDLPFPEQACCAEEEKLTFINDLCGPRRNIWRDPALCCYLSPGDEQVNCFNINYLRNVALVSGDTENAKGQGEQGSTGGTNISSTSEPKEE

SEQ ID NO: 4514 - protein, 415 aa, Homo Sapiens
MGTTARAALVLTYLAVASAASEGGFTATGQRQLRPEHFQEVGYAAPPSPPLSRSLPMDHPDSSQHGPPFEGQSQVQPPPSQEATPLQQEKLLPAQLPAEKEVGPPLPQEAVPLQKELPSLQHPNEQKEGTPAPFGDQSHPEPESWNAAQHCQQDRSQGGWGHRLDGFPPGRPSPDNLNQICLPNRQHVVYGPWNLPQSSYSHLTRQGETLNFLEIGYSRCCHCRSHTNRLECAKLVWEDTLDKYCDREYAVKTHHHLCCRHPPSPTRDECFARRAPYPNYDRDILTIDIGRVTPNLMGHLCGNQRVLTKHKHIPGLIHNMTARCCDLPFPEQACCAEEEKLTFINDLCGPRRNIWRDPALCCYLSPGDEQVNCFNINYLRNVALVSGDTENAKGQGEQGSTGGTNISSTSEPKEE

SEQ ID NO: 4515 - protein, 540 aa, Homo Sapiens
MGTTARAALVLTYLAVASAASEGGFTATGQRQLRPEHFQEVGYAAPPSPPLSRSLPMDHPDSSQHGPPFEGQSQVQPPPSQEATPLQQEKLLPAQLPAEKEVGPPLPQEAVPLQKELPSLQHPNEQKEGTPAPFGDQSHPEPESWNAAQHCQQDRSQGGWGHRLDGFPPGRPSPDNLNQICLPNRQHVVYGPWNLPQSSYSHLTRQGETLNFLEIGYSRCCHCRSHTNRLECAKLVWEEAMSRFCEAEFSVKTRPHWCCTRQGEARFSCFQEEAPQPHYQLRACPSHQPDISSGLELPFPPGVPTLDNIKNICHLRRFRSVPRNLPATDPLQRELLALIQLEREFQRCCRQGNNHTCTWKAWEDTLDKYCDREYAVKTHHHLCCRHPPSPTRDECFARRAPYPNYDRDILTIDIGRVTPNLMGHLCGNQRVLTKHKHIPGLIHNMTARCCDLPFPEQACCAEEEKLTFINDLCGPRRNIWRDPALCCYLSPGDEQVNCFNINYLRNVALVSGDTENAKGQGEQGSTGGTNISSTSEPKEE

SEQ ID NO: 4516 - protein, 160 aa, Homo Sapiens
MKIAVLFCFFLLIIFQTDFGKNEEIPRKQRRKIYHRRLRKSSTSHKHRSNRQLGIQQTTVFTPVARLPIVNFDYSMEEKFESFSSFPGVESSYNVLPGKKGHCLVKGITMYNKAVWSPEPCTTCLCSDGRVLCDETMCHPQRCPQTVIPEGECCPVCSAT

SEQ ID NO: 4517 - protein, 643 aa, Homo Sapiens
MKIAVLFCFFLLIIFQTDFGKNEEIPRKQRRKIYHRRLRKSSTSHKHRSNRQLGIQQTTVFTPVARLPIVNFDYSMEEKFESFSSFPGVESSYNVLPGKKGHCLVKGITMYNKAVWSPEPCTTCLCSDGRVLCDETMCHPQRCPQTVIPEGECCPVCSATEQREPTNLLHKQLPPPQVGMDRIVRKEALQSEEDEEVKEEDTEQKRETPESRNQGQLYSEGDSRGGDRKQRPGEERRLAHQQQRQGREEEEDEEEEGEEGEEDEEDEEDPVRGDMFRMPSRSPLPAPPRGTLRLPSGCSLSYRTISCINAMLTQIPPLTAPQITSLELTGNSIASIPDEAFNGLPNLERLDLSKNNITSSGIGPKAFKLLKKLMRLNMDGNNLIQIPSQLPSTLEELKVNENNLQAIDEESLSDLNQLVTLELEGNNLSEANVNPLAFKPLKSLAYLRLGKNKFRIIPQGLPGSIEELYLENNQIEEITEICFNHTRKINVIVLRYNKIEENRIAPLAWINQENLESIDLSYNKLYHVPSYLPKSLLHLVLLGNQIERIPGYVFGHMEPGLEYLYLSFNKLADDGMDRVSFYGAYHSLRELFLDHNDLKSIPPGIQEMKALHFLRLNNNKIRCVSDAVLETVTNRSDVAFPLW

SEQ ID NO: 4518 - protein, 164 aa, Homo Sapiens
MKIAVLFCFFLLIIFQTDFGKNEEIPRKQRRKIYHRRLRKSSTSHKHRSNRQLGIQQTTVFTPVARLPIVNFDYSMEEKFESFSSFPGVESSYNVLPGKKGHCLVKGITMYNKAVWSPEPCTTCLCSDGRVLCDETMCHPQRCPQTVIPEGECCPVCSATGTEI

SEQ ID NO: 4519 - protein, 699 aa, Homo Sapiens
MKIAVLFCFFLLIIFQTDFGKNEEIPRKQRRKIYHRRLRKSSTSHKHRSNRQLGIQQTTVFTPVARLPIVNFDYSMEEKFESFSSFPGVESSYNVLPGKKGHCLVKGITMYNKAVWSPEPCTTCLCSDGRVLCDETMCHPQRCPQTVIPEGECCPVCSATVSYSLLSGIALNDRNEFSGDSSEQREPTNLLHKQLPPPQVGMDRIVRKEALQSEEDEEVKEEDTEQKRETPESRNQGQLYSEGDSRGGDRKQRPGEERRLAHQQQRQGREEEEDEEEEGEEGEEDEEDEEDPVRGDMFRMPSRSPLPAPPRGTLRLPSGCSLSYRTISCINAMLTQIPPLTAPQITSLELTGNSIASIPDEAFNGLPNLERLDLSKNNITSSGIGPKAFKLLKKLMRLNMDGNNLIQIPSQLPSTLEELKVNENNLQAIDEESLSDLNQLVTLELEGNNLSEANVNPLAFKPLKSLAYLRLGKNKFRIIPQGLPGSIEELYLENNQIEEITEICFNHTRKINVIVLRYNKIEENRIAPLAWINQENLESIDLSYNKLYHVPSYLPKSLLHLVLLGNQIERIPGYVFGHMEPGLEYLYLSFNKLADDGMDRVSFYGAYHSLRELFLDHNDLKSIPPGIQEMKALHFLRLNNNKIRNILPEEICNAEEDDDSNLEHLHLENNYIKIREIPSYTFSCIRSYSSIVLKPQNIK

SEQ ID NO: 4520 - protein, 102 aa, Homo Sapiens
MREYGVERDLAVYNQLLNIFPKEVFRPRNIIQRIFVHYPRQQECGIAVLEQMENHGVMPNKETEFLLIQIFGRKSYPMLKLVRLKLWFPRFMNVNPFPVPRD

SEQ ID NO: 4521 - protein, 223 aa, Homo Sapiens
MREYGVERDLAVYNQLLNIFPKEVFRPRNIIQRIFVHYPRQQECGIAVLEQMENHGVMPNKETEFLLIQIFGRKSYPMLKLVRLKLWFPRFMNVNPFPVPRDLPQDPVELAMFGLRHMEPDLSARVTIYQVPLPKDSTGAADPPQPHIVGIQSPDQQAALARHNPARPVFVEGPFSLWLRNKCVYYHILRADLLPPEEREVEETPEEWNLYYPMQLDLEYVRS

SEQ ID NO: 4522 - protein, 267 aa, Homo Sapiens
MREYGVERDLAVYNQLLNIFPKEVFRPRNIIQRIFVHYPRQQECGIAVLEQMENHGVMPNKETEFLLIQIFGRKSYPMLKLVRLKLWFPRFMNVNPFPVPRDLPQDPVELAMFGLRHMEPDLSARVTIYQVPLPKDSTGAADPPQPHIVGKSESMGAAKSLTLPRPCQVLAGPRLGSLGLWAESLAGHRACMSPHQESRVPISRPPWPATIQPGLSLLRAPSPCGSATSVCITTSSELTCCPRRRGKWKRRRRSGTSTTRCSWTWSM

SEQ ID NO: 4523 - protein, 25 aa, Homo Sapiens
MSWVQATLLARGLCRAWGGTCGAAL

SEQ ID NO: 4524 - protein, 217 aa, Homo Sapiens
MSWVQATLLARGLCRAWGGTCGAALTGTSISQVPLPKDSTGAADPPQPHIVGIQSPDQQAALARHNPARPVFVEGPFSLWLRNKCVYYHILRADLLPPEEREVEETPEEWNLYYPMQLDLEYVRSGWDNYEFDINEVEEGPVFAMCMAGAHDQATMAKWIQGLQETNPTLAQIPVVFRLAGSTRELQTSSAGLEEPPLPEDHQEEDDNLQRQQQGQS

SEQ ID NO: 4525 - protein, 82 aa, Homo Sapiens
MSWVQATLLARGLCRAWGGTCGAALTGTSISQVPLPKDSTGAADPPQPHIVGSGRDAGGVEPLLPDAAGPGVCEEWLGQLRV

SEQ ID NO: 4526 - protein, 227 aa, Homo Sapiens
MSWVQATLLARGLCRAWGGTCGAALTGTSISQVPRRLPRGLHCSAAAHSSEQSLVPSPPEPRQRPTKALVPFEDLFGQAPGGERDKASFLQTVQKFAEHSVRKRGHIDFIYLALRKMREYGVERDLAVYNQLLNIFPKEVFRPRNIIQRIFVHYPRQQECGIAVLEQMENHGVMPNKETEFLLIQIFGRKSYPMLKLVRLKLWFPRFMNVNPFPVPRDLPQDPVELA

SEQ ID NO: 4527 - protein, 296 aa, Homo Sapiens
MSWVQATLLARGLCRAWGGTCGAALTGTSISQVPRRLPRGLHCSAAAHSSEQSLVPSPPEPRQRPTKALVPFEDLFGQAPGGERDKASFLQTVQKFAEHSVRKRGHIDFIYLALRKMREYGVERDLAVYNQLLNIFPKEVFRPRNIIQRIFVHYPRQQECGIAVLEQMENHGVMPNKETEFLLIQIFGRKSYPMLKLVRLKLWFPRFMNVNPFPVPRDLPQDPVELAMFGLRHMEPDLSARVTIYQVPLPKDSTGAADPPQPHIVGSGRDAGGVEPLLPDAAGPGVCEEWLGQLRV

SEQ ID NO: 4528 - protein, 431 aa, Homo Sapiens
MSWVQATLLARGLCRAWGGTCGAALTGTSISQVPRRLPRGLHCSAAAHSSEQSLVPSPPEPRQRPTKALVPFEDLFGQAPGGERDKASFLQTVQKFAEHSVRKRGHIDFIYLALRKMREYGVERDLAVYNQLLNIFPKEVFRPRNIIQRIFVHYPRQQECGIAVLEQMENHGVMPNKETEFLLIQIFGRKSYPMLKLVRLKLWFPRFMNVNPFPVPRDLPQDPVELAMFGLRHMEPDLSARVTIYQVPLPKDSTGAADPPQPHIVGIQSPDQQAALARHNPARPVFVEGPFSLWLRNKCVYYHILRADLLPPEEREVEETPEEWNLYYPMQLDLEYVRSGWDNYEFDINEVEEGPVFAMCMAGAHDQATMAKWIQGLQETNPTLAQIPVVFRLAGSTRELQTSSAGLEEPPLPEDHQEEDDNLQRQQQGQS

SEQ ID NO: 4529 - protein, 296 aa, Homo Sapiens
MSWVQATLLARGLCRAWGGTCGAALTGTSISQVPRRLPRGLHCSAAAHSSEQSLVPSPPEPRQRPTKALVPFEDLFGQAPGGERDKASFLQTVQKFAEHSVRKRGHIDFIYLALRKMREYGVERDLAVYNQLLNIFPKEVFRPRNIIQRIFVHYPRQQECGIAVLEQMENHGVMPNKETEFLLIQIFGRKSYPMLKLVRLKLWFPRFMNVNPFPVPRDLPQDPVELAMFGLRHMEPDLSARVTIYQVPLPKDSTGAADPPQPHIVELTCCPRRRGKWKRRRRSGTSTTRCSWTWSM

SEQ ID NO: 4530 - protein, 59 aa, Homo Sapiens
  misc_feature (1)..(1): Xaa can be any naturally occurring amino acid
XMREYGVERDLAVYNQLLNIFPKEVFRPRNIIQRIFVHYPRQQECGIAVLEQMENHAQV

SEQ ID NO: 4531 - protein, 71 aa, Homo Sapiens
  misc_feature (1)..(1): Xaa can be any naturally occurring amino acid
XVNPFPVPRDLPQDPVELAMFGLRHMEPDLSARVTIYQAPCAAPDAARLPPQRFLCPKTQQVQQIPPSPTS

SEQ ID NO: 4532 - protein, 147 aa, Homo Sapiens
MTSSLKIWGILLALLCILCRLCVYSNNIYWREFIKLHYLSPSREFKEYKCDVLMREKEALKGKSFHMFIYSLWFKIQRACINEKGSDRYRNAYVWAPGALKVLECHWEKYNNRYTESRSFSYIEFHCGVDGYVDNIEDLRIIEPISN

SEQ ID NO: 4533 - protein, 147 aa, Homo Sapiens
MASSLKIWGTLLALLCILCTLLVQSKEVSWREFMKQHYLSPSREFREYKCDVLMRENEALKDKSSHMFIYISWYKIEHICTSDNWMDRFRNAYVWVQNPLKVLKCHQENSKNSYTESRSFNYIEFHCSMDGYVDSIEDLKMVEPIGN

SEQ ID NO: 4534 - protein, 578 aa, Homo Sapiens
MPFRLLIPLGLLCALLPQHHGAPGPDGSAPDPAHYRERVKAMFYHAYDSYLENAFPFDELRPLTCDGHDTWGSFSLTLIDALDTLLILGNVSEFQRVVEVLQDSVDFDIDVNASVFETNIRVVGGLLSAHLLSKKAGVEVEAGWPCSGPLLRMAEEAARKLLPAFQTPTGMPYGTVNLLHGVNPGETPVTCTAGIGTFIVEFATLSSLTGDPVFEDVARVALMRLWESRSDIGLVGNHIDVLTGKWVAQDAGIGAGVDSYFEYLVKGAILLQDKKLMAMFLEYNKAIRNYTRFDDWYLWVQMYKGTVSMPVFQSLEAYWPGLQSLIGDIDNAMRTFLNYYTVWKQFGGLPEFYNIPQGYTVEKREGYPLRPELIESAMYLYRATGDPTLLELGRDAVESIEKISKVECGFATIKDLRDHKLDNRMESFFLAETVKYLYLLFDPTNFIHNNGSTFDAVITPYGECILGAGGYIFNTEAHPIDPAALHCCQRLKEEQWEVEDLMREFYSLKRSRSKFQKNTVSSGPWEPPARPGTLFSPENHDQARERKPAKQKVPLLSCPSQPFTSKLALLGQVFLDSS

SEQ ID NO: 4535 - protein, 541 aa, Homo Sapiens
MPFRLLIPLGLLCALLPQHHGAPGPDGSAPDPAHYSFSLTLIDALDTLLILGNVSEFQRVVEVLQDSVDFDIDVNASVFETNIRVVGGLLSAHLLSKKAGVEVEAGWPCSGPLLRMAEEAARKLLPAFQTPTGMPYGTVNLLHGVNPGETPVTCTAGIGTFIVEFATLSSLTGDPVFEDVARVALMRLWESRSDIGLVGNHIDVLTGKWVAQDAGIGAGVDSYFEYLVKGAILLQDKKLMAMFLEYNKAIRNYTRFDDWYLWVQMYKGTVSMPVFQSLEAYWPGLQSLIGDIDNAMRTFLNYYTVWKQFGGLPEFYNIPQGYTVEKREGYPLRPELIESAMYLYRATGDPTLLELGRDAVESIEKISKVECGFATIKDLRDHKLDNRMESFFLAETVKYLYLLFDPTNFIHNNGSTFDAVITPYGECILGAGGYIFNTEAHPIDPAALHCCQRLKEEQWEVEDLMREFYSLKRSRSKFQKNTVSSGPWEPPARPGTLFSPENHDQARERKPAKQKVPLLSCPSQPFTSKLALLGQVFLDSS

SEQ ID NO: 4536 - protein, 932 aa, Homo Sapiens
MSEAGGRGCGSPVPQRARWRLVAATAAFCLVSATSVWTAGAEPMSREEKQKLGNQVLEMFDHAYGNYMEHAYPADELMPLTCRGRVRGQEPSRGDVDDALGKFSLTLIDSLDTLVVLNKTKEFEDAVRKVLRDVNLDNDVVVSVFETNIRVLGGLLGGHSLAIMLKEKGEYMQWYNDELLQMAKQLGYKLLPAFNTTSGLPYPRINLKFGIRKPEARTGTETDTCTACAGTLILEFAALSRFTGATIFEEYARKALDFLWEKRQRSSNLVGVTINIHTGDWVRKDSGVGAGIDSYYEYLLKAYVLLGDDSFLERFNTHYDAIMRYISQPPLLLDVHIHKPMLNARTWMDALLAFFPGLQVLKGDIRPAIETHEMLYQVIKKHNFLPEAFTTDFRVHWAQHPLRPEFAESTYFLYKATGDPYYLEVGKTLIENLNKYARVPCGFAAMKDVRTGSHEDRMDSFFLAEMFKYLYLLFADKEDIIFDIEDYIFTTEAHLLPLWLSTTNQSISKKNTTSEYTELDDSNFDWTCPNTQILFPNDPLYAQSIREPLKNVVDKSCPRGIIRVEESFRSGAKPPLRARDFMATNPEHLEILKKMGVSLIHLKDGRVQLVQHAIQAASSIDAEDGLRFMQEMIELSSQQQKEQQLPPRAVQIVSHPFFGRVVLTAGPAQFGLDLSKHKETRGFVASSKPSNGCSELTNPEAVMGKIALIQRGQCMFAEKARNIQNAGAIGGIVIDDNEGSSSDTAPLFQMAGDGKDTDDIKIPMLFLFSKEGSIILDAIREYEEVEVLLSDKAKDRDPEMENEEQPSSENDSQNQSGEQISSSSQEVDLVDQESSEENSLNSHPESLSLADMDNAASISPSEQTSNPTENHETTNLNGECTDLDNQLQEQSETEEDSNPNVSWGKKVQPIDSILADWNEDIEAFEMMEKDEL

SEQ ID NO: 4537 - protein, 905 aa, Homo Sapiens
MSREEKQKLGNQVLEMFDHAYGNYMEHAYPADELMPLTCRGRVRGQEPSRGDVDDALGKFSLTLIDSLDTLVVLNKTKEFEDAVRKVLRDVNLDNDVVVSVFETNIRVLGGLLGGHSLAIMLKEKGEYMQWYNDELLQMAKQLGYKLLPAFNTTSGLPYPRINLKFGIRKPEARTGTETDTCTACAGTLILEFAALSRFTGATIFEEYARKALDFLWEKRQRSSNLVGVTINIHTGDWVRKDSGVGAGIDSYYEYLLKAYVLLGDDSFLERFNTHYDAIMRYISQPPLLLDVHIHKPMLNARTWMDALLAFFPGLQVLKGDIRPAIETHEMLYQVIKKHNFLPEAFTTDFRVHWAQHPLRPEFAESTYFLYKATGDPYYLEVGKTLIENLNKYARVPCGFAAMKDVRTGSHEDRMDSFFLAEMFKYLYLLFADKEDIIFDIEDYIFTTEAHLLPLWLSTTNQSISKKNTTSEYTELDDSNFDWTCPNTQILFPNDPLYAQSIREPLKNVVDKSCPRGIIRVEESFRSGAKPPLRARDFMATNPEHLEILKKMGVSLIHLKDGRVQLVQHAIQAASSIDAEDGLRFMQEMIELSSQQQKEQQLPPRAVQIVSHPFFGRVVLTAGPAQFGLDLSKHKETRGFVASSKPSNGCSELTNPEAVMGKIALIQRGQCMFAEKARNIQNAGAIGGIVIDDNEGSSSDTAPLFQMAGDGKDTDDIKIPMLFLFSKEGSIILDAIREYEEVEVLLSDKAKDRAAILKGKMIPSYIINSNPEMENEEQPSSENDSQNQSGEQISSSSQEVDLVDQESSEENSLNSHPESLSLADMDNAASISPSEQTSNPTENHETTNLNGECTDLDNQLQEQSETEEDSNPNVSWGKKVQPIDSILADWNEDIEAFEMMEKDEL

SEQ ID NO: 4538 - protein, 380 aa, Homo Sapiens
VDKSCPRGIIRVEESFRSGAKPPLRARDFMATNPEHLEILKKMGVSLIHLKDGRVQLVQHAIQAASSIDAEDGLRFMQEMIELSSQQQKEQQLPPRAVQIVSHPFFGRVVLTAGPAQFGLDLSKHKETRGFVASSKPSNGCSELTNPEAVMGKIALIQRGQCMFAEKARNIQNAGAIGGIVIDDNEGSSSDTAPLFQMAGDGKDTDDIKIPMLFLFSKEGSIILDAIREYEEVEVLLSDKAKDRDPEMENEEQPSSENDSQNQSGEQISSSSQEVDLVDQESSEENSLNSHPESLSLADMDNAASISPSEQTSNPTENHETTNLNGECTDLDNQLQEQSETEEDSNPNVSWGKKVQPIDSILADWNEDIEAFEMMEKDEL

SEQ ID NO: 4539 - protein, 480 aa, Homo Sapiens
MKRSVAVWLLVGLSLGVPQFGKGDICDPNPCENGGICLPGLADGSFSCECPDGFTDPNCSSVVEVASDEEEPTSAGPCTPNPCHNGGTCEISEAYRGDTFIGYVCKCPRGFNGIHCQHNINECEVEPCKNGGICTDLVANYSCECPGEFMGRNCQYKCSGPLGIEGGIISNQQITASSTHRALFGLQKWYPYYARLNKKGLINAWTAAENDRWPWIQINLQRKMRVTGVITQGAKRIGSPEYIKSYKIAYSNDGKTWAMYKVKGTNEDMVFRGNIDNNTPYANSFTPPIKAQYVRLYPQVCRRHCTLRMELLGCELSGCSEPLGMKSGHIQDYQITASSIFRTLNMDMFTWEPRKARLDKQGKVNAWTSGHNDQSQWLQVDLLVPTKVTGIITQGAKDFGHVQFVGSYKLAYSNDGEHWTVYQDEKQRKDKVFQGNFDNDTHRKNVIDPPIYARHIRILPWSWYGRITLRSELLGCTEEE

SEQ ID NO: 4540 - protein, 470 aa, Homo Sapiens
MKRSVAVWLLVGLSLGVPQFGKGDICDPNPCENGGICLPGLADGSFSCECPDGFTDPNCSSVVEVGPCTPNPCHNGGTCEISEAYRGDTFIGYVCKCPRGFNGIHCQHNINECEVEPCKNGGICTDLVANYSCECPGEFMGRNCQYKCSGPLGIEGGIISNQQITASSTHRALFGLQKWYPYYARLNKKGLINAWTAAENDRWPWIQINLQRKMRVTGVITQGAKRIGSPEYIKSYKIAYSNDGKTWAMYKVKGTNEDMVFRGNIDNNTPYANSFTPPIKAQYVRLYPQVCRRHCTLRMELLGCELSGCSEPLGMKSGHIQDYQITASSIFRTLNMDMFTWEPRKARLDKQGKVNAWTSGHNDQSQWLQVDLLVPTKVTGIITQGAKDFGHVQFVGSYKLAYSNDGEHWTVYQDEKQRKDKVFQGNFDNDTHRKNVIDPPIYARHIRILPWSWYGRITLRSELLGCTEEE

SEQ ID NO: 4541 - protein, 212 aa, Homo Sapiens
MDYLLMIFSLLFVACQGAPETAVLGAELSAVGENGGEKPTPSPPWRLRRSKRCSCSSLMDKECVYFCHLDIIWVNTPEHVVPYGLGSPRSKRALENLLPTKATDRENRCQCASQKDKKCWNFCQAGKELRAEDIMEKDWNNHKKGKDCSKLGKKCIYQQLVRGRKIRRSSEEHLRQTRSETMRNSVKSSFHDPKLKGKPSRERYVTHNRAHW

SEQ ID NO: 4542 - protein, 178 aa, Homo Sapiens
MVSVPTTWCSVALALLVALHEGKGQAAATLEQPASSSHAQGTHLRLRRCSCSSWLDKECVYFCHLDIIWVNTPEQTAPYGLGNPPRRRRRSLPRRCQCSSARDPACATFCLRRPWTEAGAVPSRKSPADVFQTGKTGATTGELLQRLRDISTVKSLFAKRQQEAMREPRSTHSRWRKR

SEQ ID NO: 4543 - protein, 192 aa, Homo Sapiens
MEPGLWLLFGLTVTSAAGFVPCSQSGDAGRRGVSQAPTAARSEGDCEETVAGPGEETVAGPGEGTVAPTALQGPSPGSPGQEQAAEGAPEHHRSRRCTCFTYKDKECVYYCHLDIIWINTPEQTVPYGLSNYRGSFRGKRSAGPLPGNLQLSHRPHLRCACVGRYDKACLHFCTQTLDVSRLKSRTNKASRL

SEQ ID NO: 4544 - protein, 224 aa, Homo Sapiens
MEPGLWLLFGLTVTSAAGFVPCSQSGDAGRRGVSQAPTAARSEGDCEETVAGPGEETVAGPGEGTVAPTALQGPSPGSPGQEQAAEGAPEHHRSRRCTCFTYKDKECVYYCHLDIIWINTPEQTVPYGLSNYRGSFRGKRSAGPLPGNLQLSHRPHLRCACVGRYDKACLHFCTQTLDVSRQVEVKDQQSKQALDLHHPKLMPGSGLALAPSTCPRCLFQEGAP

SEQ ID NO: 4545 - protein, 238 aa, Homo Sapiens
MEPGLWLLFGLTVTSAAGFVPCSQSGDAGRRGVSQAPTAARSEGDCEETVAGPGEETVAGPGEGTVAPTALQGPSPGSPGQEQAAEGAPEHHRSRRCTCFTYKDKECVYYCHLDIIWINTPEQTVPYGLSNYRGSFRGKRSAGPLPGNLQLSHRPHLRCACVGRYDKACLHFCTQTLDVSSNSRTAEKTDKEEEGKVEVKDQQSKQALDLHHPKLMPGSGLALAPSTCPRCLFQEGAP

SEQ ID NO: 4546 - protein, 238 aa, Homo Sapiens; identical to SEQ ID NO: 4545

SEQ ID NO: 4547 - protein, 219 aa, Homo Sapiens
MEPGLWLLFGLTVTSAAGFVPCSQSGDAGRRGVSQAPTAARSEGDCEETVAGPGEETVAGPGEGTVAPTALQGPSPGSPGQEQAAEGAPEHHRSRRCTCFTYKDKECVYYCHLDIIWINTPEQTVPYGLSNYRGSFRGKRSAGPLPGNLQLSHRPHLRCACVGRYDKACLHFCTQTLDVSSNSRTAEKTDKEEEGKVRGANRGLCQRRLKSRTNKASRL

SEQ ID NO: 4548 - protein, 198 aa, Homo Sapiens
MEPGLWLLFGLTVTSAAGFVPCSQSGDAGRRGVSQAPTAARSEGDCEETVAGPGEETVAGPGEGTVAPTALQGPSPGSPGQEQAAEGAPEHHRSRRCTCFTYKDKECVYYCHLDIIWINTPEQTVPYGLSNYRGSFRGKRSAGPLPGNLQLSHRPHLRCACVGRYDKACLHFCTQTLDVSSNSRTAEKTDKEEEGKVT

SEQ ID NO: 4549 - protein, 162 aa, Homo Sapiens
KLVPFIQKASVGITVLSLCALSIDRYRAVASWSRIKGIGVPKWTAVEIVLIWVVSVVLAVPEAIGFDIITMDYKGSYLRICLLHPVQKTAFMQFYKTAKDWWLFSFYFCLPLAITAFFYTLMTCEMLRKKSGMQIALNDHLKQLSVGIGLYWYQHGFTEFLH

SEQ ID NO: 4550 - protein, 532 aa, Homo Sapiens
MNKSTCLMAAETPSKRWRLHCLAFSQRFVRAGPACSSREACSSPRAGWNPAGFRLPGRWSPFVALHLVCQIREALKLRSGHRTPSGAGSSMQPPPSLCGRALVALVLACGLSRIWGEERGFPPDRATPLLQTAEIMTPPTKTLWPKGSNASLARSLAPAEVPKGDRTAGSPPRTISPPPCQGPIEIKETFKYINTVVSCLVFVLGIIGNSTLLRIIYKNKCMRNGPNILIASLALGDLLHIVIDIPINVYKLLAEDWPFGAEMCKLVPFIQKASVGITVLSLCALSIDRYRAVASWSRIKGIGVPKWTAVEIVLIWVVSVVLAVPEAIGFDIITMDYKGSYLRICLLHPVQKTAFMQFYKTAKDWWLFSFYFCLPLAITAFFYTLMTCEMLRKKSGMQIALNDHLKQRREVAKTVFCLVLVFALCWLPLHLSRILKLTLYNQNDPNRCELLSFLLVLDYIGINMASLNSCINPIALYLVSKRFKNCFKSCLCCWCQSFEEKQSLEEKQSCLKFKANDHGYDNFRSSNKYSSS

SEQ ID NO: 4551 - protein, 442 aa, Homo Sapiens
MQPPPSLCGRALVALVLACGLSRIWGEERGFPPDRATPLLQTAEIMTPPTKTLWPKGSNASLARSLAPAEVPKGDRTAGSPPRTISPPPCQGPIEIKETFKYINTVVSCLVFVLGIIGNSTLLRIIYKNKCMRNGPNILIASLALGDLLHIVIDIPINVYKLLAEDWPFGAEMCKLVPFIQKASVGITVLSLCALSIDRYRAVASWSRIKGIGVPKWTAVEIVLIWVVSVVLAVPEAIGFDIITMDYKGSYLRICLLHPVQKTAFMQFYKTAKDWWLFSFYFCLPLAITAFFYTLMTCEMLRKKSGMQIALNDHLKQRREVAKTVFCLVLVFALCWLPLHLSRILKLTLYNQNDPNRCELLSFLLVLDYIGINMASLNSCINPIALYLVSKRFKNCFKSCLCCWCQSFEEKQSLEEKQSCLKFKANDHGYDNFRSSNKYSSS

SEQ ID NO: 4552 - protein, 409 aa, Homo Sapiens
MQPPPSLCGRALVALVLACGLSRIWGEERGFPPDRATPLLQTAEIMTPPTKTLWPKGSNASLARSLAPAEVPKGDRTAGSPPRTISPPPCQGPIEIKETFKYINTVVSCLVFVLGIIGNSTLLRIIYKNKCMRNGPNILIASLALGDLLHIVIDIPINVYKLLAEDWPFGAEMCKLVPFIQKASVGITVLSLCALSIDRYRAVASWSRIKGIGVPKWTAVEIVLIWVVSVVLAVPEAIGFDIITMDYKGSYLRICLLHPVQKTAFMQFYKTAKDWWLFSFYFCLPLAITAFFYTLMTCEMLRKKSGMQIALNDHLKQRREVAKTVFCLVLVFALCWLPLHLSRILKLTLYNQNDPNRCELLSFLLVLDYIGINMASLNSCINPIALYLVSKRFKNCFKVRDYPKIKSSL

SEQ ID NO: 4553 - protein, 442 aa, Homo Sapiens; identical to SEQ ID NO: 4551

SEQ ID NO: 4554 - protein, 436 aa, Homo Sapiens
MQPPPSLCGRALVALVLACGLSRIWGEERGFPPDRATPLLQTAEIMTPPTKTLWPKGSNASLARSLAPAEVPKGDRTAGSPPRTISPPPCQGPIEIKETFKYINTVVSCLVFVLGIIGNSTLLRIIYKNKCMRNGPNILIASLALGDLLHIVIDIPINVYKLLAEDWPFGAEMCKLVPFIQKASVGITVLSLCALSIDRYRAVASWSRIKGIGVPKWTAVEIVLIWVVSVVLAVPEAIGFDIITMDYKGSYLRICLLHPVQKTAFMQFYKTAKDWWLFSFYFCLPLAITAFFYTLMTCEMLRKKSGMQIALNDHLKQRREVAKTVFCLVLVFALCWLPLHLSRILKLTLYNQNDPNRCELLSFLLVLDYIGINMASLNSCINPIALYLVSKRFKNCFKAGPHVGNKLVMLFSVNIECDGTVNQNPTMWPERKSNNN

SEQ ID NO: 4555 - protein, 442 aa, Homo Sapiens; identical to SEQ ID NO: 4551

SEQ ID NO: 4556 - protein, 442 aa, Homo Sapiens; identical to SEQ ID NO: 4551

SEQ ID NO: 4557 - protein, 442 aa, Homo Sapiens; identical to SEQ ID NO: 4551

SEQ ID NO: 4558 - protein, 27 aa, Homo Sapiens
MLKALFLTMLTLALVKSQDTEETITYT

SEQ ID NO: 4559 - protein, 52 aa, Homo Sapiens
MLKALFLTMLTLALVKSQDTEETITYTQCTDGYEWDPVRQQCKDIDECDIVP

SEQ ID NO: 4560 - protein, 62 aa, Homo Sapiens
MLKALFLTMLTLALVKSQDTEETITYTQCTDGYEWDPVRQQCKDIDECDIVPDACKGGMKCV

SEQ ID NO: 4561 - protein, 87 aa, Homo Sapiens
MLKALFLTMLTLALVKSQDTEETITYTQCTDGYEWDPVRQQCKDIDECDIVPDACKGGMKCVNHYGGYLCLPKTAQIIVNNEQPQQE

SEQ ID NO: 4562 - protein, 106 aa, Homo Sapiens
MLKALFLTMLTLALVKSQDTEETITYTQCTDGYEWDPVRQQCKDIDECDIVPDACKGGMKCVNHYGGYLCLPKTAQIIVNNEQPQQETQPAEGTSGATTGVVAASS

SEQ ID NO: 4563 - protein, 119 aa, Homo Sapiens
MLKALFLTMLTLALVKSQDTEETITYTQCTDGYEWDPVRQQCKDIDECDIVPDACKGGMKCVNHYGGYLCLPKTAQIIVNNEQPQQETQPAEGTSGATTGVVAASSMATSGVLPGGGFV

SEQ ID NO: 4564 - protein, 172 aa, Homo Sapiens
MLKALFLTMLTLALVKSQDTEETITYTQCTDGYEWDPVRQQCKDIDECDIVPDACKGGMKCVNHYGGYLCLPKTAQIIVNNEQPQQETQPAEGTSGATTGVVAASSMATSGVLPGGGFVASAAAVAGPEMQTGRNNFVIRRNPADPQRIPSNPSHRIQCAAGYEQSEHNVCQ

SEQ ID NO: 4565 - protein, 493 aa, Homo Sapiens
MLKALFLTMLTLALVKSQDTEETITYTQCTDGYEWDPVRQQCKDIDECDIVPDACKGGMKCVNHYGGYLCLPKTAQIIVNNEQPQQETQPAEGTSGATTGVVAASSMATSGVLPGGGFVASAAAVAGPEMQTGRNNFVIRRNPADPQRIPSNPSHRIQCAAGYEQSEHNVCQDIDECTAGTHNCRADQVCINLRGSFACQCPPGYQKRGEQCVDIDECTIPPYCHQRCVNTPGSFYCQCSPGFQLAANNYTCVDINECDASNQCAQQCYNILGSFICQCNQGYELSSDRLNCEDIDECRTSSYLCQYQCVNEPGKFSCMCPQGYQVVRSRTCQDINECETTNECREDEMCWNYHGGFRCYPRNPCQDPYILTPENRCVCPVSNAMCRELPQSIVYKYMSIRSDRSVPSDIFQIQATTIYANTINTFRIKSGNENGEFYLRQTSPVSAMLVLVKSLSGPREHIVDLEMLTVSSIGTFRTSSVLRLTIIVGPFSF

SEQ ID NO: 4566 - protein, 493 aa, Homo Sapiens; identical to SEQ ID NO: 4565

SEQ ID NO: 4567 - protein, 46 aa, Homo Sapiens
MLKALFLTMLTLALVKSQDTEETITYTQCTDGYEWDPVRQQCKEDS

SEQ ID NO: 4568 - protein, 280 aa, Homo Sapiens
  misc_feature (1)..(1): Xaa can be any naturally occurring amino acid
XNNFVIRRNPADPQRIPSNPSHRIQCAAGYEQSEHNVCQDIDECTAGTHNCRADQVCINLRGSFACQCPPGYQKRGEQCVDIDECRTSSYLCQYQCVNEPGKFSCMCPQGYQVVRSRTCQDINECETTNECREDEMCWNYHGGFRCYPRNPCQDPYILTPENRCVCPVSNAMCRELPQSIVYKYMSIRSDRSVPSDIFQIQATTIYANTINTFRIKSGNENGEFYLRQTSPVSAMLVLVKSLSGPREHIVDLEMLTVSSIGTFRTSSVLRLTIIVGPFSF

SEQ ID NO: 4569 - protein, 182 aa, Homo Sapiens
DECESGAHQCSEAQTCVNFHGGYRCVDTNRCVEPYIQVSENRCLCPASNPLCREQPSSIVHRYMTITSERSVPADVFQIQATSVYPGAYNAFQIRAGNSQGDFYIRGPTPSEEQEGATLPAATLAEEPVVRGRMRKAQGPPLTGAGSSAPRASVTPRGEEVTRRADSRPRPRDLDLAGLQGS

SEQ ID NO: 4570 - protein, 183 aa, Homo Sapiens
MLPCASCLPGSLLLWALLLLLLGSASPQDSEEPDSYTECTDGYEWDPDSQHCRDVNECLTIPEACKGEMKCINHYGGYLCLPRSAAVINDLHGEGPPPPVPPAQHPNPCPPGYEPDDQDSCVDVDECAQALHDCRPSQDCHNLPGSYQCTCPDGYRKIGPECVDIDECRYRYCQHRCVNLPGS

SEQ ID NO: 4571 - protein, 202 aa, Homo Sapiens
MLPCASCLPGSLLLWALLLLLLGSASPQDSEEPDSYTECTDGYEWDPDSQHCRDVNECLTIPEACKGEMKCINHYGGYLCLPRSAAVINDLHGEGPPPPVPPAQHPNPCPPGYEPDDQDSCVDVDECAQALHDCRPSQDCHNLPGSYQCTCPDGYRKIGPECVDIDECRYRYCQHRCVNLPGSFRCQCEPGFQLGPNNRSCV

SEQ ID NO: 4572 - protein, 443 aa, Homo Sapiens
MLPCASCLPGSLLLWALLLLLLGSASPQDSEEPDSYTECTDGYEWDPDSQHCRDVNECLTIPEACKGEMKCINHYGGYLCLPRSAAVINDLHGEGPPPPVPPAQHPNPCPPGYEPDDQDSCVDVDECAQALHDCRPSQDCHNLPGSYQCTCPDGYRKIGPECVDIDECRYRYCQHRCVNLPGSFRCQCEPGFQLGPNNRSCVDVNECDMGAPCEQRCFNSYGTFLCRCHQGYELHRDGFSCSDIDECSYSSYLCQYRCINEPGRFSCHCPQGYQLLATRLCQDIDECESGAHQCSEAQTCVNFHGGYRCVDTNRCVEPYIQVSENRCLCPASNPLCREQPSSIVHRYMTITSERSVPADVFQIQATSVYPGAYNAFQIRAGNSQGDFYIRQINNVSAMLVLARPVTGPREYVLDLEMVTMNSLMSYRASSVLRLTVFVGAYTF

SEQ ID NO: 4573 - protein, 443 aa, Homo Sapiens; identical to SEQ ID NO: 4572

SEQ ID NO: 4574 - protein, 436 aa, Homo Sapiens
MLPCASCLPGSLLLWALLLLLLGSASPQDSEEPDSYTECTDGYEWDPDSQHCRDVNECLTIPEACKGEMKCINHYGGYLCLPRSAAVINDLHGEGPPPPVPPAQHPNPCPPGYEPDDQDSCVDVDECAQALHDCRPSQDCHNLPGSYQCTCPDGYRKIGPECVDIDECRYRYCQHRCVNLPGSFRCQCEPGFQLGPNNRSCVDVNECDMGAPCEQRCFNSYGTFLCRCHQGYELHRDGFSCSDIDECSYSSYLCQYRCINEPGRFSCHCPQGYQLLATRLCQDIDECESGAHQCSEAQTCVNFHGGYRCVDTNRCVEPYIQVSENRCLCPASNPLCREQPSSIVHRYMTITSERSVPADVFQIQATSVYPGAYNAFQIRAGNSQGDFYIRAQGPPLTGAGSSAPRASVTPRGEEVTRRADSRPRPRDLDLAGLQGS

SEQ ID NO: 4575 - protein, 77 aa, Homo Sapiens
MLPCASCLPGSLLLWALLLLLLGSASPQDSEEPDSYTECTDGYEWDPDSQHCRGPAQETGCAQQAPLCRCQRVSDHP

SEQ ID NO: 4576 - protein, 58 aa, Homo Sapiens
MLPCASCLPGSLLLWALLLLLLGSASPQDSEEPDSYTVGTVRAAGLGQEGCQRVSDHP

SEQ ID NO: 4577 - protein, 76 aa, Homo Sapiens
MTITSERSVPADVFQIQATSVYPGAYNAFQIRAGNSQGDFYIRQINNVSAMLVLARPVTGPREYVLDLEMVTMNSL

SEQ ID NO: 4578 - protein, 74 aa, Homo Sapiens
SIVHRYMTITSERSVPADVFQIQATSVYPGAYNAFQIRAGNSQGDFYIRQINNVSAMLVLARPVTGPREPRGPH

SEQ ID NO: 4579 - protein, 69 aa, Homo Sapiens
  misc_feature (1)..(1): Xaa can be any naturally occurring amino acid
XFQIRAGNSQGDFYIRQINNVSAMLVLARPVTGPREYVLDLEMVTMNSLMSYRASSVLRLTVFVGAYTF

SEQ ID NO: 4580 - protein, 54 aa, Homo Sapiens
  misc_feature (1)..(1): Xaa can be any naturally occurring amino acid
XQINNVSAMLVLARPVTGPREYVLDLEMVTMNSLMSYRASSVLRLTVFVGAYTF

SEQ ID NO: 4581 - protein, 183 aa, Homo Sapiens
MEFLWAPLLGLCCSLAAADRHTVFWNSSNPKFRNEDYTIHVQLNDYVDIICPHYEDHSVADAAMEQYILYLVEHEEYQLCQPQSKDQVRWQCNRPSAKHGPEKLSEKFQRFTPFTLGKEFKEGHSYYYISHSPQAHDNPQEKRLAADDPEVRVLHSIGHSAAPRLFPLAWTVLLLPLLLLQTP

SEQ ID NO: 4582 - protein, 205 aa, Homo Sapiens
MEFLWAPLLGLCCSLAAADRHTVFWNSSNPKFRNEDYTIHVQLNDYVDIICPHYEDHSVADAAMEQYILYLVEHEEYQLCQPQSKDQVRWQCNRPSAKHGPEKLSEKFQRFTPFTLGKEFKEGHSYYYISKPIHQHEDRCLRLKVTVSGKITHSPQAHDNPQEKRLAADDPEVRVLHSIGHSAAPRLFPLAWTVLLLPLLLLQTP

SEQ ID NO: 4583 - protein, 213 aa, Homo Sapiens
MAPAQRPLLPLLLLLLPLPPPPFARAEDAARANSDRYAVYWNRSNPRFHAGAGDDGGGYTVEVSINDYLDIYCPHYGAPLPPAERMEHYVLYMVNGEGHASCDHRQRGFKRWECNRPAAPGGPLKFSEKFQLFTPFSLGFEFRPGHEYYYISATPPNAVDRPCLRLKVYVRPTNETLYEAPEPIFTSNNSCSSPGGCRLFLSTIPVLWTLLGS

SEQ ID NO: 4584 - protein, 201 aa, Homo Sapiens
MRLLPLLRTVLWAAFLGSPLRGGSSLRHVVYWNSSNPRLLRGDAVVELGLNDYLDIVCPHYEGPGPPEGPETFALYMVDWPGYESCQAEGPRAYKRWVCSLPFGHVQFSEKIQRFTPFSLGFEFLPGETYYYISVPTPESSGQCLRLQVSVCCKERKSESAHPVGSPGESGTSGWRGGDTPSPLCLLLLLLLLILRLLRIL

SEQ ID NO: 4585 - protein, 193 aa, Homo Sapiens
MRLLPLLRTVLWAAFLGSPLRGGSSLRHVVYWNSSNPRLLRGDAVVELGLNDYLDIVCPHYEGPGPPEGPETFALYMVDWPGYESCQAEGPRAYKRWVCSLPFGHVQFSEKIQRFTPFSLGFEFLPGETYYYISVPTPESSGQCLRLQVSVCCKERNLPSHPKEPESSQDPLEEEGSLLPALGVPIQTDKMEH

SEQ ID NO: 4586 - protein, 207 aa, Homo Sapiens
MRLLPLLRTVLWAAFLGSPLRGGSSLRHVVYWNSSNPRLLRGDAVVELGLNDYLDIVCPHYEGPGPPEGPETFALYMVDWPGYESCQAEGPRAYKRWVCSLPFGHVQFSEKIQRFTPFSLGFEFLPGETYYYISVPTPESSGQCLRLQVSVCCKERRARVLPRSPGGGGIPAACTGGANSDRQDGALMGEIRGSEVTLAGACPLITG

SEQ ID NO: 4587 - protein, 553 aa, Homo Sapiens
MPLPWSLALPLLLSWVAGGFGNAASARHHGLLASARQPGVCHYGTKLACCYGWRRNSKGVCEATCEPGCKFGECVGPNKCRCFPGYTGKTCSQDVNECGMKPRPCQHRCVNTHGSYKCFCLSGHMLMPDATCVNSRTCAMINCQYSCEDTEEGPQCLCPSSGLRLAPNGRDCLDIDECASGKVICPYNRRCVNTFGSYYCKCHIGFELQYISGRYDCIDINECTMDSHTCSHHANCFNTQGSFKCKCKQGYKGNGLRCSAIPENSVKEVLRAPGTIKDRIKKLLAHKNSMKKKAKIKNVTPEPTRTPTPKVNLQPFNYEEIVSRGGNSHGGKKGNEEKMKEGLEDEKREEKALKNDIEERSLRGDVFFPKVNEAGEFGLILVQRKALTSKLEHKDLNISVDCSFNHGICDWKQDREDDFDWNPADRDNAIGFYMAVPALAGHKKDIGRLKLLLPDLQPQSNFCLLFDYRLAGDKVGKLRVFVKNSNNALAWEKTTSEDEKWKTGKIQLYQGTDATKSIIFEAERGKGKTGEIAVDGVLLVSGLCPDSLLSVDD

SEQ ID NO: 4588 - protein, 554 aa, Homo Sapiens
MPLPWSLALPLLLSWVAGGFGNAASARHHGLLASARQPGVCHYGTKLACCYGWRRNSKGVCEATCEPGCKFGECVGPNKCRCFPGYTGKTCSQDVNECGMKPRPCQHRCVNTHGSYKCFCLSGHMLMPDATCVNSRTCAMINCQYSCEDTEEGPQCLCPSSGLRLAPNGRDCLDIDECASGKVICPYNRRCVNTFGSYYCKCHIGFELQYISGRYDCIDINECTMDSHTCSHHANCFNTQGSFKCKCKQGYKGNGLRCSAIPENSVKEVLRAPGTIKDRIKKLLAHKNSMKKKAKIKNVTPEPTRTPTPKVNLQPFNYEEIVSRGGNSHGGKKGNEEKMKEGLEDEKREEKALKNDIEERSLRGDVFFPKVNEAGEFGLILVQRKALTSKLEHKADLNISVDCSFNHGICDWKQDREDDFDWNPADRDNAIGFYMAVPALAGHKKDIGRLKLLLPDLQPQSNFCLLFDYRLAGDKVGKLRVFVKNSNNALAWEKTTSEDEKWKTGKIQLYQGTDATKSIIFEAERGKGKTGEIAVDGVLLVSGLCPDSLLSVDD

SEQ ID NO: 4589 - protein, 66 aa, Homo Sapiens
MRGSQEVLLMWLLVLAVGGTEHAYRPGRRVCAVRAHGDPVSESFVQRVYQPFLTTCDGHRACSTYR

SEQ ID NO: 4590 - protein, 273 aa, Homo Sapiens
MRGSQEVLLMWLLVLAVGGTEHAYRPGRRVCAVRAHGDPVSESFVQRVYQPFLTTCDGHRACSTYRTIYRTAYRRSPGLAPARPRYACCPGWKRTSGLPGACGAAICQPPCRNGGSCVQPGRCRCPAGWRGDTCQSDVDECSARRGGCPQRCVNTAGSYWCQCWEGHSLSADGTLCVPKGGPPRVAPNPTGVDSAMKEEVQRLQSRVDLLEEKLQLVLAPLHSLASQALEHGLPDPGSLLVHSFQQLGRIDSLSEQISFLEEQLGSCSCKKDS

SEQ ID NO: 4591 - protein, 273 aa, Homo Sapiens; identical to SEQ ID NO: 4590

SEQ ID NO: 4592 - protein, 273 aa, Homo Sapiens; identical to SEQ ID NO: 4590

SEQ ID NO: 4593 - protein, 273 aa, Homo Sapiens; identical to SEQ ID NO: 4590

SEQ ID NO: 4594 - protein, 293 aa, Homo Sapiens
MGSRAELCTLLGGFSFLLLLIPGEGAKGGSLRESQGVCSKQTLVVPLHYNESYSQPVYKPYLTLCAGRRICSTYRTMYRVMWREVRREVQQTHAVCCQGWKKRHPGALTCEAICAKPCLNGGVCVRPDQCECAPGWGGKHCHVDVDECRTSITLCSHHCFNTAGSFTCGCPHDLVLGVDGRTCMEGSPEPPTSASILSVAVREAEKDERALKQEIHELRGRLERLEQWAGQAGAWVRAVLPVPPEELQPEQVAELWGRGDRIESLSDQVLLLEERLGACSCEDNSLGLGVNHR

SEQ ID NO: 4595 - protein, 293 aa, Homo Sapiens; identical to SEQ ID NO: 4594

SEQ ID NO: 4596 - protein, 258 aa, Homo Sapiens
MGSRAELCTLLGGFSFLLLLIPGEGAKGGSLRESQGVCSKQTLVVPLHYNESYSQPVYKPYLTLCAGRRICSTYRTMYRVMWREVRREVQQTHAVCCQGWKKRHPGALTCEAICAKPCLNGGVCVRPDQCECAPGWGGKHCHVGSFTCGCPHDLVLGVDGRTCMEGSPEPPTSASILSVAVREAEKDERALKQEIHELRGRLERLEQWAGQAGAWVRAVLPVPPEELQPEQVAELWGRGDRIESLSDQVLLLEERLGA

SEQ ID NO: 4597 - protein, 1009 aa, Homo Sapiens
MDLIRGVLLRLLLLASSLGPGAVSLRAAIRKPGKVGPPLDIKLGALNCTAFSIQWKMPRHPGSPILGYTVFYSEVGADKSLQEQLHSVPLSRDIPTTEEVIGDLKPGTEYRVSIAAYSQAGKGRLSSPRHVTTLSQDSCLPPAAPQQPHVIVVSDSEVALSWKPGASEGSAPIQYYSVEFIRPDFDKKWTSIHERIQMDSMVIKGLDPDTNYQFAVRAMNSHGPSPRSWPSDIIRTLCPEEAGSGRYGPRYITDMGAGEDDEGFEDDLDLDISFEEVKPLPATKGGNKKFLVESKKMSISNPKTISRLIPPTSASLPVTTVAPQPIPIQRKGKNGVAIMSRLFDMPCDETLCSADSFCVNDYTWGGSRCQCTLGKGGESCSEDIVIQYPQFFGHSYVTFEPLKNSYQAFQITLEFRAEAEDGLLLYCGENEHGRGDFMSLAIIRRSLQFRFNCGTGVAIIVSETKIKLGGWHTVMLYRDGLNGLLQLNNGTPVTGQSQGQYSKITFRTPLYLGGAPSAYWLVRATGTNRGFQGCVQSLAVNGRRIDMRPWPLGKALSGADVGECSSGICDEASCIHGGTCTAIKADSYICLCPLGFKGRHCEDAFTLTIPQFRESLRSYAATPWPLEPQHYLSFMEFEITFRPDSGDGVLLYSYDTGSKDFLSINLAGGHVEFRFDCGSGTGVLRSEDPLTLGNWHELRVSRTAKNGILQVDKQKIVEGMAEGGFTQIKCNTDIFIGGVPNYDDVKKNSGVLKPFSGSIQKIILNDRTIHVKHDFTSGVNVENAAHPCVRAPCAHGGSCRPRKEGYDCDCPLGFEGLHCQKAIIEAIEIPQFIGRSYLTYDNPDILKRVSGSRSNVFMRFKTTAKDGLLLWRGDSPMRPNSDFISLGLRDGALVFSYNLGSGVASIMVNGSFNDGRWHRVKAVRDGQSGKITVDDYGARTGKSPGMMRQLNINGALYVGGMKEIALHTNRQYMRGLVGCISHFTLSTDYHISLVEDAVDGKNINTCGAK

SEQ ID NO: 4598 - protein, 1017 aa, Homo Sapiens
MDLIRGVLLRLLLLASSLGPGAVSLRAAIRKPGKVGPPLDIKLGALNCTAFSIQWKMPRHPGSPILGYTVFYSEVGADKSLQEQLHSVPLSRDIPTTEEVIGDLKPGTEYRVSIAAYSQAGKGRLSSPRHVTTLSQDSCLPPAAPQQPHVIVVSDSEVALSWKPGASEGSAPIQYYSVEFIRPDFDKKWTSIHERIQMDSMVIKGLDPDTNYQFAVRAMNSHGPSPRSWPSDIIRTLCPEEAGSGRYGPRYITDMGAGEDDEGFEDDLDLDISFEEVKPLPATKGGNKKFLVESKKMSISNPKTISRLIPPTSASLPVTTVAPQPIPIQRKGKNGVAIMSRLFDMPCDETLCSADSFCVNDYTWGGSRCQCTLGKGGESCSEDIVIQYPQFFGHSYVTFEPLKNSYQAFQITLEFRAEAEDGLLLYCGENEHGRGDFMSLAIIRRSLQFRFNCGTGVAIIVSETKIKLGGWHTVMLYRDGLNGLLQLNNGTPVTGQSQGQYSKITFRTPLYLGGAPSAYWLVRATGTNRGFQGCVQSLAVNGRRIDMRPWPLGKALSGADVGECSSGICDEASCIHGGTCTAIKADSYICLCPLGFKGRHCEDAFTLTIPQFRESLRSYAATPWPLEPQHYLSFMEFEITFRPDSGDGVLLYSYDTGSKDFLSINLAGGHVEFRFDCGSGTGVLRSEDPLTLGNWHELRVSRTAKNGILQVDKQKIVEGMAEGGFTQIKCNTDIFIGGVPNYDDVKKNSGVLKPFSGSIQKIILNDRTIHVKHDFTSGVNVENAAHPCVRAPCAHGGSCRPRKEGYDCDCPLGFEGLHCQKECGNYCLNTIIEAIEIPQFIGRSYLTYDNPDILKRVSGSRSNVFMRFKTTAKDGLLLWRGDSPMRPNSDFISLGLRDGALVFSYNLGSGVASIMVNGSFNDGRWHRVKAVRDGQSGKITVDDYGARTGKSPGMMRQLNINGALYVGGMKEIALHTNRQYMRGLVGCISHFTLSTDYHISLVEDAVDGKNINTCGAK

SEQ ID NO: 4599 - protein, 47 aa, Homo Sapiens
MDLIRGVLLRLLLLASSLGPGAVSLRAAIRKPGRCWRMTVTKTWTEP

SEQ ID NO: 4600 - protein, 375 aa, Homo Sapiens
MEFEITFRPDSGDGVLLYSYDTGSKDFLSINLAGGHVEFRFDCGSGTGVLRSEDPLTLGNWHELRVSRTAKNGILQVDKQKIVEGMAEGGFTQIKCNTDIFIGGVPNYDDVKKNSGVLKPFSGSIQKIILNDRTIHVKHDFTSGVNVENAAHPCVRAPCAHGGSCRPRKEGYDCDCPLGFEGLHCQKAIIEAIEIPQFIGRSYLTYDNPDILKRVSGSRSNVFMRFKTTAKDGLLLWRGDSPMRPNSDFISLGLRDGALVFSYNLGSGVASIMVNGSFNDGRWHRVKAVRDGQSGKITVDDYGARTGKSPGMMRQLNINGALYVGGMKEIALHTNRQYMRGLVGCISHFTLSTDYHISLVEDAVDGKNINTCGAK

SEQ ID NO: 4601 - protein, 775 aa, Homo Sapiens
MHPGPEEAGSGRYGPRYITDMGAGEDDEGFEDDLDLDISFEEVKPLPATKGGNKKFLVESKKMSISNPKTISRLIPPTSASLPVTTVAPQPIPIQRKGKNGVAIMSRLFDMPCDETLCSADSFCVNDYTWGGSRCQCTLGKGGESCSEDIVIQYPQFFGHSYVTFEPLKNSYQAFQITLEFRAEAEDGLLLYCGENEHGRGDFMSLAIIRRSLQFRFNCGTGVAIIVSETKIKLGGWHTVMLYRDGLNGLLQLNNGTPVTGQSQGQYSKITFRTPLYLGGAPSAYWLVRATGTNRGFQGCVQSLAVNGRRIDMRPWPLGKALSGADVGECSSGICDEASCIHGGTCTAIKADSYICLCPLGFKGRHCEDAFTLTIPQFRESLRSYAATPWPLEPQHYLSFMEFEITFRPDSGDGVLLYSYDTGSKDFLSINLAGGHVEFRFDCGSGTGVLRSEDPLTLGNWHELRVSRTAKNGILQVDKQKIVEGMAEGGFTQIKCNTDIFIGGVPNYDDVKKNSGVLKPFSGSIQKIILNDRTIHVKHDFTSGVNVENAAHPCVRAPCAHGGSCRPRKEGYDCDCPLGFEGLHCQKAIIEAIEIPQFIGRSYLTYDNPDILKRVSGSRSNVFMRFKTTAKDGLLLWRGDSPMRPNSDFISLGLRDGALVFSYNLGSGVASIMVNGSFNDGRWHRVKAVRDGQSGKITVDDYGARTGKSPGMMRQLNINGALYVGGMKEIALHTNRQYMRGLVGCISHFTLSTDYHISLVEDAVDGKNINTCGAK

SEQ ID NO: 4602 - protein, 112 aa, Homo Sapiens
MRFKTTAKDGLLLWRGDSPMRPNSDFISLGLRDGALVFSYNLGSGVASIMVNGSFNDGRWHRVKAVRDGQSGKITVDDYGARTGKSPGMMRQLNINGALYVGGMKEIALHTN

SEQ ID NO: 4603 - protein, 152 aa, Homo Sapiens
MRFKTTAKDGLLLWRGDSPMRPNSDFISLGLRDGALVFSYNLGSGVASIMVNGSFNDGRWHRVKAVRDGQSGKITVDDYGARTGKSPGMMRQLNINGALYVGGMKEIALHTNRQYMRGLVGCISHFTLSTDYHISLVEDAVDGKNINTCGAK

SEQ ID NO: 4604 - protein, 152 aa, Homo Sapiens; identical to SEQ ID NO: 4603

SEQ ID NO: 4605 - protein, 152 aa, Homo Sapiens; identical to SEQ ID NO: 4603

SEQ ID NO: 4606 - protein, 128 aa, Homo Sapiens
MFNNCEVVLGNLEITYVQRNYDLSFLKTIQEVAGYVLIALNTVERIPLENLQIIRGNMYYENSYALAVLSNYDANKTGLKELPMRNLQEILHGAVRFSNNPALCNVESIQWRDIVSSDFLSNMSMDFQ

SEQ ID NO: 4607 - protein, 1210 aa, Homo Sapiens [sequence omitted]

SEQ ID NO: 4608 - protein, 628 aa, Homo Sapiens
MRPSGTAGAALLALLAALCPASRALEEKKVCQGTSNKLTQLGTFEDHFLSLQRMFNNCEVVLGNLEITYVQRNYDLSFLKTIQEVAGYVLIALNTVERIPLENLQIIRGNMYYENSYALAVLSNYDANKTGLKELPMRNLQEILHGAVRFSNNPALCNVESIQWRDIVSSDFLSNMSMDFQNHLGSCQKCDPSCPNGSCWGAGEENCQKLTKIICAQQCSGRCRGKSPSDCCHNQCAAGCTGPRESDCLVCRKFRDEATCKDTCPPLMLYNPTTYQMDVNPEGKYSFGATCVKKCPRNYVVTDHGSCVRACGADSYEMEEDGVRKCKKCEGPCRKVCNGIGIGEFKDSLSINATNIKHFKNCTSISGDLHILPVAFRGDSFTHTPPLDPQELDILKTVKEITGFLLIQAWPENRTDLHAFENLEIIRGRTKQHGQFSLAVVSLNITSLGLRSLKEISDGDVIISGNKNLCYANTINWKKLFGTSGQKTKIISNRGENSCKATGQVCHALCSPEGCWGPEPRDCVSCRNVSRGRECVDKCNLLEGEPREFVENSECIQCHPECLPQAMNITCTGRGPDNCIQCAHYIDGPHCVKTCPAGVMGENNTLVWKYADAGHVCHLCHPNCTYGS

SEQ ID NO: 4609 - protein, 705 aa, Homo Sapiens
MRPSGTAGAALLALLAALCPASRALEEKKVCQGTSNKLTQLGTFEDHFLSLQRMFNNCEVVLGNLEITYVQRNYDLSFLKTIQEVAGYVLIALNTVERIPLENLQIIRGNMYYENSYALAVLSNYDANKTGLKELPMRNLQEILHGAVRFSNNPALCNVESIQWRDIVSSDFLSNMSMDFQNHLGSCQKCDPSCPNGSCWGAGEENCQKLTKIICAQQCSGRCRGKSPSDCCHNQCAAGCTGPRESDCLVCRKFRDEATCKDTCPPLMLYNPTTYQMDVNPEGKYSFGATCVKKCPRNYVVTDHGSCVRACGADSYEMEEDGVRKCKKCEGPCRKVCNGIGIGEFKDSLSINATNIKHFKNCTSISGDLHILPVAFRGDSFTHTPPLDPQELDILKTVKEITGFLLIQAWPENRTDLHAFENLEIIRGRTKQHGQFSLAVVSLNITSLGLRSLKEISDGDVIISGNKNLCYANTINWKKLFGTSGQKTKIISNRGENSCKATGQVCHALCSPEGCWGPEPRDCVSCRNVSRGRECVDKCNLLEGEPREFVENSECIQCHPECLPQAMNITCTGRGPDNCIQCAHYIDGPHCVKTCPAGVMGENNTLVWKYADAGHVCHLCHPNCTYGPGNESLKAMLFCLFKLSSCNQSNDGSVSHQSGSPAAQESCLGWIPSLLPSEFQLGWGGCSHLHAWPSASVIITASSCH

SEQ ID NO: 4610 - protein, 405 aa, Homo Sapiens
MRPSGTAGAALLALLAALCPASRALEEKKVCQGTSNKLTQLGTFEDHFLSLQRMFNNCEVVLGNLEITYVQRNYDLSFLKTIQEVAGYVLIALNTVERIPLENLQIIRGNMYYENSYALAVLSNYDANKTGLKELPMRNLQEILHGAVRFSNNPALCNVESIQWRDIVSSDFLSNMSMDFQNHLGSCQKCDPSCPNGSCWGAGEENCQKLTKIICAQQCSGRCRGKSPSDCCHNQCAAGCTGPRESDCLVCRKFRDEATCKDTCPPLMLYNPTTYQMDVNPEGKYSFGATCVKKCPRNYVVTDHGSCVRACGADSYEMEEDGVRKCKKCEGPCRKVCNGIGIGEFKDSLSINATNIKHFKNCTSISGDLHILPVAFRGDSFTHTPPLDPQELDILKTVKEITGLS

SEQ ID NO: 4611 - protein, 1091 aa, Homo Sapiens
MRPSGTAGAALLALLAALCPASRALEEKKVCQGTSNKLTQLGTFEDHFLSLQRMFNNCEVVLGNLEITYVQRNYDLSFLKTIQEVAGYVLIALNTVERIPLENLQIIRGNMYYENSYALAVLSNYDANKTGLKELPMRNLQGQKCDPSCPNGSCWGAGEENCQKLTKIICAQQCSGRCRGKSPSDCCHNQCAAGCTGPRESDCLVCRKFRDEATCKDTCPPLMLYNPTTYQMDVNPEGKYSFGATCVKKCPRNYVVTDHGSCVRACGADSYEMEEDGVRKCKKCEGPCRKVCNGIGIGEFKDSLSINATNIKHFKNCTSISGDLHILPVAFRGDSFTHTPPLDPQELDILKTVKEITGFLLIQAWPENRTDLHAFENLEIIRGRTKQHGQFSLAVVSLNITSLGLRSLKEISDGDVIISGNKNLCYANTINWKKLFGTSGQKTKIISNRGENSCKATGQVCHALCSPEGCWGPEPRDCVSCRNVSRGRECVDKCNLLEGEPREFVENSECIQCHPECLPQAMNITCTGRGPDNCIQCAHYIDGPHCVKTCPAGVMGENNTLVWKYADAGHVCHLCHPNCTYGCTGPGLEGCPTNGPKIPSIATGMVGALLLLLVVALGIGLFMRRRHIVRKRTLRRLLQERELVEPLTPSGEAPNQALLRILKETEFKKIKVLGSGAFGTVYKGLWIPEGEKVKIPVAIKELREATSPKANKEILDEAYVMASVDNPHVCRLLGICLTSTVQLITQLMPFGCLLDYVREHKDNIGSQYLLNWCVQIAKGMNYLEDRRLVHRDLAARNVLVKTPQHVKITDFGLAKLLGAEEKEYHAEGGKVPIKWMALESILHRIYTHQSDVWSYGVTVWELMTFGSKPYDGIPASEISSILEKGERLPQPPICTIDVYMIMVKCWMIDADSRPKFRELIIEFSKMARDPQRYLVIQGDERMHLPSPTDSNFYRALMDEEDMDDVVDADEYLIPQQGFFSSPSTSRTPLLSSLSATSNNSTVACIDRNGLQSCPIKEDSFLQRYSSDPTGALTEDSIDDTFLPVPGEWLVWKQSCSSTSSTHSAAASLQCPSQVLPPASPEGETVADLQTQ

SEQ ID NO: 4612 - protein, 1165 aa, Homo Sapiens
MRPSGTAGAALLALLAALCPASRALEEKKVCQGTSNKLTQLGTFEDHFLSLQRMFNNCEVVLGNLEITYVQRNYDLSFLKTIQEVAGYVLIALNTVERIPLENLQIIRGNMYYENSYALAVLSNYDANKTGLKELPMRNLQGQKCDPSCPNGSCWGAGEENCQKLTKIICAQQCSGRCRGKSPSDCCHNQCAAGCTGPRESDCLVCRKFRDEATCKDTCPPLMLYNPTTYQMDVNPEGKYSFGATCVKKCPRNYVVTDHGSCVRACGADSYEMEEDGVRKCKKCEGPCRKVCNGIGIGEFKDSLSINATNIKHFKNCTSISGDLHILPVAFRGDSFTHTPPLDPQELDILKTVKEITGFLLIQAWPENRTDLHAFENLEIIRGRTKQHGQFSLAVVSLNITSLGLRSLKEISDGDVIISGNKNLCYANTINWKKLFGTSGQKTKIISNRGENSCKATGQVCHALCSPEGCWGPEPRDCVSCRNVSRGRECVDKCNLLEGEPREFVENSECIQCHPECLPQAMNITCTGRGPDNCIQCAHYIDGPHCVKTCPAGVMGENNTLVWKYADAGHVCHLCHPNCTYGCTGPGLEGCPTNGPKIPSIATGMVGALLLLLVVALGIGLFMRRRHIVRKRTLRRLLQERELVEPLTPSGEAPNQALLRILKETEFKKIKVLGSGAFGTVYKGLWIPEGEKVKIPVAIKELREATSPKANKEILDEAYVMASVDNPHVCRLLGICLTSTVQLITQLMPFGCLLDYVREHKDNIGSQYLLNWCVQIAKGMNYLEDRRLVHRDLAARNVLVKTPQHVKITDFGLAKLLGAEEKEYHAEGGKVPIKWMALESILHRIYTHQSDVWSYGVTVWELMTFGSKPYDGIPASEISSILEKGERLPQPPICTIDVYMIMVKCWMIDADSRPKFRELIIEFSKMARDPQRYLVIQGDERMHLPSPTDSNFYRALMDEEDMDDVVDADEYLIPQQGFFSSPSTSRTPLLSSLSATSNNSTVACIDRNGLQSCPIKEDSFLQRYSSDPTGALTEDSIDDTFLPVPEYINQSVPKRPAGSVQNPVYHNQPLNPAPSRDPHYQDPHSTAVGNPEYLNTVQPTCVNSTFDSPAHWAQKGSHQISLDNPDYQQDFFPKEAKPNGIFKGSTAENAEYLRVAPQSSEFIGA

SEQ ID NO: 4613 - protein, 464 aa, Homo Sapiens
MSSLTKIICAQQCSGRCRGKSPSDCCHNQCAAGCTGPRESDCLVCRKFRDEATCKDTCPPLMLYNPTTYQMDVNPEGKYSFGATCVKKCPRNYVVTDHGSCVRACGADSYEMEEDGVRKCKKCEGPCRKVCNGIGIGEFKDSLSINATNIKHFKNCTSISGDLHILPVAFRGDSFTHTPPLDPQELDILKTVKEITGFLLIQAWPENRTDLHAFENLEIIRGRTKQHGQFSLAVVSLNITSLGLRSLKEISDGDVIISGNKNLCYANTINWKKLFGTSGQKTKIISNRGENSCKATGQVCHALCSPEGCWGPEPRDCVSCRNVSRGRECVDKCNLLEGEPREFVENSECIQCHPECLPQAMNITCTGRGPDNCIQCAHYIDGPHCVKTCPAGVMGENNTLVWKYADAGHVCHLCHPNCTYGCTGPGLEGCPTNGPKIPSIATGMVGALLLLLVVALGIGLFMRR

SEQ ID NO: 4614 - protein, 77 aa, Homo Sapiens
MASVWKRLQRVGKHASKFQFVASYQELMVECTKKWQPDKLVVVWTRRSRRKSSKAHSWQPGIKNPYRGVVVWPVPEN

SEQ ID NO: 4615 - protein, 1231 aa, Homo Sapiens
MASVWKRLQRVGKHASKFQFVASYQELMVECTKKWQPDKLVVVWTRRSRRKSSKAHSWQPGIKNPYRGVVVWPVPENIEITVTLFKDPHAEEFEDKEWTFVIENESPSGRRKALATSSINMKQYASPMPTQTDVKLKFKPLSKKVVSAALQFSLSCIFLREGKATDEDMQSLASLMSMKQADIGNLDDFEEDNEDDDENRVNQEEKAAKITEIVNQLNALSSLDEDQDDCIKQANMRSAKSASSSEELINKLNFLDEAEKDLATVNSNPFDDPDAAELNPFGDPDSEEPITETASPRKTEDSFYNNSYNPFKEVQTPQYLNPFDEPEAFVTIKDSPPQSTKRKNIRPVDMSKYLYADSSKTEEEELDESNPFYEPKSTPPPNNLVNPVQELETERRVKRKAPAPPVLSPKTGVLNENTVSAGKDLSTSPKPSPIPSPVLGRKPNASQSLLVWCKEVTKNYRGVKITNFTTSWRNGLSFCAILHHFRPDLIDYKSLNPQDIKENNKKAYDGFASIGISRLLEPSDMVLLAIPDKLTVMTYLYQIRAHFSGQELNVVQIEENSSKSTYKVGNYETDTNSSVDQEKFYAELSDLKREPELQQPISGAVDFLSQDDSVFVNDSGVGESESEHQTPDDHLSPSTASPYCRRTKSDTEPQKSQQSSGRTSGSDDPGICSNTDSTQAQVLLGKKRLLKAETLELSDLYVSDKKKDMSPPFICEETDEQKLQTLDIGSNLEKEKLENSRSLECRSDPESPIKKTSLSPTSKLGYSYSRDLDLAKKKHASLRQTESDPDADRTTLNHADHSSKIVQHRLLSRQEELKERARVLLEQARRDAALKAGNKHNTNTATPFCNRQLSDQQDEERRRQLRERARQLIAEARSGVKMSELPSYGEMAAEKLKERSKASGDENDNIEIDTNEEIPEGFVVGGGDELTNLENDLDTPEQNSKLVDLKLKKLLEVQPQVANSPSSAAQKAVTESSEQDMKSGTEDLRTERLQKTTERFRNPVVFSKDSTVRKTQLQSFSQYIENRPEMKRQRSIQEDTKKGNEEKAAITETQRKPSEDEVLNKGFKDTSQYVVGELAALENEQKQIDTRAALVEKRLRYLMDTGRNTEEEEAMMQEWFMLVNKKNALIRRMNQLSLLEKEHDLERRYELLNRELRAMLAIEDWQKTEAQKRREQLLLDELVALVNKRDALVRDLDAQEKQAEEEDEHLERTLEQNKGKMAKKEEKCVLQ

SEQ ID NO: 4616 - protein, 1160 aa, Homo Sapiens
MASVWKRLQRVGKHASKFQFVASYQELMVECTKKWQPDKLVVVWTRRSRRKSSKAHSWQPGIKNPYRGVVVWPVPENIEITVTLFKDPHAEEFEDKEWTFVIENESPSGRRKALATSSINMKQYASPMPTQTDVKLKFKPLSKKVVSAALQFSLSCIFLREGKATDEDMQSLASLMSMKQADIGNLDDFEEDNEDDDENRVNQEEKAAKITELINKLNFLDEAEKDLATVNSNPFDDPDAAELNPFGDPDSEEPITETASPRKTEDSFYNNSYNPFKEVQTPQYLNPFDEPEAFVTIKDSPPQSTKRKNIRPVDMSKYLYADSSKTEEEELDESNPFYEPKSTPPPNNLVNPVQELETERRVKRKAPAPPVLSPKTGVLNENTVSAGKDLSTSPKPSPIPSPVLGRKPNASQSLLVWCKEVTKNYRGVKITNFTTSWRNGLSFCAILHHFRPDLIDYKSLNPQDIKENNKKAYDGFASIGISRLLEPSDMVLLAIPDKLTVMTYLYQIRAHFSGQELNVVQIEENSSKSTYKVGNYETDTNSSVDQEKFYAELSDLKREPELQQPISGAVDFLSQDDSVFVNDSGVGESESEHQTPDDHLSPSTASPYCRRTKSDTEPQKSQQSSGRTSGSDDPGICSNTDSTQAQVLLGKKRLLKAETLELSDLYVSDKKKDMSPPFICEETDEQKLQTLDIGSNLEKEKLENSRSLECRSDPESPIKKTSLSPTSKLGYSYSRDLDLAKKKHASLRQTESDPDADRTTLNHADHSSKIVQHRLLSRQEELKERARVLLEQARRDAALKAGNKHNTNTATPFCNRQLSDQQDEERRRQLRERARQLIAEARSGVKMSELPSYGEMAAEKLKERSKASGEQNSKLVDLKLKKLLEVQPQVANSPSSAAQKAVTESSEQDMKSGTEDLRTERLQKTTERFRNPVVFSKDSTVRKTQLQSFSQYIENRPEMKRQRSIQEDTKKGNEEKAAITETQRKPSEDEVLNKGFKDTSQYVVGELAALENEQKQIDTRAALVEKRLRYLMDTGRNTEEEEAMMQEWFMLVNKKNALIRRMNQLSLLEKEHDLERRYELLNRELRAMLAIEDWQKTEAQKRREQLLLDELVALVNKRDALVRDLDAQEKQAEEEDEHLERTLEQNKGKMAKKEEKCVLQ

SEQ ID NO: 4617 - protein, 310 aa, Homo Sapiens
MASVWKRLQRVGKHASKFQFVASYQELMVECTKKWQPDKLVVVWTRRSRRKSSKAHSWQPGIKNPYRGVVVWPVPENIEITVTLFKDPHAEEFEDKEWTFVIENESPSGRRKALATSSINMKQYASPMPTQTDVKLKFKPLSKKVVSAALQFSLSCIFLREGKATDEDMQSLASLMSMKQADIGNLDDFEEDNEDDDENRVNQEEKAAKITELINKLNFLDEAEKDLATVNSNPFDDPDAAELNPFGDPDSEEPITETASPRKTEDSFYNNSYNPFKEVQTPQYLNPFDEPEAFVTIKDSPPQSTKRKNI

SEQ ID NO: 4618 - protein, 1196 aa, Homo Sapiens
MASVWKRLQRVGKHASKFQFVASYQELMVECTKKWQPDKLVVVWTRRSRRKSSKAHSWQPGIKNPYRGVVVWPVPENIEITVTLFKDPHAEEFEDKEWTFVIENESPSGRRKALATSSINMKQYASPMPTQTDVKLKFKPLSKKVVSAALQFSLSCIFLREGKATDEDMQSLASLMSMKQADIGNLDDFEEDNEDDDENRVNQEEKAAKITELINKLNFLDEAEKDLATVNSNPFDDPDAAELNPFGDPDSEEPITETASPRKTEDSFYNNSYNPFKEVQTPQYLNPFDEPEAFVTIKDSPPQSTKRKNIRPVDMSKYLYADSSKTEEEELDESNPFYEPKSTPPPNNLVNPVQELETERRVKRKAPAPPVLSPKTGVLNENTVSAGKDLSTSPKPSPIPSPVLGRKPNASQSLLVWCKEVTKNYRGVKITNFTTSWRNGLSFCAILHHFRPDLIDYKSLNPQDIKENNKKAYDGFASIGISRLLEPSDMVLLAIPDKLTVMTYLYQIRAHFSGQELNVVQIEENSSKSTYKVGNYETDTNSSVDQEKFYAELSDLKREPELQQPISGAVDFLSQDDSVFVNDSGVGESESEHQTPDDHLSPSTASPYCRRTKSDTEPQKSQQSSGRTSGSDDPGICSNTDSTQAQVLLGKKRLLKAETLELSDLYVSDKKKDMSPPFICEETDEQKLQTLDIGSNLEKEKLENSRSLECRSDPESPIKKTSLSPTSKLGYSYSRDLDLAKKKHASLRQTESDPDADRTTLNHADHSSKIVQHRLLSRQEELKERARVLLEQARRDAALKAGNKHNTNTATPFCNRQLSDQQDEERRRQLRERARQLIAEARSGVKMSELPSYGEMAAEKLKERSKASGDENDNIEIDTNEEIPEGFVVGGGDELTNLENDLDTPEQNSKLVDLKLKKLLEVQPQVANSPSSAAQKAVTESSEQDMKSGTEDLRTERLQKTTERFRNPVVFSKDSTVRKTQLQSFSQYIENRPEMKRQRSIQEDTKKGNEEKAAITETQRKPSEDEVLNKGFKDTSQYVVGELAALENEQKQIDTRAALVEKRLRYLMDTGRNTEEEEAMMQEWFMLVNKKNALIRRMNQLSLLEKEHDLERRYELLNRELRAMLAIEDWQKTEAQKRREQLLLDELVALVNKRDALVRDLDAQEKQAEEEDEHLERTLEQNKGKMAKKEEKCVLQ

SEQ ID NO: 4619 - protein, 1160 aa, Homo Sapiens; identical to SEQ ID NO: 4616

SEQ ID NO: 4620 - protein, 41 aa, Homo Sapiens
MKQYASPMPTQTDVKLKFKPLSKKVVSAALQFSLSCIFLRE

SEQ ID NO: 4621 - protein, 95 aa, Homo Sapiens
MKQYASPMPTQTDVKLKFKPLSKKVVSAALQFSLSCIFLREGKATDEDMQSLASLMSMKQADIGNLDDFEEDNEDDDENRVNQEEKAAKITEIVN

SEQ ID NO: 4622 - protein, 108 aa, Homo Sapiens
MNWQPDKLVVVWTRRSRRKSSKAHSWQPGIKNPYRGVVVWPVPENIEITVTLFKDPHAEEFEDKEWTFVIENESPSGRRKALATSSINMKQYASPMPTQTDVKLKFKP

SEQ ID NO: 4623 - protein, 110 aa, Homo Sapiens
  misc_feature (1)..(1): Xaa can be any naturally occurring amino acid
XLEKEKLENSRSLECRSDPESPIKKTSLSPTSKLGYSYSRDLDLAKKKHASLRQTESDPDADRTTLNHADHSSKIVQQQDEERRRQLRERARQLIAEARSGVKMSELPSY

SEQ ID NO: 4624 - protein, 223 aa, Homo Sapiens
  misc_feature (1)..(1): Xaa can be any naturally occurring amino acid
XNTNTATPFCNRQLSDQDEERRRQLRERARQLIAEARSGVKMSELPSYGEMAAEKLKERSKASGDENDNIEIDTNEEIPEGFVVGGGDELTNLENDLDTPEQNSKLVDLKLKKLLEVQPQVANSPSSAAQKAVTESSEQDMKSGTEDLRTERLQKTTERFRNPVVFSKDSTVRKTQLQSFSQYIENRPEMKRQRSIQEDTKKGNEEKAAITETQRKPSEDEVL

SEQ ID NO: 4625 - protein, 154 aa, Homo Sapiens
  misc_feature (1)..(1): Xaa can be any naturally occurring amino acid
XRLLEPSDMTESDPDADRTTLNHADHSSKIVQHRLLSRQEELKERARVLLEQARRDAALKAGNKHNTNTATPFCNRQLSDQQDEERRRQLRERARQLIAEARSGVKMSELPSYGEMAAEKLKERSKASGDENDNIEIDTNEEIPEGFVVGGGDE

SEQ ID NO: 4626 - protein, 322 aa, Homo Sapiens
MGLPERRGLVLLLSLAEILFKIMILEGGGVMNLNPGNNLLHQPPAWTDSYSTCNVSSGFFGGQWHEIHPQYWTKYQVWEWLQHLLDTNQLDANCIPFQEFDINGEHLCSMSLQEFTRAAGTAGQLLYSNLQHLKWNGQCSSDLFQSTHNVIVKTEQTEPSIMNTWKDENYLYDTNYGSTVDLLDSKTFCRAQISMTTTSHLPVAESPDMKKEQDPPAKCHTKKHNPRGTHLWEFIRDILLNPDKNPGLIKWEDRSEGVFRFLKSEAVAQLWGKKKNNSSMTYEKLSRAMRYYYKREILERVDGRRLVYKFGKNARGWRENEN

SEQ ID NO: 4627 - protein, 126 aa, Homo Sapiens
MILEGGGVMNLNPGNNLLHQPPAWTDSYSTCNVSSGFFGGQWHEIHPQYWTKYQVWEWLQHLLDTNQLDANCIPFQEFDINGEHLCSMSLQEFTRAAGTAGQLLYSNLQHLKWNGDSLFLCLSLPC

SEQ ID NO: 4628 - protein, 126 aa, Homo Sapiens; identical to SEQ ID NO: 4627

SEQ ID NO: 4629 - protein, 158 aa, Homo Sapiens
MILEGGGVMNLNPGNNLLHQPPAWTDSYSTCNVSSGFFGGQWHEIHPQYWTKYQVWEWLQHLLDTNQLDANCIPFQEFDINGEHLCSMSLQEFTRAAGTAGQLLYSNLQHLKWNGQCSSDLFQSTHNVIVKTEQTEPSIMNTWKDENYLYDTNYGSTV

SEQ ID NO: 4630 - protein, 166 aa, Homo Sapiens
MILEGGGVMNLNPGNNLLHQPPAWTDSYSTCNVSSGFFGGQWHEIHPQYWTKYQVWEWLQHLLDTNQLDANCIPFQEFDINGEHLCSMSLQEFTRAAGTAGQLLYSNLQHLKWNGQCSSDLFQSTHNVIVKTEQTEPSIMNTWKDENYLYDTNYGSTVAESPDMKK

SEQ ID NO: 4631 - protein, 277 aa, Homo Sapiens
MILEGGGVMNLNPGNNLLHQPPAWTDSYSTCNVSSGFFGGQWHEIHPQYWTKYQVWEWLQHLLDTNQLDANCIPFQEFDINGEHLCSMSLQEFTRAAGTAGQLLYSNLQHLKWNGQCSSDLFQSTHNVIVKTEQTEPSIMNTWKDENYLYDTNYGSTVAESPDMKKEQDPPAKCHTKKHNPRGTHLWEFIRDILLNPDKNPGLIKWEDRSEGVFRFLKSEAVAQLWGKKKNNSSMTYEKLSRAMRYYYKREILERVDGRRLVYKFGKNARGWRENEN

SEQ ID NO: 4632 - protein, 173 aa, Homo Sapiens
MILEGGGVMNLNPGNNLLHQPPAWTDSYSTCNVSSGFFGGQWHEIHPQYWTKYQVWEWLQHLLDTNQLDANCIPFQEFDINGEHLCSMSLQEFTRAAGTAGQLLYSNLQHLKWNGQCSSDLFQSTHNVIVKTEQTEPSIMNTWKDENYLYDTNYGSTVDLLDSKTFCRAQISM

SEQ ID NO: 4633 - protein, 300 aa, Homo Sapiens
MILEGGGVMNLNPGNNLLHQPPAWTDSYSTCNVSSGFFGGQWHEIHPQYWTKYQVWEWLQHLLDTNQLDANCIPFQEFDINGEHLCSMSLQEFTRAAGTAGQLLYSNLQHLKWNGQCSSDLFQSTHNVIVKTEQTEPSIMNTWKDENYLYDTNYGSTVDLLDSKTFCRAQISMTTTSHLPVAESPDMKKEQDPPAKCHTKKHNPRGTHLWEFIRDILLNPDKNPGLIKWEDRSEGVFRFLKSEAVAQLWGKKKNNSSMTYEKLSRAMRYYYKREILERVDGRRLVYKFGKNARGWRENEN

SEQ ID NO: 4634 - protein, 300 aa, Homo Sapiens; identical to SEQ ID NO: 4633

SEQ ID NO: 4635 - protein, 300 aa, Homo Sapiens; identical to SEQ ID NO: 4633

SEQ ID NO: 4636 - protein, 370 aa, Homo Sapiens
GLGRPTPGLSQGPGKETLESALIALDSEKPKKLRFHPKQLYFSARQGELQKVLLMLVDGIDPNFKMEHQNKRSPLHAAAEAGHVDICHMLVQAGANIDTCSEDQRTPLMEAAENNHLEAVKYLIKAGALVDPKDAEGSTCLHLAAKKGHYEVVQYLLSNGQMDVNCQDDGGWTPMIWATEYKHVDLVKLLLSKGSDINIRDNEENICLHWAAFSGCVDIAEILLAAKCDLHAVNIHGDSPLHIAARENRYDCVVLFLSRDSDVTLKNKEGETPLQCASLNSQVWSALQMSKALQDSAPDRPSPVERIVSRDIARGYERIPIPCVNAVDSEPCPSNYKYVSQNCVTSPMNIDRNITHLQALDMFLPAQPSP

SEQ ID NO: 4637 - protein, 1298 aa, Homo Sapiens
MAAADAEAVPARGEPQQDCCVKTELLGEETPMAADEGSAEKQAGEAHMAADGETNGSCENSDASSHANAAKHTQDSARVNPQDGTNTLTRIAENGVSERDSEAAKQNHVTADDFVQTSVIGSNGYILNKPALQAQPLRTTSTLASSLPGHAAKTLPGGAGKGRTPSAFPQTPAAPPATLGEGSADTEDRKLPAPGADVKVHRARKTMPKSVVGLHAASKDPREVREARDHKEPKEEINKNISDFGRQQLLPPFPSLHQSLPQNQCYMATTKSQTACLPFVLAAAVSRKKKRRMGTYSLVPKKKTKVLKQRTVIEMFKSITHSTVGSKGEKDLGASSLHVNGESLEMDSDEDDSEELEEDDGHGAEQAAAFPTEDSRTSKESMSEADRAQKMDGESEEEQESVDTGEEEEGGDESDLSSESSIKKKFLKRKGKTDSPWIKPARKRRRRSRKKPSGALGSESYKSSAGSAEQTAPGDSTGYMEVSLDSLDLRVKGILSSQAEGLANGPDVLETDGLQEVPLCSCRMETPKSREITTLANNQCMATESVDHELGRCTNSVVKYELMRPSNKAPLLVLCEDHRGRMVKHQCCPGCGYFCTAGNFMECQPESSISHRFHKDCASRVNNASYCPHCGEESSKAKEVTIAKADTTSTVTPVPGQEKGSALEGRADTTTGSAAGPPLSEDDKLQGAASHVPEGFDPTGPAGLGRPTPGLSQGPGKETLESALIALDSEKPKKLRFHPKQLYFSARQGELQKVLLMLVDGIDPNFKMEHQNKRSPLHAAAEAGHVDICHMLVQAGANIDTCSEDQRTPLMEAAENNHLEAVKYLIKAGALVDPKDAEGSTCLHLAAKKGHYEVVQYLLSNGQMDVNCQDDGGWTPMIWATEYKHVDLVKLLLSKGSDINIRDNEENICLHWAAFSGCVDIAEILLAAKCDLHAVNIHGDSPLHIAARENRYDCVVLFLSRDSDVTLKNKEGETPLQCASLNSQVWSALQMSKALQDSAPDRPSPVERIVSRDIARGYERIPIPCVNAVDSEPCPSNYKYVSQNCVTSPMNIDRNITHLQYCVCIDDCSSSNCMCGQLSMRCWYDKDGRLLPEFNMAEPPLIFECNHACSCWRNCRNRVVQNGLRARLQLYRTRDMGWGVRSLQDIPPGTFVCEYVGELISDSEADVREEDSYLFDLDNKDGEVYCIDARFYGNVSRFINHHCEPNLVPVRVFMAHQDLRFPRIAFFSTRLIEAGEQLGFDYGERFWDIKGKLFSCRCGSPKCRHSSAALAQRQASAAQEAQEDGLPDTSSAAAADPL

SEQ ID NO: 4638 - protein, 808 aa, Homo Sapiens
MAAADAEAVPARGEPQQDCCVKTELLGEETPMAADEGSAEKQAGEAHMAADGETNGSCENSDASSHANAAKHTQDSARVNPQDGTNTLTRIAENGVSERDSEAAKQNHVTADDFVQTSVIGSNGYILNKPALQAQPLRTTSTLASSLPGHAAKTLPGGAGKGRTPSAFPQTPAAPPATLGEGSADTEDRKLPAPGADVKVHRARKTMPKSVVGLHAASKDPREVREARDHKEPKEEINKNISDFGRQQLLPPFPSLHQSLPQNQCYMATTKSQTACLPFVLAAAVSRKKKRRMGTYSLVPKKKTKVLKQRTVIEMFKSITHSTVGSKGEKDLGASSLHVNGESLEMDSDEDDSEELEEDDGHGAEQAAAFPTEDSRTSKESMSEADRAQKMDGESEEEQESVDTGEEEEGGDESDLSSESSIKKKFLKRKGKTDSPWIKPARKRRRRSRKKPSGALGSESYKSSAGSAEQTAPGDSTGYMEVSLDSLDLRVKGILSSQAEGLANGPDVLETDGLQEVPLCSCRMETPKSREITTLANNQCMATESVDHELGRCTNSVVKYELMRPSNKAPLLVLCEDHRGRMVKHQCCPGCGYFCTAGNFMECQPESSISHRFHKDCASRVNNASYCPHCGEESSKAKEVTIAKADTTSTVTPVPGQEKGSALEGRADTTTGSAAGPPLSEDDKLQGAASHVPEGFDPTGPAGLGRPTPGLSQGPGKETLESALIALDSEKPKKLRFHPKQLYFSARQGELQKVLLMLVDGIDPNFKMEHQNKRSPLHAAAEAGHVDICHMLVQFCRLGSPRSRGCLW

SEQ ID NO: 4639 - protein, 556 aa, Homo Sapiens
MAAADAEAVPARGEPQQDCCVKTELLGEETPMAADEGSAEKQAGEAHMAADGETNGSCENSDASSHANAAKHTQDSARVNPQDGTNTLTRIAENGVSERDSEAAKQNHVTADDFVQTSVIGSNGYILNKPALQAQPLRTTSTLASSLPGHAAKTLPGGAGKGRTPSAFPQTPAAPPATLGEGSADTEDRKLPAPGADVKVHRARKTMPKSVVGLHAASKDPREVREARDHKEPKEEINKNISDFGRQQLLPPFPSLHQSLPQNQCYMATTKSQTACLPFVLAAAVSRKKKRRMGTYSLVPKKKTKVLKQRTVIEMFKSITHSTVGSKGEKDLGASSLHVNGESLEMDSDEDDSEELEEDDGHGAEQAAAFPTEDSRTSKESMSEADRAQKMDGESEEEQESVDTGEEEEGGDESDLSSESSIKKKFLKRKGKTDSPWIKPARKRRRRSRKKPSGALGSESYKSSAGSAEQTAPGDSTGYMEVSLDSLDLRVKGILSSQAEGLANGPDVLETDGLQEVPLCSCRMETPKSREITTLANNQCMATESVDHEVSTFVFI

SEQ ID NO: 4640 - protein, 66 aa, Homo Sapiens
MAAADAERHLWLPMKAQQRNRQERPTWLRTVRPMGLVKTAMPAVMQMLQSTLRTAQGSTPRMAPTH

SEQ ID NO: 4641 - protein, 106 aa, Homo Sapiens
MAADEGSAEKQAGEAHMAADGETNGSCENSDASSHANAAKHTQDSARVNPQDGTNTLTRIAENGVSERDSEAAKQNHVTADDFVQTSVIGSNGYILNKPALQAQPL

SEQ ID NO: 4642 - protein, 134 aa, Homo Sapiens
MAADEGSAEKQAGEAHMAADGETNGSCENSDASSHANAAKHTQDSARVNPQDGTNTLTRIAENGVSERDSEAAKQNHVTADDFVQTSVIGSNGYILNKPALQAQPLRTTSTLASSLPGHAAKTLPGGAGKGRTP

SEQ ID NO: 4643 - protein, 137 aa, Homo Sapiens
MAADEGSAEKQAGEAHMAADGETNGSCENSDASSHANAAKHTQDSARVNPQDGTNTLTRIAENGVSERDSEAAKQNHVTADDFVQTSVIGSNGYILNKPALQAQPLRTTSTLASSLPGHAAKTLPGGAGKGRTPSAF

SEQ ID NO: 4644 - protein, 139 aa, Homo Sapiens
MAADEGSAEKQAGEAHMAADGETNGSCENSDASSHANAAKHTQDSARVNPQDGTNTLTRIAENGVSERDSEAAKQNHVTADDFVQTSVIGSNGYILNKPALQAQPLRTTSTLASSLPGHAAKTLPGGAGKGRTPSAFPQ

SEQ ID NO: 4645 - protein, 982 aa, Homo Sapiens
MAADEGSAEKQAGEAHMAADGETNGSCENSDASSHANAAKHTQDSARVNPQDGTNTLTRIAENGVSERDSEAAKQNHVTADDFVQTSVIGSNGYILNKPALQAQPLRTTSTLASSLPGHAAKTLPGGAGKGRTPSAFPQTPAAPPATLGEGSADTEDRKLPAPGADVKVHRARKTMPKSVVGLHAASKDPREVREARDHKEPKEEINKNISDFGRQQLLPPFPSLHQSLPQNQCYMATTKSQTAAAVSRKKKRRMGTYSLVPKKKTKVLKQRTVIEMFKSITHSTVGSKGEKDLGASSLHVNGESLEMDSDEDDSEELEEDDGHGAEQAAAFPTEDSRTSKESMSEADRAQKMDGESEEEQESVDTGEEEEGGDESDLSSESSIKKKFLKRKGKTDSPWIKPARKRRRRSRKKPSGALGSESYKSSAGSAEQTAPGDSTGYMEVSLDSLDLRVKGILSSQAEGLANGPDVLETDGLQEVPLCSCRMETPKSREITTLANNQCMATESVDHELGRCTNSVVKYELMRPSNKAPLLVLCEDHRGRMVKHQCCPGCGYFCTAGNFMECQPESSISHRFHKDCASRVNNASYCPHCGEESSKAKEVTIAKADTTSTVTPVPGQEKGSALEGRADTTTGSAAGPPLSEDDKLQGAASHVPEGFDPTGPAGLGRPTPGLSQGPGKETLESALIALDSEKPKKLRFHPKQLYFSARQGELQKVLLMLVDGIDPNFKMEHQNKRSPLHAAAEAGHVDICHMLVQAGANIDTCSEDQRTPLMEAAENNHLEAVKYLIKAGALVDPKDAEGSTCLHLAAKKGHYEVVQYLLSNGQMDVNCQDDGGWTPMIWATEYKHVDLVKLLLSKGSDINIRDNEENICLHWAAFSGCVDIAEILLAAKCDLHAVNIHGDSPLHIAARENRYDCVVLFLSRDSDVTLKNKEGETPLQCASLNSQVWSALQMSKALQDSAPDRPSPVERIVSRDIARGYER

SEQ ID NO: 4646 - protein, 1267 aa, Homo Sapiens
MAADEGSAEKQAGEAHMAADGETNGSCENSDASSHANAAKHTQDSARVNPQDGTNTLTRIAENGVSERDSEAAKQNHVTADDFVQTSVIGSNGYILNKPALQAQPLRTTSTLASSLPGHAAKTLPGGAGKGRTPSAFPQTPAAPPATLGEGSADTEDRKLPAPGADVKVHRARKTMPKSVVGLHAASKDPREVREARDHKEPKEEINKNISDFGRQQLLPPFPSLHQSLPQNQCYMATTKSQTACLPFVLAAAVSRKKKRRMGTYSLVPKKKTKVLKQRTVIEMFKSITHSTVGSKGEKDLGASSLHVNGESLEMDSDEDDSEELEEDDGHGAEQAAAFPTEDSRTSKESMSEADRAQKMDGESEEEQESVDTGEEEEGGDESDLSSESSIKKKFLKRKGKTDSPWIKPARKRRRRSRKKPSGALGSESYKSSAGSAEQTAPGDSTGYMEVSLDSLDLRVKGILSSQAEGLANGPDVLETDGLQEVPLCSCRMETPKSREITTLANNQCMATESVDHELGRCTNSVVKYELMRPSNKAPLLVLCEDHRGRMVKHQCCPGCGYFCTAGNFMECQPESSISHRFHKDCASRVNNASYCPHCGEESSKAKEVTIAKADTTSTVTPVPGQEKGSALEGRADTTTGSAAGPPLSEDDKLQGAASHVPEGFDPTGPAGLGRPTPGLSQGPGKETLESALIALDSEKPKKLRFHPKQLYFSARQGELQKVLLMLVDGIDPNFKMEHQNKRSPLHAAAEAGHVDICHMLVQAGANIDTCSEDQRTPLMEAAENNHLEAVKYLIKAGALVDPKDAEGSTCLHLAAKKGHYEVVQYLLSNGQMDVNCQDDGGWTPMIWATEYKHVDLVKLLLSKGSDINIRDNEENICLHWAAFSGCVDIAEILLAAKCDLHAVNIHGDSPLHIAARENRYDCVVLFLSRDSDVTLKNKEGETPLQCASLNSQVWSALQMSKALQDSAPDRPSPVERIVSRDIARGYERIPIPCVNAVDSEPCPSNYKYVSQNCVTSPMNIDRNITHLQYCVCIDDCSSSNCMCGQLSMRCWYDKDGRLLPEFNMAEPPLIFECNHACSCWRNCRNRVVQNGLRARLQLYRTRDMGWGVRSLQDIPPGTFVCEYVGELISDSEADVREEDSYLFDLDNKDGEVYCIDARFYGNVSRFINHHCEPNLVPVRVFMAHQDLRFPRIAFFSTRLIEAGEQLGFDYGERFWDIKGKLFSCRCGSPKCRHSSAALAQRQASAAQEAQEDGLPDTSSAAAADPL

SEQ ID NO: 4647 - protein, 117 aa, Homo Sapiens
MEAAENNHLEAVKYLIKAGALVDPKDAEGSTCLHLAAKKGHYEVVQYLLSNGQMDVNCQDDGGWTPMIWATEYKHVDLVKLLLSKGSDINIRDNDDGTMKRGALSRQKEEKREAEEP

SEQ ID NO: 4648 - protein, 107 aa, Homo Sapiens
MEAAENNHLEAVKYLIKAGALVDPKDAEGSTCLHLAAKKGHYEVVQYLLSNGQMDVNCQDDGGWTPMIWATEYKHVDLVKLLLSKGSDINIRDNRVPEARNGKSSHK

SEQ ID NO: 4649 - protein, 394 aa, Homo Sapiens
MGFAAAAVSRKKKRRMGTYSLVPKKKTKVLKQRTVIEMFKSITHSTVGSKGEKDLGASSLHVNGESLEMDSDEDDSEELEEDDGHGAEQAAAFPTEDSRTSKESMSEADRAQKMDGESEEEQESVDTGEEEEGGDESDLSSESSIKKKFLKRKGKTDSPWIKPARKRRRRSRKKPSGALGSESYKSSAGSAEQTAPGDSTGYMEVSLDSLDLRVKGILSSQAEGLANGPDVLETDGLQEVPLCSCRMETPKSREITTLANNQCMATESVDHELGRCTNSVVKYELMRPSNKAPLLVLCEDHRGRMVKHQCCPGCGYFCTAGNFMECQPESSISHRFHKDCASRVNNASYCPHCGEESSKAKEVTIAKADTTSTVTPVPGQEKGSALEGRADTTT

SEQ ID NO: 4650 - protein, 126 aa, Homo Sapiens
MGTYSLVPKKKTKVLKQRTVIEMFKSITHSTVGSKGEKDLGASSLHVNGESLEMDSDEDDSEELEEDDGHGAEQAAAFPTEDSRTSKESMSEADRAQKKHEEENTASSPHCPGGSGTLKQSLQELP

SEQ ID NO: 4651 - protein, 126 aa, Homo Sapiens; identical to SEQ ID NO: 4650

SEQ ID NO: 4652 - protein, 268 aa, Homo Sapiens
MLYFSRSHFPRPCGGQVSAGSGLTLLLLLLPALWRGWLEGDGQQAVPARGEPQQDCCVKTELLGEETPMAADEGSAEKQAGEAHMAADGETNGSCENSDASSHANAAKHTQDSARVNPQDGTNTLTRIAENGVSERDSEAAKQNHVTADDFVQTSVIGSNGYILNKPALQAQPLRTTSTLASSLPGHAAKTLPGGAGKGRTPSAFPQTPAAPPATLGEGSADTEDRKLPAPGADVKVHRARKTMPKSVVGLHAASKDPREVREARDHK

SEQ ID NO: 4653 - protein, 803 aa, Homo Sapiens
MSEADRAQKMDGESEEEQESVDTGEEEEGGDESDLSSESSIKKKFLKRKGKTDSPWIKPARKRRRRSRKKPSGALGSESYKSSAGSAEQTAPGDSTGYMEVSLDSLDLRVKGILSSQAEGLANGPDVLETDGLQEVPLCSCRMETPKSREITTLANNQCMATESVDHELGRCTNSVVKYELMRPSNKAPLLVLCEDHRGRMVKHQCCPGCGYFCTAGNFMECQPESSISHRFHKDCASRVNNASYCPHCGEESSKAKEVTIAKADTTSTVTPVPGQEKGSALEGRADTTTGSAAGPPLSEDDKLQGAASHVPEGFDPTGPAGLGRPTPGLSQGPGKETLESALIALDSEKPKKLRFHPKQLYFSARQGELQKVLLMLVDGIDPNFKMEHQNKRSPLHAAAEAGHVDICHMLVQAGANIDTCSEDQRTPLMEAAENNHLEAVKYLIKAGALVDPKDAEGSTCLHLAAKKGHYEVVQYLLSNGQMDVNCQDDGGWTPMIWATEYKHVDLVKLLLSKGSDINIRDNEENICLHWAAFSGCVDIAEILLAAKCDLHAVNIHGDSPLHIAARENRYDCVVLFLSRDSDVTLKNKEGETPLQCASLNSQVWSALQMSKALQDSAPDRPSPVERIVSRDIARGYERIPIPCVNAVDSEPCPSNYKYVSQNCVTSPMNIDRNITHLQYCVCIDDCSSSNCMCGQLSMRCWYDKDGRLLPEFNMAEPPLIFECNHACSCWRNCRNRVVQNGLRARLQLYRTRDMGWGVRSLQDIPPGTFVCEYVGELISDSEADVREEDSYLFDLDNKISSA

SEQ ID NO: 4654 - protein, 153 aa, Homo Sapiens
SPLHAAAEAGHVDICHMLVQAGANIDTCSEDQRTPLMEAAENNHLEAVKYLIKAGALVDPKDAEGSTCLHLAAKKGHYEVVQYLLSNGQMDVNCQDDGGWTPMIWATEYKHVDLVKLLLSKGSDINIRDNDDGTMKRGALSRQKEEKREAEEP

SEQ ID NO: 4655 - protein, 277 aa, Homo Sapiens
VPARGEPQQDCCVKTELLGEETPMAADEGSAEKQAGEAHMAADGETNGSCENSDASSHANAAKHTQDSARVNPQDGTNTLTRIAENGVSERDSEAAKQNHVTADDFVQTSVIGSNGYILNKPALQAQPLRTTSTLASSLPGHAAKTLPGGAGKGRTPSAFPQTPAAPPATLGEGSADTEDRKLPAPGADVKVHRARKTMPKSVVGLHAASKDPREVREARDHKEPKEEINKNISDFGRQQLLPPFPSLHQSLPQNQCYMATTKSQTGKEDPATVSAL

SEQ ID NO: 4656 - protein, 168 aa, Homo Sapiens
WIKPARKRRRRSRKKPSGALGSESYKSSAGSAEQTAPGDSTGYMEVSLDSLDLRVKGILSSQAEGLANGPDVLETDGLQEVPLCSCRMETPKSREITTLANNQCMATESVDHEGNFMECQPESSISHRFHKDCASRVNNASYCPHCGEESSKAKEVTIAKADTTSTVT

SEQ ID NO: 4657 - protein, 543 aa, Homo Sapiens
  misc_feature (1)..(1): Xaa can be any naturally occurring amino acid
XCVKTELLGEETPMAADEGSAEKQAGEAHMAADGETNGSCENSDASSHANAAKHTQDSARVNPQDGTNTLTRIAENGVSERDSEAAKQNHVTADDFVQTSVIGSNGYILNKPALQAQPLRTTSTLASSLPGHAAKTLPGGAGKGRTPSAFPQTPAAPPATLGEGSADTEDRKLPAPGADVKVHRARKTMPKSVVGLHAASKDPREVREARDHKEPKEEINKNISDFGRQQLLPPFPSLHQSLPQNQCYMATTKSQTACLPFVLAAAVSRKKKRRMGTYSLVPKKKTKVLKQRTVIEMFKSITHSTVGSKGEKDLGASSLHVNGESLEMDSDEDDSEELEEDDGHGAEQAAAFPTEDSRTSKESMSEADRAQKMDGESEEEQESVDTGEEEEGGDESDLSSESSIKKKFLKRKGKTDSPWIKPARKRRRRSRKKPSGALGSESYKSSAGSAEQTAPGDSTGYMEVSLDSLDLRVKGILSSQAEGLANGPDVLETDGLQEVPLCSCRMETPKSREITTLANNQCMATESVDHEVLNRIQWSQIPV

SEQ ID NO: 4658 - protein, 433 aa, Homo Sapiens
  misc_feature (1)..(1): Xaa can be any naturally occurring amino acid
XGEETPMAADEGSAEKQAGEAHMAADGETNGSCENSDASSHANAAKHTQDSARVNPQDGTNTLTRIAENGVSERDSEAAKQNHVTADDFVQTSVIGSNGYILNKPALQAQPLRTTSTLASSLPGHAAKTLPGGAGKGRTPSAFPQTPAAPPATLGEGSADTEDRKLPAPGADVKVHRARKTMPKSVVGLHAASKDPREVREARDHKEPKEEINKNISDFGRQQLLPPFPSLHQSLPQNQCYMATTKSQTAAAVSRKKKRRMGTYSLVPKKKTKVLKQRTVIEMFKSITHSTVGSKGEKDLGASSLHVNGESLEMDSDEDDSEELEEDDGHGAEQAAAFPTEDSRTSKESMSEADRAQKMDGESEEEQESVDTGEEEEGGDESDLSSESSIKKKFLKRKGKTDSPWIKPARKRRRRSRKKPSGALGSESYKSSA

SEQ ID NO: 4659 - protein, 112 aa, Homo Sapiens
  misc_feature (1)..(1): Xaa can be any naturally occurring amino acid
XPALQAQPLRTTSTLASSLPGHAAKTLPGGAGKGRTPSAFPQTPAAPPATLGEGSADTEDRKLPAPGADVKVHRARKTMPKSVVGLVILCLLLLFPFSHLFCFNNGKWTLVH

SEQ ID NO: 4660 - protein, 230 aa, Homo Sapiens
  misc_feature (1)..(1): Xaa can be any naturally occurring amino acid
XPFVLAAAVSRKKKRRMGTYSLVPKKKTKVLKQRTVIEMFKSITHSTVGSKGEKDLGASSLHVNGESLEMDSDEDDSEELEEDDGHGAEQAAAFPTEDSRTSKESMSEADRAQKSSESSIKKKFLKRKGKTDSPWIKPARKRRRRSRKKPSGALGSESYKSSAGSAEQTAPGDSTGYMEVSLDSLDLRVKGILSSQAEGLANGPDVLETDGLQEVPLCSCRMETPKSREI

SEQ ID NO: 4661 - protein, 108 aa, Homo Sapiens
  misc_feature (1)..(1): Xaa can be any naturally occurring amino acid
XPLMEAAENNHLEAVKYLIKAGALVDPKDAEGSTCLHLAAKKGHYEVVQYLLSNGQMDVNCQDDGGWTPMIWATEYKHVDLVKLLLSKGSDINIRDNVGCIYSKYTLG

SEQ ID NO: 4662 - protein, 1176 aa, Homo Sapiens
MAAAAGAAAAAAAEGEAPAEMGALLLEKETRGATERVHGSLGDTPRSEETLPKATPDSLEPAGPSSPASVTVTVGDEGADTPVGATPLIGDESENLEGDGDLRGGRILLGHATKSFPSSPSKGGSCPSRAKMSMTGAGKSPPSVQSLAMRLLSMPGAQGAAAAGSEPPPATTSPEGQPKVHRARKTMSKPGNGQPPVPEKRPPEIQHFRMSDDVHSLGKVTSDLAKRRKLNSGGGLSEELGSARRSGEVTLTKGDPGSLEEWETVVGDDFSLYYDSYSVDERVDSDSKSEVEALTEQLSEEEEEEEEEEEEEEEEEEEEEEEEDEESGNQSDRSGSSGRRKAKKKWRKDSPWVKPSRKRRKREPPRAKEPRGVSNDTSSLETERGFEELPLCSCRMEAPKIDRISERAGHKCMATESVDGELSGCNAAILKRETMRPSSRVALMVLCETHRARMVKHHCCPGCGYFCTAGTFLECHPDFRVAHRFHKACVSQLNGMVFCPHCGEDASEAQEVTIPRGDGVTPPAGTAAPAPPPLSQDVPGRADTSQPSARMRGHGEPRRPPCDPLADTIDSSGPSLTLPNGGCLSAVGLPLGPGREALEKALVIQESERRKKLRFHPRQLYLSVKQGELQKVILMLLDNLDPNFQSDQQSKRTPLHAAAQKGSVEICHVLLQAGANINAVDKQQRTPLMEAVVNNHLEVARYMVQRGGCVYSKEEDGSTCLHHAAKIGNLEMVSLLLSTGQVDVNAQDSGGWTPIIWAAEHKHIEVIRMLLTRGADVTLTDNEENICLHWASFTGSAAIAEVLLNARCDLHAVNYHGDTPLHIAARESYHDCVLLFLSRGANPELRNKEGDTAWDLTPERSDVWFALQLNRKLRLGVGNRAIRTEKIICRDVARGYENVPIPCVNGVDGEPCPEDYKYISENCETSTMNIDRNITHLQHCTCVDDCSSSNCLCGQLSIRCWYDKDGRLLQEFNKIEPPLIFECNQACSCWRNCKNRVVQSGIKVRLQLYRTAKMGWGVRALQTIPQGTFICEYVGELISDAEADVREDDSYLFDLDNKDGEVYCIDARYYGNISRFINHLCDPNIIPVRVFMLHQDLRFPRIAFFSSRDIRTGEELGFDYGDRFWDIKSKYFTCQCGSEKCKHSAEAIALEQSRLARLDPHPELLPELGSLPPVNT

SEQ ID NO: 4663 - protein, 1210 aa, Homo Sapiens
MAAAAGAAAAAAAEGEAPAEMGALLLEKETRGATERVHGSLGDTPRSEETLPKATPDSLEPAGPSSPASVTVTVGDEGADTPVGATPLIGDESENLEGDGDLRGGRILLGHATKSFPSSPSKGGSCPSRAKMSMTGAGKSPPSVQSLAMRLLSMPGAQGAAAAGSEPPPATTSPEGQPKVHRARKTMSKPGNGQPPVPEKRPPEIQHFRMSDDVHSLGKVTSDLAKRRKLNSGGGLSEELGSARRSGEVTLTKGDPGSLEEWETVVGDDFSLYYDSYSVDERVDSDSKSEVEALTEQLSEEEEEEEEEEEEEEEEEEEEEEEEDEESGNQSDRSGSSGRRKAKKKWRKDSPWVKPSRKRRKREPPRAKEPRGVNGVGSSGPSEYMEVPLGSLELPSEGTLSPNHAGVSNDTSSLETERGFEELPLCSCRMEAPKIDRISERAGHKCMATESVDGELSGCNAAILKRETMRPSSRVALMVLCETHRARMVKHHCCPGCGYFCTAGTFLECHPDFRVAHRFHKACVSQLNGMVFCPHCGEDASEAQEVTIPRGDGVTPPAGTAAPAPPPLSQDVPGRADTSQPSARMRGHGEPRRPPCDPLADTIDSSGPSLTLPNGGCLSAVGLPLGPGREALEKALVIQESERRKKLRFHPRQLYLSVKQGELQKVILMLLDNLDPNFQSDQQSKRTPLHAAAQKGSVEICHVLLQAGANINAVDKQQRTPLMEAVVNNHLEVARYMVQRGGCVYSKEEDGSTCLHHAAKIGNLEMVSLLLSTGQVDVNAQDSGGWTPIIWAAEHKHIEVIRMLLTRGADVTLTDNEENICLHWASFTGSAAIAEVLLNARCDLHAVNYHGDTPLHIAARESYHDCVLLFLSRGANPELRNKEGDTAWDLTPERSDVWFALQLNRKLRLGVGNRAIRTEKIICRDVARGYENVPIPCVNGVDGEPCPEDYKYISENCETSTMNIDRNITHLQHCTCVDDCSSSNCLCGQLSIRCWYDKDGRLLQEFNKIEPPLIFECNQACSCWRNCKNRVVQSGIKVRLQLYRTAKMGWGVRALQTIPQGTFICEYVGELISDAEADVREDDSYLFDLDNKDGEVYCIDARYYGNISRFINHLCDPNIIPVRVFMLHQDLRFPRIAFFSSRDIRTGEELGFDYGDRFWDIKSKYFTCQCGSEKCKHSAEAIALEQSRLARLDPHPELLPELGSLPPVNT

SEQ ID NO: 4664 - protein, 1233 aa, Homo Sapiens
MRGLPRGRGLMRARGRGRAAPPGSRGRGRGGPHRGRGRPRSLLSLPRAQASWTPQLSTGLTSPPVPCLPSQGEAPAEMGALLLEKETRGATERVHGSLGDTPRSEETLPKATPDSLEPAGPSSPASVTVTVGDEGADTPVGATPLIGDESENLEGDGDLRGGRILLGHATKSFPSSPSKGGSCPSRAKMSMTGAGKSPPSVQSLAMRLLSMPGAQGAAAAGSEPPPATTSPEGQPKVHRARKTMSKPGNGQPPVPEKRPPEIQHFRMSDDVHSLGKVTSDLAKRRKLNSGGGLSEELGSARRSGEVTLTKGDPGSLEEWETVVGDDFSLYYDSYSVDERVDSDSKSEVEALTEQLSEEEEEEEEEEEEEEEEEEEEEEEEDEESGNQSDRSGSSGRRKAKKKWRKDSPWVKPSRKRRKREPPRAKEPRGVSNDTSSLETERGFEELPLCSCRMEAPKIDRISERAGHKCMATESVDGELSGCNAAILKRETMRPSSRVALMVLCETHRARMVKHHCCPGCGYFCTAGTFLECHPDFRVAHRFHKACVSQLNGMVFCPHCGEDASEAQEVTIPRGDGVTPPAGTAAPAPPPLSQDVPGRADTSQPSARMRGHGEPRRPPCDPLADTIDSSGPSLTLPNGGCLSAVGLPLGPGREALEKALVIQESERRKKLRFHPRQLYLSVKQGELQKVILMLLDNLDPNFQSDQQSKRTPLHAAAQKGSVEICHVLLQAGANINAVDKQQRTPLMEAVVNNHLEVARYMVQRGGCVYSKEEDGSTCLHHAAKIGNLEMVSLLLSTGQVDVNAQDSGGWTPIIWAAEHKHIEVIRMLLTRGADVTLTDNEENICLHWASFTGSAAIAEVLLNARCDLHAVNYHGDTPLHIAARESYHDCVLLFLSRGANPELRNKEGDTAWDLTPERSDVWFALQLNRKLRLGVGNRAIRTEKIICRDVARGYENVPIPCVNGVDGEPCPEDYKYISENCETSTMNIDRNITHLQHCTCVDDCSSSNCLCGQLSIRCWYDKDGRLLQEFNKIEPPLIFECNQACSCWRNCKNRVVQSGIKVRLQLYRTAKMGWGVRALQTIPQGTFICEYVGELISDAEADVREDDSYLFDLDNKDGEVYCIDARYYGNISRFINHLCDPNIIPVRVFMLHQDLRFPRIAFFSSRDIRTGEELGFDYGDRFWDIKSKYFTCQCGSEKCKHSAEAIALEQSRLARLDPHPELLPELGSLPPVNT

SEQ ID NO: 4665 - protein, 1267 aa, Homo Sapiens
MRGLPRGRGLMRARGRGRAAPPGSRGRGRGGPHRGRGRPRSLLSLPRAQASWTPQLSTGLTSPPVPCLPSQGEAPAEMGALLLEKETRGATERVHGSLGDTPRSEETLPKATPDSLEPAGPSSPASVTVTVGDEGADTPVGATPLIGDESENLEGDGDLRGGRILLGHATKSFPSSPSKGGSCPSRAKMSMTGAGKSPPSVQSLAMRLLSMPGAQGAAAAGSEPPPATTSPEGQPKVHRARKTMSKPGNGQPPVPEKRPPEIQHFRMSDDVHSLGKVTSDLAKRRKLNSGGGLSEELGSARRSGEVTLTKGDPGSLEEWETVVGDDFSLYYDSYSVDERVDSDSKSEVEALTEQLSEEEEEEEEEEEEEEEEEEEEEEEEDEESGNQSDRSGSSGRRKAKKKWRKDSPWVKPSRKRRKREPPRAKEPRGVNGVGSSGPSEYMEVPLGSLELPSEGTLSPNHAGVSNDTSSLETERGFEELPLCSCRMEAPKIDRISERAGHKCMATESVDGELSGCNAAILKRETMRPSSRVALMVLCETHRARMVKHHCCPGCGYFCTAGTFLECHPDFRVAHRFHKACVSQLNGMVFCPHCGEDASEAQEVTIPRGDGVTPPAGTAAPAPPPLSQDVPGRADTSQPSARMRGHGEPRRPPCDPLADTIDSSGPSLTLPNGGCLSAVGLPLGPGREALEKALVIQESERRKKLRFHPRQLYLSVKQGELQKVILMLLDNLDPNFQSDQQSKRTPLHAAAQKGSVEICHVLLQAGANINAVDKQQRTPLMEAVVNNHLEVARYMVQRGGCVYSKEEDGSTCLHHAAKIGNLEMVSLLLSTGQVDVNAQDSGGWTPIIWAAEHKHIEVIRMLLTRGADVTLTDNEENICLHWASFTGSAAIAEVLLNARCDLHAVNYHGDTPLHIAARESYHDCVLLFLSRGANPELRNKEGDTAWDLTPERSDVWFALQLNRKLRLGVGNRAIRTEKIICRDVARGYENVPIPCVNGVDGEPCPEDYKYISENCETSTMNIDRNITHLQHCTCVDDCSSSNCLCGQLSIRCWYDKDGRLLQEFNKIEPPLIFECNQACSCWRNCKNRVVQSGIKVRLQLYRTAKMGWGVRALQTIPQGTFICEYVGELISDAEADVREDDSYLFDLDNKDGEVYCIDARYYGNISRFINHLCDPNIIPVRVFMLHQDLRFPRIAFFSSRDIRTGEELGFDYGDRFWDIKSKYFTCQCGSEKCKHSAEAIALEQSRLARLDPHPELLPELGSLPPVNT

SEQ ID NO: 4666 - protein, 298 aa, Homo Sapiens
  misc_feature (1)..(1): Xaa can be any naturally occurring amino acid
XSKRTPLHAAAQKGSVEICHVLLQAGANINAVDKQQRTPLMEAVVNNHLEVARYMVQRGGCVYSKEEDGSTCLHHAAKIGNLEMVSLLLSTGQVDVNAQGQLPPPSLPSHPQDSGGWTPIIWAAEHKHIEVIRMLLTRGADVTLTDNEENICLHWASFTGSAAIAEVLLNARCDLHAVNYHGDTPLHIAARESYHDCVLLFLSRGANPELRNKEGDTAWDLTPERSDVWFALQLNRKLRLGVGNRAIRTEKIICRDVARGYENVPIPCVNGVDGEPCPEDYKYISENCETSTMNIDRN

SEQ ID NO: 4667 - protein, 81 aa, Homo Sapiens
MQGGNSGVRKREEEGDGAGAVAAPPAIDFPAEGPDPEYDEMWSCCVSQAGLERLASSDSPASAFQNAGIIDNLMFQQKSRC

SEQ ID NO: 4668 - protein, 164 aa, Homo Sapiens
MQGGNSGVRKREEEGDGAGAVAAPPAIDFPAEGPDPEYDESDVPAEIQVLKEPLQQPTFPFAVANQLLLVSLLEHLSHVHEPNPLRSRQVFKLLCQTFIKMGLLSSFTCSDEFSSLRLHHNRAITHLMRSAKERVRQDPCEDISRIQKIRDEKFHFSPSFPNQH

SEQ ID NO: 4669 - protein, 630 aa, Homo Sapiens
MQGGNSGVRKREEEGDGAGAVAAPPAIDFPAEGPDPEYDESDVPAEIQVLKEPLQQPTFPFAVANQLLLVSLLEHLSHVHEPNPLRSRQVFKLLCQTFIKMGLLSSFTCSDEFSSLRLHHNRAITHLMRSAKERVRQDPCEDISRIQKIRSREVALEAQTSRYLNEFEELAILGKGGYGRVYKVRNKLDGQYYAIKKILIKGATKTVCMKVLREVKVLAGLQHPNIVGYHTAWIEHVHVIQPRADRAAIELPSLEVLSDQEEDREQCGVKNDESSSSSIIFAEPTPEKEKRFGESDTENQNNKSVKYTTNLVIRESGELESTLELQENGLAGLSASSIVEQQLPLRRNSHLEESFTSTEESSEENVNFLGQTEAQYHLMLHIQMQLCELSLWDWIVERNKRGREYVDESACPYVMANVATKIFQELVEGVFYIHNMGIVHRDLKPRNIFLHGPDQQVKIGDFGLACTDILQKNTDWTNRNGKRTPTHTSRVGTCLYASPEQLEGSEYDAKSDMYSLGVVLLELFQPFGTEMERAEVLTGLRTGQLPESLRKRCPVQAKYIQHLTRRNSSQRPSAIQLLQSELFQNSGNVNLTLQMKIIEQEKEIAELKKQLNLLSQDKGVRDDGKDGGVG

SEQ ID NO: 4670 - protein, 72 aa, Homo Sapiens
  misc_feature (1)..(1): Xaa can be any naturally occurring amino acid
XLAGLTPLGVAAVASAGTGGICWCSQRGAEGWGPTPQRRPVNLTLQMKIIEQEKEIAELKKQLNLLSQDKGA

SEQ ID NO: 4671 - protein, 267 aa, Homo Sapiens
MTLGRRLACLFLACVLPALLLGGTALASEIVGGRRARPHAWPFMVSLQLRGGHFCGATLIAPNFVMSAAHCVANVNVRAVRVVLGAHNLSRREPTRQVFAVQRIFENGYDPVNLLNDIVILQLNGSATINANVQVAQLPAQGRRLGNGVQCLAMGWGLLGRNRGIASVLQELNVTVVTSLCRRSNVCTLVRGRQAGVCFGDSGSPLVCNGLIHGIASFVRGGCASGLYPDAFAPVAQFVNWIDSIIQRSEDNPCPHPRDPDPASRTH

SEQ ID NO: 4672 - protein, 267 aa, Homo Sapiens; identical to SEQ ID NO: 4671

SEQ ID NO: 4673 - protein, 152 aa, Homo Sapiens [sequence omitted]

SEQ ID NO: 4674 - protein, 700 aa, Homo Sapiens
MAGLTAAAPRPGVLLLLLSILHPSRPGGVPGAIPGGVPGGVFYPALGPGGKPLKPVPGGLAGAGLGAGLGAFPAVTFPGALVPGGVADAAAAYKAAKAGAGLGGVPGVGGLGVSAAPSVPGAVVPQPGAGVKPGKVPGVGLPGVYPGGVLPGARFPGVGVLPGVPTGAGVKPKAPGVGGAFAGIPGVGPFGGPQPGVPLGYPIKAPKLPGGYGLPYTTGKLPYGYGPGGVAGAAGKAGYPTGTGVGPQAAAAAAAKAAAKFGAGAAGVLPGVGGAGVPGVPGAIPGIGGIAGVGTPAAAAAAAAAAKAAKYGAAAGLVPGGPGFGPGVVGVPGAGVPGVGVPGAGIPVVPGAGIPGAAVPGVVSPEAAAKAAAKAAKYGARPGVGVGGIPTYGVGAGGFPGFGVGVGGIPGVAGVPGVGGVPGVGGVPGVGISPEAQAAAAAKAAKYGLVPGVGVAPGVGVAPGVGVAPGVGLAPGVGVAPGVGVAPGVGVAPGIGPGGVAAAAKSAAKVAAKAQLRAAAGLGAGIPGLGVGVGVPGLGVGAGVPGLGVGAGVPGFGAVPGALAAAKAAKYGAAVPGVLGGLGALGGVGIPGGVVGAGPAAAAAAAKAAAKAAQFGLVGAAGLGGLGVGGLGVPGVGGLGGIPPAAAAKAAKYGAAGLGGVLGGAGQFPLGGVAARPGFGLSPIFPGGACLGKACGRKRK

SEQ ID NO: 4675 - protein, 677 aa, Homo Sapiens
MAGLTAAAPRPGVLLLLLSILHPSRPGGVPGAIPGGVPGGVFYPALGPGGKPLKPVPGGLAGAGLGAGLGAFPAVTFPGALVPGGVADAAAAYKAAKAGAGLGGVPGVGGLGVSAGAVVPQPGAGVKPGKVPGVGLPGVYPGGVLPGARFPGVGVLPGVPTGAGVKPKAPGVGGAFAGIPGVGPFGGPQPGVPLGYPIKAPKLPGGYGLPYTTGKLPYGYGPGGVAGAAGKAGYPTGTGVGPQAAAAAAAKAAAKFGAGAAGVLPGVGGAGVPGVPGAIPGIGGIAGVGTPAAAAAAAAAAKAAKYGAAAGLVPGGPGFGPGVVGVPGAGVPGVGVPGAGIPVVPGAGIPGAAVPGVVSPEAAAKAAAKAAKYGARPGVGVGGIPTYGVGAGGFPGFGVGVGGIPGVAGVPGVGGVPGVGGVPGVGISPEAQAAAAAKAAKYGLVPGVGVAPGVGVAPGVGVAPGVGLAPGVGVAPGVGVAPGVGVAPGIGPGGVAAAAKSAAKVAAKAQLRAAAGLGAGIPGLGVGVGVPGLGVGAGVPGLGVGAGVPGFGAVPGALAAAKAAKYGAAVPGVLGGLGALGGVGIPGGVVGAGPAAAAAAAKAAAKAAQFGLVGAAGLGGLGVGGLGVPGVGGLGGIPPAAAAKAAKYGVAARPGFGLSPIFPGGACLGKACGRKRK

SEQ ID NO: 4676 - protein, 714 aa, Homo Sapiens
MAGLTAAAPRPGVLLLLLSILHPSRPGGVPGAIPGGVPGGVFYPALGPGGKPLKPVPGGLAGAGLGAGLGAFPAVTFPGALVPGGVADAAAAYKAAKAGAGLGGVPGVGGLGVSAGAVVPQPGAGVKPGKVPGVGLPGVYPGGVLPGARFPGVGVLPGVPTGAGVKPKAPGVGGAFAGIPGVGPFGGPQPGVPLGYPIKAPKLPGGYGLPYTTGKLPYGYGPGGVAGAAGKAGYPTGTGVGPQAAAAAAAKAAAKFGAGAAGVLPGVGGAGVPGVPGAIPGIGGIAGVGTPAAAAAAAAAAKAAKYGAAAGLVPGGPGFGPGVVGVPGAGVPGVGVPGAGIPVVPGAGIPGAAVPGVVSPEAAAKAAAKAAKYGARPGVGVGGIPTYGVGAGGFPGFGVGVGGIPGVAGVPGVGGVPGVGGVPGVGISPEAQAAAAAKAAKYGVGTPAAAAAKAAAKAAQFGLVPGVGVAPGVGVAPGVGVAPGVGLAPGVGVAPGVGVAPGVGVAPGIGPGGVAAAAKSAAKVAAKAQLRAAAGLGAGIPGLGVGVGVPGLGVGAGVPGLGVGAGVPGFGAVPGALAAAKAAKYGAAVPGVLGGLGALGGVGIPGGVVGAGPAAAAAAAKAAAKAAQFGLVGAAGLGGLGVGGLGVPGVGGLGGIPPAAAAKAAKYGAAGLGGVLGGAGQFPLGGVAARPGFGLSPIFPGGACLGKACGRKRK

SEQ ID NO: 4677 - protein, 617 aa, Homo Sapiens
MAGLTAAAPRPGVLLLLLSILHPSRPGGVPGAIPGGVPGGVFYPALGPGGKPLKPVPGGLAGAGLGAGLGAFPAVTFPGALVPGGVADAAAAYKAAKAGAGLGGVPGVGGLGVSAGAVVPQPGAGVKPGKVPGVGLPGVYPGGVLPGVGPFGGPQPGVPLGYPIKAPKLPGGYGLPYTTGKLPYGYGPGGVAGAAGKAGYPTGTGVGPQAAAAAAAKAAAKFGAGAAGVLPGVGGAGVPGVPGAIPGIGGIAGVGTPAAAAAAAAAAKAAKYGAAAGLVPGGPGFGPGVVGVPGAGVPGVGVPGAGIPVVPGAGIPGAAVPGVVSPEAAAKAAAKAAKYGARPGVGVGGIPTYGVGAGGFPGFGVGVGAEAQAAAAAKAAKYGLVPGVGVAPGVGVAPGVGVAPGVGLAPGVGVAPGVGVAPGVGVAPGIGPGGVAAAAKSAAKVAAKAQLRAAAGLGAGIPGLGVGVGVPGLGVGAGVPGLGVGAGVPGFGAVPGALAAAKAAKYGAAVPGVLGGLGALGGVGIPGGVVGAGPAAAAAAAKAAAKAAQFGLVGAAGLGGLGVGGLGVPGVGGLGGIPPAAAAKAAKYGVAARPGFGLSPIFPGGACLGKACGRKRK

SEQ ID NO: 4678 - protein, 294 aa, Homo Sapiens
MAGLTAAAPRPGVLLLLLSILHPSRPGGVPGAIPGGVPGGVFYPGAGLGALGGGALGPGGKPLKPGLGAFPAVTFPGALVPGGVADAAAAYKAAKAGAGLGGVPGVGGLGVSAGAVVPQPGAGVKPGKVPGVGLPGVYPGGVLPGARFPGVGVLPGVPTGAGVKPKAPGVGPFGGPQPGVPLGYPIKAPKLPGGYGLPYTTGKLPYGYGPGGVAGAAGKAGYPTGTGVGPQAAAAAAAKAAAKFGAGAAGVLPGVGGAGVPGVPGAIPGIGGIAGVGTPAAAAAAAAAAKAAKY

SEQ ID NO: 4679 - protein, 643 aa, Homo Sapiens
MAGLTAAAPRPGVLLLLLSILHPSRPGGVPGAIPGGVPGGVFYPGAGLGALGGGALGPGGKPLKPGLGAFPAVTFPGALVPGGVADAAAAYKAAKAGAGLGGVPGVGGLGVSAGAVVPQPGAGVKPGKVPGVGLPGVYPGGVLPGARFPGVGVLPGVPTGAGVKPKAPGVGPFGGPQPGVPLGYPIKAPKLPGYGPGGVAGAAGKAGYPTGTGVGPQAAAAAAAKAAAKFGAGAAGVLPGVGGAGVPGVPGAIPGIGGIAGVGTPAAAAAAAAAAKAAKYGAAAGLVPGGPGFGPGVVGVPGAGVPGVGVPGAGIPVVPGAGIPGAAVPGVVSPEAAAKAAAKAAKYGARPGVGVGGIPTYGVGAGGFPGFGVGVGAEAQAAAAAKAAKYGLVPGVGVAPGVGVAPGVGVAPGVGLAPGVGVAPGVGVAPGVGVAPGIGPGGVAAAAKSAAKVAAKAQLRAAAGLGAGIPGLGVGVGVPGLGVGAGVPGLGVGAGVPGFGAVPGALAAAKAAKYGAAVPGVLGGLGALGGVGIPGGVVGAGPAAAAAAAKAAAKAAQFGLVGAAGLGGLGVGGLGVPGVGGLGGIPPAAAAKAAKYGAAGLGGVLGGAGQFPLGGVAARPGFGLSPIFPGGACLGKACGRKRK

SEQ ID NO: 4680 - protein, 168 aa, Homo Sapiens
MAGLTAAAPRPGVLLLLLSILHPSRPGGVPGAIPGGVPGGVFYPGAGLGALGGGALGPGGKPLKPGVGPFGGPQPGVPLGYPIKAPKLPGYGPGGVAGAAGKAGYPTGTGVGPQAAAAAAAKAAAKFGAGAAGVLPGVGGAGVPGVPGAIPGIGGIAGVGTPAAAAAA

SEQ ID NO: 4681 - protein, 711 aa, Homo Sapiens
MAGLTAAAPRPGVLLLLLSILHPSRPGGVPGAIPGGVPGGVFYPGAGLGALGGGALGPGGKPLKPVPGGLAGAGLGAGLGAFPAVTFPGALVPGGVADAAAAYKAAKAGAGLGGVPGVGGLGVSAAPSVPGAVVPQPGAGVKPGKVPGVGLPGVYPGGVLPGARFPGVGVLPGVPTGAGVKPKAPGVGGAFAGIPGVGPFGGPQPGVPLGYPIKAPKLPGGYGLPYTTGKLPYGYGPGGVAGAAGKAGYPTGTGVGPQAAAAAAAKAAAKFGAGAAGVLPGVGGAGVPGVPGAIPGIGGIAGVGTPAAAAAAAAAAKAAKYGAAAGLVPGGPGFGPGVVGVPGAGVPGVGVPGAGIPVVPGAGIPGAAVPGVVSPEAAAKAAAKAAKYGARPGVGVGGIPTYGVGAGGFPGFGVGVGGIPGVAGVPGVGGVPGVGGVPGVGISPEAQAAAAAKAAKYGVGTPAAAAAKAAAKAAQFGLVPGVGVAPGVGVAPGVGVAPGVGLAPGVGVAPGVGVAPGVGVAPGIGPGGVAAAAKSAAKVAAKAQLRAAAGLGAGIPGLGVGVGVPGLGVGAGVPGLGVGAGVPGFGAVPGALAAAKAAKYGAAVPGVLGGLGALGGVGIPGGVVGAGPAAAAAAAKAAAKAAQFGLVGAAGLGGLGVGGLGVPGVGGLGGIPPAAAAKAAKYGVAARPGFGLSPIFPGGACLGKACGRKRK

SEQ ID NO: 4682 - protein, 692 aa, Homo Sapiens
MAGLTAAAPRPGVLLLLLSILHPSRPGGVPGAIPGGVPGGVFYPGAGLGALGGGALGPGGKPLKPVPGGLAGAGLGAGLGAFPAVTFPGALVPGGVADAAAAYKAAKAGAGLGGVPGVGGLGVSAAPSVPGAVVPQPGAGVKPGKVPGVGLPGVYPGGVLPGARFPGVGVLPGVPTGAGVKPKAPGVGGAFAGIPGVGPFGGPQPGVPLGYPIKAPKLPGGYGLPYTTGKLPYGYGPGGVAGAAGKAGYPTGTGVGPQAAAAAAAKAAAKFGAGAAGVLPGVGGAGVPGVPGAIPGIGGIAGVGTPAAAAAAAAAAKAAKYGAAAGLVPGGPGFGPGVVGVPGAGVPGVGVPGAGIPVVPGAGIPGAAVPGVVSPEAAAKAAAKAAKYGARPGVGVGGIPTYGVGAGGFPGFGVGVGGIPGVAGVPGVGGVPGVGGVPGVGISPEAQAAAAAKAAKYGLVPGVGVAPGVGVAPGVGVAPGVGLAPGVGVAPGVGVAPGVGVAPGIGPGGVAAAAKSAAKVAAKAQLRAAAGLGAGIPGLGVGVGVPGLGVGAGVPGLGVGAGVPGFGAVPGALAAAKAAKYGAAVPGVLGGLGALGGVGIPGGVVGAGPAAAAAAAKAAAKAAQFGLVGAAGLGGLGVGGLGVPGVGGLGGIPPAAAAKAAKYGVAARPGFGLSPIFPGGACLGKACGRKRK

SEQ ID NO: 4683 - protein, 176 aa, Homo Sapiens
MAGLTAAAPRPGVLLLLLSILHPSRPGGVPGAIPGGVPGGVFYPGAGLGALGGGALGPGGKPLKPVPGGLAGAGLGAGLGAFPAVTFPGALVPGGVADAAAAYKAAKAGAGLGGVPGVGGLGVSAGAVVPQPGAGVKPGKVPGVGGAFAGIPGVGPFGGPQPGVPLGYPIKAPKLP

SEQ ID NO: 4684 - protein, 724 aa, Homo Sapiens
MAGLTAAAPRPGVLLLLLSILHPSRPGGVPGAIPGGVPGGVFYPGAGLGALGGGALGPGGKPLKPVPGGLAGAGLGAGLGAFPAVTFPGALVPGGVADAAAAYKAAKAGAGLGGVPGVGGLGVSAGAVVPQPGAGVKPGKVPGVGLPGVYPGGVLPGARFPGVGVLPGVPTGAGVKPKAPGVGGAFAGIPGVGPFGGPQPGVPLGYPIKAPKLPGGYGLPYTTGKLPYGYGPGGVAGAAGKAGYPTGTGVGPQAAAAAAAKAAAKFGAGAAGVLPGVGGAGVPGVPGAIPGIGGIAGVGTPAAAAAAAAAAKAAKYGAAAGLVPGGPGFGPGVVGVPGAGVPGVGVPGAGIPVVPGAGIPGAAVPGVVSPEAAAKAAAKAAKYGARPGVGVGGIPTYGVGAGGFPGFGVGVGGIPGVAGVPGVGGVPGVGGVPGVGISPEAQAAAAAKAAKYGVGTPAAAAAKAAAKAAQFGLVPGVGVAPGVGVAPGVGVAPGVGLAPGVGVAPGVGVAPGVGVAPGIGPGGVAAAAKSAAKVAAKAQLRAAAGLGAGIPGLGVGVGVPGLGVGAGVPGLGVGAGVPGFGAVPGALAAAKAAKYGAAVPGVLGGLGALGGVGIPGGVVGAGPAAAAAAAKAAAKAAQFGLVGAAGLGGLGVGGLGVPGVGGLGGIPPAAAAKAAKYGAAGLGGVLGGAGQFPLGGVAARPGFGLSPIFPGGACLGKACGRKRK

SEQ ID NO: 4685 - protein, 757 aa, Homo Sapiens
MAGLTAAAPRPGVLLLLLSILHPSRPGGVPGAIPGGVPGGVFYPGAGLGALGGGALGPGGKPLKPVPGGLAGAGLGAGLGAFPAVTFPGALVPGGVADAAAAYKAAKAGAGLGGVPGVGGLGVSAGAVVPQPGAGVKPGKVPGVGLPGVYPGGVLPGARFPGVGVLPGVPTGAGVKPKAPGVGGAFAGIPGVGPFGGPQPGVPLGYPIKAPKLPGGYGLPYTTGKLPYGYGPGGVAGAAGKAGYPTGTGVGPQAAAAAAAKAAAKFGAGAAGVLPGVGGAGVPGVPGAIPGIGGIAGVGTPAAAAAAAAAAKAAKYGAAAGLVPGGPGFGPGVVGVPGAGVPGVGVPGAGIPVVPGAGIPGAAVPGVVSPEAAAKAAAKAAKYGARPGVGVGGIPTYGVGAGGFPGFGVGVGGIPGVAGVPGVGGVPGVGGVPGVGISPEAQAAAAAKAAKYGVGTPAAAAAKAAAKAAQFGLVPGVGVAPGVGVAPGVGVAPGVGLAPGVGVAPGVGVAPGVGVAPGIGPGGVAAAAKSAAKVAAKAQLRAAAGLGAGIPGLGVGVGVPGLGVGAGVPGLGVGAGVPGFGAGADEGVRRSLSPELREGDPSSSQHLPSTPSSPRVPGALAAAKAAKYGAAVPGVLGGLGALGGVGIPGGVVGAGPAAAAAAAKAAAKAAQFGLVGAAGLGGLGVGGLGVPGVGGLGGIPPAAAAKAAKYGAAGLGGVLGGAGQFPLGGVAARPGFGLSPIFPGGACLGKACGRKRK

SEQ ID NO: 4686 - protein, 786 aa, Homo Sapiens
MAGLTAAAPRPGVLLLLLSILHPSRPGGVPGAIPGGVPGGVFYPGAGLGALGGGALGPGGKPLKPVPGGLAGAGLGAGLGAFPAVTFPGALVPGGVADAAAAYKAAKAGAGLGGVPGVGGLGVSAGAVVPQPGAGVKPGKVPGVGLPGVYPGGVLPGARFPGVGVLPGVPTGAGVKPKAPGVGGAFAGIPGVGPFGGPQPGVPLGYPIKAPKLPGGYGLPYTTGKLPYGYGPGGVAGAAGKAGYPTGTGVGPQAAAAAAAKAAAKFGAGAAGVLPGVGGAGVPGVPGAIPGIGGIAGVGTPAAAAAAAAAAKAAKYGAAAGLVPGGPGFGPGVVGVPGAGVPGVGVPGAGIPVVPGAGIPGAAVPGVVSPEAAAKAAAKAAKYGARPGVGVGGIPTYGVGAGGFPGFGVGVGGIPGVAGVPGVGGVPGVGGVPGVGISPEAQAAAAAKAAKYGAAGAGVLGGLVPGAPGAVPGVPGTGGVPGVGTPAAAAAKAAAKAAQFGLVPGVGVAPGVGVAPGVGVAPGVGLAPGVGVAPGVGVAPGVGVAPGIGPGGVAAAAKSAAKVAAKAQLRAAAGLGAGIPGLGVGVGVPGLGVGAGVPGLGVGAGVPGFGAGADEGVRRSLSPELREGDPSSSQHLPSTPSSPRVPGALAAAKAAKYGAAVPGVLGGLGALGGVGIPGGVVGAGPAAAAAAAKAAAKAAQFGLVGAAGLGGLGVGGLGVPGVGGLGGIPPAAAAKAAKYGAAGLGGVLGGAGQFPLGGVAARPGFGLSPIFPGGACLGKACGRKRK

SEQ ID NO: 4687 - protein, 706 aa, Homo Sapiens
MAGLTAAAPRPGVLLLLLSILHPSRPGGVPGAIPGGVPGGVFYPGAGLGALGGGALGPGGKPLKPVPGGLAGAGLGAGLGAFPAVTFPGALVPGGVADAAAAYKAAKAGAGLGGVPGVGGLGVSAGAVVPQPGAGVKPGKVPGVGLPGVYPGGVLPGARFPGVGVLPGVPTGAGVKPKAPGVGGAFAGIPGVGPFGGPQPGVPLGYPIKAPKLPGGYGLPYTTGKLPYGYGPGGVAGAAGKAGYPTGTGVGPQAAAAAAAKAAAKFGAGAAGVLPGVGGAGVPGVPGAIPGIGGIAGVGTPAAAAAAAAAAKAAKYGAAAGLVPGGPGFGPGVVGVPGAGVPGVGVPGAGIPVVPGAGIPGAAVPGVVSPEAAAKAAAKAAKYGARPGVGVGGIPTYGVGAGGFPGFGVGVGGIPGVAGVPGVGGVPGVGGVPGVGISPEAQAAAAAKAAKYGVGTPAAAAAKAAAKAAQFGLVPGVGVAPGVGVAPGVGVAPGVGLAPGVGVAPGVGVAPGVGVAPGIGPGGVAAAAKSAAKVAAKAQLRAAAGLGAGIPGLGVGVGVPGLGVGAGVPGLGVGAGVPGFGAVPGALAAAKAAKYGAAVPGVLGGLGALGGVGIPGGVVGAGPAAAAAAAKAAAKAAQFGLVGAAGLGGLGVGGLGVPGVGGLGGIPPAAAAKAAKYGVAARPGFGLSPIFPGGACLGKACGRKRK

SEQ ID NO: 4688 - protein, 730 aa, Homo Sapiens
MAGLTAAAPRPGVLLLLLSILHPSRPGGVPGAIPGGVPGGVFYPGAGLGALGGGALGPGGKPLKPVPGGLAGAGLGAGLGAFPAVTFPGALVPGGVADAAAAYKAAKAGAGLGGVPGVGGLGVSAGAVVPQPGAGVKPGKVPGVGLPGVYPGGVLPGARFPGVGVLPGVPTGAGVKPKAPGVGGAFAGIPGVGPFGGPQPGVPLGYPIKAPKLPGGYGLPYTTGKLPYGYGPGGVAGAAGKAGYPTGTGVGPQAAAAAAAKAAAKFGAGAAGVLPGVGGAGVPGVPGAIPGIGGIAGVGTPAAAAAAAAAAKAAKYGAAAGLVPGGPGFGPGVVGVPGAGVPGVGVPGAGIPVVPGAGIPGAAVPGVVSPEAAAKAAAKAAKYGARPGVGVGGIPTYGVGAGGFPGFGVGVGGIPGVAGVPGVGGVPGVGGVPGVGISPEAQAAAAAKAAKYGVGTPAAAAAKAAAKAAQFALLNLAGLVPGVGVAPGVGVAPGVGVAPGVGLAPGVGVAPGVGVAPGVGVAPGIGPGGVAAAAKSAAKVAAKAQLRAAAGLGAGIPGLGVGVGVPGLGVGAGVPGLGVGAGVPGFGAVPGALAAAKAAKYGAAVPGVLGGLGALGGVGIPGGVVGAGPAAAAAAAKAAAKAAQFGLVGAAGLGGLGVGGLGVPGVGGLGGIPPAAAAKAAKYGAAGLGGVLGGAGQFPLGGVAARPGFGLSPIFPGGACLGKACGRKRK

SEQ ID NO: 4689 - protein, 705 aa, Homo Sapiens
MAGLTAAAPRPGVLLLLLSILHPSRPGGVPGAIPGGVPGGVFYPGAGLGALGGGALGPGGKPLKPVPGGLAGAGLGAGLGAFPAVTFPGALVPGGVADAAAAYKAAKAGAGLGGVPGVGGLGVSAGAVVPQPGAGVKPGKVPGVGLPGVYPGGVLPGARFPGVGVLPGVPTGAGVKPKAPGVGGAFAGIPGVGPFGGPQPGVPLGYPIKAPKLPGGYGLPYTTGKLPYGYGPGGVAGAAGKAGYPTGTGVGPQAAAAAAAKAAAKFGAGAAGVLPGVGGAGVPGVPGAIPGIGGIAGVGTPAAAAAAAAAAKAAKYGAAAGLVPGGPGFGPGVVGVPGAGVPGVGVPGAGIPVVPGAGIPGAAVPGVVSPEAAAKAAAKAAKYGARPGVGVGGIPTYGVGAGGFPGFGVGVGGIPGVAGVPGVGGVPGVGGVPGVGISPEAQAAAAAKAAKYGLVPGVGVAPGVGVAPGVGVAPGVGLAPGVGVAPGVGVAPGVGVAPGIGPGGVAAAAKSAAKVAAKAQLRAAAGLGAGIPGLGVGVGVPGLGVGAGVPGLGVGAGVPGFGAVPGALAAAKAAKYGAAVPGVLGGLGALGGVGIPGGVVGAGPAAAAAAAKAAAKAAQFGLVGAAGLGGLGVGGLGVPGVGGLGGIPPAAAAKAAKYGAAGLGGVLGGAGQFPLGGVAARPGFGLSPIFPGGACLGKACGRKRK

SEQ ID NO: 4690 - protein, 658 aa, Homo Sapiens
MAGLTAAAPRPGVLLLLLSILHPSRPGGVPGAIPGGVPGGVFYPGAGLGALGGGALGPGGKPLKPVPGGLAGAGLGAGLGAFPAVTFPGALVPGGVADAAAAYKAAKAGAGLGGVPGVGGLGVSAGAVVPQPGAGVKPGKVPGVGLPGVYPGGVLPGARFPGVGVLPGVPTGAGVKPKAPGVGGAFAGIPGVGPFGGPQPGVPLGYPIKAPKLPGYGPGGVAGAAGKAGYPTGTGVGPQAAAAAAAKAAAKFGAGAAGVLPGVGGAGVPGVPGAIPGIGGIAGVGTPAAAAAAAAAAKAAKYGAAAGLVPGGPGFGPGVVGVPGAGVPGVGVPGAGIPVVPGAGIPGAAVPGVVSPEAAAKAAAKAAKYGARPGVGVGGIPTYGVGAGGFPGFGVGVGGIPGVAGVPGVGGVPGVGGVPGVGISPEAQAAAAAKAAKYGLVPGVGVAPGVGVAPGVGVAPGVGLAPGVGVAPGVGVAPGVGVAPGIGPGGVAGAAAGLGAGIPGLGVGVGVPGLGVGAGVPGLGVGAGVPGFGAVPGALAAAKAAKYGAAVPGVLGGLGALGGVGIPGGVVGAGPAAAAAAAKAAAKAAQFGLVGAAGLGGLGVGGLGVPGVGGLGGIPPAAAAKAAKYGVAARPGFGLSPIFPGGACLGKACGRKRK

SEQ ID NO: 4691 - protein, 214 aa, Homo Sapiens
MAGLTAAAPRPGVLLLLLSILHPSRPGGVPGAIPGGVPGGVFYPGAGLGALGGGALGPGGKPLKPVPGGLAGAGLGAGLGAFPAVTFPGALVPGGVADAAAAYKAAKAGAGLGGVPGVGGLGVSAGAVVPQPGAGVKPGKVPGVGLPGVYPGGVLPGVGPFGGPQPGVPLGYPIKAPKLPGGYGLPYTTGKLPYGYGPGGVAGAAGKAGYPTGT

SEQ ID NO: 4692 - protein, 167 aa, Homo Sapiens [sequence omitted]

SEQ ID NO: 4693 - protein, 570 aa, Homo Sapiens
MAGLTAAAPRPGVLLLLLSILHPSRPGGVPGAIPGGVPGGVFYPGAGLGALGGGALGPGGKPLKPVPGGLAGAGLGAGVGGAFAGIPGVGPFGGPQPGVPLGYPIKAPKLPGYGPGGVAGAAGKAGYPTGTGVGPQAAAAAAAKAAAKFGAGAAGVLPGVGGAGVPGVPGAIPGIGGIAGVGTPAAAAAAAAAAKAAKYGAAAGLVPGGPGFGPGVVGVPGAGVPGVGVPGAGIPVVPGAGIPGAAVPGVVSPEAAAKAAAKAAKYGARPGVGVGGIPTYGVGAGGFPGFGVGVGGIPGVAGVPGVGGVPGVGGVPGVGISPEAQAAAAAKAAKYGLVPGVGVAPGVGVAPGVGVAPGVGLAPGVGVAPGVGVAPGVGVAPGIGPGGVAAAAKSAAKVAAKAQLRAAAGLGAGIPGLGVGVGVPGLGVGAGVPGLGVGAGVPGFGAVPGALAAAKAAKYGAAVPGVLGGLGALGGVGIPGGVVGAGPAAAAAAAKAAAKAAQFGLVGAAGLGGLGVGGLGVPGVGGLGGIPPAAAAKAAKYGVAARPGFGLSPIFPGGACLGKACGRKRK

SEQ ID NO: 4694 - protein, 68 aa, Homo Sapiens
MAGLTAAAPRPGVLLLLLSILHPSRPGGVPGAIPGGVPGGVFYPGNVHETSTHPGHADDADVHNRCTF

SEQ ID NO: 4695 - protein, 60 aa, Homo Sapiens
VTFPGALVPGGVADAAAAYKAAKAGAGLGGVPGVGGLGVSAGAVVPQPGAGVKPGKVPAL

SEQ ID NO: 4696 - protein, 47 aa, Homo Sapiens
DEEELLTSTGFEYQQVAFQPSILTEPPTEDHLLQNTLWPEVQKLASF

SEQ ID NO: 4697 - protein, 57 aa, Homo Sapiens
MCLQTLNFGNGFALALCLSFLPNTDVPILACGNDDCRIHIFAQQNDQFQKVLSLCGH

SEQ ID NO: 4698 - protein, 120 aa, Homo Sapiens
MVAPVLETSHVFCCPNRVRGVLNWSSGPRGLLAFGTSCSVVLYDPLKRVVVTNLNGHTARVNCIQWICKQDGSPSTELVSGGSDNQVIHWEIEDNQAMKDLFMRCMLFTRGGHQILHYVH

SEQ ID NO: 4699 - protein, 101 aa, Homo Sapiens
MVAPVLETSHVFCCPNRVRGVLNWSSGPRGLLAFGTSCSVVLYDPLKRVVVTNLNGHTARVNCIQWICKQDGSPSTELVSGGSDNQVIHWEIEDNQIWARL

SEQ ID NO: 4700 - protein, 756 aa, Homo Sapiens
MVAPVLETSHVFCCPNRVRGVLNWSSGPRGLLAFGTSCSVVLYDPLKRVVVTNLNGHTARVNCIQWICKQDGSPSTELVSGGSDNQVIHWEIEDNQLLKAVHLQGHEGPVYAVHAVYQRRTSDPALCTLIVSAAADSAVRLWSKKGPEGRDLFLASCSQDCLIRIWKLYIKSTSLETQDDDNIRLKENTFTIENESVKIAFAVTLETVLAGHENWVNAVHWQPVFYKDGVLQQPVRLLSASMDKTMILWAPDEESGVWLEQVRVGEVGGNTLGFYDCQFNEDGSMIIAHAFHGALHLWKQNTVNPREWTPEIVISGHFDGVQDLVWDPEGEFIITVGTDQTTRLFAPWKRKDQSQVTWHEIARPQIHGYDLKCLAMINRFQFVSGADEKVLRVFSAPRNFVENFCAITGQSLNHVLCNQDSDLPEGATVPALGLSNKAVFQGDIASQPSDEEELLTSTGFEYQQVAFQPSILTEPPTEDHLLQNTLWPEVQKLYGHGYEIFCVTCNSSKTLLASACKAAKKEHAAIILWNTTSWKQVQNLVFHSLTVTQMAFSPNEKFLLAVSRDRTWSLWKKQDTISPEFEPVFSLFAFTNKITSVHSRIIWSCDWSPDSKYFFTGSRDKKVVVWGECDSTDDCIEHNIGPCSSVLDVGGAVTAVSVCPVLHPSQRYVVAVGLECGKICLYTWKKTDQVPEINDWTHCVETSQSQSHTLAIRKLCWKNCSGKTEQKEAEGAEWLHFASCGEDHTVKIHRVNKCAL

SEQ ID NO: 4701 - protein, 826 aa, Homo Sapiens
MVAPVLETSHVFCCPNRVRGVLNWSSGPRGLLAFGTSCSVVLYDPLKRVVVTNLNGHTARVNCIQWICKQDGSPSTELVSGGSDNQVIHWEIEDNQLLKAVHLQGHEGPVYAVHAVYQRRTSDPALCTLIVSAAADSAVRLWSKKGPEVMCLQTLNFGNGFALALCLSFLPNTDVPILACGNDDCRIHIFAQQNDQFQKVLSLCGHEDWIRGVEWAAFGRDLFLASCSQDCLIRIWKLYIKSTSLETQDDDNIRLKENTFTIENESVKIAFAVTLETVLAGHENWVNAVHWQPVFYKDGVLQQPVRLLSASMDKTMILWAPDEESGVWLEQVRVGEVGGNTLGFYDCQFNEDGSMIIAHAFHGALHLWKQNTVNPREWTPEIVISGHFDGVQDLVWDPEGEFIITVGTDQTTRLFAPWKRKDQSQVTWHEIARPQIHGYDLKCLAMINRFQFVSGADEKVLRVFSAPRNFVENFCAITGQSLNHVLCNQDSDLPEGATVPALGLSNKAVFQGDIASQPSDEEELLTSTGFEYQQVAFQPSILTEPPTEDHLLQNTLWPEVQKLYGHGYEIFCVTCNSSKTLLASACKAAKKEHAAIILWNTTSWKQVQNLVFHSLTVTQMAFSPNEKFLLAVSRDRTWSLWKKQDTISPEFEPVFSLFAFTNKITSVHSRIIWSCDWSPDSKYFFTGSRDKKVVVWGECDSTDDCIEHNIGPCSSVLDVGGAVTAVSVCPVLHPSQRYVVAVGLECGKICLYTWKKTDQVPEINDWTHCVETSQSQSHTLAIRKLCWKNCSGKTEQKEAEGAEWLHFASCGEDHTVKIHRVNKCAL

SEQ ID NO: 4702 - protein, 705 aa, Homo Sapiens
MVAPVLETSHVFCCPNRVRGVLNWSSGPRGLLAFGTSCSVVLYDPLKRVVVTNLNGHTARVNCIQWICKQDGSPSTELVSGGSDNQVIHWEIEDNQLLKAVHLQGHEGPVYAVHAVYQRRTSDPALCTLIVSAAADSAVRLWSKKGPEVMCLQTLNFGNGFALALCLSFLPNTDVPILACGNDDCRIHIFAQQNDQFQKVLSLCGHEDWIRGVEWAAFGRDLFLASCSQDCLIRIWKLYIKSTSLETQDDDNIRLKENTFTIENESVKIAFAVTLETVLAGHENWVNAVHWQPVFYKDGVLQQPVRLLSASMDKTMILWAPDEESGVWLEQVRVGEVGGNTLGFYDCQFNEDGSMIIAHAFHGALHLWKQNTVNPREWTPEIVISGHFDGVQDLVWDPEGEFIITVGTDQTTRLFAPWKRKDQSQVTWHEIARPQIHGYDLKCLAMINRFQFVSGADEKVLRVFSAPRNFVENFCAITGQSLNHVLCNQDSDLPEGATVPALGLSNKAVFQGDIASQPSDEEELLTSTGFEYQQVAFQPSILTEPPTEDHLLQNTLWPEVQKLYGHGYEIFCVTCNSSKTLLASACKAAKKEHAAIILWNTTSWKQVQNLVFHSLTVTQMAFSPNEKFLLAVSRDRTWSLWKKQDTISPEFVELFGLVIGVLTASISSLGVETKRWLSGVSATPLMTVLSTTLAPAPQSWTWVGL

SEQ ID NO: 4703 - protein, 891 aa, Homo Sapiens
MVAPVLETSHVFCCPNRVRGVLNWSSGPRGLLAFGTSCSVVLYDPLKRVVVTNLNGHTARVNCIQWICKQDGSPSTELVSGGSDNQVIHWEIEDNQLLKAVHLQGHEGPVYAVHAVYQRRTSDPALCTLIVSAAADSAVRLWSKKGPEVMCLQTLNFGNGFALALCLSFLPNTDVTWKTGQVERGRAWKPPASLALCSRSCDSMVSCYASILCKALWKEKLHTFWHHNRISFLPSAFRPIPILACGNDDCRIHIFAQQNDQFQKVLSLCGHEDWIRGVEWAAFGRDLFLASCSQDCLIRIWKLYIKSTSLETQDDDNIRLKENTFTIENESVKIAFAVTLETVLAGHENWVNAVHWQPVFYKDGVLQQPVRLLSASMDKTMILWAPDEESGVWLEQVRVGEVGGNTLGFYDCQFNEDGSMIIAHAFHGALHLWKQNTVNPREWTPEIVISGHFDGVQDLVWDPEGEFIITVGTDQTTRLFAPWKRKDQSQVTWHEIARPQIHGYDLKCLAMINRFQFVSGADEKVLRVFSAPRNFVENFCAITGQSLNHVLCNQDSDLPEGATVPALGLSNKAVFQGDIASQPSDEEELLTSTGFEYQQVAFQPSILTEPPTEDHLLQNTLWPEVQKLYGHGYEIFCVTCNSSKTLLASACKAAKKEHAAIILWNTTSWKQVQNLVFHSLTVTQMAFSPNEKFLLAVSRDRTWSLWKKQDTISPEFEPVFSLFAFTNKITSVHSRIIWSCDWSPDSKYFFTGSRDKKVVVWGECDSTDDCIEHNIGPCSSVLDVGGAVTAVSVCPVLHPSQRYVVAVGLECGKICLYTWKKTDQVPEINDWTHCVETSQSQSHTLAIRKLCWKNCSGKTEQKEAEGAEWLHFASCGEDHTVKIHRVNKCAL

SEQ ID NO: 4704 - protein, 800 aa, Homo Sapiens
MVAPVLETSHVFCCPNRVRGVLNWSSGPRGLLAFGTSCSVVLYDPLKRVVVTNLNGHTARVNCIQWICKQDGSPSTELVSGGSDNQVIHWEIEDNQLLKAVHLQGHEGPVYAVHAVYQRRTSDPALCTLIVSAAADSAVRLWSKKGPEVPILACGNDDCRIHIFAQQNDQFQKVLSLCGHEDWIRGVEWAAFGRDLFLASCSQDCLIRIWKLYIKSTSLETQDDDNIRLKENTFTIENESVKIAFAVTLETVLAGHENWVNAVHWQPVFYKDGVLQQPVRLLSASMDKTMILWAPDEESGVWLEQVRVGEVGGNTLGFYDCQFNEDGSMIIAHAFHGALHLWKQNTVNPREWTPEIVISGHFDGVQDLVWDPEGEFIITVGTDQTTRLFAPWKRKDQSQVTWHEIARPQIHGYDLKCLAMINRFQFVSGADEKVLRVFSAPRNFVENFCAITGQSLNHVLCNQDSDLPEGATVPALGLSNKAVFQGDIASQPSDEEELLTSTGFEYQQVAFQPSILTEPPTEDHLLQNTLWPEVQKLYGHGYEIFCVTCNSSKTLLASACKAAKKEHAAIILWNTTSWKQVQNLVFHSLTVTQMAFSPNEKFLLAVSRDRTWSLWKKQDTISPEFEPVFSLFAFTNKITSVHSRIIWSCDWSPDSKYFFTGSRDKKVVVWGECDSTDDCIEHNIGPCSSVLDVGGAVTAVSVCPVLHPSQRYVVAVGLECGKICLYTWKKTDQVPEINDWTHCVETSQSQSHTLAIRKLCWKNCSGKTEQKEAEGAEWLHFASCGEDHTVKIHRVNKCAL

SEQ ID NO: 4705 - protein, 756 aa, Homo Sapiens
MVAPVLETSHVFCCPNRVRGVLNWSSGPRGLLAFGTSCSVVLYDPLKRVVVTNLNGHTARVNCIQWICKQDGSPSTELVSGGSDNQVIHWEIEDNQLLKAVHLQGHEGPVYAVHAVYQRRTSDPALCTLIVSAAADSAVRLWSKKGPEVPILACGNDDCRIHIFAQQNDQFQKVLSLCGHEDWIRGVEWAAFGRDLFLASCSQDCLIRIWKLYIKSTSLETQDDDNIRLKENTFTIENESVKIAFAVTLETVLAGHENWVNAVHWQPVFYKDGVLQQPVRLLSASMDKTMILWAPDEESGVWLEQREWTPEIVISGHFDGVQDLVWDPEGEFIITVGTDQTTRLFAPWKRKDQSQVTWHEIARPQIHGYDLKCLAMINRFQFVSGADEKVLRVFSAPRNFVENFCAITGQSLNHVLCNQDSDLPEGATVPALGLSNKAVFQGDIASQPSDEEELLTSTGFEYQQVAFQPSILTEPPTEDHLLQNTLWPEVQKLYGHGYEIFCVTCNSSKTLLASACKAAKKEHAAIILWNTTSWKQVQNLVFHSLTVTQMAFSPNEKFLLAVSRDRTWSLWKKQDTISPEFEPVFSLFAFTNKITSVHSRIIWSCDWSPDSKYFFTGSRDKKVVVWGECDSTDDCIEHNIGPCSSVLDVGGAVTAVSVCPVLHPSQRYVVAVGLECGKICLYTWKKTDQVPEINDWTHCVETSQSQSHTLAIRKLCWKNCSGKTEQKEAEGAEWLHFASCGEDHTVKIHRVNKCAL

SEQ ID NO: 4706 - protein, 821 aa, Homo Sapiens
MVAPVLETSHVFCCPNRVRGVLNWSSGPRGLLAFGTSCSVVLYDPLKRVVVTNLNGHTARVNCIQWICKQDGSPSTELVSGGSDNQVIHWEIEDNQLLKAVHLQGHEGPVYAVHAVYQRRTSDPALCTLIVSAAADSAVRLWSKKGPEVTWKTGQVERGRAWKPPASLALCSRSCDSMVSCYASILCKALWKEKLHTFWHHNRISFLPSAFRPIPILACGNDDCRIHIFAQQNDQFQKVLSLCGHEDWIRGVEWAAFGRDLFLASCSQDCLIRIWKLYIKSTSLETQDDDNIRLKENTFTIENESVKIAFAVTLETVLAGHENWVNAVHWQPVFYKDGVLQQPVRLLSASMDKTMILWAPDEESGVWLEQREWTPEIVISGHFDGVQDLVWDPEGEFIITVGTDQTTRLFAPWKRKDQSQVTWHEIARPQIHGYDLKCLAMINRFQFVSGADEKVLRVFSAPRNFVENFCAITGQSLNHVLCNQDSDLPEGATVPALGLSNKAVFQGDIASQPSDEEELLTSTGFEYQQVAFQPSILTEPPTEDHLLQNTLWPEVQKLYGHGYEIFCVTCNSSKTLLASACKAAKKEHAAIILWNTTSWKQVQNLVFHSLTVTQMAFSPNEKFLLAVSRDRTWSLWKKQDTISPEFEPVFSLFAFTNKITSVHSRIIWSCDWSPDSKYFFTGSRDKKVVVWGECDSTDDCIEHNIGPCSSVLDVGGAVTAVSVCPVLHPSQRYVVAVGLECGKICLYTWKKTDQVPEINDWTHCVETSQSQSHTLAIRKLCWKNCSGKTEQKEAEGAEWLHFASCGEDHTVKIHRVNKCAL

SEQ ID NO: 4707 - protein, 51 aa, Homo Sapiens
MVAPVLETSHVFCCPNRVRGVLNWSSGPRGLLAFGTSCSVVLYDPLPLLLN

SEQ ID NO: 4708 - protein, 51 aa, Homo Sapiens; identical to SEQ ID NO: 4707

SEQ ID NO: 4709 - protein, 150 aa, Homo Sapiens
MTRWSSYLLGWTTFLLYSYESSGDYPRCIFPFIYRGKAYNSCISQGSFLGSLWCSVTSVFDEKQQWKFCETNEYGGNSLRKPCIFPSIYRNNVVSDCMEDESNKLWCPTTENMDKDGKWSFCADTRISALVPGFPCHFPFNYKNKNYFNC

SEQ ID NO: 4710 - protein, 75 aa, Homo Sapiens
MTRWSSYLLGWTTFLLYSYESSGGISALVPGFPCHFPFNYKNKNYFNCTNEGSKENLVWCATSYNYDQDHTWVYC

SEQ ID NO: 4711 - protein, 223 aa, Homo Sapiens [sequence omitted]

SEQ ID NO: 4712 - protein, 220 aa, Homo Sapiens
MVQLPVGWTTFLLYSYESSGGMHEECVFPFTYKGSVYFTCTHIHSLSPWCATRAVYNGQWKYCQSEDYPRCIFPFIYRGKAYNSCISQGSFLGSLWCSVTSVFDEKQQWKFCETNEYGGNSLRKPCIFPSIYRNNVVSDCMEDESNKLWCPTTENMDKDGKWSFCADTRISALVPGFPCHFPFNYKNKNYFNCTNEGSKENLVWCATSYNYDQDHTWVYC

SEQ ID NO: 4713 - protein, 76 aa, Homo Sapiens
SNKLWCPTTENMDKDGKWSFCADTRISALVPGFPCHFPFNYKNKNYFNCTNEGSKENLVWCATSYNYDQDHTWVYC

SEQ ID NO: 4714 - protein, 154 aa, Homo Sapiens
  misc_feature (1)..(1): Xaa can be any naturally occurring amino acid
XYPRCIFPFIYRGKAYNSCISQGSFLGSLWCSVTSVFDEKQQWKFCETNEYGGNSLRKPCIFPSIYRNNVVSDCMEDESNKLWCPTTENMDKDGKWSFCADTRISALVPGFPCHFPFNYKNKNYFNCTNEGSKENLVWCATSYNYDQDHTWVYC

SEQ ID NO: 4715 - protein, 178 aa, Homo Sapiens
FIGIFLIDGVTGRIIHSSVQKKAKGPVHIVHSENWVVYQYWNTKARRNEFTVLELYEGTEQYNATAFSSLDRPQLPQVLQQSYIFPSSISAMEATITERGITSRHLLSFAGSPPPRDPNRTKQMYRYTQSDSSTITRQFLECEVSTQLPRVWSPLVWLWPMVWTFTKLESTHPSSLTF

SEQ ID NO: 4716 - protein, 75 aa, Homo Sapiens
MAAEWASRFWLWATLLIPAAAVYEDQVGKFDWRQQYVGKVKFASLEFSPGSKKLVVATEKNVIAALNSRTGEICE

SEQ ID NO: 4717 - protein, 992 aa, Homo Sapiens
MAAEWASRFWLWATLLIPAAAVYEDQVGKFDWRQQYVGKVKFASLEFSPGSKKLVVATEKNVIAALNSRTGEILWRHVDKGTAEGAVDAMLLHGQDVITVSNGGRIMRSWETNIGGLNWEITLDSGSFQALGLVGLQESVRYIAVLKKTTLALHHLSSGHLKWVEHLPESDSIHYQMVYSYGSGVVWALGVVPFSHVNIVKFNVEDGEIVQQVRVSTPWLQHLSGACGVVDEAVLVCPDPSSRSLQTLALETEWELRQIPLQSLDLEFGSGFQPRVLPTQPNPVDASRAQFFLHLSPSHYALLQYHYGTLSLLKNFPQTALVSFATTGEKTVAAVMACRNEVKSSSSEDGSMGSFSEKSSSKDSLACFNQTYTINLYLVETGRRLLDTTITFSLEQSGTRPERLYIQVFLKKDDSVGYRALVQTEDHLLLFLQQLAGKVVLWSREESLAEVVCLEMVDLPLTGAQAELEGEFGKKADGLLGMFLKRLSSQLILLQAWTSHLWKMFYDARKPRSQIKNEINIDTLARDEFNLQKMMVMVTASGKLFGIESSSGTILWKQYLPNVKPDSSFKLMVQRTTAHFPHPPQCTLLVKDKESGMSSLYVFNPIFGKWSQVAPPVLKRPILQSLLLPVMDQDYAKVLLLIDDEYKVTAFPATRNVLRQLHELAPSIFFYLVDAEQGRLCGYRLRKDLTTELSWELTIPPEVQRIVKVKGKRSSEHVHSQGRVMGDRSVLYKSLNPNLLAVVTESTDAHHERTFIGIFLIDGVTGRIIHSSVQKKAKGPVHIVHSENWVVYQYWNTKARRNEFTVLELYEGTEQYNATAFSSLDRPQLPQVLQQSYIFPSSISAMEATITERGITSRHLLIGLPSGAILSLPKALLDPRRPEIPTEQSREENLIPYSPDVQIHAERFINYNQTVSRMRGIYTAPSGLESTCLVVAYGLDIYQTRVYPSKQFDVLKDDYDYVLISSVLFGLVFATMITKRLAQVKLLNRAWR

SEQ ID NO: 4718 - protein, 993 aa, Homo Sapiens
MAAEWASRFWLWATLLIPAAAVYEDQVGKFDWRQQYVGKVKFASLEFSPGSKKLVVATEKNVIAALNSRTGEILWRHVDKGTAEGAVDAMLLHGQDVITVSNGGRIMRSWETNIGGLNWEITLDSGSFQALGLVGLQESVRYIAVLKKTTLALHHLSSGHLKWVEHLPESDSIHYQMVYSYGSGVVWALGVVPFSHVNIVKFNVEDGEIVQQVRVSTPWLQHLSGACGVVDEAVLVCPDPSSRSLQTLALETEWELRQIPLQSLDLEFGSGFQPRVLPTQPNPVDASRAQFFLHLSPSHYALLQYHYGTLSLLKNFPQTALVSFATTGEKTVAAVMACRNEVQKSSSSEDGSMGSFSEKSSSKDSLACFNQTYTINLYLVETGRRLLDTTITFSLEQSGTRPERLYIQVFLKKDDSVGYRALVQTEDHLLLFLQQLAGKVVLWSREESLAEVVCLEMVDLPLTGAQAELEGEFGKKADGLLGMFLKRLSSQLILLQAWTSHLWKMFYDARKPRSQIKNEINIDTLARDEFNLQKMMVMVTASGKLFGIESSSGTILWKQYLPNVKPDSSFKLMVQRTTAHFPHPPQCTLLVKDKESGMSSLYVFNPIFGKWSQVAPPVLKRPILQSLLLPVMDQDYAKVLLLIDDEYKVTAFPATRNVLRQLHELAPSIFFYLVDAEQGRLCGYRLRKDLTTELSWELTIPPEVQRIVKVKGKRSSEHVHSQGRVMGDRSVLYKSLNPNLLAVVTESTDAHHERTFIGIFLIDGVTGRIIHSSVQKKAKGPVHIVHSENWVVYQYWNTKARRNEFTVLELYEGTEQYNATAFSSLDRPQLPQVLQQSYIFPSSISAMEATITERGITSRHLLIGLPSGAILSLPKALLDPRRPEIPTEQSREENLIPYSPDVQIHAERFINYNQTVSRMRGIYTAPSGLESTCLVVAYGLDIYQTRVYPSKQFDVLKDDYDYVLISSVLFGLVFATMITKRLAQVKLLNRAWR

SEQ ID NO: 4719 - protein, 971 aa, Homo Sapiens
MAAEWASRFWLWATLLIPAAAVYEDQVGKFDWRQQYVGKVKFASLEFSPGSKKLVVATEKNVIAALNSRTGEIYVITVSNGGRIMRSWETNIGGLNWEITLDSGSFQALGLVGLQESVRYIAVLKKTTLALHHLSSGHLKWVEHLPESDSIHYQMVYSYGSGVVWALGVVPFSHVNIVKFNVEDGEIVQQVRVSTPWLQHLSGACGVVDEAVLVCPDPSSRSLQTLALETEWELRQIPLQSLDLEFGSGFQPRVLPTQPNPVDASRAQFFLHLSPSHYALLQYHYGTLSLLKNFPQTALVSFATTGEKTVAAVMACRNEVQKSSSSEDGSMGSFSEKSSSKDSLACFNQTYTINLYLVETGRRLLDTTITFSLEQSGTRPERLYIQVFLKKDDSVGYRALVQTEDHLLLFLQQLAGKVVLWSREESLAEVVCLEMVDLPLTGAQAELEGEFGKKADGLLGMFLKRLSSQLILLQAWTSHLWKMFYDARKPRSQIKNEINIDTLARDEFNLQKMMVMVTASGKLFGIESSSGTILWKQYLPNVKPDSSFKLMVQRTTAHFPHPPQCTLLVKDKESGMSSLYVFNPIFGKWSQVAPPVLKRPILQSLLLPVMDQDYAKVLLLIDDEYKVTAFPATRNVLRQLHELAPSIFFYLVDAEQGRLCGYRLRKDLTTELSWELTIPPEVQRIVKVKGKRSSEHVHSQGRVMGDRSVLYKSLNPNLLAVVTESTDAHHERTFIGIFLIDGVTGRIIHSSVQKKAKGPVHIVHSENWVVYQYWNTKARRNEFTVLELYEGTEQYNATAFSSLDRPQLPQVLQQSYIFPSSISAMEATITERGITSRHLLIGLPSGAILSLPKALLDPRRPEIPTEQSREENLIPYSPDVQIHAERFINYNQTVSRMRGIYTAPSGLESTCLVVAYGLDIYQTRVYPSKQFDVLKDDYDYVLISSVLFGLVFATMITKRLAQVKLLNRAWR

SEQ ID NO: 4720 - protein, 86 aa, Homo Sapiens
  misc_feature (1)..(1): Xaa can be any naturally occurring amino acid
XNATAFSSLDRPQLPQVLQQSYIFPSSISAMEATITERGITSRHLLIGLPSGAILSLPKALLDPRRPEIPTEQSRCTDTRRAIHQL

SEQ ID NO: 4721 - protein, 191 aa, Homo Sapiens
  misc_feature (1)..(1): Xaa can be any naturally occurring amino acid
XSSKDSLACFNQTYTINLYLVETGRRLLDTTITFSLEQSGTRPERLYIQVFLKKDDSVGYRALVQTEDHLLLFLQQLAGKVVLWSREESLAEVVCLEMVDLPLTGAQAELEGEFGKKAAIQDGLLGMFLKRLSSQLILLQAWTSHLWKMFYDARKPRSQIKNEINIDTLARDEFNLQKMMVMVTASGKVSG

SEQ ID NO: 4722 - protein, 43 aa, Homo Sapiens
MAAASAGATRLLLLLLMAHSFEIDDSANFRKRGSLLWNQQDGT

SEQ ID NO: 4723 - protein, 254 aa, Homo Sapiens
MAAASAGATRLLLLLLMAVAAPSRARGSGCRAGTGARGAGAEGREGEACGTVGLLLEHSFEIDDSANFRKRGSLLWNQQDGTLSLSQRQLSEEERGRLRDVAALNGLYRVRIPRRPGALDGLEAGGYVSSFVPACSLVESHLSDQLTLHVDVAGNVVGVSVVTHPGGCRGHEVEDVDLELFNTSVQLQPPTTAPGPETAAFIERLEMEQAQKAKNPQEQKSFFAKYWHIILGGAVLLTALRPAAPGPAPPPQEA

SEQ ID NO: 4724 - protein, 262 aa, Homo Sapiens
MAAASAGATRLLLLLLMAVAAPSRARGSGCRAGTGARGAGAEGREGEACGTVGLLLEHSFEIDDSANFRKRGSLLWNQQDGTLSLSQRQLSEEERGRLRDVAALNGLYRVRIPRRPGALDGLEAGGYVSSFVPACSLVESHLSDQLTLHVDVAGNVVGVSVVTHPGGCRGHEVEDVDLELFNTSVQLQPPTTAPGPETAAFIERLEMEQAQKAKNPQEQKSFFAKYWMYIIPVVLFLMMSGAPDTGGQGGGGGGGGGGGSGR

SEQ ID NO: 4725 - protein, 371 aa, Homo Sapiens
MAAASAGATRLLLLLLMAVAAPSRARGSGCRAGTGARGAGAEGREGEACGTVGLLLEHSFEIDDSANFRKRGSLLWNQQDGTLSLSQRQLSEEERGRLRDVAALNGLYRVRIPRRPGALDGLEAGGYVSSFVPACSLVESHLSDQLTLHVDVAGNVVGVSVVTHPGGCRGHEVEDVDLELFNTSVQLQPPTTAPGPETAAFIERLEMEQAQKAKNPQEQKSFFAKYWMYIIPVVLFLMMSGAPDTGGQGGGGGGGGGGGSGRPLSSAFCWQRSSWTGAFGTAAGVSCARLPHGPMQPQGLPPCPWSRARDPGHYASSDLASPYPEPMQSGNMPPSLQPLCLCSRWSHPPVPGWARWSCPGSCSAPLTLTLD

SEQ ID NO: 4726 - protein, 42 aa, Homo Sapiens
MAAASAGATRLLLLLLMAVAAPSRARGSGCRAGTGARGVSAL

SEQ ID NO: 4727 - protein, 42 aa, Homo Sapiens; identical to SEQ ID NO: 4726

SEQ ID NO: 4728 - protein, 89 aa, Homo Sapiens [sequence omitted]

SEQ ID NO: 4729 - protein, 94 aa, Homo Sapiens
MGEVEISALAYVKMCLHAARYPHAAVNGLFLAPAPRSGECLCLTDCVPLFHSHLALSVMLEVALNQVDVWGAQAGLVVAGYYHANAAVNDQSNI

SEQ ID NO: 4730 - protein, 208 aa, Homo Sapiens
MGEVEISALAYVKMCLHAARYPHAAVNGLFLAPAPRSGECLCLTDCVPLFHSHLALSVMLEVALNQVDVWGAQAGLVVAGYYHANAAVNDQSPGPLALKIAGRIAEFFPDAVLIMLDNQKLVPQPRVPPVIVLENQGLRWVPKDKNLVMWRDWEESRQMVGALLEDRAHQHLVDFDCHLDDIRQDWTNQRLNTQITQWVGPTNGNGNA

SEQ ID NO: 4731 - protein, 208 aa, Homo Sapiens; identical to SEQ ID NO: 4730

SEQ ID NO: 4732 - protein, 134 aa, Homo Sapiens
MGFAHSWLLTPLIFPLHSPGPLALKIAGRIAEFFPDAVLIMLDNQKLVPQPRVPPVIVLENQGLRWVPKDKNLVMWRDWEESRQMVGALLEDRAHQHLVDFDCHLDDIRQDWTNQRLNTQITQWVGPTNGNGNA

SEQ ID NO: 4733 - protein, 76 aa, Homo Sapiens
LMSTATFLTSKDEGLKATTTDVRKNDSIISNVTVTSVTLPNAVSTLQSSKPKTETQSSIKTTEIPGEHSAQGKTKN

SEQ ID NO: 4734 - protein, 248 aa, Homo Sapiens
MELLQVTILFLLPSICSSNSTGVLEAANNSLVVTTTKPSITTPNTESLQKNVVTPTTGTTPKGTITNELLKMSLMSTATFLTSKDEGLKATTTDVRKNDSIISNVTVTSVTLPNAVSTLQSSKPKSSVLQPDASPSKTGTLTSIPVTIPENTSQSQVIGTEGGKNASTSATSRSYSSIILPVVIALIVITLSVFVLVGLYRMCWKADPGTPENGNDQPQSDKESVKLLTVKTISHESGEHSAQGKTKN

SEQ ID NO: 4735 - protein, 165 aa, Homo Sapiens
MELLQVTILFLLPSICSSNSTGVLEAANNSLVVTTTKPSITTPNTESLQKNVVTPTTGTTPKGTITNELLKMSLMSTATFLTSKDEGLKATTTDVRKNDSIISNVTVTSVTLPNAVSTLQSSKPKTETQSSIKTTEIPGIILPVVIALIVITLSVFVLVGLYRMC

SEQ ID NO: 4736 - protein, 261 aa, Homo Sapiens
MELLQVTILFLLPSICSSNSTGVLEAANNSLVVTTTKPSITTPNTESLQKNVVTPTTGTTPKGTITNELLKMSLMSTATFLTSKDEGLKATTTDVRKNDSIISNVTVTSVTLPNAVSTLQSSKPKTETQSSIKTTEIPGSVLQPDASPSKTGTLTSIPVTIPENTSQSQVIGTEGGKNASTSATSRSYSSIILPVVIALIVITLSVFVLVGLYRMCWKADPGTPENGNDQPQSDKESVKLLTVKTISHESGEHSAQGKTKN

SEQ ID NO: 4737 - protein, 178 aa, Homo Sapiens
MELLQVTILFLLPSICSSNSTGVLEAANNSLVVTTTKPSITTPNTESLQKNVVTPTTGTTPKGTITNELLKMSLMSTATFLTSKDEGLKATTTDVRKNDSIISNVTVTSVTLPNAVSTLQSSKPKTETQSSIKTTEIPGTPENGNDQPQSDKESVKLLTVKTISHESGEHSAQGKTKN

SEQ ID NO: 4738 - protein, 34 aa, Homo Sapiens
MGGPRAWALLCLGLLLPGGGAAWSIGAAPFSGRR

SEQ ID NO: 4739 - protein, 175 aa, Homo Sapiens
MGGPRAWALLCLGLLLPGGGAAWSIGAAPFSGRRNWCSYVVTRTISCHVQNGTYLQRVLQNCPWPMSCPGSSYRTVVRPTYKVMYKIVTAREWRCCPGHSGVSCEEGCLNCSKVSELTERLKVLEAKMTMLTVIEQPVPPTPATPEDPAPLWGPPPAQGSPGDGGLQDQVGAWGL

SEQ ID NO: 4740 - protein, 443 aa, Homo Sapiens
MGGPRAWALLCLGLLLPGGGAAWSIGAAPFSGRRNWCSYVVTRTISCHVQNGTYLQRVLQNCPWPMSCPGSSYRTVVRPTYKVMYKIVTAREWRCCPGHSGVSCEEVAASSASLEPMWSGSTMRRMALRPTAFSGCLNCSKVSELTERLKVLEAKMTMLTVIEQPVPPTPATPEDPAPLWGPPPAQGSPGDGGLQDQVGAWGLPGPTGPKGDAGSRGPMGMRGPPGPQGPPGSPGRAGAVGTPGERGPPGPPGPPGPPGPPAPVGPPHARISQHGDPLLSNTFTETNNHWPQGPTGPPGPPGPMGPPGPPGPTGVPGSPGHIGPPGPTGPKGISGHPGEKGERGLRGEPGPQGSAGQRGEPGPKGDPGEKSHWGEGLHQLREALKILAERVLILETMIGLYEPELGSGAGPAGTGTPSLLRGKRGGHATNYRIVAPRSRDERG

SEQ ID NO: 4741 - protein, 422 aa, Homo Sapiens
MGGPRAWALLCLGLLLPGGGAAWSIGAAPFSGRRNWCSYVVTRTISCHVQNGTYLQRVLQNCPWPMSCPGSSYRTVVRPTYKVMYKIVTAREWRCCPGHSGVSCEEVAASSASLEPMWSGSTMRRMALRPTAFSGCLNCSKVSELTERLKVLEAKMTMLTVIEQPVPPTPATPEDPAPLWGPPPAQGSPGDGGLQDQVGAWGLPGPTGPKGDAGSRGPMGMRGPPGPQGPPGSPGRAGAVGTPGERGPPGPPGPPGPPGPPAPVGPPHARISQHGDPLLSNTFTETNNHWPQGPTGPPGPPGPMGPPGPPGPTGVPGSPGHIGLRGEPGPQGSAGQRGEPGPKGDPGEKSHWGEGLHQLREALKILAERVLILETMIGLYEPELGSGAGPAGTGTPSLLRGKRGGHATNYRIVAPRSRDERG

SEQ ID NO: 4742 - protein, 445 aa, Homo Sapiens
MGGPRAWALLCLGLLLPGGGAAWSIGAAPFSGRRNWCSYVVTRTISCHVQNGTYLQRVLQNCPWPMSCPGSSYRTVVRPTYKVMYKIVTAREWRCCPGHSGVSCEEVAASSASLEPMWSGSTMRRMALRPTAFSGCLNCSKVSELTERLKVLEAKMTMLTVIEQPVPPTPATPEDPAPLWGPPPAQGSPGDGGLQDQVGAWGLPGPTGPKGDAGSRGPMGMRGPPGPQGPPGSPGRAGAVGTPGERGPPGPPGPPGPPGPPAPVGPPHARISQHGDPLLSNTFTETNNHWPQGPTGPPGPPGPMGPPGPPGPTGVPGSPGHIGPPGPTGPKGISGHPGEKGERGLRGEPGPQGSAGQRGEPGPKGDPGEKSHWAPSLQSFLQQQAQLELLARRVTLLEAIIWPEPELGSGAGPAGTGTPSLLRGKRGGHATNYRIVAPRSRDERG

SEQ ID NO: 4743 - protein, 212 aa, Homo Sapiens
MGGPRAWALLCLGLLLPGGGAAWSIGAAPFSGRRNWCSYVVTRTISCHVQNGTYLQRVLQNCPWPMSCPGSSYRTVVRPTYKVMYKIVTAREWRCCPGHSGVSCEEVAASSASLEPMWSGSTMRRMALRPTAFSGCLNCSKVSELTERLKVLEAKMTMLTVIEQPVPPTPATPEDPAPLWGPPPAQGSPGDGGLQGDPLLSNTFTETNNHWP

SEQ ID NO: 4744 - protein, 236 aa, Homo Sapiens
  misc_feature (1)..(1): Xaa can be any naturally occurring amino acid
XMTMLTVIEQPVPPTPATPEDPAPLWGPPPAQGSPGDGGLQGLPGAIESVRVPLLPRNDQVGAWGLPGPTGPKGDAGSRGPMGMRGPPGPQGPPGSPGRAGAVGTPGERGPPGPPGPPGPPGPPAPVGPPHARISQHGDPLLSNTFTETNNHWPQGPTGPPGPPGPMGPPGPPGPTGVPGSPGHIGPPGPTGPKGISGHPGEKGERGLRGEPGPQGSAGQRGEPGPKGDPGEKSHW

SEQ ID NO: 4745 - protein, 1016 aa, Homo Sapiens
MAPRTLWSCYLCCLLTAAAGAASYPPRGFSLYTGSSGALSPGGPQAQIAPRPASRHRNWCAYVVTRTVSCVLEDGVETYVKYQPCAWGQPQCPQSIMYRRFLRPRYRVAYKTVTDMEWRCCQGYGGDDCAESPAPALGPASSTPRPLARPARPNLSGSSAGSPLSGLGGEGPGESEKVQQLEEQVQSLTKELQGLRGVLQGLSGRLAEDVQRAVETAFNGRQQPADAAARPGVHETLNEIQHQLQLLDTRVSTHDQELGHLNNHHGGSSSSGGSRAPAPASAPPGPSEELLRQLEQRLQESCSVCLAGLDGFRRQQQEDRERLRAMEKLLASVEERQRHLAGLAVGRRPPQECCSPELGRRLAELERRLDVVAGSVTVLSGRRGTELGGAAGQGGHPPGYTSLASRLSRLEDRFNSTLGPSEEQEESWPGAPGGLSHWLPAARGRLEQLGGLLANVSGELGGRLDLLEEQVAGAMQACGQLCSGAPGEQDSQVSEILSALERRVLDSEGQLRLVGSGLHTVEAAGEARQATLEGLQEVVGRLQDRVDAQDETAAEFTLRLNLTAARLGQLEGLLQAHGDEGCGACGGVQEELGRLRDGVERCSCPLLPPRGPGAGPGVGGPSRGPLDGFSVFGGSSGSALQALQGELSEVILSFSSLNDSLNELQTTVEGQGADLADLGATKDRIISEINRLQQEATEHATESEERFRGLEEGQAQAGQCPSLEGRLGRLEGVCERLDTVAGGLQGLREGLSRHVAGLWAGLRETNTTSQMQAALLEKLVGGQAGLGRRLGALNSSLQLLEDRLHQLSLKDLTGPAGEAGPPGPPGLQGPPGPAGPPGSPGKDGQEGPIGPPGPQGEQGVEGAPAAPVPQVAFSAALSLPRSEPGTVPFDRVLLNDGGYYDPETGVFTAPLAGRYLLSAVLTGHRHEKVEAVLSRSNQGVARVDSGGYEPEGLENKPVAESQPSPGTLGVFSLILPLQAGDTVCVDLVMGQLAHSEEPLTIFSGALLYGDPELEHA

SEQ ID NO: 4746 - protein, 347 aa, Homo Sapiens
  misc_feature (1)..(1): Xaa can be any naturally occurring amino acid
XADLGATKDRIISEINRLQQEATEHATESEERFRGLEEGQAQAGQCPSLEGRLGRLEGVCERLDTVAGGLQGLREGLSRHVAGLWAGLRETNTTSQMQAALLEKLVGGQAGLGRRLGALNSSLQLLEDRLHQLSLKDLTGEGTKGPAGEAGPPGPPGLQGPPGPAGPPGSPGKDGQEGPIGPPGPQGEQGVEGAPAAPVPQVAFSAALSLPRSEPGTVPFDRVLLNDGGYYDPETGVFTAPLAGRYLLSAVLTGHRHEKVEAVLSRSNQGVARVDSGGYEPEGLENKPVAESQPSPGTLGVFSLILPLQAGDTVCVDLVMGQLAHSEEPLTIFSGALLYGDPELEHA

SEQ ID NO: 4747 - protein, 1053 aa, Homo Sapiens
MWQPRRPWPRVPWRWALALLALVGAGLCHAGPQPGYPARPSARNKNWCAYIVNKNVSCSVLEGSESFIQAQYNCAWNQMPCPSALVYRVNFRPRYVTRYKTVTQLEWRCCPGFRGGDCQEGPKDPVKTLRPTPARPRNSLKKATDNEPSQFSEPRKTLSPTGTAQPSWGVDPKEGPQELQEKKIQVLEEKVLRLTRTVLDLQSSLAGVSENLKHATQDDASRTRAPGLSSQHPKPDTTVSGDTETGQSPGVFNTKESGMKDIKSELAEVKDTLKNKSDKLEELDGKVKGYEGQLRQLQEAAQGPTVTMTTNELYQAYVDSKIDALREELMEGMDRKLADLKNSCEYKLTGLQQQCDDYGSSYLGVIELIGEKETSLRKEINNLRARLQEPSAQANCCDSEKNGDIGQQIKTLDQKIERVAEATRMLNGRLDNEFDRLIVPEPDVDFDAKWNELDARINVTEKNAEEHCFYIEETLRGAINGEVGDLKQLVDQKIQSLEDRLGSVLLQMTNNTGAELSPPGAAALPGVSGSGDERVMMELNHLKDKVQVVEDICLLNIQGKPHGMEGALPNREDRAVRDSLHLLKSLNDTMHRKFQETEQTIQKLQQDFSFLYSQLNHTENDVTHLQKEMSNCRAGENAGMGRFTKVGEQERTVDTLPSPQHPVAHCCSQLEERWQRLQSQVISELDACKECTQGVQREVSMVEGRVSHMEKTCSKLDSISGNLQRIKEGLNKHVSSLWNCVRQMNGTLRSHSRDISGLKNSVQQFYSHVFQISTDLQDLVKFQPSAKAPSPPPPAEAPKEPLQPEPAPPRPSGPATAEDPGRRPVLPQRPPEERPPQPPGSTGVIAETGQAGPPAGAGVSGRGLPRGVDGQTGSGTVPGAEGFAGAPGYPKSPPVASPGAPVPSLVSFSAGLTQKPFPSDGGVVLFNKVLVNDGDVYNPSTGVFTAPYDGRYLITATLTPERDAYVEAVLSVSNASVAQLHTAGYRREFLEYHRPPGALHTCGGPGAFHLIVHLKAGDAVNVVVTGGKLAHTDFDEMYSTFSGVFLYPFLSHL

SEQ ID NO: 4748 - protein, 766 aa, Homo Sapiens
MGRRRLLVWLCAVAALLSGAQARGTPLLARPAPPGASRYSLYTTGWRPRLRPGPHKALCAYVVHRNVTCILQEGAESYVKAEYRQCRWGPKCPGTVTYRTVLRPKYKVGYKTVTDLAWRCCPGFTGKRCPEHLTDHGAASPQLEPEPQIPSGQLDPGPRPPSYSRAAPSPHGRKGPGLFGERLERLEGDVQRLAQTYGTLSGLVASHEDPNRMTGGPRAPAVPVGFGVIPEGLVGPGDRARGPLTPPLDEILSKVTEVSNTLQTKVQLLDKVHGLALGHEAHLQRLREAPPSPLTSLALLEEYVDRRLHRLWGSLLDGFEQKLQGVQSECDLRVQEVRRQCEEGQAASRRLHQSLDGRELALRQELSQLGSQLQGLSVSGRGSCCGQLALINARMDGLERALQAVTETQRGPGAPAGDELTRLSAAMLEGGVDGLLEGLETLNGTEGGARGCCLRLDMGGWGVGGFGTMLEERVQSLEERLATLAGELSHDSASPGRSARPLVQTELAVLEQRLVSLETSCTPSTTSAILDSLVAEVKAWQSRSEALLRQVASHAALLQQLNGTVAEVQGQLAEGTGSSLQGEITLLKVNLNSVSKSLTGLSDSVSQYSDAFLAANTSLDERERKVEAEVQAIQEQVSSQGSRLQAGHRQVLNLRGELEQLKAGVAKVASGLSRCQDTAQKLQHTVGHFDQRVAQVEGACRRLGLLAAGLDSLPTEPLRPREGLWSHVDQLNRTLAQHTQDIARLRDDLLDCQAQLAEQVRPGQAN

SEQ ID NO: 4749 - protein, 1142 aa, Homo Sapiens
MLVLRCRLGTSFPKLDNLVPKGKMKILLVFLGLLGNSVAMPMHMPRMPGFSSKSEEMMRYNQFNFMNGPHMAHLGPFFGNGLPQQFPQYQMPMWPQPPPNTWHPRKSSAPKRHNKTDQTQETQKPNQTQSKKPPQKRPLKQPSHNQPQPEEEAQPPQAFPPFGNGLFPYQQPPWQIPQRLPPPGYGRPPISNEEGGNPYFGYFGYHGFGGRPPYYSEEMFEQDFEKPKEEDPPKAESPGTEPTANSTVTETNSTQPNPKGSQGGNDTSPTGNSTPGLNTGNNPPAQNGIGPLPAVNASGQGGPGSQIPWRPSQPNIRENHPYPNIRNFPSGRQWYFTGTVMGHRQNRPFYRNQQVQRGPRWNFFAWERKQVARPGNPVYHKAYPPTSRGNYPNYAGNPANLRRKPQGPNKHPVGTTVAPLGPKPGPVVRNEKIQNPKEKPLGPKEQIIVPTKNPTSPWRNSQQYEVNKSNYKLPHSEGYMPVPNFNSVDQHENSYYPRGDSRKVPNSDGQTQSQNLPKGIVLGSRRMPYESETNQSELKHSSYQPAVYPEEIPSPAKEHFPAGRNTWDHQEISPPFKEDPGRQEEHLPHPSHGSRGSVFYPEYNPYDPRENSPYLRGNTWDERDDSPNTMGQKESPLYPINTPDQKEIVPYNEEDPVDPTGDEVFPGQNRWGEELSFKGGPTVRHYEGEQYTSNQPKEYLPYSLDNPSKPREDFYYSEFYPWSPDENFPSYNTASTMPPPIESRGYYVNNAAGPEESTLFPSRNSWDHRIQAQGQRERRPYFNRNIWDQATHLQKAPARPPDQKGNQPYYSNTPAGLQKNPIWHEGENLNYGMQITRMNSPEREHSSFPNFIPPSYPSGQKEAHLFHLSQRGSCCAGSSTGPKDNPLALQDYTPSYGLAPGENQDTSPLYTDGSHTKQTRDIISPTSILPGQRNSSEKRESQNPFRDDVSTLRRNTPCSIKNQLGQKEIMPFPEASSLQSKNTPCLKNDLGGDGNNILEQVFEDNQLNERTVDLTPEQLVIGTPDEGSNPEGIQSQVQENESERQQQRPSNILHLPCFGSKLAKHHSSTTGTPSSDGRQSPFDGDSITPTENPNTLVELATEEQFKSINVDPLDADEHSPFEFLQRGTNVQDQVQDCLLLQA

SEQ ID NO: 4750 - protein, 297 aa, Homo Sapiens
MRALRAGLTLASGAGLGAVVEGWRRRREDARAAPGLLGRLPVLPVAAAAELPPVPGGPRGPGELAKYGLPGLAQLKSRESYVLCYDPRTRGALWVVEQLRPERLRGDGDRRECDFREDDSVHAYHRATNADYRGSGFDRGHLAAAANHRWSQKAMDDTFYLSNVAPQVPHLNQNAWNNLEKYSRSLTRSYQNVYVCTGPLFLPRTEADGKSYVKYQVIGKNHVAVPTHFFKVLILEAAGGQIELRTYVMPNAPVDEAIPLERFLVPIESIERASGLLFVPNILARAGSLKAITAGSK

SEQ ID NO: 4751 - protein, 347 aa, Homo Sapiens
MRACISLVLAVLCGLAWADLYSAPTSCQGRCYEAFDKHHQCHCNARCQEFGNCCKDFESLCSDHEVSHSSDAITKEEIQSISEKIYRADTNKAQKEDIVLNSQNCISPSETRNQVDRCPKPLFTYVNEKLFSKPTYAAFINLLNNYQRATGHGEHFSAQELAEQDAFLREIMKTAVMKELYSFLHHQNRYGSEQEFVDDLKNMWFGLYSRGNEEGDSSGFEHVFSGEVKKGKVTGFHNWIRFYLEEKEGLVDYYSHIYDGPWDSYPDVLAMQFNWDGYYKEVGSAFIGSSPEFEFALYSLCFIARPGKVCQLSLGGYPLAVRTYTWDKSTYGNGKKYIATAYIVSST

SEQ ID NO: 4752 - protein, 369 aa, Homo Sapiens
MRACISLVLAVLCGLAWAEDHKESEPLPQLEEETEEALASNLYSAPTSCQGRCYEAFDKHHQCHCNARCQEFGNCCKDFESLCSDHEVSHSSDAITKEEIQSISEKIYRADTNKAQKEDIVLNSQNCISPSETRNQVDRCPKPLFTYVNEKLFSKPTYAAFINLLNNYQRATGHGEHFSAQELAEQDAFLREIMKTAVMKELYSFLHHQNRYGSEQEFVDDLKNMWFGLYSRGNEEGDSSGFEHVFSGEVKKGKVTGFHNWIRFYLEEKEGLVDYYSHIYDGPWDSYPDVLAMQFNWDGYYKEVGSAFIGSSPEFEFALYSLCFIARPGKVCQLSLGGYPLAVRTYTWDKSTYGNGKKYIATAYIVSST

SEQ ID NO: 4753 - protein, 410 aa, Homo Sapiens
MRACISLVLAVLCGLAWAGKIESCASRCNEKFNRDAACQCDRRCLWHGNCCEDYEHLCTEDHKESEPLPQLEEETEEALASNLYSAPTSCQGRCYEAFDKHHQCHCNARCQEFGNCCKDFESLCSDHEVSHSSDAITKEEIQSISEKIYRADTNKAQKEDIVLNSQNCISPSETRNQVDRCPKPLFTYVNEKLFSKPTYAAFINLLNNYQRATGHGEHFSAQELAEQDAFLREIMKTAVMKELYSFLHHQNRYGSEQEFVDDLKNMWFGLYSRGNEEGDSSGFEHVFSGEVKKGKVTGFHNWIRFYLEEKEGLVDYYSHIYDGPWDSYPDVLAMQFNWDGYYKEVGSAFIGSSPEFEFALYSLCFIARPGKVCQLSLGGYPLAVRTYTWDKSTYGNGKKYIATAYIVSST

SEQ ID NO: 4754 - protein, 76 aa, Homo Sapiens
MGAAISQGALIAIVCNGLVGFLLLLLWVILCWACHSRSADVDSLSESSPNSSPGPCPEKAPPPQKPSHEGSYLLQP

SEQ ID NO: 4755 - protein, 363 aa, Homo Sapiens
MAIGAVSLAVAKACAMLLNKPLYLNIALLKHNQEQPTTLSMPLLMVSLVSCGKSSSGKLNLMKEVICIPHPELTTKQGVEMLMEMQKHINKIIEMPSPPKAETKKGHDGSKRGQQQITGKMSHLGCLTINCDSIEQPLLLIQEICANLGLELGTNLHLAINCAGHELMDYNKGKYEVIMGTYKNAAEMVDLYVDLINKYPSIIALIDPFRKEDSEQWDSIYHALGSRCYIIAGTASKSISKLLEQGNISIPKSNGLIIKHTNQTTMSDLVEITNLIDSKKHITVFGSTEGESSDDSLVDLAVGLGVRFIKLGGLSRGERVTKYNRLLTIEEELVQNGTLATSSSSCDARIGGQEQETMTLVKV

SEQ ID NO: 4756 - protein, 625 aa, Homo Sapiens
MEEEGGGRSCGTTRELQKLKQQAMEYYRENDVPRRLEELLNSTFYLQPADVYGHLANCFSKLAKPPTICKIVGKDVLDGLGLPTLQVDIFCTIQNFPKNVCSVVISTHFEVHENALPELAKAEEAERASAVSTAVQWVNSTITHELQGMAPSDQAEVDHLLRIFFASKVQEDKGRKELEKSLEYSTVPTPLPPVPPPPPPPPPTKKKGQKPGRKDTITEKPIAPAEPVEPVLSGSMAIGAVSLAVAKACAMLLNKPLYLNIALLKHNQEQPTTLSMPLLMVSLVSCGKSSSGKLNLMKEVICIPHPELTTKQGVEMLMEMQKHINKIIEMPSPPKAETKKGHDGSKRGQQQITGKMSHLGCLTINCDSIEQPLLLIQEICANLGLELGTNLHLAINCAGHELMDYNKGKYEVIMGTYKNAAEMVDLYVDLINKYPSIIALIDPFRKEDSEQWDSIYHALGSRCYIIAGTASKSISKLLEQGNISIPKSNGLIIKHTNQTTMSDLVEITNLIDSKKHITVFGSTEGESSDDSLVDLAVGLGVRFIKLGGLSRGERVTKYNRLLTIEEELVQNGTLGFKEEHTFFYFNEEAEKAAEALEAAAAREPLVPTFPTQGVEESAETGASSG

SEQ ID NO: 4757 - protein, 628 aa, Homo Sapiens [sequence omitted]

SEQ ID NO: 4758 - protein, 308 aa, Homo Sapiens
MEEEGGGRSCGTTRELQKLKQQAMEYYRENDVPRRLEELLNSTFYLQPADVYGHLPSPPKAETKKGHDGSKRGQQQITGKMSHLGCLTINCDSIEQPLLLIQEICANLGLELGTNLHLAINCAGHELMDYDSEQWDSIYHALGSRCYIIAGTASKSISKLLEQGNISIPKSNGLIIKHTNQTTMSDLVEITNLIDSKKHITVFGSTEGESSDDSLVDLAVGLGVRFIKLGGLSRGERVTKYNRLLTIEEELVQNGTLGFKEEHTFFYFNEEAEKAAEALEAAAAREPLVPTFPTQGVEESAETGASSG

SEQ ID NO: 4759 - protein, 138 aa, Homo Sapiens
  misc_feature (1)..(1): Xaa can be any naturally occurring amino acid
XGRSCGTTRELQKLKQQAMEYYRENDVPRRLEELLNSTFYLQPADVYGHLANCFSKLAKPPTICKIVGKDVLDGLGLPTLQVDIFCTIQNFPKNVCSVVISTHFEVHENALPELAKAEEAERASAVSTAVQWVNSTIT

SEQ ID NO: 4760 - protein, 440 aa, Homo Sapiens
MAVKLGTLLLALALGLAQPASARRKLLVFLLDGFRSDYISDEALESLPGFKEIVSRGVKVDYLTPDFPSLSYPNYYTLMTGRHCEVHQMIGNYMWDPTTNKSFDIGVNKDSLMPLWWNGSEPLWVTLTKAKRKVYMYYWPGCEVEILGVRPTYCLEYKNVPTDINFANAVSDALDSFKSGRADLAAIYHERIDVEGHHYGPASPQRKDALKAVDTVLKYMTKWIQERGLQDRLNVIIFSDHGMTDIFWMDKVIELNKYISLNDLQQVKDRGPVVSLWPAPGKHSEIYNKLSTVEHMTVYEKEAIPSRFYYKKGKFVSPLTLVADEGWFITENREMLPFWMNSTGRREGWQRGWHGYDNELMDMRGIFLAFGPDFKSNFRAAPIRSVDVYNVMCNVVGITPLPNNGSWSRVMCMLKGRASTAPPVWPSHCALALILLFLLA

SEQ ID NO: 4761 - protein, 194 aa, Homo Sapiens
MIGNYMWDPTTNKSFDIGVNKDSLMPLWWNGSEPLWVTLTKAKRKVYMYYWPGCEVEILGVRPTYCLEYKNVPTDINFANAVSDALDSFKSGRADLAAIYHERIDVEGHHYGPASPQRKDALKAVDTVLKYMTKWIQERGLQDRLNVIIFSDHGMTDIFWMDKVIELNKYISLNDLQQVKDRGPVVSLWPAPGK

SEQ ID NO: 4762 - protein, 159 aa, Homo Sapiens
LKDAHPKLHVYKKEAFPEAFHYANNPRVTPLLMYSDLGYVIHGRINVQFNNGEHGFDNKDMDMKTIFRAVGPSFRAGLEVEPFESVHVYELMCRLLGIVPEANDGHLATLLPMLHTESALPPDGRPTLLPKGRSALPPSSRPLLVMGLLGTVILLSEVA

SEQ ID NO: 4763 - protein, 458 aa, Homo Sapiens
MRGPAVLLTVALATLLAPGAGAPVQSQGSQNKLLLVSFDGFRWNYDQDVDTPNLDAMARDGVKARYMTPAFVTMTSPCHFTLVTGKYIENHGVVHNMYYNTTSKVKLPYHATLGIQRWWDNGSVPIWITAQRQGLRAGSFFYPGGNVTYQGVAVTRSRKEGIAHNYKNETEWRANIDTVMAWFTEEDLDLVTLYFGEPDSTGHRYGPESPERREMVRQVDRTVGYLRESIARNHLTDRLNLIITSDHGMTTVDKRAGDLVEFHKFPNFTFRDIEFELLDYGPNGMLLPKEGRLEKVYDALKDAHPKLHVYKKEAFPEAFHYANNPRVTPLLMYSDLGYVIHGRINVQFNNGEHGFDNKDMDMKTIFRAVGPSFRAGLEVEPFESVHVYELMCRLLGIVPEANDGHLATLLPMLHTESALPPDGRPTLLPKGRSALPPSSRPLLVMGLLGTVILLSEVA

SEQ ID NO: 4764 - protein, 91 aa, Homo Sapiens
MATSWGTVFFMLVVSCVCSAVSHRNQQTWFEGIFLSSMCPINVSASTLYGIMFDAGSTGTRIHVYTFVQKMPGHLWSLGKGGGVRCPPEKW

SEQ ID NO: 4765 - protein, 211 aa, Homo Sapiens
MATSWGTVFFMLVVSCVCSAVSHRNQQTWFEGIFLSSMCPINVSASTLYGIMFDAGSTGTRIHVYTFVQKMPGQLPILEGEVFDSVKPGLSAFVDQPKQGAETVQGLLEVAKDSIPRSHWKKTPVVLKATAGLRLLPEHKAKALLFEVKEIFRKSPFLVPKGSVSIMDGSDEGILAWVTVNFLTGQLHGHRQETVGTLDLGGASTQITFLP

SEQ ID NO: 4766 - protein, 428 aa, Homo Sapiens
MATSWGTVFFMLVVSCVCSAVSHRNQQTWFEGIFLSSMCPINVSASTLYGIMFDAGSTGTRIHVYTFVQKMPGQLPILEGEVFDSVKPGLSAFVDQPKQGAETVQGLLEVAKDSIPRSHWKKTPVVLKATAGLRLLPEHKAKALLFEVKEIFRKSPFLVPKGSVSIMDGSDEGILAWVTVNFLTGQLHGHRQETVGTLDLGGASTQITFLPQFEKTLEQTPRGYLTSFEMFNSTYKLYTHSYLGFGLKAARLATLGALETEGTDGHTFRSACLPRWLEAEWIFGGVKYQYGGNQEGEVGFEPCYAEVLRVVRGKLHQPEEVQRGSFYAFSYYYDRAVDTDMIDYEKGGILKVEDFERKAREVCDNLENFTSGSPFLCMDLSYITALLKDGFGFADSTVLQLTKKVNNIETGWALGATFHLLQSLGISH

SEQ ID NO: 4767 - protein, 407 aa, Homo Sapiens
MATSWGTVFFMLVVSCVCSAVSHRNQQTWFEGIFLSSMCPINVSASTLYGIMFDAGSTGTRIHVYTFVQKMPGQLPILEGEVFDSVKPGLSAFVDQPKQGAETVQGLLEVAKDSIPRSHWKKTPVVLKATAGLRLLPEHKAKALLFEVKEIFRKSPFLVPKGSVSIMDGSDEGILAWVTVNFLTGQLHGHRQETVGTLDLGGASTQITFLPQFEKTLEQTPRGYLTSFEMFNSTYKLYTHSYLGFGLKAARLATLGALETEGTDGHTFRSACLPRWLEAEWIFGGVKYQYGGNQEGEVGFEPCYAEVLRVVRGKLHQPEEVQRGSFYAFSYYYDRAVDTDMIDYEKGGILKVEDFERKAREVCDNLENFTSGSPFLCMDLSYITALLKDGFGFADSTVLQHIISWVN

SEQ ID NO: 4768 - protein, 80 aa, Homo Sapiens
  misc_feature (1)..(1): Xaa can be any naturally occurring amino acid
XYAFSYYYDRAVDTDMIDYEKGGILKVEDFERKAREVCDNLENFTSGSPFLCMDLSYITALLKDGFGFADSTVLQAAVLR

SEQ ID NO: 4769 - protein, 223 aa, Homo Sapiens
LGASGVSGLTALILLLVEATSVLLPTDIKFGIVFDAGSSHTSLFLYQWLANKENGTGVVSQALACQVEGPGISSYTSNAAQAGESLQGCLEEALVLIPEAQHRKTPTFLGATAGMRLLSSHPGPGPVSRGLLGCRAPGRAGRRCLWLDHCQLRLGDAGQVLLHWRMDPASGGDAGGCPGHGRGLHPDHVRAWGPHLGQEHPGRFSPLRLRLQRLHSQLPVLWT

SEQ ID NO: 4770 - protein, 458 aa, Homo Sapiens
MGLSRKEQVFLALLGASGVSGLTALILLLVEATSVLLPTDIKFGIVFDAGSSHTSLFLYQWLANKENGTGVVSQALACQVEGPGISSYTSNAAQAGESLQGCLEEALVLIPEAQHRKTPTFLGATAGMRLLSRKNSSQARDIFAAVTQVLGRSPVDFWGAELLAGQAEGAFGWITVNYGLGTLVKYSFTGEWIQPPEEMLVGALDMGGASTQITFVPGGPILDKSTQADFRLYGSDYSVYTHSYLCFGRDQMLSRLLVGLVQSRPAALLRHPCYLSGYQTTLALGPLYESPCVHATPPLSLPQNLTVEGTGNPGACVSAIRELFNFSSCQGQEDCAFDGVYQPPLRGQFYVEASYPGQDRWLRDYCASGLYILTLLHEGYGFSEETWPSLEFRKQAGGVDIGWTLGYMLNLTGMIPADAPAQWRAESYGVWVAKVVFMVLALVAVVGAALVQLFWLQD

SEQ ID NO: 4771 - protein, 495 aa, Homo Sapiens
MGLSRKEQVFLALLGASGVSGLTALILLLVEATSVLLPTDIKFGIVFDAGSSHTSLFLYQWLANKENGTGVVSQALACQVEGPGISSYTSNAAQAGESLQGCLEEALVLIPEAQHRKTPTFLGATAGMRLLSRKNSSQARDIFAAVTQVLGRSPVDFWGAELLAGQAEGAFGWITVNYGLGTLVKYSFTGEWIQPPEEMLVGALDMGGASTQITFVPGGPILDKSTQADFRLYGSDYSVYTHSYLCFGRDQMLSRLLVGLVQSRPAALLRHPCYLSGYQTTLALGPLYESPCVHATPPLSLPQNLTVEGTGNPGACVSAIRELFNFSSCQGQEDCAFDGVYQPPLRGQFYAFSNFYYTFHFLNLTSRQPLSTVNATIWEFCQRPWKLVEASYPGQDRWLRDYCASGLYILTLLHEGYGFSEETWPSLEFRKQAGGVDIGWTLGYMLNLTGMIPADAPAQWRAESYGVWVAKVVFMVLALVAVVGAALVQLFWLQD

SEQ ID NO: 4772 - protein, 495 aa, Homo Sapiens; identical to SEQ ID NO: 4771

SEQ ID NO: 4773 - protein, 135 aa, Homo Sapiens
MISAHCNLCLLDSSDSCALASQVAGITGVHHHAQLIFVFLIETEFHHVGQAGLELWVQEILPPCLPKCWDYRCEPPRMALNFLFLGIPKFSTFSALEFVNIFVEYHMTVIPECSNLFMIYLGKFTTVLLFAIIWL

SEQ ID NO: 4774 - protein, 124 aa, Homo Sapiens
MLMLFVFGVLLHEVSLSGQNEAPPNTHSIPGEPLYNYASIRLPEEHIPFFLHNNRHIATVCRKDSLCPYKKHLEKLKYCWGYEKSCKPEFRFGYPVCSYVDMGWTDTLESAEDIFWKQADFGYA

SEQ ID NO: 4775 - protein, 132 aa, Homo Sapiens
MLMLFVFGVLLHEVSLSGQNEAPPNTHSIPGEPLYNYASIRLPEEHIPFFLHNNRHIATVCRKDSLCPYKKHLEKLKYCWGYEKSCKPEFRFGYPVCSYVDMGWTDTLESAEDIFWKQADFGYARERLEEMH

SEQ ID NO: 4776 - protein, 206 aa, Homo Sapiens
MLMLFVFGVLLHEVSLSGQNEAPPNTHSIPGEPLYNYASIRLPEEHIPFFLHNNRHIATVCRKDSLCPYKKHLEKLKYCWGYEKSCKPEFRFGYPVCSYVDMGWTDTLESAEDIFWKQADFGYARERLEEMHVLCQPKETSDSSLVCSRYLQYCRATNLYLDLRNIKRNHDRFKEDFFQSGEIGGHCKLDIRTLTSEGQRKSPLQS

SEQ ID NO: 4777 - protein, 443 aa, Homo Sapiens
MLMLFVFGVLLHEVSLSGQNEAPPNTHSIPGEPLYNYASIRLPEEHIPFFLHNNRHIATVCRKDSLCPYKKHLEKLKYCWGYEKSCKPEFRFGYPVCSYVDMGWTDTLESAEDIFWKQADFGYARERLEEMHVLCQPKETSDSSLVCSRYLQYCRATNLYLDLRNIKRNHDRFKEDFFQSGEIGGHCKLDIRTLTSEGQRKSPLQSWFAELQSYTQLNFRPIEDAKCDIVIEKPTYFMKLDAGVNMYHHFCDFINLYITQHVNNSFSTDVYIVMWDTDGKIRVTILARSTEYRKILNQNELVNALKTVSTFEVQIVDYKYRELGFLDQLRITHNTDIFIGMHGAGLTHLLFLPDWAAVFELYNCEDERCYLDLARLRGVHYITWRRQNKVFPQDKGHHPTLGEHPKFTNYSFDVEEFMYLVLQAADHVLQHPKWPFKKKHDEL

SEQ ID NO: 4778 - protein, 527 aa, Homo Sapiens
MLMLFVFGVLLHEVSLSGQNEAPPNTHSIPGEPLYNYASIRLPEEHIPFFLHNNRHIATVCRKDSLCPYKKHLEKLKYCWGYEKSCKPEFRFGYPVCSYVDMGWTDTLESAEDIFWKQADFGYARERLEEMHVLCQPKETSDSSLVCSRYLQYCRATNLYLDLRNIKRNHDRFKEDFFQSGEIGGHCKLDIRTLTSEGQRKSPLQSWFAELQSYTQLNFRPIEDAKCDIVIEKPTYFMKLDAGVNMYHHFCDFINLYITQHVNNSFSTDVYIVMWDTSSYGYGDLFSDTWNAFTDYDVIHLKTYDSKRVCFKEAVFSLLPRMRYGLFYNTPLISGCQNTGLFRAFAQHVLHRLNITQEGPKDGKIRVTILARSTEYRKILNQNELVNALKTVSTFEVQIVDYKYRELGFLDQLRITHNTDIFIGMHGAGLTHLLFLPDWAAVFELYNCEDERCYLDLARLRGVHYITWRRQNKVFPQDKGHHPTLGEHPKFTNYSFDVEEFMYLVLQAADHVLQHPKWPFKKKHDEL

SEQ ID NO: 4779 - protein, 443 aa, Homo Sapiens; identical to SEQ ID NO: 4777

SEQ ID NO: 4780 - protein, 527 aa, Homo Sapiens; identical to SEQ ID NO: 4778

SEQ ID NO: 4781 - protein, 314 aa, Homo Sapiens
MAPPQVLAFGLLLAAATATFAAAQEECVCENYKLAVNCFVNNNRQCQCTSVGAQNTVICSKLAAKCLVMKAEMNGSKLGRRAKPEGALQNNDGLYDPDCDESGLFKAKQCNGTSMCWCVNTAGVRRTDKDTEITCSERVRTYWIIIELKHKAREKPYDSKSLRTALQKEITTRYQLDPKFITSILYENNVITIDLVQNSSQKTQNDVDIADVAYYFEKDVKGESLFHSKKMDLTVNGEQLDLDPGQTLIYYVDEKAPEFSMQGLKAGVIAVIVVVVIAVVAGIVVLVISRKKRMAKYEKAEIKEMGEMHRELNA

SEQ ID NO: 4782 - protein, 199 aa, Homo Sapiens
MAPPQVLAFGLLLAAATATFAAAQEGEARIGAELWSWAGLGGSGPRPSAPETGIIGRGPRGRAFQRGDRTVRPCSGSGPPRGRKRRGPSRGAASLRSFARLECVCENYKLAVNCFVNNNRQCQCTSVGAQNTVICSKLAAKCLVMKAEMNGSKLGRRAKPEGALQNNDGLYDPDCDESGLFKAKQCNGTSMCWCVNTAG

SEQ ID NO: 4783 - protein, 342 aa, Homo Sapiens
METKHLGRGGAGRAGPHLWRGPRPNCSAGAGGGEPTHSPNSRAVTHQRAPAARECVCENYKLAVNCFVNNNRQCQCTSVGAQNTVICSKLAAKCLVMKAEMNGSKLGRRAKPEGALQNNDGLYDPDCDESGLFKAKQCNGTSMCWCVNTAGVRRTDKDTEITCSERVRTYWIIIELKHKAREKPYDSKSLRTALQKEITTRYQLDPKFITSILYENNVITIDLVQNSSQKTQNDVDIADVAYYFEKDVKGESLFHSKKMDLTVNGEQLDLDPGQTLIYYVDEKAPEFSMQGLKAGVIAVIVVVVIAVVAGIVVLVISRKKRMAKYEKAEIKEMGEMHRELNA

SEQ ID NO: 4784 - protein, 342 aa, Homo Sapiens; identical to SEQ ID NO: 4783

SEQ ID NO: 4785 - protein, 122 aa, Homo Sapiens
MFQIDQATKQCSKMTLTQPWDPLDIPQNSTFEDQYSIGGPQEQITVQEWSDRKSARSYETWIGIYTVKDCYPVQETFTINYSVILSTRFFDIQLGIKDPSVFTPPSTCQMAQLEKMSEDCSW

SEQ ID NO: 4786 - protein, 90 aa, Homo Sapiens
MPGRAPLRTVPGALGAWLLGGLWAWTLCGLCSLGAVGAPRPCQAPQQWEGRQVMYQQSSGRNSRALLSYDGLNQRVRVLDERKALIPCKR

SEQ ID NO: 4787 - protein, 224 aa, Homo Sapiens
MPGRAPLRTVPGALGAWLLGGLWAWTLCGLCSLGAVGAPRPCQAPQQWEGRQVMYQQSSGRNSRALLSYDGLNQRVRVLDERKALIPCKRLFEYILLYKDGVMFQIDQATKQCSKMTLTQPWDPLDIPQNSTFEDQYSIGGPQEQITVQEWSDRKSARSYETWIGIYTVKDCYPVQETFTINYSVILSTRFFDIQLGIKDPSVFTPPSTCQMAQLEKMSEDCSW

SEQ ID NO: 4788 - protein, 163 aa, Homo Sapiens
MVRDWEGRCAHRGRPAGGGLSNTQRGGGRLFEYILLYKDGVMFQIDQATKQCSKMTLTQPWDPLDIPQNSTFEDQYSIGGPQEQITVQEWSDRKSARSYETWIGIYTVKDCYPVQETFTINYSVILSTRFFDIQLGIKDPSVFTPPSTCQMAQLEKMSEDCSW

SEQ ID NO: 4789 - protein, 73 aa, Homo Sapiens
MALGVPISVYLLFNADNIEGPIALKFSHLCLEDHNSYCINGACAFHHELEKAICRCLKLKSPYNVCSGERRPL

SEQ ID NO: 4790 - protein, 133 aa, Homo Sapiens
MALGVPISVYLLFNAMTALTEEAAVTVTPPITAQQADNIEGPIALKFSHLCLEDHNSYCINGACAFHHELEKAICRCFTGYTGERCEHLTLTSYAVDSYEKYIAIGIGVGLLLSGFLVIFYCYIRKRYEKDKI

SEQ ID NO: 4791 - protein, 103 aa, Homo Sapiens
MALGVPISVYLLFNAMTALTEEAAVTVTPPITAQQADNIEGPIALKFSHLCLEDHNSYCINGACAFHHELEKAICRCFTGYTGERCLKLKSPYNVCSGERRPL

SEQ ID NO: 4792 - protein, 94 aa, Homo Sapiens
MALGVPISVYLLFNAMTALTEEAAVTVTPPITAQQADNIEGPIALKFSHLCLEDHNSYCINGACAFHHELEKAICRCLKLKSPYNVCSGERRPL

SEQ ID NO: 4793 - protein, 94 aa, Homo Sapiens
MALGVPISVYLLFNAMTALTEEAAVTVTPPITAQQGNWTVNKTEADNIEGPIALKFSHLCLEDHNSYCINGACAFHHELEKAICRCFTGYTGER

SEQ ID NO: 4794 - protein, 154 aa, Homo Sapiens
MALGVPISVYLLFNAMTALTEEAAVTVTPPITAQQGNWTVNKTEADNIEGPIALKFSHLCLEDHNSYCINGACAFHHELEKAICRCFTGYTGERCEHLTLTSYAVDSYEKYIAIGIGVGLLLSGFLVIFYCYIRKRCLKLKSPYNVCSGERRPL

SEQ ID NO: 4795 - protein, 112 aa, Homo Sapiens
MALGVPISVYLLFNAMTALTEEAAVTVTPPITAQQGNWTVNKTEADNIEGPIALKFSHLCLEDHNSYCINGACAFHHELEKAICRCFTGYTGERCLKLKSPYNVCSGERRPL

SEQ ID NO: 4796 - protein, 103 aa, Homo Sapiens
MALGVPISVYLLFNAMTALTEEAAVTVTPPITAQQGNWTVNKTEADNIEGPIALKFSHLCLEDHNSYCINGACAFHHELEKAICRCLKLKSPYNVCSGERRPL

SEQ ID NO: 4797 - protein, 130 aa, Homo Sapiens
  misc_feature (1)..(1): Xaa can be any naturally occurring amino acid
XTALTEEAAVTVTPPITAQQADNIEGPIALKFSHLCLEDHNSYCINGACAFHHELEKAICRCFTGYTGERCEHLTLTSYAVDSYEKYIAIGIGVGLLLSGFLVIFYCYIRKRCLKLKSPYNVCSGERRPL

SEQ ID NO: 4798 - protein, 218 aa, Homo Sapiens
AQVTVSTGPGAPWEEDEIRRDRVEPQSVSLSWREPIPAGAPGANDTEYEIRYYEKGQSEQTYSMVKTGAPTVTVTNLKPATRYVFQIRAASPGPSWEAQSFNPSIEVQTLGEAASGSRDQSPAIVVTVVTISALLVLGSVMSVLAIWRRPCSYGKGGGDAHDEEELYFHFKVPTRRTFLDPQSCGDLLQAVHLFAKELDAKSVTLERSLGGGLETSPH

SEQ ID NO: 4799 - protein, 392 aa, Homo Sapiens
EQTYSMVKTGAPTVTVTNLKPATRYVFQIRAASPGPSWEAQSFNPSIEVQTLGEAASGSRDQSPAIVVTVVTISALLVLGSVMSVLAIWRRPCSYGKGGGDAHDEEELYFHFKVPTRRTFLDPQSCGDLLQAVHLFAKELDAKSVTLERSLGGGRFGELCCGCLQLPGRQELLVAVHMLRDSASDSQRLGFLAEALTLGQFDHSHIVRLEGVVTRGSTLMIVTEYMSHGALDGFLRRHEGQLVAGQLMGLLPGLASAMKYLSEMGYVHRGLAARHVLVSSDLVCKISGFGRGPRDRSEAVYTTMSGRSPALWAAPETLQFGHFSSASDVWSFGIIMWEVMAFGERPYWDMSGQDVIKAVEDGFRLPPPRNCPNLLHRLMLDCWQKDPGLPPH

SEQ ID NO: 4800 - protein, 295 aa, Homo Sapiens
METCAGPHPLRLFLCRMQLCLALLLGPWRPGTAEEVILLDSKASQAELGWTALPSNGWEEISGVDEHDRPIRTYQVCNVLEPNQDNWLQTGWISRGRGQRIFVELQFTLRDCSSIPGAAGTCKETFNVYYLETEADLGRGRPRLGGSRPRKIDTIAADESFTQGDLGERKMKLNTEVREIGPLSRRGFHLAFQDVGACVALVSVRVYYKQCRATVRGLATFPATAAESAFSTLVEVAGTCVAHSEGEPGSPPRMHCGADGEWLVPVGRCSCSAGFQERGDFCEGIQLAGGRGVGV

SEQ ID NO: 4801 - protein, 1008 aa, Homo Sapiens
METCAGPHPLRLFLCRMQLCLALLLGPWRPGTAEEVILLDSKASQAELGWTALPSNGWEEISGVDEHDRPIRTYQVCNVLEPNQDNWLQTGWISRGRGQRIFVELQFTLRDCSSIPGAAGTCKETFNVYYLETEADLGRGRPRLGGSRPRKIDTIAADESFTQGDLGERKMKLNTEVREIGPLSRRGFHLAFQDVGACVALVSVRVYYKQCRATVRGLATFPATAAESAFSTLVEVAGTCVAHSEGEPGSPPRMHCGADGEWLVPVGRCSCSAGFQERGDFCEACPPGFYKVSPRRPLCSPCPEHSRALENASTFCVCQDSYARSPTDPPSASCTRPPSAPRDLQYSLSRSPLVLRLRWLPPADSGGRSDVTYSLLCLRCGREGPAGACEPCGPRVAFLPRQAGLRERAATLLHLRPGARYTVRVAALNGVSGPAAAAGTTYAQVTVSTGPGAPWEEDEIRRDRVEPQSVSLSWREPIPAGAPGANDTEYEIRYYEKGQSEQTYSMVKTGAPTVTVTNLKPATRYVFQIRAASPGPSWEAQSFNPSIEVQTLGEAASGSRDQSPAIVVTVVTISALLVLGSVMSVLAIWRRPCSYGKGGGDAHDEEELYFHFKVPTRRTFLDPQSCGDLLQAVHLFAKELDAKSVTLERSLGGGRFGELCCGCLQLPGRQELLVAVHMLRDSASDSQRLGFLAEALTLGQFDHSHIVRLEGVVTRGSTLMIVTEYMSHGALDGFLRRHEGQLVAGQLMGLLPGLASAMKYLSEMGYVHRGLAARHVLVSSDLVCKISGFGRGPRDRSEAVYTTMSGRSPALWAAPETLQFGHFSSASDVWSFGIIMWEVMAFGERPYWDMSGQDVIKAVEDGFRLPPPRNCPNLLHRLMLDCWQKDPGERPRFSQIHSILSKMVQDPEPPKCALTTCPRPPTPLADRAFSTFPSFGSVGAWLEALDLCRYKDSFAAAGYGSLEAVAEMTAQDLVSLGISLAEHREALLSGISALQARVLQLQGQGVQV

SEQ ID NO: 4802 - protein, 1014 aa, Homo Sapiens
METCAGPHPLRLFLCRMQLCLALLLGPWRPGTAEEVILLDSKASQAELGWTALPSNGWEEISGVDEHDRPIRTYQVCNVLEPNQDNWLQTGWISRGRGQRIFVELQFTLRDCSSIPGAAGTCKETFNVYYLETEADLGRGRPRLGGSRPRKIDTIAADESFTQGDLGERKMKLNTEVREIGPLSRRGFHLAFQDVGACVALVSVRVYYKQCRATVRGLATFPATAAESAFSTLVEVAGTCVAHSEGEPGSPPRMHCGADGEWLVPVGRCSCSAGFQERGDFCEACPPGFYKVSPRRPLCSPCPEHSRALENASTFCVCQDSYARSPTDPPSASCTRPPSAPRDLQYSLSRSPLVLRLRWLPPADSGGRSDVTYSLLCLRCGREGPAGACEPCGPRVAFLPRQAGLRERAATLLHLRPGARYTVRVAALNGVSGPAAAAGTTYAQVTVSTGPGAPWEEDEIRRDRVEPQSVSLSWREPIPAGAPGANDTEYEIRYYEKGQSEQTYSMVKTGAPTVTVTNLKPATRYVFQIRAASPGPSWEAQSFNPSIEVQTLGEAASGSRDQSPAIVVTVVTISALLVLGSVMSVLAIWRRPCSYGKGGGDAHDEEELYFHFKVPTRRTFLDPQSCGDLLQAVHLFAKELDAKSVTLERSLGGGRFGELCCGCLQLPGRQELLVAVHMLRDSASDSQRLGFLAEALTLGQFDHSHIVRLEGVVTRGSTLMIVTEYMSHGALDGFLRRHEGQLVAGQLMGLLPGLASAMKYLSEMGYVHRGLAARHVLVSSDLVCKISGFGRGPRDRSEAVYTTMSGRSPALWAAPETLQFGHFSSASDVWSFGIIMWEVMAFGERPYWDMSGQDVIKAVEDGFRLPPPRNCPNLLHRLMLDCWQKDPGERPRFSQIHSILSKMVQDPEPPKCALTTCPRPPTPLADRAFSTFPSFGSVGAWLEALDLCRYKDSFAAAGYGSLEAVAEMTAQDLVSLGISLAEHREALLSGISALQARVLQLQGQGVQVIIKTCL

SEQ ID NO: 4803 - protein, 155 aa, Homo Sapiens
MVKTGAPTVTVTNLKPATRYVFQIRAASPGPSWEAQSFNPSIEVQTLGEAASGSRDQSPAIVVTVVTISALLVLGSVMSVLAIWRRPCSYGKGGGDAHDEEELYFHFKVPTRRTFLDPQSCGDLLQAVHLFAKELDAKSVTLERSLGGGLETSPH

SEQ ID NO: 4804 - protein, 92 aa, Homo Sapiens
  misc_feature (1)..(1): Xaa can be any naturally occurring amino acid
XHLRPGARYTVRVAALNGVSGPAAAAGTTYAQVTVSTGPGAPWEEDEIRRDRVEPQSVSLSWREPIPAGAPGANDTEYEIRYYEKDTCADFC

SEQ ID NO: 4805 - protein, 217 aa, Homo Sapiens
  misc_feature (1)..(1): Xaa can be any naturally occurring amino acid
XQIRAASPGPSWEAQSFNPSIEVQTLGEAASGSRDQSPAIVVTVVTISALLVLGSVMSVLAIWRRPCSYGKGGGDAHDEEELYFHFKVPTRRTFLDPQSCGDLLQAVHLFAKELDAKSVTLERSLGGGLCSCLEALPPHQAHPPPRKSLACLIIGKRMAEGSVTLSWSSRAVWGAVLWLLAAPRSPGAARSRAYAEGQRLRLTEARLPGRGPHAGPV

SEQ ID NO: 4806 - protein, 983 aa, Homo Sapiens
MDCQLSILLLLSCSVLDSFGELIPQPSNEVNLLDSKTIQGELGWISYPSHGWEEISGVDEHYTPIRTYQVCNVMDHSQNNWLRTNWVPRNSAQKIYVELKFTLRDCNSIPLVLGTCKETFNLYYMESDDDHGVKFREHQFTKIDTIAADESFTQMDLGDRILKLNTEIREVGPVNKKGFYLAFQDVGACVALVSVRVYFKKCPFTVKNLAMFPDTVPMDSQSLVEVRGSCVNNSKEEDPPRMYCSTEGEWLVPIGKCSCNAGYEERGFMCQACRPGFYKALDGNMKCAKCPPHSSTQEDGSMNCRCENNYFRADKDPPSMACTRPPSSPRNVISNINETSVILDWSWPLDTGGRKDVTFNIICKKCGWNIKQCEPCSPNVRFLPRQFGLTNTTVTVTDLLAHTNYTFEIDAVNGVSELSSPPRQFAAVSITTNQAAPSPVLTIKKDRTSRNSISLSWQEPEHPNGIILDYEVKYYEKQEQETSYTILRARGTNVTISSLKPDTIYVFQIRARTAAGYGTNSRKFEFETSPDSFSISGESSQVVMIAISAAVAIILLTVVIYVLIGRFCGYKSKHGADEKRLHFGNGHLKLPGLRTYVDPHTYEDPTQAVHEFAKELDATNISIDKVVGAGEFGEVCSGRLKLPSKKEISVAIKTLKVGYTEKQRRDFLGEASIMGQFDHPNIIRLEGVVTKSKPVMIVTEYMENGSLDSFLRKHDAQFTVIQLVGMLRGIASGMKYLSDMGYVHRDLAARNILINSNLVCKVSDFGLSRVLEDDPEAAYTTRGGKIPIRWTSPEAIAYRKFTSASDVWSYGIVLWEVMSYGERPYWEMSNQDVIKAVDEGYRLPPPMDCPAALYQLMLDCWQKDRNNRPKFEQIVSILDKLIRNPGSLKIITSAAARPSNLLLDQSNVDITTFRTTGDWLNGVWTAHCKEIFTGVEYSSCDTIAKISTDDMKKVGVTVVGPQKKIISSIKALETQSKNGPVPV

SEQ ID NO: 4807 - protein, 918 aa, Homo Sapiens
MDCQLSILLLLSCSVLDSFGELIPQPSNEVNLLDSKTIQGELGWISYPSHGWEEISGVDEHYTPIRTYQVCNVMDHSQNNWLRTNWVPRNSAQKIYVELKFTLRDCNSIPLVLGTCKETFNLYYMESDDDHGVKFREHQFTKIDTIAADESFTQMDLGDRILKLNTEIREVGPVNKKGFYLAFQDVGACVALVSVRVYFKKCPFTVKNLAMFPDTVPMDSQSLVEVRGSCVNNSKEEDPPRMYCSTEGEWLVPIGKCSCNAGYEERGFMCQACRPGFYKALDGNMKCAKCPPHSSTQEDGSMNCRCENNYFRADKDPPSMACTRPPSSPRNVISNINETSVILDWSWPLDTGGRKDVTFNIICKKCGWNIKQCEPCSPNVRFLPRQFGLTNTTVTVTDLLAHTNYTFEIDAVNGVSELSSPPRQFAAVSITTNQAAPSPVLTIKKDRTSRNSISLSWQEPEHPNGIILDYEVKYYEKQEQETSYTILRARGTNVTISSLKPDTIYVFQIRARTAAGYGTNSRKFEFETSPDSFSISGESSQVVMIAISAAVAIILLTVVIYVLIGRFCGYKSKHGADEKRLHFGNGHLKLPGLRTYVDPHTYEDPTQAVHEFAKELDATNISIDKVVGAGEFGEVCSGRLKLPSKKEISVAIKTLKVGYTEKQRRDFLGEASIMGQFDHPNIIRLEGVVTKSKPVMIVTEYMENGSLDSFLRKHDAQFTVIQLVGMLRGIASGMKYLSDMGYVHRDLAARNILINSNLVCKVSDFGLSRVLEDDPEAAYTTRGGKIPIRWTSPEAIAYRKFTSASDVWSYGIVLWEVMSYGERPYWEMSNQDVIKAVDEGYRLPPPMDCPAALYQLMLDCWQKDRNNRPKFEQIVSILDKLIRNPGSLKIITSAAARPSNLLLDQSNVDITTFRTTVT

SEQ ID NO: 4808 - protein, 539 aa, Homo Sapiens
MDCQLSILLLLSCSVLDSFGELIPQPSNEVNLLDSKTIQGELGWISYPSHGWEEISGVDEHYTPIRTYQVCNVMDHSQNNWLRTNWVPRNSAQKIYVELKFTLRDCNSIPLVLGTCKETFNLYYMESDDDHGVKFREHQFTKIDTIAADESFTQMDLGDRILKLNTEIREVGPVNKKGFYLAFQDVGACVALVSVRVYFKKCPFTVKNLAMFPDTVPMDSQSLVEVRGSCVNNSKEEDPPRMYCSTEGEWLVPIGKCSCNAGYEERGFMCQACRPGFYKALDGNMKCAKCPPHSSTQEDGSMNCRCENNYFRADKDPPSMACTRPPSSPRNVISNINETSVILDWSWPLDTGGRKDVTFNIICKKCGWNIKQCEPCSPNVRFLPRQFGLTNTTVTVTDLLAHTNYTFEIDAVNGVSELSSPPRQFAAVSITTNQAAPSPVLTIKKDRTSRNSISLSWQEPEHPNGIILDYEVKYYEKQEQETSYTILRARGTNVTISSLKPDTIYVFQIRARTAAGYGTNSRKFEFETSPDCMYYFNAV

SEQ ID NO: 4809 - protein, 37 aa, Homo Sapiens
AYRKFTSASDVWSYGIVMWEVMSYGERPYWDMSNQDT

SEQ ID NO: 4810 - protein, 177 aa, Homo Sapiens
MAGIFYFALFSCLFGICDAVTGSRVYPANEGPPSAPLNLISNVNETSVNLEWSSPQNTGGRQDISYNVVCKKCGAGDPSKCRPCGSGVHYTPQQNGLKTTKVSITDLLAHTNYTFEIWAVNGVSKYNPNPDQSVSVTVTTNQAAPSSIALVQAKEVTRYSVALAWLEPDRPNGVILE

SEQ ID NO: 4811 - protein, 38 aa, Homo Sapiens
MAGIFYFALFSCLFGICDAVTGSRVYPANEVGGSEYHG

SEQ ID NO: 4812 - protein, 91 aa, Homo Sapiens
MAGIFYFALFSCLFGICDAVTGSRVYPANEVTLLDSRSVQGELGWIASPLEGGWEEVSIMDEKNTPIRTYQVCNVMEPSQNNWLRTDWITR

SEQ ID NO: 4813 - protein, 149 aa, Homo Sapiens
MAGIFYFALFSCLFGICDAVTGSRVYPANEVTLLDSRSVQGELGWIASPLEGGWEEVSIMDEKNTPIRTYQVCNVMEPSQNNWLRTDWITREGAQRVYIEIKFTLRDCNSLPGVMGTCKETFNLYYYESDNDKERFIRENQFVKIDTIA

SEQ ID NO: 4814 - protein, 986 aa, Homo Sapiens
MAGIFYFALFSCLFGICDAVTGSRVYPANEVTLLDSRSVQGELGWIASPLEGGWEEVSIMDEKNTPIRTYQVCNVMEPSQNNWLRTDWITREGAQRVYIEIKFTLRDCNSLPGVMGTCKETFNLYYYESDNDKERFIRENQFVKIDTIAADESFTQVDIGDRIMKLNTEIRDVGPLSKKGFYLAFQDVGACIALVSVRVFYKKCPLTVRNLAQFPDTITGADTSSLVEVRGSCVNNSEEKDVPKMYCGADGEWLVPIGNCLCNAGHEERSGECQACKIGYYKALSTDATCAKCPPHSYSVWEGATSCTCDRGFFRADNDAASMPCTRPPSAPLNLISNVNETSVNLEWSSPQNTGGRQDISYNVVCKKCGAGDPSKCRPCGSGVHYTPQQNGLKTTKVSITDLLAHTNYTFEIWAVNGVSKYNPNPDQSVSVTVTTNQAAPSSIALVQAKEVTRYSVALAWLEPDRPNGVILEYEVKYYEKDQNERSYRIVRTAARNTDIKGLNPLTSYVFHVRARTAAGYGDFSEPLEVTTNTVPSRIIGDGANSTVLLVSVSGSVVLVVILIAAFVISRRRSKYSKAKQEADEEKHLNQGVRTYVDPFTYEDPNQAVREFAKEIDASCIKIEKVIGVGEFGEVCSGRLKVPGKREICVAIKTLKAGYTDKQRRDFLSEASIMGQFDHPNIIHLEGVVTKCKPVMIITEYMENGSLDAFLRKNDGRFTVIQLVGMLRGIGSGMKYLSDMSYVHRDLAARNILVNSNLVCKVSDFGMSRVLEDDPEAAYTTRGGKIPIRWTAPEAIAYRKFTSASDVWSYGIVMWEVMSYGERPYWDMSNQDVIKAIEEGYRLPPPMDCPIALHQLMLDCWQKERSDRPKFGQIVNMLDKLIRNPNSLKRTGTESSRPNTALLDPSSPEFSAVVSVGDWLQAIKMDRYKDNFTAAGYTTLEAVVHVNQEDLARIGITAITHQNKILSSVQAMRTQMQQMHGRMVPV

SEQ ID NO: 4815 - protein, 986 aa, Homo Sapiens; identical to SEQ ID NO: 4814

SEQ ID NO: 4816 - protein, 949 aa, Homo Sapiens
MAGIFYFALFSCLFGICDAVTGSRVYPANEVTLLDSRSVQGELGWIASPLEGGWEEVSIMDEKNTPIRTYQVCNVMEPSQNNWLRTDWITREGAQRVYIEIKFTLRDCNSLPGVMGTCKETFNLYYYESDNDKERFIRENQFVKIDTIAADESFTQVDIGDRIMKLNTEIRDVGPLSKKGFYLAFQDVGACIALVSVRVFYKKCPLTVRNLAQFPDTITGADTSSLVEVRGSCVNNSEEKDVPKMYCGADGEWLVPIGNCLCNAGHEERSGECQACKIGYYKALSTDATCAKCPPHSYSVWEGATSCTCDRGFFRADNDAASMPCTRPPSAPLNLISNVNETSVNLEWSSPQNTGGRQDISYNVVCKKCGAGDPSKCRPCGSGVHYTPQQNGLKTTKVSITDLLAHTNYTFEIWAVNGVSKYNPNPDQSVSVTVTTNQAAPSSIALVQAKEVTRYSVALAWLEPDRPNGVILEYEVKYYEKDQNERSYRIVRTAARNTDIKGLNPLTSYVFHVRARTAAGYGDFSEPLEVTTNTVPSRIIGDGANSTVLLVSVSGSVVLVVILIAAFVISRRRSKYSKAKQEADEEKHLNQGVRTYVDPFTYEDPNQAVREFAKEIDASCIKIEKVIGVGEFGEVCSGRLKVPGKREICVAIKTLKAGYTDKQRRDFLSEASIMGQFDHPNIIHLEGVVTKCKPVMIITEYMENGSLDAFLRKNDGRFTVIQLVGMLRGIGSGMKYLSDMSYVHRDLAARNILVNSNLVCKVSDFGMSRVLEDDPEAAYTTRGGKIPIRWTAPEAIAYRKFTSASDVWSYGIVMWEVMSYGERPYWDMSNQDVIKAIEEGYRLPPPMDCPIALHQLMLDCWQKERSDRPKFGQIVNMLDKLIRNPNSLKRTGTESSRPNTALLDPSSPEFSAVVSVGDWLQAIKMDRYKDNFTAAGYTTLEAVVHVNQE

SEQ ID NO: 4817 - protein, 126 aa, Homo Sapiens
MDEKNTPIRTYQVCNVMEPSQNNWLRTDWITREGAQRVYIEIKFTLRDCNSLPGVMGTCKETFNLYYYESDNDKERFIRENQFVKIDTIAADESFTQVDIGDRIMKLNTEIRDVGPLSKKGFYLAF

SEQ ID NO: 4818 - protein, 189 aa, Homo Sapiens
  misc_feature (1)..(1): Xaa can be any naturally occurring amino acid
XFHGSLSSTHFTCKIGYYKALSTDATCAKCPPHSYSVWEGATSCTCDRGFFRADNDAASMPCTRPPSAPLNLISNVNETSVNLEWSSPQNTGGRQDISYNVVCKKCGAGDPSKCRPCGSGVHYTPQQNGLKTTKVSITDLLAHTNYTFEIWAVNGVSKYNPNPDQSVSVTVTTNQAAPSSIALVQAKEV

SEQ ID NO: 4819 - protein, 279 aa, Homo Sapiens
MVFQTRYPSWIILCYIWLLRFAHTGEAQAAKEVLLLDSKAQQTELEWISSPPNGWEEISGLDENYTPIRTYQVCQVMEPNQNNWLRTNWISKGNAQRIFVELKFTLRDCNSLPGVLGTCKETFNLYYYETDYDTGRNIRENLYVKIDTIAADESFTQGDLGERKMKLNTEVREIGPLSKKGFYLAFQDVGACIALVSVKVYYKKCWSIIENLAIFPDTVTGSEFSSLVEVRGTCVSSAEEEAENAPRMHCSAEGEWLVPIGKCICKAGYQQKGDTCERK

SEQ ID NO: 4820 - protein, 998 aa, Homo Sapiens
MVFQTRYPSWIILCYIWLLRFAHTGEAQAAKEVLLLDSKAQQTELEWISSPPNGWEEISGLDENYTPIRTYQVCQVMEPNQNNWLRTNWISKGNAQRIFVELKFTLRDCNSLPGVLGTCKETFNLYYYETDYDTGRNIRENLYVKIDTIAADESFTQGDLGERKMKLNTEVREIGPLSKKGFYLAFQDVGACIALVSVKVYYKKCWSIIENLAIFPDTVTGSEFSSLVEVRGTCVSSAEEEAENAPRMHCSAEGEWLVPIGKCICKAGYQQKGDTCEPCGRGFYKSSSQDLQCSRCPTHSFSDKEGSSRCECEDGYYRAPSDPPYVACTRPPSAPQNLIFNINQTTVSLEWSPPADNGGRNDVTYRILCKRCSWEQGECVPCGSNIGYMPQQTGLEDNYVTVMDLLAHANYTFEVEAVNGVSDLSRSQRLFAAVSITTGQAAPSQVSGVMKERVLQRSVELSWQEPEHPNGVITEYEIKYYEKDQRERTYSTVKTKSTSASINNLKPGTVYVFQIRAFTAAGYGNYSPRLDVATLEEATGKMFEATAVSSEQNPVIIIAVVAVAGTIILVFMVFGFIIGRRHCGYSKADQEGDEELYFHFKFPGTKTYIDPETYEDPNRAVHQFAKELDASCIKIERVIGAGEFGEVCSGRLKLPGKRDVAVAIKTLKVGYTEKQRRDFLCEASIMGQFDHPNVVHLEGVVTRGKPVMIVIEFMENGALDAFLRKHDGQFTVIQLVGMLRGIAAGMRYLADMGYVHRDLAARNILVNSNLVCKVSDFGLSRVIEDDPEAVYTTTGGKIPVRWTAPEAIQYRKFTSASDVWSYGIVMWEVMSYGERPYWDMSNQDVIKAIEEGYRLPAPMDCPAGLHQLMLDCWQKERAERPKFEQIVGILDKMIRNPNSLKTPLGTCSRPISPLLDQNTPDFTTFCSVGEWLQAIKMERYKDNFTAAGYNSLESVARMTIEDVMSLGITLVGHQKKIMSSIQTMRAQMLHLHGTGIQV

SEQ ID NO: 4821 - protein, 1005 aa, Homo Sapiens
MAPARGRLPPALWVVTAAAAAATCVSAARGEVNLLDTSTIHGDWGWLTYPAHGWDSINEVDESFQPIHTYQVCNVMSPNQNNWLRTSWVPRDGARRVYAEIKFTLRDCNSMPGVLGTCKETFNLYYLESDRDLGASTQESQFLKIDTIAADESFTGADLGVRRLKLNTEVRSVGPLSKRGFYLAFQDIGACLAILSLRIYYKKCPAMVRNLAAFSEAVTGADSSSLVEVRGQCVRHSEERDTPKMYCSAEGEWLVPIGKCVCSAGYEERRDACVACELGFYKSAPGDQLCARCPPHSHSAAPAAQACHCDLSYYRAALDPPSSACTRPPSAPVNLISSVNGTSVTLEWAPPLDPGGRSDITYNAVCRRCPWALSRCEACGSGTRFVPQQTSLVQASLLVANLLAHMNYSFWIEAVNGVSDLSPEPRRAAVVNITTNQAAPSQVVVIRQERAGQTSVSLLWQEPEQPNGIILEYEIKYYEKDKEMQSYSTLKAVTTRATVSGLKPGTRYVFQVRARTSAGCGRFSQAMEVETGKPRPRYDTRTIVWICLTLITGLVVLLLLLICKKRHCGYSKAFQDSDEEKMHYQNGQAPPPVFLPLHHPPGKLPEPQFYAEPHTYEEPGRAGRSFTREIEASRIHIEKIIGSGDSGEVCYGRLRVPGQRDVPVAIKALKAGYTERQRRDFLSEASIMGQFDHPNIIRLEGVVTRGRLAMIVTEYMENGSLDTFLRTHDGQFTIMQLVGMLRGVGAGMRYLSDLGYVHRDLAARNVLVDSNLVCKVSDFGLSRVLEDDPDAAYTTTGGKIPIRWTAPEAIAFRTFSSASDVWSFGVVMWEVLAYGERPYWNMTNRDVISSVEEGYRLPAPMGCPHALHQLMLDCWHKDRAQRPRFSQIVSVLDALIRSPESLRATATVSRCPPPAFVRSCFDLRGGSGGGGGLTVGDWLDSIRMGRYRDHFAAGGYSSLGMVLRMNAQDVRALGITLMGHQKKILGSIQTMRAQLTSTQGPRRHL

SEQ ID NO: 4822 - protein, 495 aa, Homo Sapiens
MAPARGRLPPALWVVTAAAAAATCVSAARGEVNLLDTSTIHGDWGWLTYPAHGWDSINEVDESFQPIHTYQVCNVMSPNQNNWLRTSWVPRDGARRVYAEIKFTLRDCNSMPGVLGTCKETFNLYYLESDRDLGASTQESQFLKIDTIAADESFTGADLGVRRLKLNTEVRSVGPLSKRGFYLAFQDIGACLAILSLRIYYKKCPAMVRNLAAFSEAVTGADSSSLVEVRGQCVRHSEERDTPKMYCSAEGEWLVPIGKCVCSAGYEERRDACVACELGFYKSAPGDQLCARCPPHSHSAAPAAQACHCDLSYYRAALDPPSSACTRPPSAPVNLISSVNGTSVTLEWAPPLDPGGRSDITYNAVCRRCPWALSRCEACGSGTRFVPQQTSLVQASLLVANLLAHMNYSFWIEAVNGVSDLSPEPRRAAVVNITTNQAGRRRNSVPQRPGPPASPASDPSRDQSSAGDVLWAFRQVPLWPCAPHQDPELEALHCL

SEQ ID NO: 4823 - protein, 986 aa, Homo Sapiens
MALRRLGAALLLLPLLAAVEETLMDSTTATAELGWMVHPPSGWEEVSGYDENMNTIRTYQVCNVFESSQNNWLRTKFIRRRGAHRIHVEMKFSVRDCSSIPSVPGSCKETFNLYYYEADFDSATKTFPNWMENPWVKVDTIAADESFSQVDLGGRVMKINTEVRSFGPVSRSGFYLAFQDYGGCMSLIAVRVFYRKCPRIIQNGAIFQETLSGAESTSLVAARGSCIANAEEVDVPIKLYCNGDGEWLVPIGRCMCKAGFEAVENGTVCRGCPSGTFKANQGDEACTHCPINSRTTSEGATNCVCRNGYYRADLDPLDMPCTTIPSAPQAVISSVNETSLMLEWTPPRDSGGREDLVYNIICKSCGSGRGACTRCGDNVQYAPRQLGLTEPRIYISDLLAHTQYTFEIQAVNGVTDQSPFSPQFASVNITTNQAAPSAVSIMHQVSRTVDSITLSWSQPDQPNGVILDYELQYYEKELSEYNATAIKSPTNTVTVQGLKAGAIYVFQVRARTVAGYGRYSGKMYFQTMTEAEYQTSIQEKLPLIIGSSAAGLVFLIAVVVIAIVCNRRGFERADSEYTDKLQHYTSGHMTPGMKIYIDPFTYEDPNEAVREFAKEIDISCVKIEQVIGAGEFGEVCSGHLKLPGKREIFVAIKTLKSGYTEKQRRDFLSEASIMGQFDHPNVIHLEGVVTKSTPVMIITEFMENGSLDSFLRQNDGQFTVIQLVGMLRGIAAGMKYLADMNYVHRDLAARNILVNSNLVCKVSDFGLSRFLEDDTSDPTYTSALGGKIPIRWTAPEAIQYRKFTSASDVWSYGIVMWEVMSYGERPYWDMTNQDVINAIEQDYRLPPPMDCPSALHQLMLDCWQKDRNHRPKFGQIVNTLDKMIRNPNSLKAMAPLSSGINLPLLDRTIPDYTSFNTVDEWLEAIKMGQYKESFANAGFTSFDVVSQMMMEDILRVGVTLAGHQKKILNSIQVMRAQMNQIQSVEV

SEQ ID NO: 4824 - protein, 1055 aa, Homo Sapiens
MALRRLGAALLLLPLLAAVEETLMDSTTATAELGWMVHPPSGWEEVSGYDENMNTIRTYQVCNVFESSQNNWLRTKFIRRRGAHRIHVEMKFSVRDCSSIPSVPGSCKETFNLYYYEADFDSATKTFPNWMENPWVKVDTIAADESFSQVDLGGRVMKINTEVRSFGPVSRSGFYLAFQDYGGCMSLIAVRVFYRKCPRIIQNGAIFQETLSGAESTSLVAARGSCIANAEEVDVPIKLYCNGDGEWLVPIGRCMCKAGFEAVENGTVCRGCPSGTFKANQGDEACTHCPINSRTTSEGATNCVCRNGYYRADLDPLDMPCTTIPSAPQAVISSVNETSLMLEWTPPRDSGGREDLVYNIICKSCGSGRGACTRCGDNVQYAPRQLGLTEPRIYISDLLAHTQYTFEIQAVNGVTDQSPFSPQFASVNITTNQAAPSAVSIMHQVSRTVDSITLSWSQPDQPNGVILDYELQYYEKELSEYNATAIKSPTNTVTVQGLKAGAIYVFQVRARTVAGYGRYSGKMYFQTMTEAEYQTSIQEKLPLIIGSSAAGLVFLIAVVVIAIVCNRRGFERADSEYTDKLQHYTSGHMTPGMKIYIDPFTYEDPNEAVREFAKEIDISCVKIEQVIGAGEFGEVCSGHLKLPGKREIFVAIKTLKSGYTEKQRRDFLSEASIMGQFDHPNVIHLEGVVTKSTPVMIITEFMENGSLDSFLRQNDGQFTVIQLVGMLRGIAAGMKYLADMNYVHRDLAARNILVNSNLVCKVSDFGLSRFLEDDTSDPTYTSALGGKIPIRWTAPEAIQYRKFTSASDVWSYGIVMWEVMSYGERPYWDMTNQDVINAIEQDYRLPPPMDCPSALHQLMLDCWQKDRNHRPKFGQIVNTLDKMIRNPNSLKAMAPLSSGINLPLLDRTIPDYTSFNTVDEWLEAIKMGQYKESFANAGFTSFDVVSQMMMEDILRVGVTLAGHQKKILNSIQVMRAQMNQIQSVEGQPLARRPRATGRTKRCQPRDVTKKTCNSNDGKKKGMGKKKTDPGRGREIQGIFFKEDSHKESNDCSCGG

SEQ ID NO: 4825 - protein, 987 aa, Homo Sapiens
MALRRLGAALLLLPLLAAVEETLMDSTTATAELGWMVHPPSGWEEVSGYDENMNTIRTYQVCNVFESSQNNWLRTKFIRRRGAHRIHVEMKFSVRDCSSIPSVPGSCKETFNLYYYEADFDSATKTFPNWMENPWVKVDTIAADESFSQVDLGGRVMKINTEVRSFGPVSRSGFYLAFQDYGGCMSLIAVRVFYRKCPRIIQNGAIFQETLSGAESTSLVAARGSCIANAEEVDVPIKLYCNGDGEWLVPIGRCMCKAGFEAVENGTVCRGCPSGTFKANQGDEACTHCPINSRTTSEGATNCVCRNGYYRADLDPLDMPCTTIPSAPQAVISSVNETSLMLEWTPPRDSGGREDLVYNIICKSCGSGRGACTRCGDNVQYAPRQLGLTEPRIYISDLLAHTQYTFEIQAVNGVTDQSPFSPQFASVNITTNQAAPSAVSIMHQVSRTVDSITLSWSQPDQPNGVILDYELQYYEKELSEYNATAIKSPTNTVTVQGLKAGAIYVFQVRARTVAGYGRYSGKMYFQTMTEAEYQTSIQEKLPLIIGSSAAGLVFLIAVVVIAIVCNRRRGFERADSEYTDKLQHYTSGHMTPGMKIYIDPFTYEDPNEAVREFAKEIDISCVKIEQVIGAGEFGEVCSGHLKLPGKREIFVAIKTLKSGYTEKQRRDFLSEASIMGQFDHPNVIHLEGVVTKSTPVMIITEFMENGSLDSFLRQNDGQFTVIQLVGMLRGIAAGMKYLADMNYVHRDLAARNILVNSNLVCKVSDFGLSRFLEDDTSDPTYTSALGGKIPIRWTAPEAIQYRKFTSASDVWSYGIVMWEVMSYGERPYWDMTNQDVINAIEQDYRLPPPMDCPSALHQLMLDCWQKDRNHRPKFGQIVNTLDKMIRNPNSLKAMAPLSSGINLPLLDRTIPDYTSFNTVDEWLEAIKMGQYKESFANAGFTSFDVVSQMMMEDILRVGVTLAGHQKKILNSIQVMRAQMNQIQSVEV

SEQ ID NO: 4826 - protein, 482 aa, Homo Sapiens
MALRRLGAALLLLPLLAAVEETLMDSTTATAELGWMVHPPSGWEEVSGYDENMNTIRTYQVCNVFESSQNNWLRTKFIRRRGAHRIHVEMKFSVRDCSSIPSVPGSCKETFNLYYYEADFDSATKTFPNWMENPWVKVDTIAADESFSQVDLGGRVMKINTEVRSFGPVSRSGFYLAFQDYGGCMSLIAVRVFYRKCPRIIQNGAIFQETLSGAESTSLVAARGSCIANAEEVDVPIKLYCNGDGEWLVPIGRCMCKAGFEAVENGTVCRGCPSGTFKANQGDEACTHCPINSRTTSEGATNCVCRNGYYRADLDPLDMPCTTIPSAPQAVISSVNETSLMLEWTPPRDSGGREDLVYNIICKSCGSGRGACTRCGDNVQYAPRQLGLTEPRIYISDLLAHTQYTFEIQAVNGVTDQSPFSPQFASVNITTNQAAPSAVSIMHQVSRTVDSITLSWSQPDQPNGVILDYELQYYEKMKTQRS

SEQ ID NO: 4827 - protein, 946 aa, Homo Sapiens
MWVPVLALPVCTYAETLMDSTTATAELGWMVHPPSGWEEVSGYDENMNTIRTYQVCNVFESSQNNWLRTKFIRRRGAHRIHVEMKFSVRDCSSIPSVPGSCKETFNLYYYEADFDSATKTFPNWMENPWVKVDTIAADESFSQVDLGGRVMKINTEVRSFGPVSRSGFYLAFQDYGGCMSLIAVRVFYRKCPRIIQNGAIFQETLSGAESTSLVAARGSCIANAEEVDVPIKLYCNGDGEWLVPIGRCMCKAGFEAVENGTVCRGCPSGTFKANQGDEACTHCPINSRTTSEGATNCVCRNGYYRADLDPLDMPCTTIPSAPQAVISSVNETSLMLEWTPPRDSGGREDLVYNIICKSCGSGRGACTRCGDNVQYAPRQLGLTEPRIYISDLLAHTQYTFEIQAVNGVTDQSPFSPQFASVNITTNQAAPSAVSIMHQVSRTVDSITLSWSQPDQPNGVILDYELQYYEKQELSEYNATAIKSPTNTVTVQGLKAGAIYVFQVRARTVAGYGRYSGKMYFQTMTEAEYQTSIQEKLPLIIGSSAAGLVFLIAVVVIAIVCNRRGFERADSEYTDKLQHYTSGHMTPGMKIYIDPFTYEDPNEAVREFAKEIDISCVKIEQVIGAGEFGEVCSGHLKLPGKREIFVAIKTLKSGYTEKQRRDFLSEASIMGQFDHPNVIHLEGVVTKSTPVMIITEFMENGSLDSFLRQNDGQFTVIQLVGMLRGIAAGMKYLADMNYVHRDLAARNILVNSNLVCKVSDFGLSRFLEDDTSDPTYTSALGGKIPIRWTAPEAIQYRKFTSASDVWSYGIVMWEVMSYGERPYWDMTNQDVINAIEQDYRLPPPMDCPSALHQLMLDCWQKDRNHRPKFGQIVNTLDKMIRNPNSLKAMAPLSSGINLPLLDRTIPDYTSFNTVDEWLEAIKMGQYKESFANAGFTSFDVVSQMMME

SEQ ID NO: 4828 - protein, 935 aa, Homo Sapiens
MELRVLLCWASLAAALEETLLNTKLETADLKWVTFPQVDGQWEELSGLDEEQHSVRTYEVCDVQRAPGQAHWLRTGWVPRRGAVHVYATLRFTMLECLSLPRAGRSCKETFTVFYYESDADTATALTPAWMENPYIKVDTVAAEHLTRKRPGAEATGKVNVKTLRLGPLSKAGFYLAFQDQGACMALLSLHLFYKKCAQLTVNLTRFPETVPRELVVPVAGSCVVDAVPAPGPSPSLYCREDGQWAEQPVTGCSCAPGFEAAEGNTKCRACAQGTFKPLSGEGSCQPCPANSHSNTIGSAVCQCRVGYFRARTDPRGAPCTTPPSAPRSVVSRLNGSSLHLEWSAPLESGGREDLTYALRCRECRPGGSCAPCGGDLTFDPGPRDLVEPWVVVRGLRPDFTYTFEVTALNGVSSLATGPVPFEPVNVTTDREVPPAVSDIRVTRSSPSSLSLAWAVPRAPSGAVLDYEVKYHEKGAEGPSSVRFLKTSENRAELRGLKRGASYLVQVRARSEAGYGPFGQEHHSQTQLDESEGWREQLALIAGTAVVGVVLVLVVIVVAVLCLRKQSNGREAEYSDKHGQYLIGHGTKVYIDPFTYEDPNEAVREFAKEIDVSYVKIEEVIGAGEFGEVCRGRLKAPGKKESCVAIKTLKGGYTERQRREFLSEASIMGQFEHPNIIRLEGVVTNSMPVMILTEFMENGALDSFLRLNDGQFTVIQLVGMLRGIASGMRYLAEMSYVHRDLAARNILVNSNLVCKVSDFGLSRFLEENSSDPTYTSSLGGKIPIRWTAPEAIAFRKFTSASDAWSYGIVMWEVMSFGERPYWDMSNQDVINAIEQDYRLPPPPDCPTSLHQLMLDCWQKDRNARPRFPQVVSALDKMIRNPASLKIVARENGGDLLRIGVTLAGHQKKILASVQHMKSQAKPGTPGGTGGPAPQY

SEQ ID NO: 4829 - protein, 987 aa, Homo Sapiens
MELRVLLCWASLAAALEETLLNTKLETADLKWVTFPQVDGQWEELSGLDEEQHSVRTYEVCDVQRAPGQAHWLRTGWVPRRGAVHVYATLRFTMLECLSLPRAGRSCKETFTVFYYESDADTATALTPAWMENPYIKVDTVAAEHLTRKRPGAEATGKVNVKTLRLGPLSKAGFYLAFQDQGACMALLSLHLFYKKCAQLTVNLTRFPETVPRELVVPVAGSCVVDAVPAPGPSPSLYCREDGQWAEQPVTGCSCAPGFEAAEGNTKCRACAQGTFKPLSGEGSCQPCPANSHSNTIGSAVCQCRVGYFRARTDPRGAPCTTPPSAPRSVVSRLNGSSLHLEWSAPLESGGREDLTYALRCRECRPGGSCAPCGGDLTFDPGPRDLVEPWVVVRGLRPDFTYTFEVTALNGVSSLATGPVPFEPVNVTTDREVPPAVSDIRVTRSSPSSLSLAWAVPRAPSGAVLDYEVKYHEKGAEGPSSVRFLKTSENRAELRGLKRGASYLVQVRARSEAGYGPFGQEHHSQTQLDESEGWREQLALIAGTAVVGVVLVLVVIVVAVLCLRKQSNGREAEYSDKHGQYLIGHGTKVYIDPFTYEDPNEAVREFAKEIDVSYVKIEEVIGAGEFGEVCRGRLKAPGKKESCVAIKTLKGGYTERQRREFLSEASIMGQFEHPNIIRLEGVVTNSMPVMILTEFMENGALDSFLRLNDGQFTVIQLVGMLRGIASGMRYLAEMSYVHRDLAARNILVNSNLVCKVSDFGLSRFLEENSSDPTYTSSLGGKIPIRWTAPEAIAFRKFTSASDAWSYGIVMWEVMSFGERPYWDMSNQDVINAIEQDYRLPPPPDCPTSLHQLMLDCWQKDRNARPRFPQVVSALDKMIRNPASLKIVARENGGASHPLLDQRQPHYSAFGSVGEWLRAIKMGRYEESFAAAGFGSFELVSQISAEDLLRIGVTLAGHQKKILASVQHMKSQAKPGTPGGTGGPAPQY

SEQ ID NO: 4830 - protein, 306 aa, Homo Sapiens
MELRVLLCWASLAAALEETLLNTKLETADLKWVTFPQVDGQWEELSGLDEEQHSVRTYEVCDVQRAPGQAHWLRTGWVPRRGAVHVYATLRFTMLECLSLPRAGRSCKETFTVFYYESDADTATALTPAWMENPYIKVDTVAAEHLTRKRPGAEATGKVNVKTLRLGPLSKAGFYLAFQDQGACMALLSLHLFYKKCAQLTVNLTRFPETVPRELVVPVAGSCVVDAVPAPGPSPSLYCREDGQWAEQPVTGCSCAPGFEAAEGNTKCRGRRGSQQRAVPEDVRKPGRAAGAEAGSQLPGAGTGAL

SEQ ID NO: 4831 - protein, 126 aa, Homo Sapiens
MPELVVTALLAPSRLSLKLLRAFMWSLVFSVALVAAAVYGCIALTHVLCRPRRGCCGRRRSASPACLSDPSLGEHGFLNLKSSGLRLHYVSAGRGNGPLMLFLHGFPENWFSWRYQLREFQSRFHV

SEQ ID NO: 4832 - protein, 360 aa, Homo Sapiens
MPELVVTALLAPSRLSLKLLRAFMWSLVFSVALVAAAVYGCIALTHVLCRPRRGCCGRRRSASPACLSDPSLGEHGFLNLKSSGLRLHYVSAGRGNGPLMLFLHGFPENWFSWRYQLREFQSRFHVVAVDLRGYGPSDAPRDVDCYTIDLLLVDIKDVILGLGYSKCILVAHDWGALLAWHFSIYYPSLVERMVVVSGAPMSVYQDYSLHHISQFFRSHYMFLFQLPWLPEKLLSMSDFQILKTTLTHRKTGIPCLTPSELEAFLYNFSQPGGLTGPLNYYRNLFRNFPLEPQELTTPTLLLWGEKDTYLELGLVEAIGSRFVPGRLEAHILPGIGHWIPQSNPQEMHQYMWAFLQDLLD

SEQ ID NO: 4833 - protein, 360 aa, Homo Sapiens; identical to SEQ ID NO: 4832

SEQ ID NO: 4834 - protein, 360 aa, Homo Sapiens; identical to SEQ ID NO: 4832

SEQ ID NO: 4835 - protein, 193 aa, Homo Sapiens
MGVHECPAWLWLLLSLLSLPLGLPVLGAPPRLICDSRVLERYLLEAKEAENITTGCAEHCSLNENITVPDTKVNFYAWKRMEVGQQAVEVWQGLALLSEAVLRGQALLVNSSQPWEPLQLHVDKAVSGLRSLTTLLRALGAQKEAISPPDAASAAPLRTITADTFRKLFRVYSNFLRGKLKLYTGEACRTGDR

SEQ ID NO: 4836 - protein, 133 aa, Homo Sapiens
MGSSGLLSLLVLFVLLANVQGPGLTDWLFPRRCPKIREECEFQERDVCTKDRQCQDNKKCCVFSCGKKCLDLKQDVCEMPKETGPCLAYFLHWWYDKKDNTCSMFVYGGCQGNNNNFQSKANCLNTCKNKRFP

SEQ ID NO: 4837 - protein, 77 aa, Homo Sapiens
MGSSGLLSLLVLFVLLANVQGPGLTDWLFPRRCPKIREECEFQERDVCTKDRQCQDNKKCCVFSCGKKCLDLKQGKQ

SEQ ID NO: 4838 - protein, 117 aa, Homo Sapiens
MLSKAHGCKTALSLGRCPKIREECEFQERDVCTKDRQCQDNKKCCVFSCGKKCLDLKQDVCEMPKETGPCLAYFLHWWYDKKDNTCSMFVYGGCQGNNNNFQSKANCLNTCKNKRFP

SEQ ID NO: 4839 - protein, 179 aa, Homo Sapiens
MGSSGLLSLLVLFVLLANVQGPGLTDWLFPRRCPKIREECEFQERDVCTKDRQCQDNKKCCVFSCGKKCLDLKQDVCEMPKETGPCLAYFLHWWYDKKDNTCSMFVYGGCQGNNNNFQSKANCLNTCKNKQPCPKIKVECEVEEIDQCTKPRDCPENMKCCPFSRGKKCLDFRKASLST

SEQ ID NO: 4840 - protein, 762 aa, Homo Sapiens
MAAAAQLSLTQLSSGNPVYEKYYRQVDTGNTGRVLASDAAAFLKKSGLPDLILGKIWDLADTDGKGILNKQEFFVALRLVACAQNGLEVSLSSLNLAVPPPRFHDTSSPLLISGTSAAELPWAVKPEDKAKYDAIFDSLSPVNGFLSGDKVKPVLLNSKLPVDILGRVWELSDIDHDGMLDRDEFAVAMFLVYCALEKEPVPMSLPPALVPPSKRKTWVVSPAEKAKYDEIFLKTDKDMDGFVSGLEVREIFLKTGLPSTLLAHIWSLCDTKDCGKLSKDQFALAFHLISQKLIKGIDPPHVLTPEMIPPSDRASLQKNIIGSSPVADFSAIKELDTLNNEIVDLQREKNNVEQDLKEKEDTIKQRTSEVQDLQDEVQRENTNLQKLQAQKQQVQELLDELDEQKAQLEEQLKEVRKKCAEEAQLARSSPELLPSGVTDENEVTTAVTEKVCSELDNNRHSKEEDPFNVDSSSLTGPVADTNLDFFQSDPFVGSDPFKDDPFGKIDPFGGDPFKGSDPFASDCFFRQSTDPFATSSTDPFSAANNSSITSVETLKHNDPFAPGGTVVAASDSATDPFASVFGNESFGGGFADFSTLSKVNNEDPFRSATSSSVSNVVITKNVFEETSVKSEDEPPALPPKIGTPTRPCPLPPGKRSINKLDSPDPFKLNDPFQPFPGNDSPKEKDPEIFCDPFTSATTTTNKEADPSNFANFSAYPSEEDMIEWAKRESEREEEQRLARLNQQEQEDLELAIALSKSEISEA

SEQ ID NO: 4841 - protein, 896 aa, Homo Sapiens
MAAAAQLSLTQLSSGNPVYEKYYRQVDTGNTGRVLASDAAAFLKKSGLPDLILGKIWDLADTDGKGILNKQEFFVALRLVACAQNGLEVSLSSLNLAVPPPRFHDTSSPLLISGTSAAELPWAVKPEDKAKYDAIFDSLSPVNGFLSGDKVKPVLLNSKLPVDILGRVWELSDIDHDGMLDRDEFAVAMFLVYCALEKEPVPMSLPPALVPPSKRKTWVVSPAEKAKYDEIFLKTDKDMDGFVSGLEVREIFLKTGLPSTLLAHIWSLCDTKDCGKLSKDQFALAFHLISQKLIKGIDPPHVLTPEMIPPSDRASLQKNIIGSSPVADFSAIKELDTLNNEIVDLQREKNNVEQDLKEKEDTIKQRTSEVQDLQDEVQRENTNLQKLQAQKQQVQELLDELDEQKAQLEEQLKEVRKKCAEEAQLISSLKAELTSQESQISTYEEELAKAREELSRLQQETAELEESVESGKAQLEPLQQHLQDSQQEISSMQMKLMEMKDLENHNSQLNWCSSPHSILVNGATDYCSLSTSSSETANLNEHVEGQSNLESEPIHQESPARSSPELLPSGVTDENEVTTAVTEKVCSELDNNRHSKEEDPFNVDSSSLTGPVADTNLDFFQSDPFVGSDPFKDDPFGKIDPFGGDPFKGSDPFASDCFFRQSTDPFATSSTDPFSAANNSSITSVETLKHNDPFAPGGTVVAASDSATDPFASVFGNESFGGGFADFSTLSKVNNEDPFRSATSSSVSNVVITKNVFEETSVKSEDEPPALPPKIGTPTRPCPLPPGKRSINKLDSPDPFKLNDPFQPFPGNDSPKEKDPEIFCDPFTSATTTTNKEADPSNFANFSAYPSEEDMIEWAKRESEREEEQRLARLNQQEQEDLELAIALSKSEISEA

SEQ ID NO: 4842 - protein, 90 aa, Homo Sapiens
  misc_feature (1)..(1): Xaa can be any naturally occurring amino acid
XAAAQLSLTQLSSGNPVYEKYYRQVDTGNTGRVLASDAAAFLKKSGLPDLILGKIWDLADTDGKGILNKQHDTSSPLLISGTSAAELPWA

SEQ ID NO: 4843 - protein, 659 aa, Homo Sapiens
MDSQGRVWAQEMLLRVSPDHVTLLDPASKEELESYPLGAIVRCDAVMPPGRSRSLLLLVCQEPERAQPDVHFFQGLRLGAELIREDIQGALHNYRSGRGERRAAALRATQEELQRDRSPAAETPPLQRRPSVRAVISTVERGAGRGRPQAKPIPEAEEAQRPEPVGTSSNADSASPDLGPRGPDLAVLQAEREVDILNHVFDDVESFVSRLQKSAEAARVLEHRERGRRSRRRAAGEGLLTLRAKPPSEAEYTDVLQKIKYAFSLLARLRGNIADPSSPELLHFLFGPLQMIVNTSGGPEFASSVRRPHLTSDAVALLRDNVTPRENELWTSLGDSWTRPGLELSPEEGPPYRPEFFSGWEPPVTDPQSRAWEDPVEKQLQHERRRRQQSAPQVAVNGHRDLEPESEPQLESETAGKWVLCNYDFQARNSSELSVKQRDVLEVLDDSRKWWKVRDPAGQEGYVPYNILTPYPGPRLHHSQSPARSLNSTPPPPPAPAPAPPPALARPRWDRPRWDSCDSLNGLDPSEKEKFSQMLIVNEELQARLAQGRSGPSRAVPGPRAPEPQLSPGSDASEVRAWLQAKGFSSGTVDALGVLTGAQLFSLQKEELRAVSPEEGARVYSQVTVQRSLLEDKEKVSELEAVMEKQKKKVEGEVEMEVI

SEQ ID NO: 4844 - protein, 548 aa, Homo Sapiens
MGRKAIVLAIANTSLAFPLCQHLVTFCLGEDDGVHTVEDASRKLAVMDSQGRVWAQEMLLRVSPDHVTLLDPASKEELESYPLGAIVRCDAVMPPGRSRSLLLLVCQEPERAQPDVHFFQGLRLGAELIREDIQGALHNYRSGRGERRAAALRATQEELQRDRSPAAETPPLQRRPSVRAVISTVERGAGRGRPQAKPIPEAEEAQRPEPVGTSSNADSASPDLGPRGPDLAVLQAEREVDILNHVFDDVESFVSRLQKSAEAARVLEHRERGRRSRRRAAGEGLLTLRAKPPSEAEYTDVLQKIKYAFSLLARLRGNIADPSSPELLHFLFGPLQMIVNTSGGPEFASSVRRPHLTSDAVALLRDNVTPRENELWTSLGDSWTRPGLELSPEEGPPYRPEFFSGWEPPVTDPQSRAWEDPVEKQLQHERRRRQVTQATQQGRGWEVRGRGRSAWPRLTRLSYFLQQSAPQVAVNGHRDLEPESEPQLESETAGKWVLCNYDFQARNSSELSVKQRDVLEDKEKVSELEAVMEKQKKKVEGEVEMEVI

SEQ ID NO: 4845 - protein, 428 aa, Homo Sapiens
MHLVTFCLGEDDGVHTVEDASRKLAVMDSQGRVWAQEMLLRVSPDHVTLLDPASKEELESYPLGAIVRCDAVMPPGRSRSLLLLVCQEPERAQPDVHFFQGLRLGAELIREDIQGALHNYRSGRGERRAAALRATQEELQRDRSPAAETPPLQRRPSVRAVISTVERGAGRGRPQAKPIPEAEEAQRPEPVGTSSNADSASPDLGPRGPDLAVLQAEREVDILNHVFDDVESFVSRLQKSAEAARVLEHRERGRRSRRRAAGEGLLTLRAKPPSEAEYTDVLQKIKYAFSLLARLRGNIADPSSPELLHFLFGPLQMIVNTSGGPEFASSVRRPHLTSDAVALLRDNVTPRENELWTSLGDSWTRPGLELSPEEGPPYRPEFFSGWEPPVTDPQSRAWEDPVEKQLQHERRRRQQSAPQVAVNGWVRW

SEQ ID NO: 4846 - protein, 596 aa, Homo Sapiens
MNRTWPRRIWGSSQDEAELIREDIQGALHNYRSGRGERRAAALRATQEELQRDRSPAAETPPLQRRPSVRAVISTVERGAGRGRPQAKPIPEAEEAQRPEPVGTSSNADSASPDLGPRGPDLAVLQAEREVDILNHVFDDVESFVSRLQKSAEAARVLEHRERGRRSRRRAAGEGLLTLRAKPPSEAEYTDVLQKIKYAFSLLARLRGNIADPSSPELLHFLFGPLQMIVNTSGGPEFASSVRRPHLTSDAVALLRDNVTPRENELWTSLGDSWTRPGLELSPEEGPPYRPEFFSGWEPPVTDPQSRAWEDPVEKQLQHERRRRQQSAPQVAVNGHRDLEPESEPQLESETAGKWVLCNYDFQARNSSELSVKQRDVLEVLDDSRKWWKVRDPAGQEGYVPYNILTPYPGPRLHHSQSPARSLNSTPPPPPAPAPAPPPALARPRWDRPRWDSCDSLNGLDPSEKEKFSQMLIVNEELQARLAQGRSGPSRAVPGPRAPEPQLSPGSDASEVRAWLQAKGFSSGTVDALGVLTGAQLFSLQKEELRAVSPEEGARVYSQVTVQRSLLEDKEKVSELEAVMEKQKKKVEGEVEMEVI

SEQ ID NO: 4847 - protein, 409 aa, Homo Sapiens
MNRTWPRRIWGSSQDEVGFASSVRRPHLTSDAVALLRDNVTPRENELWTSLGDSWTRPGLELSPEEGPPYRPEFFSGWEPPVTDPQSRAWEDPVEKQLQHERRRRQVTQATQQGRGWEVRGRGRSAWPRLTRLSYFLQQSAPQVAVNGHRDLEPESEPQLESETAGKWVLCNYDFQARNSSELSVKQRDVLEVLDDSRKWWKVRDPAGQEGYVPYNILTPYPGPRLHHSQSPARSLNSTPPPPPAPAPAPPPALARPRWDRPRWDSCDSLNGLDPSEKEKFSQMLIVNEELQARLAQGRSGPSRAVPGPRAPEPQLSPGSDASEVRAWLQAKGFSSGTVDALGVLTGAQLFSLQKEELRAVSPEEGARVYSQVTVQRSLLEDKEKVSELEAVMEKQKKKVEGEVEMEVI

SEQ ID NO: 4848 - protein, 723 aa, Homo Sapiens
MSTATGPEAAPKPSAKSIYEQRKRYSTVVMADVSQYPVNHLVTFCLGEDDGVHTVEDASRKLAVMDSQGRVWAQEMLLRVSPDHVTLLDPASKEELESYPLGAIVRCDAVMPPGRSRSLLLLVCQEPERAQPDVHFFQGLRLGAELIREDIQGALHNYRSGRGERRAAALRATQEELQRDRSPAAETPPLQRRPSVRAVISTVERGAGRGRPQAKPIPEAEEAQRPEPVGTSSNADSASPDLGPRGPDLAVLQAEREVDILNHVFDDVESFVSRLQKSAEAARVLEHRERGRRSRRRAAGEGLLTLRAKPPSEAEYTDVLQKIKYAFSLLARLRGNIADPSSPELLHFLFGPLQMIVNTSGGPEFASSVRRPHLTSDAVALLRDNVTPRENELWTSLGDSWTRPGLELSPEEGPPYRPEFFSGWEPPVTDPQSRAWEDPVEKQLQHERRRRQQSAPQVAVNGHRDLEPESEPQLESETAGKWVLCNYDFQARNSSELSVKQRDVLEVLDDSRKWWKVRDPAGQEGYVPYNILTPYPGPRLHHSQSPARSLNSTPPPPPAPAPAPPPALARPRWDRPRWDSCDSLNGLDPSEKEKFSQMLIVNEELQARLAQGRSGPSRAVPGPRAPEPQLSPGSDASEVRAWLQAKGFSSGTVDALGVLTGAQLFSLQKEELRAVSPEEGARVYSQVTVQRSLLEDKEKVSELEAVMEKQKKKVEGEVEMEVI

SEQ ID NO: 4849 - protein, 715 aa, Homo Sapiens
MHLLPALAGVLATLVLAQPCEGTDPASPGAVETSVLRDCIAEAKLLVDAAYNWTQKSIKQRLRSGSASPMDLLSYFKQPVAATRTVVRAADYMHVALGLLEEKLQPQRSGPFNVTDVLTEPQLRLLSQASGCALRDQAERCSDKYRTITGRCNNKRRPLLGASNQALARWLPAEYEDGLSLPFGWTPSRRRNGFLLPLVRAVSNQIVRFPNERLTSDRGRALMFMQWGQFIDHDLDFSPESPARVAFTAGVDCERTCAQLPPCFPIKIPPNDPRIKNQRDCIPFFRSAPSCPQNKNRVRNQINALTSFVDASMVYGSEVSLSLRLRNRTNYLGLLAINQRFQDNGRALLPFDNLHDDPCLLTNRSARIPCFLAGDTRSTETPKLAAMHTLFMREHNRLATELRRLNPRWNGDKLYNEARKIMGAMVQIITYRDFLPLVLGKARARRTLGHYRGYCSNVDPRVANVFTLAFRFGHTMLQPFMFRLDSQYRASAPNSHVPLSSAFFASWRIVYEGGIDPILRGLMATPAKLNRQDAMLVDELRDRLFRQVRRIGLDLAALNMQRSRDHGLPGYNAWRRFCGLSQPRNLAQLSRVLKNQDLARKFLNLYGTPDNIDIWIGAIAEPLLPGARVGPLLACLFENQFRRARDGDRFWWQKRGVFTKRQRKALSRISLSRIICDNTGITTVSRDIFRANIYPRGFVNCSRIPRLNLSAWRGT

SEQ ID NO: 4850 - protein, 234 aa, Homo Sapiens
MKTLAGLVLGLVIFDAAVTAPTLESINYDSETYDATLEDLDNLYNYENIPVDKVEIEIATVMPSGNRELLTPPPQPEKAQEEEEEEESTPRLIDGSSPQEPEFTGVLGPHTNEDFPTCLLCTCISTTVYCDDHELDAIPPLPKNTAYFYSRFNRIKKINKNDFASLSDLKRIDLTSNLISEIDEDAFRKLPQLRELVLRDNKIRQLPELPTTLTFIDISNNRLGRKGIKQEAFK

SEQ ID NO: 4851 - protein, 322 aa, Homo Sapiens
MKTLAGLVLGLVIFDAAVTAPTLESINYDSETYDATLEDLDNLYNYENIPVDKVEIEIATVMPSGNRELLTPPPQPEKAQEEEEEEESTPRLIDGSSPQEPEFTGVLGPHTNEDFPTCLLCTCISTTVYCDDHELDAIPPLPKNTAYFYSRFNRIKKINKNDFASLSDLKRIDLTSNLISEIDEDAFRKLPQLRELVLRDNKIRQLPELPTTLTFIDISNNRLGRKGIKQEAFKDMYDLHHLYLTDNNLDHIPLPLPENLRALHLQNNNILEMHEDTFCNVKNLTYIRKALEDIRLDGNPINLSKTPQAYMCLPRLPVGSLV

SEQ ID NO: 4852 - protein, 294 aa, Homo Sapiens
MNFILFIFIPGVFSLKSSTLKPTIEALPNVLPLNEDVNKQEEKNEDHTPNYAPANEKNGNYYKDIKQYVFTTQNPNGTESEISVRATTDLNFALKNDKTVNATTYEKSTIEEETTTSEPSHKNIQRSTPNVPAFWTMLAKAINGTAVVMDDKDQLFHPIPESDVNATQGENQPDLEDLKIKIMLGISLMTLLLFVVLLAFCSATLYKLRHLSYKSCESQYSVNPELATMSYFHPSEGVSDTSFSKSAESSTFLGTTSSDMRRSGTRTSESKIMTDIISIGSDNEMHENDESVTR

SEQ ID NO: 4853 - protein, 127 aa, Homo Sapiens
MNFILFIFIPGVFSLKSSTLKPTIEALPNVLPLNEDVNKQEEKNEDHTPNYAPANEKNGNYYKDIKQYVFTTQNPNGTESEISVRATTDLNFALKNDKTVNATTYEKSTIEEETTTSEPSHKNIQSI

SEQ ID NO: 4854 - protein, 265 aa, Homo Sapiens
MNFILFIFIPGVFSLKSSTLKPTIEALPNVLPLNEDVNKQEEKNEDHTPNYAPANEKNGNYYKDIKQYVFTTQNPNGTESEISVRATTDLNFALKNGSTPNVPAFWTMLAKAINGTAVVMDDKDQLFHPIPESDVNATQGENQPDLEDLKIKIMLGISLMTLLLFVVLLAFCSATLYKLRHLSYKSCESQYSVNPELATMSYFHPSEGVSDTSFSKSAESSTFLGTTSSDMRRSGTRTSESKIMTDIISIGSDNEMHENDESVTR

SEQ ID NO: 4855 - protein, 9 aa, Homo Sapiens
MAFPCFDEP

SEQ ID NO: 4856 - protein, 129 aa, Homo Sapiens
MVFLPLKWSLATMSFLLSSLLALLTVSTPSWCQSTEASPKRSDGTPFPWNKIRLPEYVIPVHYDLLIHANLTTLTFWGTTKVEITASQPTSTIILHSHHLQISRATLRKGAGERLSEEPLQVLEHPRQE

SEQ ID NO: 4857 - protein, 948 aa, Homo Sapiens
MVFLPLKWSLATMSFLLSSLLALLTVSTPSWCQSTEASPKRSDGTPFPWNKIRLPEYVIPVHYDLLIHANLTTLTFWGTTKVEITASQPTSTIILHSHHLQISRATLRKGAGERLSEEPLQVLEHPRQEQIALLAPEPLLVGLPYTVVIHYAGNLSETFHGFYKSTYRTKEGELRILASTQFEPTAARMAFPCFDEPAFKASFSIKIRREPRHLAISNMPLVKSVTVAEGLIEDHFDVTVKMSTYLVAFIISDFESVSKITKSGVKVSVYAVPDKINQADYALDAAVTLLEFYEDYFSIPYPLPKQDLAAIPDFQSGAMENWGLTTYRESALLFDAEKSSASSKLGITMTVAHELAHQWFGNLVTMEWWNDLWLNEGFAKFMEFVSVSVTHPELKVGDYFFGKCFDAMEVDALNSSHPVSTPVENPAQIREMFDDVSYDKGACILNMLREYLSADAFKSGIVQYLQKHSYKNTKNEDLWDSMASICPTDGVKGMDGFCSRSQHSSSSSHWHQEGVDVKTMMNTWTLQKGFPLITITVRGRNVHMKQEHYMKGSDGAPDTGYLWHVPLTFITSKSDMVHRFLLKTKTDVLILPEEVEWIKFNVGMNGYYIVHYEDDGWDSLTGLLKGTHTAVSSNDRASLINNAFQLVSIGKLSIEKALDLSLYLKHETEIMPVFQGLNELIPMYKLMEKRDMNEVETQFKAFLIRLLRDLIDKQTWTDEGSVSERMLRSQLLLLACVHNYQPCVQRAEGYFRKWKESNGNLSLPVDVTLAVFAVGAQSTEGWDFLYSKYQFSLSSTEKSQIEFALCRTQNKEKLQWLLDESFKGDKIKTQEFPQILTLIGRNPVGYPLAWQFLRKNWNKLVQKFELGSSSIAHMVMGTTNQFSTRTRLEEVKGFFSSLKENGSQLRCVQQTIETIEENIGWMDKNFDKIRVWLQSEKLEHDPEADATG

SEQ ID NO: 4858 - protein, 941 aa, Homo Sapiens
MVFLPLKWSLATMSFLLSSLLALLTVSTPSWCQSTEASPKRSDGTPFPWNKIRLPEYVIPVHYDLLIHANLTTLTFWGTTKVEITASQPTSTIILHSHHLQISRATLRKGAGERLSEEPLQVLEHPRQEQIALLAPEPLLVGLPYTVVIHYAGNLSETFHGFYKSTYRTKEGELRILASTQFEPTAARMAFPCFDEPAFKASFSIKIRREPRHLAISNMPLVKSVTVAEGLIEDHFDVTVKMSTYLVAFIISDFESVSKITKSGVKVSVYAVPDKINQADYALDAAVTLLEFYEDYFSIPYPLPKQDLAAIPDFQSGAMENWGLTTYRESALLFDAEKSSASSKLGITMTVAHELAHQWFGNLVTMEWWNDLWLNEGFAKFMEFVSVSVTHPELKVGDYFFGKCFDAMEVDALNSSHPVSTPVENPAQIREMFDDVSYDKGACILNMLREYLSADAFKSGIVQYLQKHSYKNTKNEDLWDSMASICPTDGVKGMDGFCSRSQHSSSSSHWHQEGVDVKTMMNTWTLQKGFPLITITVRGRNVHMKQEHYMKGSDGAPDTGYLWHVPLTFITSKSDMVHRFLLKTKTDVLILPEEVEWIKFNVGMNGYYIVHYEDDGWDSLTGLLKGTHTAVSSNDRASLINNAFQLVSIGKLSIEKALDLSLYLKHETEIMPVFQGLNELIPMYKLMEKRDMNEVETQFKAFLIRLLRDLIDKQTWTDEGSVSERMLRSQLLLLACVHNYQPCVQRAEGYFRKWKESNGNLSLPVDVTLAVFAVGAQSTEGWDFLYSKYQFSLSSTEKSQIEFALCRTQNKEKLQWLLDESFKGDKIKTQEFPQILTLIGRNPVGYPLAWQFLRKNWNKLVQKFELGSSSIAHMVMGTTNQFSTRTRLEEVKGFFSSLKENGSQLRCVQQTIETIEENIGWMDKNFDKIRVWLQSEKLERM

SEQ ID NO: 4859 - protein, 144 aa, Homo Sapiens
  misc_feature (1)..(1): Xaa can be any naturally occurring amino acid
XKGDKIKTQEFPQILTLIGRNPVGYPLAWQFLRKNWNKLVQKFELGSSSIAHMVMGTTNQFSTRTRLEEVKGFFSSLKENGSQLRCVQQTIETIEENIGWMDKNFDKIRVWLQSEKLERVALQRKPKCWVPCHRRIKYLILLIL

SEQ ID NO: 4860 - protein, 960 aa, Homo Sapiens
MFHSSAMVNSHRKPMFNIHRGFYCLTAILPQICICSQFSVPSSYHFTEDPGAFPVATNGERFPWQELRLPSVVIPLHYDLFVHPNLTSLDFVASEKIEVLVSNATQFIILHSKDLEITNATLQSEEDSRYMKPGKELKVLSYPAHEQIALLVPEKLTPHLKYYVAMDFQAKLGDGFEGFYKSTYRTLGGETRILAVTDFEPTQARMAFPCFDEPLFKANFSIKIRRESRHIALSNMPKVKTIELEGGLLEDHFETTVKMSTYLVAYIVCDFHSLSGFTSSGVKVSIYASPDKRNQTHYALQASLKLLDFYEKYFDIYYPLSKLDLIAIPDFAPGAMENWGLITYRETSLLFDPKTSSASDKLWVTRVIAHELAHQWFGNLVTMEWWNDIWLKEGFAKYMELIAVNATYPELQFDDYFLNVCFEVITKDSLNSSRPISKPAETPTQIQEMFDEVSYNKGACILNMLKDFLGEEKFQKGIIQYLKKFSYRNAKNDDLWSSLSNSCLESDFTSGGVCHSDPKMTSNMLAFLGENAEVKEMMTTWTLQKGIPLLVVKQDGCSLRLQQERFLQGVFQEDPEWRALQERYLWHIPLTYSTSSSNVIHRHILKSKTDTLDLPEKTSWVKFNVDSNGYYIVHYEGHGWDQLITQLNQNHTLLRPKDRVGLIHDVFQLVGAGRLTLDKALDMTYYLQHETSSPALLEGLSYLESFYHMMDRRNISDISENLKRYLLQYFKPVIDRQSWSDKGSVWDRMLRSALLKLACDLNHAPCIQKAAELFSQWMESSGKLNIPTDVLKIVYSVGAQTTAGWNYLLEQYELSMSSAEQNKILYALSTSKHQEKLLKLIELGMEGKVIKTQNLAALLHAIARRPKGQQLAWDFVRENWTHLLKKFDLGSYDIRMIISGTTAHFSSKDKLQEVKLFFESLEAQGSHLDIFQTVLETITKNIKWLEKNLPTLRTWLMVNT

SEQ ID NO: 4861 - protein, 350 aa, Homo Sapiens
MFHSSAMVNSHRKPMFNIHRGFYCLTAILPQICICSQFSVPSSYHFTEDPGAFPVATNGERFPWQELRLPSVVIPLHYDLFVHPNLTSLDFVASEKIEVLVSNATQFIILHSKDLEITNATLQSEEDSRYMKPGKELKVLSYPAHEQIALLVPEKLTPHLKYYVAMDFQAKLGDGFEGFYKSTYRTLGGETRILAVTDFEPTQARMAFPCFDEPLFKANFSIKIRRESRHIALSNMPKVKTIELEGGLLEDHFETTVKMSTYLVAYIVCDFHSLSGFTSSGVKVSIYASPDKRNQTHYALQASLKLLDFYEKYFDIYYPLSKLGMFKFHIIVFIFAHKTCFDLFPLSLSM

SEQ ID NO: 4862 - protein, 694 aa, Homo Sapiens
MFHSSAMVNSHRKPMFNIHRGFYCLTAILPQICICSQFSVPSSYHFTEDPGAFPVATNGERFPWQELRLPSVVIPLHYDLFVHPNLTSLDFVASEKIEVLVSNATQFIILHSKDLEITNATLQSEEDSRYMKPGKELKVLSYPAHEQIALLVPEKLTPHLKYYVAMDFQAKLGDGFEGFYKSTYRTLGGETRILAVTDFEPTQARMAFPCFDEPLFKANFSIKIRRESRHIALSNMPKVKTIELEGGLLEDHFETTVKMSTYLVAYIVCDFHSLSGFTSSGVKVSIYASPDKRNQTHYALQASLKLLDFYEKYFDIYYPLSKLDLIAIPDFAPGAMENWGLITYRETSLLFDPKTSSASDKLWVTRVIAHELAHQWFGNLVTMEWWNDIWLKEGFAKYMELIAVNATYPELQFDDYFLNVCFEVITKDSLNSSRPISKPAETPTQIQEMFDEVSYNKGACILNMLKDFLGEEKFQKGIIQYLKKFSYRNAKNDDLWSSLSNSCLESDFTSGGVCHSDPKMTSNMLAFLGENAEVKEMMTTWTLQKGIPLLVVKQDGCSLRLQQERFLQGVFQEDPEWRALQERYLWHIPLTYSTSSSNVIHRHILKSKTDTLDLPEKTSWVKFNVDSNGYYIVHYEGHGWDQLITQLNQNHTLLRPKDRVGLIHDVFQLVGAGRLTLDKALDMTYYLQHETSSP

SEQ ID NO: 4863 - protein, 532 aa, Homo Sapiens
MFHSSAMVNSHRKPMFNIHRGFYCLTAILPQICICSQFSVPSSYHFTEDPGAFPVATNGERFPWQELRLPSVVIPLHYDLFVHPNLTSLDFVASEKIEVLVSNATQFIILHSKDLEITNATLQSEEDSRYMKPGKELKVLSYPAHEQIALLVPEKLTPHLKYYVAMDFQAKLGDGFEGFYKSTYRTLGGETRILAVTDFEPTQARMAFPCFDEPLFKANFSIKIRRESRHIALSNMPKVKTIELEGGLLEDHFETTVKMSTYLVAYIVCDFHSLSGFTSSGVKVSIYASPDKRNQTHYALQASLKLLDFYEKYFDIYYPLSKLDLIAIPDFAPGAMENWGLITYRETSLLFDPKTSSASDKLWVTRVIAHELAHQWFGNLVTMEWWNDIWLKEGFAKYMELIAVNATYPELQFDDYFLNVCFEVITKDSLNSSRPISKPAETPTQIQEMFDEVSYNKGACILNMLKDFLGEEKFQKGIIQYLKKFSYRNAKNDDLWSSLSNSCLESDFTSGGVCHSDPKMTSNMVRIKRVTE

SEQ ID NO: 4864 - protein, 915 aa, Homo Sapiens
MFHSSAMVNSHRKPMFNIHRGFYCLTAILPQICICSQFSVPSSYHFTEDPGAFPVATNGERFPWQELRLPSVVIPLHYDLFVHPNLTSLDFVASEKIEVLVSNATQFIILHSKDLEITNATLQSEEDSRYMKPGKELKVLSYPAHEQIALLVPEKLTPHLKYYVAMDFQAKLGDGFEGFYKSTYRTLGGETRILAVTDFEPTQARMAFPCFDEPLFKANFSIKIRRESRHIALSNMPKVSIYASPDKRNQTHYALQASLKLLDFYEKYFDIYYPLSKLDLIAIPDFAPGAMENWGLITYRETSLLFDPKTSSASDKLWVTRVIAHELAHQWFGNLVTMEWWNDIWLKEGFAKYMELIAVNATYPELQFDDYFLNVCFEVITKDSLNSSRPISKPAETPTQIQEMFDEVSYNKGACILNMLKDFLGEEKFQKGIIQYLKKFSYRNAKNDDLWSSLSNSCLESDFTSGGVCHSDPKMTSNMLAFLGENAEVKEMMTTWTLQKGIPLLVVKQDGCSLRLQQERFLQGVFQEDPEWRALQERYLWHIPLTYSTSSSNVIHRHILKSKTDTLDLPEKTSWVKFNVDSNGYYIVHYEGHGWDQLITQLNQNHTLLRPKDRVGLIHDVFQLVGAGRLTLDKALDMTYYLQHETSSPALLEGLSYLESFYHMMDRRNISDISENLKRYLLQYFKPVIDRQSWSDKGSVWDRMLRSALLKLACDLNHAPCIQKAAELFSQWMESSGKLNIPTDVLKIVYSVGAQTTAGWNYLLEQYELSMSSAEQNKILYALSTSKHQEKLLKLIELGMEGKVIKTQNLAALLHAIARRPKGQQLAWDFVRENWTHLLKKFDLGSYDIRMIISGTTAHFSSKDKLQEVKLFFESLEAQGSHLDIFQTVLETITKNIKWLEKNLPTLRTWLMVNT

SEQ ID NO: 4865 - protein, 29 aa, Homo Sapiens
MLHRVDGLVSQGQDPSGRILAVTDFEPTQ

SEQ ID NO: 4866 - protein, 79 aa, Homo Sapiens
  misc_feature (1)..(1): Xaa can be any naturally occurring amino acid
XGKVIKTQNLAALLHAIARRPKGQQLAWDFVRENWTHLLKKFDLGSYDIRMIISGTTAHFSSKDKLQEVCDFLFLTISK

SEQ ID NO: 4867 - protein, 163 aa, Homo Sapiens
  misc_feature (1)..(1): Xaa can be any naturally occurring amino acid
XQTHYALQASLKLLDFYEKYFDIYYPLSKLDLIAIPDFAPGAMENWGLITYRETSLLFDPKTSSASDKLWVTRVIAHELAHQWFGNLVTMEWWNDIWLKEGFAKYMELIAVNATYPELQFGACILNMLKDFLGEEKFQKGIIQYLKKFSYRNAKNDDLWSSLS

SEQ ID NO: 4868 - protein, 649 aa, Homo Sapiens
CLSCRNYSRGGVCVTHCNFLNGEPREFAHEAECFSCHPECQPMEGTATCNGSGSDTCAQCAHFRDGPHCVSSCPHGVLGAKGPIYKYPDVQNECRPCHENCTQGCKGPELQDCLGQTLVLIGKTHLTMALTVIAGLVVIFMMLGGTFLYWRGRRIQNKRAMRRYLERGESIEPLDPSEKTPIKWMALESIHFGKYTHQSDVWSYGVTVWELMTFGAEPYAGLRLAEVPDLLEKGERLAQPQICTIDVYMVMVKCWMIDENIRPTFKELANEFTRMARDPPRYLVIKRESGPGIAPGPEPHGLTNKKLEEVELEPELDLDLDLEAEEDNLATTTLGSALSLPVGTLNRPRGSQSLLSPSSGYMPMNQGNLGESCQESAVSGSSERCPRPVSLHPMPRGCLASESSEGHVTGSEAELQEKVSMCRSRSRSRSPRPRGDSAYHSQRHSLLTPVTPLSPPGLEEEDVNGYVMPDTHLKGTPSSREGTLSSVGLSSVLGTEEEDEDEEYEYMNRRRRHSPPHPPRPSSLEELGYEYMDVGSDLSASLGSTQSCPLHPVPIMPTAGTTPDEDYEYMNRQRDGGGPGGDYAAMGACPASEQGYEEMRAFQGPGHQAPHVHYARLKTLRSLEATDSAFDNPDYWHSRLFPKANAQRT

SEQ ID NO: 4869 - protein, 81 aa, Homo Sapiens
LDIKHNRPRRDCVAEGKVCDPLCSSGGCWGPGPGQCLSCRNYSRGGVCVTHCNFLNGYSKGSQSRMGGGGALQWNCSGGIQ

SEQ ID NO: 4870 - protein, 19 aa, Homo Sapiens
MGNLEIVLTGHNADLSFLQ

SEQ ID NO: 4871 - protein, 115 aa, Homo Sapiens
MGNLEIVLTGHNADLSFLQWIREVTGYVLVAMNEFSTLPLPNLRVVRGTQVYDGKFAIFVMLNYNTNSSHALRQLRLTQLTEILSGGVYIEKNDKLCHMDTIDWRDIVRDRDAEI

SEQ ID NO: 4872 - protein, 116 aa, Homo Sapiens
MGNLEIVLTGHNADLSFLQWIREVTGYVLVAMNEFSTLPLPNLRVVRGTQVYDGKFAIFVMLNYNTNSSHALRQLRLTQLTEILSGGVYIEKNDKLCHMDTIDWRDIVRDRDAEIV

SEQ ID NO: 4873 - protein, 1283 aa, Homo Sapiens
MGNLEIVLTGHNADLSFLQWIREVTGYVLVAMNEFSTLPLPNLRVVRGTQVYDGKFAIFVMLNYNTNSSHALRQLRLTQLTEILSGGVYIEKNDKLCHMDTIDWRDIVRDRDAEIVVKDNGRSCPPCHEVCKGRCWGPGSEDCQTLTKTICAPQCNGHCFGPNPNQCCHDECAGGCSGPQDTDCFACRHFNDSGACVPRCPQPLVYNKLTFQLEPNPHTKYQYGGVCVASCPHNFVVDQTSCVRACPPDKMEVDKNGLKMCEPCGGLCPKACEGTGSGSRFQTVDSSNIDGFVNCTKILGNLDFLITGLNGDPWHKIPALDPEKLNVFRTVREITGYLNIQSWPPHMHNFSVFSNLTTIGGRSLYNRGFSLLIMKNLNVTSLGFRSLKEISAGRIYISANRQLCYHHSLNWTKVLRGPTEERLDIKHNRPRRDCVAEGKVCDPLCSSGGCWGPGPGQCLSCRNYSRGGVCVTHCNFLNGEPREFAHEAECFSCHPECQPMEGTATCNGSGSDTCAQCAHFRDGPHCVSSCPHGVLGAKGPIYKYPDVQNECRPCHENCTQGCKGPELQDCLGQTLVLIGKTHLTMALTVIAGLVVIFMMLGGTFLYWRGRRIQNKRAMRRYLERGESIEPLDPSEKANKVLARIFKETELRKLKVLGSGVFGTVHKGVWIPEGESIKIPVCIKVIEDKSGRQSFQAVTDHMLAIGSLDHAHIVRLLGLCPGSSLQLVTQYLPLGSLLDHVRQHRGALGPQLLLNWGVQIAKGMYYLEEHGMVHRNLAARNVLLKSPSQVQVADFGVADLLPPDDKQLLYSEAKTPIKWMALESIHFGKYTHQSDVWSYGVTVWELMTFGAEPYAGLRLAEVPDLLEKGERLAQPQICTIDVYMVMVKCWMIDENIRPTFKELANEFTRMARDPPRYLVIKRESGPGIAPGPEPHGLTNKKLEEVELEPELDLDLDLEAEEDNLATTTLGSALSLPVGTLNRPRGSQSLLSPSSGYMPMNQGNLGESCQESAVSGSSERCPRPVSLHPMPRGCLASESSEGHVTGSEAELQEKVSMCRSRSRSRSPRPRGDSAYHSQRHSLLTPVTPLSPPGLEEEDVNGYVMPDTHLKGTPSSREGTLSSVGLSSVLGTEEEDEDEEYEYMNRRRRHSPPHPPRPSSLEELGYEYMDVGSDLSASLGSTQSCPLHPVPIMPTAGTTPDEDYEYMNRQRDGGGPGGDYAAMGACPASEQGYEEMRAFQGPGHQAPHVHYARLKTLRSLEATDSAFDNPDYWHSRLFPKANAQRT

SEQ ID NO: 4874 - protein, 583 aa, Homo Sapiens
MLAIGSLDHAHIVRLLGLCPGSSLQLVTQYLPLGSLLDHVRQHRGALGPQLLLNWGVQIAKGMYYLEEHGMVHRNLAARNVLLKSPSQVQVADFGVADLLPPDDKQLLYSEAKTPIKWMALESIHFGKYTHQSDVWSYGVTVWELMTFGAEPYAGLRLAEVPDLLEKGERLAQPQICTIDVYMVMVKCWMIDENIRPTFKELANEFTRMARDPPRYLVIKRESGPGIAPGPEPHGLTNKKLEEVELEPELDLDLDLEAEEDNLATTTLGSALSLPVGTLNRPRGSQSLLSPSSGYMPMNQGNLGESCQESAVSGSSERCPRPVSLHPMPRGCLASESSEGHVTGSEAELQEKVSMCRSRSRSRSPRPRGDSAYHSQRHSLLTPVTPLSPPGLEEEDVNGYVMPDTHLKGTPSSREGTLSSVGLSSVLGTEEEDEDEEYEYMNRRRRHSPPHPPRPSSLEELGYEYMDVGSDLSASLGSTQSCPLHPVPIMPTAGTTPDEDYEYMNRQRDGGGPGGDYAAMGACPASEQGYEEMRAFQGPGHQAPHVHYARLKTLRSLEATDSAFDNPDYWHSRLFPKANAQRT

SEQ ID NO: 4875 - protein, 462 aa, Homo Sapiens
MPMSTILPVTSPCLPATGVTVWELMTFGAEPYAGLRLAEVPDLLEKGERLAQPQICTIDVYMVMVKCWMIDENIRPTFKELANEFTRMARDPPRYLVIKRESGPGIAPGPEPHGLTNKKLEEVELEPELDLDLDLEAEEDNLATTTLGSALSLPVGTLNRPRGSQSLLSPSSGYMPMNQGNLGESCQESAVSGSSERCPRPVSLHPMPRGCLASESSEGHVTGSEAELQEKVSMCRSRSRSRSPRPRGDSAYHSQRHSLLTPVTPLSPPGLEEEDVNGYVMPDTHLKGTPSSREGTLSSVGLSSVLGTEEEDEDEEYEYMNRRRRHSPPHPPRPSSLEELGYEYMDVGSDLSASLGSTQSCPLHPVPIMPTAGTTPDEDYEYMNRQRDGGGPGGDYAAMGACPASEQGYEEMRAFQGPGHQAPHVHYARLKTLRSLEATDSAFDNPDYWHSRLFPKANAQRT

SEQ ID NO: 4876 - protein, 126 aa, Homo Sapiens
MRANDALQVLGLLFSLARGSEVGNSQAVCPGTLNGLSVTGDAENQYQTLYKLYERCEVVMGNLEIVLTGHNADLSFLQWIREVTGYVLVAMNEFSTLPLPNLRVVRGTQVYDGKFAIFVMLNYNTN

SEQ ID NO: 4877 - protein, 1342 aa, Homo Sapiens
MRANDALQVLGLLFSLARGSEVGNSQAVCPGTLNGLSVTGDAENQYQTLYKLYERCEVVMGNLEIVLTGHNADLSFLQWIREVTGYVLVAMNEFSTLPLPNLRVVRGTQVYDGKFAIFVMLNYNTNSSHALRQLRLTQLTEILSGGVYIEKNDKLCHMDTIDWRDIVRDRDAEIVVKDNGRSCPPCHEVCKGRCWGPGSEDCQTLTKTICAPQCNGHCFGPNPNQCCHDECAGGCSGPQDTDCFACRHFNDSGACVPRCPQPLVYNKLTFQLEPNPHTKYQYGGVCVASCPHNFVVDQTSCVRACPPDKMEVDKNGLKMCEPCGGLCPKACEGTGSGSRFQTVDSSNIDGFVNCTKILGNLDFLITGLNGDPWHKIPALDPEKLNVFRTVREITGYLNIQSWPPHMHNFSVFSNLTTIGGRSLYNRGFSLLIMKNLNVTSLGFRSLKEISAGRIYISANRQLCYHHSLNWTKVLRGPTEERLDIKHNRPRRDCVAEGKVCDPLCSSGGCWGPGPGQCLSCRNYSRGGVCVTHCNFLNGEPREFAHEAECFSCHPECQPMEGTATCNGSGSDTCAQCAHFRDGPHCVSSCPHGVLGAKGPIYKYPDVQNECRPCHENCTQGCKGPELQDCLGQTLVLIGKTHLTMALTVIAGLVVIFMMLGGTFLYWRGRRIQNKRAMRRYLERGESIEPLDPSEKANKVLARIFKETELRKLKVLGSGVFGTVHKGVWIPEGESIKIPVCIKVIEDKSGRQSFQAVTDHMLAIGSLDHAHIVRLLGLCPGSSLQLVTQYLPLGSLLDHVRQHRGALGPQLLLNWGVQIAKGMYYLEEHGMVHRNLAARNVLLKSPSQVQVADFGVADLLPPDDKQLLYSEAKTPIKWMALESIHFGKYTHQSDVWSYGVTVWELMTFGAEPYAGLRLAEVPDLLEKGERLAQPQICTIDVYMVMVKCWMIDENIRPTFKELANEFTRMARDPPRYLVIKRESGPGIAPGPEPHGLTNKKLEEVELEPELDLDLDLEAEEDNLATTTLGSALSLPVGTLNRPRGSQSLLSPSSGYMPMNQGNLGESCQESAVSGSSERCPRPVSLHPMPRGCLASESSEGHVTGSEAELQEKVSMCRSRSRSRSPRPRGDSAYHSQRHSLLTPVTPLSPPGLEEEDVNGYVMPDTHLKGTPSSREGTLSSVGLSSVLGTEEEDEDEEYEYMNRRRRHSPPHPPRPSSLEELGYEYMDVGSDLSASLGSTQSCPLHPVPIMPTAGTTPDEDYEYMNRQRDGGGPGGDYAAMGACPASEQGYEEMRAFQGPGHQAPHVHYARLKTLRSLEATDSAFDNPDYWHSRLFPKANAQRT

SEQ ID NO: 4878 - protein, 921 aa, Homo Sapiens
MRANDALQVLGLLFSLARGSEVGNSQAVCPGTLNGLSVTGDAENQYQTLYKLYERCEVVMGNLEIVLTGHNADLSFLQWIREVTGYVLVAMNEFSTLPLPNLRVVRGTQVYDGKFAIFVMLNYNTNSSHALRQLRLTQLTEILSGGVYIEKNDKLCHMDTIDWRDIVRDRDAEIVVKDNGRSCPPCHEVCKGRCWGPGSEDCQTLTKTICAPQCNGHCFGPNPNQCCHDECAGGCSGPQDTDCFACRHFNDSGACVPRCPQPLVYNKLTFQLEPNPHTKYQYGGVCVASCPHNFVVDQTSCVRACPPDKMEVDKNGLKMCEPCGGLCPKACEGTGSGSRFQTVDSSNIDGFVNCTKILGNLDFLITGLNGDPWHKIPALDPEKLNVFRTVREITGYLNIQSWPPHMHNFSVFSNLTTIGGRSLYNRGFSLLIMKNLNVTSLGFRSLKEISAGRIYISANRQLCYHHSLNWTKVLRGPTEERLDIKHNRPRRDCVAEGKVCDPLCSSGGCWGPGPGQCLSCRNYSRGGVCVTHCNFLNGEPREFAHEAECFSCHPECQPMEGTATCNGSGSDTCAQCAHFRDGPHCVSSCPHGVLGAKGPIYKYPDVQNECRPCHENCTQGCKGPELQDCLGQTLVLIGKTHLTMALTVIAGLVVIFMMLGGTFLYWRGRRIQNKRAMRRYLERGESIEPLDPSEKANKVLARIFKETELRKLKVLGSGVFGTVHKGVWIPEGESIKIPVCIKVIEDKSGRQSFQAVTDHMLAIGSLDHAHIVRLLGLCPGSSLQLVTQYLPLGSLLDHVRQHRGALGPQLLLNWGVQIAKGMYYLEEHGMVHRNLAARNVLLKSPSQVQVADFGVADLLPPDDKQLLYSEAKTPIKWMALESIHFGKYTHQSDVWSYGQCIWMPSLPSLAPVSNLPFETPS

SEQ ID NO: 4879 - protein, 331 aa, Homo Sapiens
MRANDALQVLGLLFSLARGSEVGNSQAVCPGTLNGLSVTGDAENQYQTLYKLYERCEVVMGNLEIVLTGHNADLSFLQWIREVTGYVLVAMNEFSTLPLPNLRVVRGTQVYDGKFAIFVMLNYNTNSSHALRQLRLTQLTEILSGGVYIEKNDKLCHMDTIDWRDIVRDRDAEIVVKDNGRSCPPCHEVCKGRCWGPGSEDCQTLTKTICAPQCNGHCFGPNPNQCCHDECAGGCSGPQDTDCFACRHFNDSGACVPRCPQPLVYNKLTFQLEPNPHTKYQYGGVCVASCPHNFVVDQTSCVRACPPDKMEVDKNGLKMCEPCGGLCPKAF

SEQ ID NO: 4880 - protein, 183 aa, Homo Sapiens
MRANDALQVLGLLFSLARGSEVGNSQAVCPGTLNGLSVTGDAENQYQTLYKLYERCEVVMGNLEIVLTGHNADLSFLQWIREVTGYVLVAMNEFSTLPLPNLRVVRGTQVYDGKFAIFVMLNYNTNSSHALRQLRLTQLTGQFPMVPSGLTPQPAQDWYLLDDDPRLLTLSASSKVPVTLAAV

SEQ ID NO: 4881 - protein, 43 aa, Homo Sapiens
MRANDALQVPRAQSTSTQMFRMNVGPAMRTAPRGVKDQSFKTV

SEQ ID NO: 4882 - protein, 354 aa, Homo Sapiens
MAPARRPAGARLLLVYAGLLAAAAAGLGSPEPGAPSRSRARREPPPGNELPRGPGESRAGPAARPPEPTAERAHSVDPRDAWMLFVRQSDKGVNGKKRSRGKAKKLKFGLPGPPGPPGPQGPPGPIIPPEALLKEFQLLLKGAVRQRERAEPEPCTCGPAGPVAASLAPVSATAGEDDDDVVGDVLALLAAPLAPGPRAPRVEAAFLCRLRRDALVERRALHELGVYYLPDAEGAFRRGPGLNLTSGQYRAPVAGFYALAATLHVALGEPPRRGPPRPRDHLRLLICIQSRCQRNASLEAIMGLESSSELFTISVNGVLYLQMGQWTSVFLDNASGCSLTVRSGSHFSAVLLGV

SEQ ID NO: 4883 - protein, 63 aa, Homo Sapiens
  misc_feature (1)..(1): Xaa can be any naturally occurring amino acid
XFGYSSLEAIMGLESSSELFTISVNGVLYLQMGQWTSVFLDNASGCSLTVRSGSHFSAVLLGV

SEQ ID NO: 4884 - protein, 74 aa, Homo Sapiens
  misc_feature (1)..(1): Xaa can be any naturally occurring amino acid
XIQSRCQRNASLEAIMGLESSSELFTISVNGVLYLQATKNLVPQDLLGAKLVWQGRSGLGEKGAMASHLHLLTN

SEQ ID NO: 4885 - protein, 275 aa, Homo Sapiens
MNMTQARVLVAAVVGLVAVLLYASIHKIEEGHLAVYYRGGALLTSPSGPGYHIMLPFITTFRSVQTTLQTDEVKNVPCGTSGGVMIYIDRIEVVNMLAPYAVFDIVRNYTADYDKTLIFNKIHHELNQFCSAHTLQEVYIELFDQIDENLKQALQKDLNLMAPGLTIQAVRVTKPKIPEAIRRNFELMEAEKTKLLIAAQKQKVVEKEAETERKKAVIEAEKIAQVAKIRFQQKVMEKETEKRISEIEDAAFLAREKAKADAEYYAAHKYATSNK

SEQ ID NO: 4886 - protein, 348 aa, Homo Sapiens
MNMTQARVLVAAVVGLVAVLLYASIHKIEEGHLAVYYRGGALLTSPSGPGYHIMLPFITTFRSVQTTLQTDEVKNVPCGTSGGVMIYIDRIEVVNMLAPYAVFDIVRNYTADYDKTLIFNKIHHELNQFCSAHTLQEVYIELFDQIDENLKQALQKDLNLMAPGLTIQAVRVTKPKIPEAIRRNFELMEAEKTKLLIAAQKQKVVEKEAETERKKAVIEAEKIAQVAKIRFQQKVMEKETEKRISEIEDAAFLAREKAKADAEYYAAHKYATSNKHKLTPEYLELKKYQAIASNSKIYFGSNIPNMFVDSSCALKYSDIRTGRESSLPSKEALEPSGENVIQNKESTG

SEQ ID NO: 4887 - protein, 348 aa, Homo Sapiens; identical to SEQ ID NO: 4886

SEQ ID NO: 4888 - protein, 339 aa, Homo Sapiens
MAQLGAVVAVASSFFCASLFSAVHKIEEGHIGVYYRGGALLTSTSGPGFHLMLPFITSYKSVQTTLQTDEVKNVPCGTSGGVMIYFDRIEVVNFLVPNAVYDIVKNYTADYDKALIFNKIHHELNQFCSVHTLQEVYIELFDQIDENLKLALQQDLTSMAPGLVIQAVRVTKPNIPEAIRRNYELMESEKTKLLIAAQKQKVVEKEAETERKKALIEAEKVAQVAEITYGQKVMEKETEKKISEIEDAAFLAREKAKADAECYTAMKIAEANKLKLTPEYLQLMKYKAIASNSKIYFGKDIPNMFMDSAGSVSKQFEGLADKLSFGLEDEPLETATKEN

SEQ ID NO: 4889 - protein, 339 aa, Homo Sapiens; identical to SEQ ID NO: 4888

SEQ ID NO: 4890 - protein, 338 aa, Homo Sapiens
MAQLGAVVAVASSFFCASLFSAVHKIEEGHIGVYYRGGALLTSTSGPGFHLMLPFITSYKSVQTTLQTDEVKNVPCGTSGGVMIYFDRIEVVNFLVPNAVYDIVKNYTADYDKALIFNKIHHELNQFCSVHTLQEVYIELFDQIDENLKLALQQDLTSMAPGLVIQAVRVTKPNIPEAIRRNYELMESEKTKLLIAAQKQKVVEKEAETERKKALIEAEKVAQVAEITYGQKVMEKETEKKISEIEDAAFLAREKAKADAECYTAMKIAEANKLKLTPEYLQLMKYKAIASNSKIYFGKDIPNMFMDSAGSVSKQFEGLADKLSFGLEDEPLETATKE

SEQ ID NO: 4891 - protein, 206 aa, Homo Sapiens
MAQLGAVVAVASSFFCASLFSAVHKIEEGHIGVYYRGGALLTSTSGPGFHLMLPFITSYKSVQTTLQTDEVKNVPCGTSGGVMIYFDRIEVVNFLVPNAVYDIVKNYTADYDKALIFNKIHHELNQFCSVHTLQEVYIELFGKKVSPEHAVLKQGSWNPASLHCLKPGCLQGVMVTYGQEMLKNLVLRSWSQRSSWRMLIAMQQDP

SEQ ID NO: 4892 - protein, 206 aa, Homo Sapiens; identical to SEQ ID NO: 4891

SEQ ID NO: 4893 - protein, 206 aa, Homo Sapiens; identical to SEQ ID NO: 4891

SEQ ID NO: 4894 - protein, 152 aa, Homo Sapiens
MAQLGAVVAVASSFFCASLFSAVHKIEEGHIGVYYRGGALLTSTSGPGFHLMLPFITSYKSVQTTLQTDEVKNVPCGTSGGVMIYFDRIEVVNFLVPNAVYDIVKNYTADYDKALIFNKIHHELNQFCSVHTLQEVYIELFGLENDFSQESS

SEQ ID NO: 4895 - protein, 152 aa, Homo Sapiens; identical to SEQ ID NO: 4894

SEQ ID NO: 4896 - protein, 197 aa, Homo Sapiens
MAQLGAVVAVASSFFCASLFSAVHKIEEGHIGVYYSGGVMIYFDRIEVVNFLVPNAVYDIVKNYTADYDKALIFNKIHHELNQFCSVHTLQEVYIELFDQIDENLKLALQQDLTSMAPGLVIQAVRVTKPNIPEAIRRNYELMESEKTKLLIAAQKQKVVEKEAETERKKALIEAEKVAQVAEITYGQKVMEKETEK

SEQ ID NO: 4897 - protein, 977 aa, Homo Sapiens
MPARRLLLLLTLLLPGLGIFGSTSTVTLPETLLFVSTLDGSLHAVSKRTGSIKWTLKEDPVLQVPTHVEEPAFLPDPNDGSLYTLGSKNNEGLTKLPFTIPELVQASPCRSSDGILYMGKKQDIWYVIDLLTGEKQQTLSSAFADSLCPSTSLLYLGRTEYTITMYDTKTRELRWNATYFDYAASLPEDDVDYKMSHFVSNGDGLVVTVDSESGDVLWIQNYASPVVAFYVWQREGLRKVMHINVAVETLRYLTFMSGEVGRITKWKYPFPKETEAKSKLTPTLYVGKYSTSLYASPSMVHEGVAVVPRGSTLPLLEGPQTDGVTIGDKGECVITPSTDVKFDPGLKSKNKLNYLRNYWLLIGHHETPLSASTKMLERFPNNLPKHRENVIPADSEKKSFEEVINLVDQTSENAPTTVSRDVEEKPAHAPARPEAPVDSMLKDMATIILSTFLLIGWVAFIITYPLSMHQQQQLQHQQFQKELEKIQLLQQQQQQLPFHPPGDTAQDGELLDTSGPYSESSGTSSPSTSPRASNHSLCSGSSASKAGSSPSLEQDDGDEETSVVIVGKISFCPKDVLGHGAEGTIVYRGMFDNRDVAVKRILPECFSFADREVQLLRESDEHPNVIRYFCTEKDRQFQYIAIELCAATLQEYVEQKDFAHLGLEPITLLQQTTSGLAHLHSLNIVHRDLKPHNILISMPNAHGKIKAMISDFGLCKKLAVGRHSFSRRSGVPGTEGWIAPEMLSEDCKENPTYTVDIFSAGCVFYYVISEGSHPFGKSLQRQANILLGACSLDCLHPEKHEDVIARELIEKMIAMDPQKRPSAKHVLKHPFFWSLEKQLQFFQDVSDRIEKESLDGPIVKQLERGGRAVVKMDWRENITVPLQTDLRKFRTYKGGSVRDLLRAMRNKKHHYRELPAEVRETLGSLPDDFVCYFTSRFPHLLAHTYRAMELCSHERLFQPYYFHEPPEPQPPVTPDAL

SEQ ID NO: 4898 - protein, 70 aa, Homo Sapiens
MPARRLLLLLTLLLPGLGVSDRGAWGGGQLATAGSGPGQRRGAGAGVRAGSATAAARCPVSPAVGGSGRA

SEQ ID NO: 4899 - protein, 23 aa, Homo Sapiens
ELLQLLPPDSPTRWLPGTWLEPC

SEQ ID NO: 4900 - protein, 80 aa, Homo Sapiens
MASAVRGSRPWPRLGLQLQFAALLLGTLSPQGCGWATRMLGLLLGAQPHPVCSRRDWSRFILSGQRTSCWCPPWMEVSTH

SEQ ID NO: 4901 - protein, 129 aa, Homo Sapiens
MASAVRGSRPWPRLGLQLQFAALLLGTLSPQVHTLRPENLLLVSTLDGSLHALSKQTGDLKWTLRDDPVIEGPMYVTEMAFLSDPADGSLYILGTQKQQGLMAGVQWYDHKAHCSLELLASSNPRTSVS

SEQ ID NO: 4902 - protein, 926 aa, Homo Sapiens
MASAVRGSRPWPRLGLQLQFAALLLGTLSPQVHTLRPENLLLVSTLDGSLHALSKQTGDLKWTLRDDPVIEGPMYVTEMAFLSDPADGSLYILGTQKQQGLMKLPFTIPELVHASPCRSSDGVFYTGRKQDAWFVVDPESGETQMTLTTEGPSTPRLYIGRTQYTVTMHDPRAPALRWNTTYRRYSAPPMDGSPGKYMSHLASCGMGLLLTVDPGSGTVLWTQDLGVPVMGVYTWHQDGLRQLPHLTLARDTLHFLALRWGHIRLPASGPRDTATLFSTLDTQLLMTLYVGKDETGFYVSKALVHTGVALVPRGLTLAPADGPTTDEVTLQVSGEREGSPSTAVRYPSGSVALPSQWLLIGHHELPPVLHTTMLRVHPTLGSGTAETRPPENTQAPAFFLELLSLSREKLWDSELHPEEKTPDSYLGLGPQDLLAASLTAVLLGGWILFVMRQQQPQVVEKQQETPLAPADFAHISQDAQSLHSGASRRSQKRLQSPSKQAQPLDDPEAEQLTVVGKISFNPKDVLGRGAGGTFVFRGQFEGRAVAVKRLLRECFGLVRREVQLLQESDRHPNVLRYFCTERGPQFHYIALELCRASLQEYVENPDLDRGGLEPEVVLQQLMSGLAHLHSLHIVHRDLKPGNILITGPDSQGLGRVVLSDFGLCKKLPAGRCSFSLHSGIPGTEGWMAPELLQLLPPDSPTSAVDIFSAGCVFYYVLSGGSHPFGDSLYRQANILTGAPCLAHLEEEVHDKVVARDLVGAMLSPLPQPRPSAPQVLAHPFFWSRAKQLQFFQDVSDWLEKESEQEPLVRALEAGGCAVVRDNWHEHISMPLQTDLRKFRSYKGTSVRDLLRAVRNKKHHYRELPVEVRQALGQVPDGFVQYFTNRFPRLLLHTHRAMRSCASESLFLPYYPPDSEARRPCPGATGR

SEQ ID NO: 4903 - protein, 874 aa, Homo Sapiens
MASAVRGSRPWPRLGLQLQFAALLLGTLSPQVHTLRPENLLLVSTLDGSLHALSKQTGDLKWTLRDDPVIEGPMYVTEMAFLSDPADGSLYILGTQKQQGLMKLPFTIPELVHASPCRSSDGVFYTGRKQDAWFVVDPESGETQMTLTTEGPSTPRLYIGRTQYTVTMHDPRAPALRWNTTYRRYSAPPMDGSPGKYMSHLASCGMGLLLTVDPGSGTVLWTQDLGVPVMGVYTWHQDGLRQLPHLTLARDTLHFLALRWGHIRLPASGPRDTATLFSTLDTQLLMTLYVGKDETGFYVSKALVHTGVALVPRGLTLAPADGPTTDEVTLQVSGEREGSPSTAVRYPSGSVALPSQWLLIGHHELPPVLHTTMLRVHPTLGSGTAETRPPENTQAPAFFLEQQPQVVEKQQETPLAPADFAHISQDAQSLHSGASRRSQKRLQSPSKQAQPLDDPEAEQLTVVGKISFNPKDVLGRGAGGTFVFRGQFEGRAVAVKRLLRECFGLVRREVQLLQESDRHPNVLRYFCTERGPQFHYIALELCRASLQEYVENPDLDRGGLEPEVVLQQLMSGLAHLHSLHIVHRDLKPGNILITGPDSQGLGRVVLSDFGLCKKLPAGRCSFSLHSGIPGTEGWMAPELLQLLPPDSPTSAVDIFSAGCVFYYVLSGGSHPFGDSLYRQANILTGAPCLAHLEEEVHDKVVARDLVGAMLSPLPQPRPSAPQVLAHPFFWSRAKQLQFFQDVSDWLEKESEQEPLVRALEAGGCAVVRDNWHEHISMPLQTDLRKFRSYKGTSVRDLLRAVRNKKHHYRELPVEVRQALGQVPDGFVQYFTNRFPRLLLHTHRAMRSCASESLFLPYYPPDSEARRPCPGATGR

SEQ ID NO: 4904 - protein, 169 aa, Homo Sapiens
MGRGWGFLFGLLGAVWLLSSGHGEEQPPETAAQRCFCQVNLKRPCPFWNDISQCGRRDCAVKPCQSDEVPDGIKSASYKYSEEANNLIEECEQAERLGAVDESLSEETQKAVLQWTKHDDSSDNFCEADDIQSPEAEYVDLLLNPERYTGYKGPDAWKIWNVIYEENCF

SEQ ID NO: 4905 - protein, 125 aa, Homo Sapiens
MGRGWGFLFGLLGAVWLLSSGHGEEQPPETAAQRCFCQVSGYLDDCTCDVETIDRFNNYRLFPRLQKLLESDYFRYYKVNLKRPCPFWNDISQCGRRDCAVKPCQSDEVPDGIKSASYKVCTYTY

SEQ ID NO: 4906 - protein, 257 aa, Homo Sapiens
MGRGWGFLFGLLGAVWLLSSGHGEEQPPETAAQRCFCQVSGYLDDCTCDVETIDRFNNYRLFPRLQKLLESDYFRYYKVNLKRPCPFWNDISQCGRRDCAVKPCQSDEVPDGIKSASYKYSEEANNLIEECEQAERLGAVDESLSEETQKAVLQWTKHDDSSDNFCEADDIQSPEAEYVDLLLNPERYTGYKGPDAWKIWNVIYEENCFKPQTIKRPLNPLASGQGKLLICVSLLFLRSLCRKKSILQTYIWPTCKH

SEQ ID NO: 4907 - protein, 257 aa, Homo Sapiens; identical to SEQ ID NO: 4906

SEQ ID NO: 4908 - protein, 257 aa, Homo Sapiens; identical to SEQ ID NO: 4906

SEQ ID NO: 4909 - protein, 468 aa, Homo Sapiens
MGRGWGFLFGLLGAVWLLSSGHGEEQPPETAAQRCFCQVSGYLDDCTCDVETIDRFNNYRLFPRLQKLLESDYFRYYKVNLKRPCPFWNDISQCGRRDCAVKPCQSDEVPDGIKSASYKYSEEANNLIEECEQAERLGAVDESLSEETQKAVLQWTKHDDSSDNFCEADDIQSPEAEYVDLLLNPERYTGYKGPDAWKIWNVIYEENCFKPQTIKRPLNPLASGQGTSEENTFYSWLEGLCVEKRAFYRLISGLHASINVHLSARYLLQETWLEKKWGHNITEFQQRFDGILTEGEGPRRLKNLYFLYLIELRALSKVLPFFERPDFQLFTGNKIQDEENKMLLLEILHEIKSFPLHFDENSFFAGDKKEAHKLKEDFRLHFRNISRIMDCVGCFKCRLWGKLQTQGLGTALKILFSEKLIANMPESGPSYEFHLTRQEIVSLFNAFGRISTSVKELENFRNLLQNIH

SEQ ID NO: 4910 - protein, 75 aa, Homo Sapiens
MLLLEILHEIKSFPLHFDENSFFAGDKKEAHKLKEDFRLHFRNISRIMDCVGCFKCRLWGKLQTQGLGTALKILF

SEQ ID NO: 4911 - protein, 71 aa, Homo Sapiens
MANNTKELEDCEQANKLGAINSTLSNQSKEAFIDWARYDDSRDHFCELDDERSPAAQYVDLLLNPERYTGY

SEQ ID NO: 4912 - protein, 467 aa, Homo Sapiens
MSQGVRRAGAGQGVAAAVQLLVTLSFLRSVVEAQVTGVLDDCLCDIDSIDNFNTYKIFPKIKKLQERDYFRYYKVNLKRPCPFWAEDGHCSIKDCHVEPCPESKIPVGIKAGHSNKYLKMANNTKELEDCEQANKLGAINSTLSNQSKEAFIDWARYDDSRDHFCELDDERSPAAQYVDLLLNPERYTGYKGTSAWRVWNSIYEENCFKPRSVYRPLNPLAPSRGEDDGESFYTWLEGLCLEKRVFYKLISGLHASINLHLCANYLLEETWGKPSWGPNIKEFKHRFDPVETKGEGPRRLKNLYFLYLIELRALSKVAPYFERSIVDLYTGNAEEDADTKTLLLNIFQDTKSFPMHFDEKSMFAGDKKGAKSLKEEFRLHFKNISRIMDCVGCDKCRLWGKLQTQGLGTALKILFSEKEIQKLPENSPSKGFQLTRQEIVALLNAFGRLSTSIRDLQNFKVLLQHSR

SEQ ID NO: 4913 - protein, 173 aa, Homo Sapiens
WGPNIKEFKHRFDPVETKGEGPRRLKNLYFLYLIELRALSKVAPYFERSIVDLYTGNAEEDADTKTLLLNIFQDTKSFPMHFDEKSMFAGDKKGAKSLKEEFRLHFKNISRIMDCVGCDKCRLWGKLQTQGLGTALKILFSEKEIQKLPENSPSKGFQLTRQEIVALLNAFGR

SEQ ID NO: 4914 - protein, 273 aa, Homo Sapiens
MEAAPSRFMFLLFLLTCELAAEVAAEVEKSSDGPGAAQEPTWLTDVPAAMEFIAATEVAVIGFFQDLEIPAVPILHSMVQKFPGVSFGISTDSEVLTHYNITGNTICLFRLVDNEQLNLEDEDIESIDATKLSRFIEINSLHMVTEYNPVTVIGLFNSVIQIHLLLIMNKASPEYEENMHRYQKAAKLFQGKILFILVDSGMKENGKVISFFKLKESQLPALAIYQTLDDEWDTLPTAEVSVEHVQNFCDGFLSGKLLKENRESEGKTPKVEL

SEQ ID NO: 4915 - protein, 172 aa, Homo Sapiens
MKETCQLEIQVDNEQLNLEDEDIESIDATKLSRFIEINSLHMVTEYNPVTVIGLFNSVIQIHLLLIMNKASPEYEENMHRYQKAAKLFQGKILFILVDSGMKENGKVISFFKLKESQLPALAIYQTLDDEWDTLPTAEVSVEHVQNFCDGFLSGKLLKENRESEGKTPKVEL

SEQ ID NO: 4916 - protein, 53 aa, Homo Sapiens
MAAAVPRAAFLSPLLPLLLGFLLLSAPHGGSGLHTKGALPLDTVTFYKIMVTS

SEQ ID NO: 4917 - protein, 261 aa, Homo Sapiens
MAAAVPRAAFLSPLLPLLLGFLLLSAPHGGSGLHTKGALPLDTVTFYKVIPKSKFVLVKFDTQYPYGEKQDEFKRLAENSASSDDLLVAEVGISDYGDKLNMELSEKYKLDKESYPVFYLFRDGDFENPVPYTGAVKVGAIQRWLKGQGVYLGMPGCLPVYDALAGEFIRASGVEARQALLKQGQDNLSSVKETQKKWAEQYLKIMGKILDQGEDFPASEMTRIARLIEKNKMSDGKKEELQKSLNILTAFQKKGAEKEEL

SEQ ID NO: 4918 - protein, 160 aa, Homo Sapiens
MELSEKYKLDKESYPVFYLFRDGDFENPVPYTGAVKVGAIQRWLKGQGVYLGMPGCLPVYDALAGEFIRASGVEARQALLKQGQDNLSSVKETQKKWAEQYLKIMGKILDQGEDFPASEMTRIARLIEKNKMSDGKKEELQKSLNILTAFQKKGAEKEEL

SEQ ID NO: 4919 - protein, 95 aa, Homo Sapiens
  misc_feature (1)..(1): Xaa can be any naturally occurring amino acid
XPAPHFSPRCFPFSWASCSSPLRMAAAACTPRAPFPWIRSLSTRGPLGRGISPKSPWNTHLLSSIRPQVIPKSKFVLVKFDTQYPYGEKQDEFKR

SEQ ID NO: 4920 - protein, 406 aa, Homo Sapiens
MHPAVFLSLPDLRCSLLLLVTWVFTPVTTEITSLDTENIDEILNNADVALVNFYADWCRFSQMLHPIFEEASDVIKEEFPNENQVVFARVDCDQHSDIAQRYRISKYPTLKLFRNGMMMKREYRGQRSVKALADYIRQQKSDPIQEIRDLAEITTLDRSKRNIIGYFEQKDSDNYRVFERVANILHDDCAFLSAFGDVSKPERYSGDNIIYKPPGHSAPDMVYLGAMTNFDVTYNWIQDKCVPLVREITFENGEELTEEGLPFLILFHMKEDTESLEIFQNEVARQLISEKGTINFLHADCDKFRHPLLHIQKTPADCPVIAIDSFRHMYVFGDFKDVLIPGKLKQFVFDLHSGKLHREFHHGPDPTDTAPGEQAQDVASSPPESSFQKLAPSEYRYTLLRDRDEL

SEQ ID NO: 4921 - protein, 604 aa, Homo Sapiens
MLGMNMLLITLFLLLPLSMLKGEPWEGCLHCTHTTWSGNIMTKTLLYHTYYECAGTCLGTCTHNQTTYSVCDPGRGQPYVCYDPKSSPGTWFEIHVGSKEGDLLNQTKVFPSGKDVVSLYFDVCQIVSMGSLFPVIFSSMEYYSSCHKNRYAHPACSTDSPVTTCWDCTTWSTNQQSLGPIMLTKIPLEPDCKTSTCNSVNLTILEPDQPIWTTGLKAPLGARVSGEEIGPGAYVYLYIIKKTRTRSTQQFRVFESFYEHVNQKLPEPPPLASNLFAQLAENIASSLHVASCYVCGGMNMGDQWPWEARELMPQDNFTLTASSLEPAPSSQSIWFLKTSIIGKFCIARWGKAFTDPVGELTCLGQQYYNETLGKTLWRGKSNNSESPHPSPFSRFPSLNHSWYQLEAPNTWQAPSGLYWICGPQAYRQLPAKWSGACVLGTIRPSFFLMPLKQGEALGYPIYDETKRKSKRGITIGDWKDNEWPPERIIQYYGPATWAEDGMWGYRTPVYMLNRIIRLQAVLEIITNETAGALNLLAQQATKMRNVIYQNRLALDYLLAQEEGVCGKFNLTNCCLELDDEGKVIKEITAKIQKLAHIPVQTWKG

SEQ ID NO: 4922 - protein, 89 aa, Homo Sapiens
MKSVLLLTTLLVPAHLVAAWSNNYAVDCPQHCDSSECKSSPRCKRTVLDDCGCCRVCAAGRGETCYRTVSGMDGMKCGPGLRCQPSNGE

SEQ ID NO: 4923 - protein, 184 aa, Homo Sapiens
MKSVLLLTTLLVPAHLVAAWSNNYAVDCPQHCDSSECKSSPRCKRTVLDDCGCCRVCAAGRGETCYRTVSGMDGMKCGPGLRCQPSNGEDPFGEEFGICKDCPYGTFGMDCRETCNCQSGICDRGTGKCLKFPFFQYSVTKSSNRFVSLTEHDMASGDGNIVREEVVKENAAGSPVMRKWLNPR

SEQ ID NO: 4924 - protein, 134 aa, Homo Sapiens
MKSVLLLTTLLVPAHLVAAWSNNYAVDCPQHCDSSECKSSPRCKRTVLDDCGCCRVCAAGRGETCYRTVSGMDGMKCGPGLRCQPSNGEDPFGEEFGICKEHDMASGDGNIVREEVVKENAAGSPVMRKWLNPR

SEQ ID NO: 4925 - protein, 522 aa, Homo Sapiens
EFKKCCPGSPDIDKLDVATMTEYLNFEKSSSVSRYGASQVEDMGNIILAMISEPYNHRFSDPERVNYKFESGTCSKMELIDDNTVVRARGLPWQSSDQDIARFFKGLNIAKGGAALCLNAQGRRNGEALVRFVSEEHRDLALQRHKHHMGTRYIEVYKATGEDFLKIAGGTSNEVAQFLSKENQVIVRMRGLPFTATAEEVVAFFGQHCPITGGKEGILFVTYPDGRPTGDAFVLFACEEYAQNALRKHKDLLGKRYIELFRSTAAEVQQVLNRFSSAPLIPLPTPPIIPVLPQQFVPPTNVRDCIRLRGLPYAATIEDILDFLGEFATDIRTHGVHMVLNHQGRPSGDAFIQMKSADRAFMAAQKCHKKNMKDRYVEVFQCSAEEMNFVLMGGTLNRNGLSPPPCKLPCLSPPSYTFPAPAAVIPTEAAIYQPSVILNPRALQPSTAYYPAGTQLFMNYTAYYPSPPGSPNSLGYFPTAANLSGVPPQPGTVVRMQGLAYNTGVKEILNFFQGYQCLKDVW

SEQ ID NO: 4926 - protein, 677 aa, Homo Sapiens
MTASPDYLVVLFGITAGATGAKLGSDEKELILLFWKVVDLANKKVGQLHEVLVRPDQLELTEDCKEETKIDVESLSSASQLDQALRQFNQSVSNELNIGVGTSFCLCTDGQLHVRQILHPEASKKNVLLPECFYSFFDLRKEFKKCCPGSPDIDKLDVATMTEYLNFEKSSSVSRYGASQVEDMGNIILAMISEPYNHRFSDPERVNYKFESGTCSKMELIDDNTVVRARGLPWQSSDQDIARFFKGLNIAKGGAALCLNAQGRRNGEALVRFVSEEHRDLALQRHKHHMGTRYIEVYKATGEDFLKIAGGTSNEVAQFLSKENQVIVRMRGLPFTATAEEVVAFFGQHCPITGGKEGILFVTYPDGRPTGDAFVLFACEEYAQNALRKHKDLLGKRYIELFRSTAAEVQQVLNRFSSAPLIPLPTPPIIPVLPQQFVPPTNVRDCIRLRGLPYAATIEDILDFLGEFATDIRTHGVHMVLNHQGRPSGDAFIQMKSADRAFMAAQKCHKKNMKDRYVEVFQCSAEEMNFVLMGGTLNRNGLSPPPCLSPPSYTFPAPAAVIPTEAAIYQPSVILNPRALQPSTAYYPAGTQLFMNYTAYYPSPPGSPNSLGYFPTAANLSGVPPQPGTVVRMQGLAYNTGVKEILNFFQGYQYATEDGLIHTNDQARTLPKEWVCI

SEQ ID NO: 4927 - protein, 681 aa, Homo Sapiens
MTASPDYLVVLFGITAGATGAKLGSDEKELILLFWKVVDLANKKVGQLHEVLVRPDQLELTEDCKEETKIDVESLSSASQLDQALRQFNQSVSNELNIGVGTSFCLCTDGQLHVRQILHPEASKKNVLLPECFYSFFDLRKEFKKCCPGSPDIDKLDVATMTEYLNFEKSSSVSRYGASQVEDMGNIILAMISEPYNHRFSDPERVNYKFESGTCSKMELIDDNTVVRARGLPWQSSDQDIARFFKGLNIAKGGAALCLNAQGRRNGEALVRFVSEEHRDLALQRHKHHMGTRYIEVYKATGEDFLKIAGGTSNEVAQFLSKENQVIVRMRGLPFTATAEEVVAFFGQHCPITGGKEGILFVTYPDGRPTGDAFVLFACEEYAQNALRKHKDLLGKRYIELFRSTAAEVQQVLNRFSSAPLIPLPTPPIIPVLPQQFVPPTNVRDCIRLRGLPYAATIEDILDFLGEFATDIRTHGVHMVLNHQGRPSGDAFIQMKSADRAFMAAQKCHKKNMKDRYVEVFQCSAEEMNFVLMGGTLNRNGLSPPPCKLPCLSPPSYTFPAPAAVIPTEAAIYQPSVILNPRALQPSTAYYPAGTQLFMNYTAYYPSPPGSPNSLGYFPTAANLSGVPPQPGTVVRMQGLAYNTGVKEILNFFQGYQYATEDGLIHTNDQARTLPKEWVCI

SEQ ID NO: 4928 - protein, 659 aa, Homo Sapiens
MTASPDYLVVLFGITAGATGAKLGSDEKELILLFWKVVDLANKKVGQLHEVLVRPDQLELTEDCKEETKIDVESLSSASQLDQALRQFNQSVSNELNIGVGTSFCLCTDGQLHVRQILHPEASKKNVLLPECFYSFFDLRKEFKKCCPGSPDIDKLDVATMTEYLNFEKSSSVSRYGASQVEDMGNIILAMISEPYNHRFSDPERVNYKFESGTCSKMELIDDNTVVRARGLPWQSSDQDIARFFKGLNIAKGGAALCLNAQGRRNGEALVRFVSEEHRDLALQRHKHHMGTRYIEVYKATGEDFLKIAGGTSNEVAQFLSKENQVIVRMRGLPFTATAEEVVAFFGQHCPITGGKEGILFVTYPDGRPTGDAFVLFACEEYAQNALRKHKDLLGKRYIELFRSTAAEVQQVLNRFSSAPLIPLPTPPIIPVLPQQFVPPTNVRDCIRLRGLPYAATIEDILDFLGEFATDIRTHGVHMVLNHQGRPSGDAFIQMKSADRAFMAAQKCHKKNMKDRYVEVFQCSAEEMNFVLMGGTLNRNGLSPPPCLSPPSYTFPAPAAVIPTEAAIYQPSVILNPRALQPSTAYYPAGTQLFMNYTAYYPSPPGSPNSLGYFPTAANLSGVPPQPGTVVRMQGLAYNTGVKEILNFFQGYQCLKDVW

SEQ ID NO: 4929 - protein, 604 aa, Homo Sapiens
MTASPDYLVVLFGITAGATGAKLGSDEKELILLFWKVVDLANKKVGQLHEVLVRPDQLELTEDCKEETKIDVESLSSASQLDQALRQFNQSVSNELNIGVGTSFCLCTDGQLHVRQILHPEASKKNVLLPECFYSFFDLRKEFKKCCPGSPDIDKLDVATMTEYLNFEKSSSVSRYGASQVEDMGNIILAMISEPYNHRFSDPERVNYKFESGTCSKMELIDDNTVVRARGLPWQSSDQDIARFFKGLNIAKGGAALCLNAQGRRNGEALVRFVSEEHRDLALQRHKHHMGTRYIEVYKATGEDFLKIAGGTSNEVAQFLSKENQVIVRMRGLPFTATAEEVVAFFGQHCPITGGKEGILFVTYPDGRPTGDAFVLFACEEYAQNALRKHKDLLGKRYIELFRSTAAEVQQVLNRFSSAPLIPLPTPPIIPVLPQQFVPPTNVRDCIRLRGLPYAATIEDILDFLGEFATDIRTHGVHMVLNHQGRPSGDAFIQMKSADRAFMAAQKCHKKNMKDRYVEVFQCSAEEMNFVLMGGTLNRNGLSPPPCLSPPSYTFPAPAAVIPTEAAIYQPSVILNPRALQPSTAYYPAGTQLFMNYTAYYPSV

SEQ ID NO: 4930 - protein, 681 aa, Homo Sapiens; identical to SEQ ID NO: 4927

SEQ ID NO: 4931 - protein, 608 aa, Homo Sapiens
MTASPDYLVVLFGITAGATGAKLGSDEKELILLFWKVVDLANKKVGQLHEVLVRPDQLELTEDCKEETKIDVESLSSASQLDQALRQFNQSVSNELNIGVGTSFCLCTDGQLHVRQILHPEASKKNVLLPECFYSFFDLRKEFKKCCPGSPDIDKLDVATMTEYLNFEKSSSVSRYGASQVEDMGNIILAMISEPYNHRFSDPERVNYKFESGTCSKMELIDDNTVVRARGLPWQSSDQDIARFFKGLNIAKGGAALCLNAQGRRNGEALVRFVSEEHRDLALQRHKHHMGTRYIEVYKATGEDFLKIAGGTSNEVAQFLSKENQVIVRMRGLPFTATAEEVVAFFGQHCPITGGKEGILFVTYPDGRPTGDAFVLFACEEYAQNALRKHKDLLGKRYIELFRSTAAEVQQVLNRFSSAPLIPLPTPPIIPVLPQQFVPPTNVRDCIRLRGLPYAATIEDILDFLGEFATDIRTHGVHMVLNHQGRPSGDAFIQMKSADRAFMAAQKCHKKNMKDRYVEVFQCSAEEMNFVLMGGTLNRNGLSPPPCKLPCLSPPSYTFPAPAAVIPTEAAIYQPSVILNPRALQPSTAYYPAGTQLFMNYTAYYPSV

SEQ ID NO: 4932 - protein, 502 aa, Homo Sapiens
  misc_feature (1)..(1): Xaa can be any naturally occurring amino acid
XFFDLRKEFKKCCPGSPDIDKLDVATMTEYLNFEKSSSVSRYGASQVEDMGNIILAMISEPYNHRFSDPERVNYKFESGTCSKMELIDDNTVVRARGLPWQSSDQDIARFFKGLNIAKGGAALCLNAQGRRNGEALVRFVSEEHRDLALQRHKHHMGTRYIEVYKATGEDFLKIAGGTSNEVAQFLSKENQVIVRMRGLPFTATAEEVVAFFGQHCPITGGKEGILFVTYPDGRPTGDAFVLFACEEYAQNALRKHKDLLGKRYIELFRSTAAEVQQVLNRFSSAPLIPLPTPPIIPVLPQQFVPPTNVRDCIRLRGLPYAATIEDILDFLGEFATDIRTHGVHMVLNHQGRPSGDAFIQMKSADRAFMAAQKCHKKNMKDRYVEVFQCSAEEMNFVLMGGTLNRNGLSPPPCKLPCLSPPSYTFPAPAAVIPTEAAIYQPSVILNPRALQPSTAYYPAGTQLFMNYTAYYPSMQPRMDLYTQMTRPGLYPKNGFVFKGPSS

SEQ ID NO: 4933 - protein, 40 aa, Homo Sapiens
  misc_feature (1)..(1): Xaa can be any naturally occurring amino acid
XLLPECFYSFFDLRKEFKKCCPGSPDIDKLDVATMTECIL

SEQ ID NO: 4934 - protein, 56 aa, Homo Sapiens
MAIKSIASRLRGSRRFLSGFVAGAVVGAAGAGLAALQFFRSQGAEGALTGKQPDDC

SEQ ID NO: 4935 - protein, 56 aa, Homo Sapiens; identical to SEQ ID NO: 4934

SEQ ID NO: 4936 - protein, 56 aa, Homo Sapiens; identical to SEQ ID NO: 4934

SEQ ID NO: 4937 - protein, 56 aa, Homo Sapiens; identical to SEQ ID NO: 4934

SEQ ID NO: 4938 - protein, 56 aa, Homo Sapiens; identical to SEQ ID NO: 4934

SEQ ID NO: 4939 - protein, 318 aa, Homo Sapiens
MAIKSIASRLRGSRRFLSGFVAGAVVGAAGAGLAALQFFRSQGAEGALTGKQPDGDADRKHCKFKPDPNIPPTFSAFNEDYVGSGWSRGHMAPAGNNKFSSKAMAETFYLSNIVPQDFDNNSGYWNRIEMYCRELTERFEDVWVVSGPLTLPQTRGDGKKIVSYQVIGEDNVAVPSHLYKVILARRSSVSTEPLALGAFVVPNEAIGFQPQLTEFQVSLQDLEKLSGLVFFPHLDRTSDIRNICSVDTCKLLDFQEFTLYLSTRKIEGARSVLRLEKIMENLKNAEIEPDDYFMSRYEKKLEELKAKEQSGTQIRKPS

SEQ ID NO: 4940 - protein, 368 aa, Homo Sapiens
MAIKSIASRLRGSRRFLSGFVAGAVVGAAGAGLAALQFFRSQGAEGALTGKQPDGSAEKAVLEQFGFPLTGTEARCYTNHALSYDQAKRVPRWVLEHISKSKIMGDADRKHCKFKPDPNIPPTFSAFNEDYVGSGWSRGHMAPAGNNKFSSKAMAETFYLSNIVPQDFDNNSGYWNRIEMYCRELTERFEDVWVVSGPLTLPQTRGDGKKIVSYQVIGEDNVAVPSHLYKVILARRSSVSTEPLALGAFVVPNEAIGFQPQLTEFQVSLQDLEKLSGLVFFPHLDRTSDIRNICSVDTCKLLDFQEFTLYLSTRKIEGARSVLRLEKIMENLKNAEIEPDDYFMSRYEKKLEELKAKEQSGTQIRKPS

SEQ ID NO: 4941 - protein, 143 aa, Homo Sapiens
MAIKSIASRLRGSRRFLSGFVAGAVVGAAGAGLAALQFFRSQGAEGALTGKQPDGSAEKAVLEQFGFPLTGTEARCYTNHALSYDQAKRVPRWVLEHISKSKIMGRFFKFTLLASLFLLSLNLHLWLVLNFWVQVTLLPQPPE

SEQ ID NO: 4942 - protein, 107 aa, Homo Sapiens
MAIKSIASRLRGSRRFLSGFVAGAVVGAAGAGLAALQFFRSQGAEGALTGKQPDGSAEKAVLEQFGFPLTGTEARCYTNHALSYDQAKRVPRWVLEHISKSKIMGWS

SEQ ID NO: 4943 - protein, 81 aa, Homo Sapiens
MAIKSIASRLRGSRRFLSGFVAGAVVGAAGAGLAALQFFRSQGAEGALTGKQPDGSAEKAVLEQFGFPLTGTEVDSSSLHS

SEQ ID NO: 4944 - protein, 146 aa, Homo Sapiens
MAIKSIASRLRGSRRFLSGFVAGAVVGAAGAGLAALQFFRSQGAEGALTGKQPDGSAEKAVLEQFGFPLTGTEVMQTESIVNLSLIPISLQPSVPSMKIMLEVGGHEDTWLQQEITNFQVKPWLKPFTFLTLCLRILIIILDIGTE

SEQ ID NO: 4945 - protein, 107 aa, Homo Sapiens
RSQGAEGALTGKQPDGSAEKAVLEQFGFPLTGTEVMQTESIVNLSLIPISLQPSVPSMKIMLEVGGHEDTWLQQEITNFQVKPWLKPFTFLTLCLRILIIILDIGTE

SEQ ID NO: 4946 - protein, 187 aa, Homo Sapiens
  misc_feature (1)..(1): Xaa can be any naturally occurring amino acid
XFRSQGAEGALTGKQPDGSAEKAVLEQFGFPLTGTEARCYTNHALSYDQAKRVPRWVLEHISKSKIMGDADRKHCKFKPDPNIPPTFSAFNEDYVGSGWSRGHMAPAGNNKFSSKAMAETFYLSNIVPQDFDNNSGYWNRIEMYCRELTERFEDVWVVSGPLTLPQTRGDGKKIVSYQSWEYPSLQF

SEQ ID NO: 4947 - protein, 15 aa, Homo Sapiens
  misc_feature (1)..(1): Xaa can be any naturally occurring amino acid
XGAEGALTGKQPDDC

SEQ ID NO: 4948 - protein, 676 aa, Homo Sapiens
MQSWRRRKSLWLALSASWLLLVLLGGFSLLRLALPPRPRPGASQGWPRWLDAELLQSFSQPGELPEDAVSPPQAPHGGSCNWESCFDTSKCRGDGLKVFVYPAVGTISETHRRILASIEGSRFYTFSPAGACLLLLLSLDAQTGECSSMPLQWNRGRNHLVLRLHPAPCPRTFQLGQAMVAEASPTVDSFRPGFDVALPFLPEAHPLRGGAPGQLRQHSPQPGVALLALEEERGGWRTADTGSSACPWDGRCEQDPGPGQTQRQETLPNATFCLISGHRPEAASRFLQALQAGCIPVLLSPRWELPFSEVIDWTKAAIVADERLPLQVLAALQEMSPARVLALRQQTQFLWDAYFSSVEKVIHTTLEVIQDRIFGTSAHPSLLWNSPPGALLALSTFSTSPQDFPFYYLQQGSRPEGRFSALIWVGPPGQPPLKLIQAVAGSQHCAQILVLWSNERPLPSRWPETAVPLTVIDGHRKVSDRFYPYSTIRTDAILSLDARSSLSTSEVDFAFLVWQSFPERMVGFLTSSHFWDEAHGGWGYTAERTNEFSMVLTTAAFYHRYYHTLFTHSLPKALRTLADEAPTCVDVLMNFIVAAVTKLPPIKVPYGKQRQEAAPLAPGGPGPRPKPPAPAPDCINQIAAAFGHMPLLSSRLRLDPVLFKDPVSVQRKKYRSLEKP

SEQ ID NO: 4949 - protein, 117 aa, Homo Sapiens
MGIRVLRLSLVVILVLLLVAGALTALLPSVKEDKMLMLRREIKSQGKSTMDSFTLIMQTYNRTDLLLKLLNHYQAVPNLHKVIVVWNNIGEKAPDELWNSLGPHPIPVIFKQQTANR

SEQ ID NO: 4950 - protein, 147 aa, Homo Sapiens
MRCCHICKLPGRVMGIRVLRLSLVVILVLLLVAGALTALLPSVKEDKMLMLRREIKSQGKSTMDSFTLIMQTYNRTDLLLKLLNHYQAVPNLHKVIVVWNNIGEKAPDELWNSLGPHPIPVIFKQQTANRMRNRLQVFPELETNAIS

SEQ ID NO: 4951 - protein, 330 aa, Homo Sapiens
MRCCHICKLPGRVMGIRVLRLSLVVILVLLLVAGALTALLPSVKEDKMLMLRREIKSQGKSTMDSFTLIMQTYNRTDLLLKLLNHYQAVPNLHKVIVVWNNIGEKAPDELWNSLGPHPIPVIFKQQTANRMRNRLQVFPELETNAVLMVDDDTLISTPDLVFAFSVWQQFPDQIVGFVPRKHVSTSSGIYSYGSFEMQAPGSGNGDQYSMVLIGASFFNSKYLELFQRQPAAVHALIDDTQNCDDIAMNFIIAKHIGKTSGIFVKPVNMDNLEKETNSGYSGMWHRAEHALQRSYCINKLVNIYDSMPLRYSNIMISQFGFPYANYKRKI

SEQ ID NO: 4952 - protein, 330 aa, Homo Sapiens; identical to SEQ ID NO: 4951

SEQ ID NO: 4953 - protein, 266 aa, Homo Sapiens
MRTWNSGGTKCCHICKLPGRVMGIRVLRLSLVVILVLLLVAGALTALLPSVKEDKMLMLRREIKSQGKSTMDSFTLIMQTYNRTDLLLKLLNHYQAVPNLHKVIVVWNNIGEKAPDELWNSLGPHPIPVIFKQQTANRMRNRLQVFPELETNAVLMVDDDTLISTPDLVFAFSVWQQFPDQIVGFVPRKHVSTSSGIYSYGSFEMQAPGSGNGDQYSMVLIGASFFNSKYLELFQRQPAAVHALIDDTQNCDDIAMNFIIAKHIGK

SEQ ID NO: 4954 - protein, 130 aa, Homo Sapiens
MGRPLHLVLLSASLAGLLLLGESLFIRREQANNILARVTRANSFLEEMKKGHLERECMEETCSYEEAREVFEDSDKTNEFWNKYKDGDQCETSPCQNQGKCKDGLGEYTCTCLEGFEGKNCELCMLIFAL

SEQ ID NO: 4955 - protein, 334 aa, Homo Sapiens
MGRPLHLVLLSASLAGLLLLGESLFIRREQANNILARVTRANSFLEEMKKGHLERECMEETCSYEEAREVFEDSDKTNEFWNKYKDGDQCETSPCQNQGKCKDGLGEYTCTCLEGFEGKNCELFTRKLCSLDNGDCDQFCHEEQNSVVCSCARGYTLADNGKACIPTGPYPCGKQTLERRKRSVAQATSSSGEAPDSITWKPYDAADLDPTENPFDLLDFNQTQPERGDNNLTRIVGGQECKDGECPWQALLINEENEGFCGGTILSEFYILTAAHCLYQAKRFKVRGTGTRSRRRAVRRCTRWRWSSSTTGSQRRPMTSTSPCSGSRPPSPSA

SEQ ID NO: 4956 - protein, 332 aa, Homo Sapiens
MGRPLHLVLLSASLAGLLLLGESLFIRREQANNILARVTRANSFLEEMKKGHLERECMEETCSYEEAREVFEDSDKTNEFWNKYKDGDQCETSPCQNQGKCKDGLGEYTCTCLEGFEGKNCELFTRKLCSLDNGDCDQFCHEEQNSVVCSCARGYTLADNGKACIPTGPYPCGKQTLERRKRSVAQATSSSGEAPDSITWKPYDAADLDPTENPFDLLDFNQTQPERGDNNLTRIVGGQECKDGECPWQALLINEENEGFCGGTILSEFYILTAAHCLYQAKRFKGTGTRSRRRAVRRCTRWRWSSSTTGSQRRPMTSTSPCSGSRPPSPSA

SEQ ID NO: 4957 - protein, 488 aa, Homo Sapiens
MGRPLHLVLLSASLAGLLLLGESLFIRREQANNILARVTRANSFLEEMKKGHLERECMEETCSYEEAREVFEDSDKTNEFWNKYKDGDQCETSPCQNQGKCKDGLGEYTCTCLEGFEGKNCELFTRKLCSLDNGDCDQFCHEEQNSVVCSCARGYTLADNGKACIPTGPYPCGKQTLERRKRSVAQATSSSGEAPDSITWKPYDAADLDPTENPFDLLDFNQTQPERGDNNLTRIVGGQECKDGECPWQALLINEENEGFCGGTILSEFYILTAAHCLYQAKRFKVRVGDRNTEQEEGGEAVHEVEVVIKHNRFTKETYDFDIAVLRLKTPITFRMNVAPACLPERDWAESTLMTQKTGIVSGFGRTHEKGRQSTRLKMLEVPYVDRNSCKLSSSFIITQNMFCAGYDTKQEDACQGDSGGPHVTRFKDTYFVTGIVSWGEGCARKGKYGIYTKVTAFLKWIDRSMKTRGLPKAKSHAPEVITSSPLK

SEQ ID NO: 4958 - protein, 162 aa, Homo Sapiens
MIFLYQVVHFILFTSVSGECVTQLLKDTCFEGGDITTVFTPSAKYCQVVCTYHPRCLLFTFTAESPSEDPTRWFTCVLKDSVTETLPRVNRTAAISGYSFKQCSHQISACNKDIYVDLDMKGINYNSSVAKSAQECQERCTDDVHCHFFTYATRQFPSLEHR

SEQ ID NO: 4959 - protein, 625 aa, Homo Sapiens
MIFLYQVVHFILFTSVSGECVTQLLKDTCFEGGDITTVFTPSAKYCQVVCTYHPRCLLFTFTAESPSEDPTRWFTCVLKDSVTETLPRVNRTAAISGYSFKQCSHQISACNKDIYVDLDMKGINYNSSVAKSAQECQERCTDDVHCHFFTYATRQFPSLEHRNICLLKHTQTGTPTRITKLDKVVSGFSLKSCALSNLACIRDIFPNTVFADSNIDSVMAPDAFVCGRICTHHPGCLFFTFFSQEWPKESQRNLCLLKTSESGLPSTRIKKSKALSGFSLQSCRHSIPVFCHSSFYHDTDFLGEELDIVAAKSHEACQKLCTNAVRCQFFTYTPAQASCNEGKGKCYLKLSSNGSPTKILHGRGGISGYTLRLCKMDNECTTKIKPRIVGGTASVRGEWPWQVTLHTTSPTQRHLCGGSIIGNQWILTAAHCFYGVESPKILRVYSGILNQSEIKEDTSFFGVQEIIIHDQYKMAESGYDIALLKLETTVNYTDSQRPICLPSKGDRNVIYTDCWVTGWGYRKLRDKIQNTLQKAKIPLVTNEECQKRYRGHKITHKMICAGYREGGKDACKGDSGGPLSCKHNEVWHLVGITSWGEGCAQRERPGVYTNVVEYVDWILEKTQAV

SEQ ID NO: 4960 - protein, 571 aa, Homo Sapiens
MIFLYQVVHFILFTSVSGECVTQLLKDTCFEGGDITTVFTPSAKYCQVVCTYHPRCLLFTFTAESPSEDPTRWFTCVLKDSVTETLPRVNRTAAISGYSFKQCSHQISNICLLKHTQTGTPTRITKLDKVVSGFSLKSCALSNLACIRDIFPNTVFADSNIDSVMAPDAFVCGRICTHHPGCLFFTFFSQEWPKESQRNLCLLKTSESGLPSTRIKKSKALSGFSLQSCRHSIPVFCHSSFYHDTDFLGEELDIVAAKSHEACQKLCTNAVRCQFFTYTPAQASCNEGKGKCYLKLSSNGSPTKILHGRGGISGYTLRLCKMDNECTTKIKPRIVGGTASVRGEWPWQVTLHTTSPTQRHLCGGSIIGNQWILTAAHCFYGVESPKILRVYSGILNQSEIKEDTSFFGVQEIIIHDQYKMAESGYDIALLKLETTVNYTDSQRPICLPSKGDRNVIYTDCWVTGWGYRKLRDKIQNTLQKAKIPLVTNEECQKRYRGHKITHKMICAGYREGGKDACKGDSGGPLSCKHNEVWHLVGITSWGEGCAQRERPGVYTNVVEYVDWILEKTQAV

SEQ ID NO: 4961 - protein, 210 aa, Homo Sapiens
  misc_feature (1)..(1): Xaa can be any naturally occurring amino acid
XSGFSLKSCALSNLACIRDIFPNTVFADSNIDSVMAPDAFVCGRICTHHPGCLFFTFFSQEWPKESQRNLCLLKTSESGLPSTRIKKSKALSGFSLQSCRHSIPVFCHSSFYHDTDFLGEELDIVAAKSHEACQKLCTNAVRCQFFTYTPAQASCNEGKGKCYLKLSSNGSPTKILHGRGGISGYTLRLCKMDNELRGAPMKISGWLKTS

SEQ ID NO: 4962 - protein, 159 aa, Homo Sapiens
  misc_feature (1)..(1): Xaa can be any naturally occurring amino acid
XVESPKILRVYSGILNQSEIKEDTSFFGVQEIIIHDQYKMAESGYDIALLKLETTVNYTDKIQNTLQKAKIPLVTNEECQKRYRGHKITHKMICAGYREGGKDACKGDSGGPLSCKHNEVWHLVGITSWGEGCAQRERPGVYTNVVEYVDWILEKTQAV

SEQ ID NO: 4963 - protein, 615 aa, Homo Sapiens
MRALLLLGFLLVSLESTLSIPPWEAPKEHKYKAEEHTVVLTVTGEPCHFPFQYHRQLYHKCTHKGRPGPQPWCATTPNFDQDQRWGYCLEPKKVKDHCSKHSPCQKGGTCVNMPSGPHCLCPQHLTGNHCQKEKCFEPQLLRFFHKNEIWYRTEQAAVARCQCKGPDAHCQRLASQACRTNPCLHGGRCLEVEGHRLCHCPVGYTGAFCDVDTKASCYDGRGLSYRGLARTTLSGAPCQPWASEATYRNVTAEQARNWGLGGHAFCRNPDNDIRPWCFVLNRDRLSWEYCDLAQCQTPTQAAPPTPVSPRLHVPLMPAQPAPPKPQPTTRTPPQSQTPGALPAKREQPPSLTRNGPLSCGQRLRKSLSSMTRVVGGLVALRGAHPYIAALYWGHSFCAGSLIAPCWVLTAAHCLQDRPAPEDLTVVLGQERRNHSCEPCQTLAVRSYRLHEAFSPVSYQHDLALLRLQEDADGSCALLSPYVQPVCLPSGAARPSETTLCQVAGWGHQFEGAEEYASFLQEAQVPFLSLERCSAPDVHGSSILPGMLCAGFLEGGTDACQGDSGGPLVCEDQAAERRLTLQGIISWGSGCGDRNKPGVYTDVAYYLAWIREHTVS

SEQ ID NO: 4964 - protein, 661 aa, Homo Sapiens
MRLKNLTFIIILIISGELYAEEKPCGFPHVENGRIAQYYYTFKSFYFPMSIDKKLSFFCLAGYTTESGRQEEQTTCTTEGWSPEPRCFKKCTKPDLSNGYISDVKLLYKIQENMRYGCASGYKTTGGKDEEVVQCLSDGWSSQPTCRKEHETCLAPELYNGNYSTTQKTFKVKDKVQYECATGYYTAGGKKTEEVECLTYGWSLTPKCTKLKCSSLRLIENGYFHPVKQTYEEGDVVQFFCHENYYLSGSDLIQCYNFGWYPESPVCEGRRNRCPPPPLPINSKIQTHSTTYRHGEIVHIECELNFEIHGSAEIRCEDGKWTEPPKCIEGQEKVACEEPPFIENGAANLHSKIYYNGDKVTYACKSGYLLHGSNEITCNRGKWTLPPECVENNENCKHPPVVMNGAVADGILASYATGSSVEYRCNEYYLLRGSKISRCEQGKWSSPPVCLEPCTVNVDYMNRNNIEMKWKYEGKVLHGDLIDFVCKQGYDLSPLTPLSELSVQCNRGEVKYPLCTRKESKGMCTSPPLIKHGVIISSTVDTYENGSSVEYRCFDHHFLEGSREAYCLDGMWTTPPLCLEPCTLSFTEMEKNNLLLKWDFDNRPHILHGEYIEFICRGDTYPAELYITGSILRMQCDRGQLKYPRCIPRQSTLSYQEPLRT

SEQ ID NO: 4965 - protein, 622 aa, Homo Sapiens
MAHVRGLQLPGCLALAALCSLVHSQHVFLAPQQARSLLQRVRRANTFLEEVRKGNLERECVEETCSYEEAFEALESSTATDVFWAKYTACETARTPRDKLAACLEGNCAEGLGTNYRGHVNITRSGIECQLWRSRYPHKPEINSTTHPGADLQENFCRNPDSSTTGPWCYTTDPTVRRQECSIPVCGQDQVTVAMTPRSEGSSVNLSPPLEQCVPDRGQQYQGRLAVTTHGLPCLAWASAQAKALSKHQDFNSAVQLVENFCRNPDGDEEGVWCYVAGKPGDFGYCDLNYCEEAVEEETGDGLDEDSDRAIEGRTATSEYQTFFNPRTFGSGEADCGLRPLFEKKSLEDKTERELLESYIDGRIVEGSDAEIGMSPWQVMLFRKSPQELLCGASLISDRWVLTAAHCLLYPPWDKNFTENDLLVRIGKHSRTRYERNIEKISMLEKIYIHPRYNWRENLDRDIALMKLKKPVAFSDYIHPVCLPDRETAASLLQAGYKGRVTGWGNLKETWTANVGKGQPSVLQVVNLPIVERPVCKDSTRIRITDNMFCAGYKPDEGKRGDACEGDSGGPFVMKSPFNNRWYQMGIVSWGEGCDRDGKYGFYTHVFRLKKWIQKVIDQFGE

SEQ ID NO: 4966 - protein, 583 aa, Homo Sapiens
MAHVRGLQLPGCLALAALCSLVHSQHVFLAPQQARSLLQRVRRANTFLEEVRKGNLERECVEETCSYEEAFEALESSTATDVFWAKYTACETARTPRDKLAACLEGNCAEGLGTNYRGHVNITRSGIECQLWRSRYPHKPEINSTTHPGADLQENFCRNPDSSTTGPWCYTTDPTVRRQECSIPVCGQDQVTVAMTPRSEGSSVNLSPPLEQCVPDRGQQYQGRLAVTTHGLPCLAWASAQAKALSKHQDFNSAVQLVENFCRNPDGDEEGVWCYVAGKPGDFGYCDLNYCEEAVEEETGDGLDEDSDRAIEGRTATSEYQTFFNPRTFGSGEADCGLRPLFEKKSLEDKTERELLESYIDGRIVEGSDAEIGMSPWQVMLFRKSPQELLCGASLISDRWVLTAAHCLLYPPWDKNFTENDLLVRIGKHSRTRYERNIEKISMLEKIYIHPSLLQAGYKGRVTGWGNLKETWTANVGKGQPSVLQVVNLPIVERPVCKDSTRIRITDNMFCAGYKPDEGKRGDACEGDSGGPFVMKSPFNNRWYQMGIVSWGEGCDRDGKYGFYTHVFRLKKWIQKVIDQFGE

SEQ ID NO: 4967 - protein, 324 aa, Homo Sapiens
MGWGLLAGQSTQSWPLMFLAPQQARSLLQRVRRANTFLEEVRKGNLERECVEETCSYEEAFEALESSTATDVFWAKYTACETARTPRDKLAACLEGNCAEGLGTNYRGHVNITRSGIECQLWRSRYPHKPEINSTTHPGADLQENFCRNPDSSTTGPWCYTTDPTVRRQECSIPVCGQDQVTVAMTPRSEGSSVNLSPPLEQCVPDRGQQYQGRLAVTTHGLPCLAWASAQAKALSKHQDFNSAVQLVENFCRNPDGDEEGVWCYVAGKPGDFGYCDLNYCEEAVEEETGDGLDEDSDRAIEGRTATSEYQTFFNPRTFGSGEA

SEQ ID NO: 4968 - protein, 425 aa, Homo Sapiens
MGPRRLLLVAACFSLCGPLLSARTRARRPESKATNATLDPRSFLLRNPNDKYEPFWEDEEKNESGLTEYRLVSINKSSPLQKQLPAFISEDASGYLTSSWLTLFVPSVYTGVFVVSLPLNIMAIVVFILKMKVKKPAVVYMLHLATADVLFVSVLPFKISYYFSGSDWQFGSELCRFVTAAFYCNMYASILLMTVISIDRFLAVVYPMQSLSWRTLGRASFTCLAIWALAIAGVVPLLLKEQTIQVPGLNITTCHDVLNETLLEGYYAYYFSAFSAVFFFVPLIISTVCYVSIIRCLSSSAVANRSKKSRALFLSAAVFCIFIICFGPTNVLLIAHYSFLSHTSTTEAAYFAYLLCVCVSSISCCIDPLIYYYASSECQRYVYSILCCKESSDPSSYNSSGQLMASKMDTCSSNLNNSIYKKLLT

SEQ ID NO: 4969 - protein, 102 aa, Homo Sapiens
MGPRRLLLVAACFSLCGPLLSARTRARRPVTFRWGVPPPSRAQPMPLWTRSWRVQPACHGVLDMEEDGAEAPWGSLQSCVALVIVFLPGPPPKRKALTLLHQ

SEQ ID NO: 4970 - protein, 113 aa, Homo Sapiens
MWGRLLLWPLVLGFSLSGGTQTPSVYDESGSTGGGDARPQSCLPPAATQAKSVPMTVTPWSSRTAHGHCFWAGCPPGWCPPSMGWSWWWGCRPMGWRCGCWPRRHLGCPPPCC

SEQ ID NO: 4971 - protein, 385 aa, Homo Sapiens
MWGRLLLWPLVLGFSLSGGTQTPSVYDESGSTGGGDDSTPSILPAPRGYPGQVCANDSDTLELPDSSRALLLGWVPTRLVPALYGLVLVVGLPANGLALWVLATQAPRLPSTMLLMNLAAADLLLALALPPRIAYHLRGQRWPFGEAACRLATAALYGHMYGSVLLLAAVSLDRYLALVHPLRARALRGRRLALGLCMAAWLMAAALALPLTLQRQTFRLARSDRVLCHDALPLDAQASHWQPAFTCLALLGCFLPLLAMLLCYGATLHTLAASGRRYGHALRLTAVVLASAVAFFVPSNLLLLLHYSDPSPSAWGNLYGAYVPSLALSTLNSCVDPFIYYYVSAEFRDKVRAGLFQRSPGDTVASKASAEGGSRGMGTHSSLLQ

SEQ ID NO: 4972 - protein, 2224 aa, Homo Sapiens
MFPGCPRLWVLVVLGTSWVGWGSQGTEAAQLRQFYVAAQGISWSYRPEPTNSSLNLSVTSFKKIVYREYEPYFKKEKPQSTISGLLGPTLYAEVGDIIKVHFKNKADKPLSIHPQGIRYSKLSEGASYLDHTFPAEKMDDAVAPGREYTYEWSISEDSGPTHDDPPCLTHIYYSHENLIEDFNSGLIGPLLICKKGTLTEGGTQKTFDKQIVLLFAVFDESKSWSQSSSLMYTVNGYVNGTMPDITVCAHDHISWHLLGMSSGPELFSIHFNGQVLEQNHHKVSAITLVSATSTTANMTVGPEGKWIISSLTPKHLQAGMQAYIDIKNCPKKTRNLKKITREQRRHMKRWEYFIAAEEVIWDYAPVIPANMDKKYRSQHLDNFSNQIGKHYKKVMYTQYEDESFTKHTVNPNMKEDGILGPIIRAQVRDTLKIVFKNMASRPYSIYPHGVTFSPYEDEVNSSFTSGRNNTMIRAVQPGETYTYKWNILEFDEPTENDAQCLTRPYYSDVDIMRDIASGLIGLLLICKSRSLDRRGIQRAADIEQQAVFAVFDENKSWYLEDNINKFCENPDEVKRDDPKFYESNIMSTINGYVPESITTLGFCFDDTVQWHFCSVGTQNEILTIHFTGHSFIYGKRHEDTLTLFPMRGESVTVTMDNVGTWMLTSMNSSPRSKKLRLKFRDVKCIPDDDEDSYEIFEPPESTVMATRKMHDRLEPEDEESDADYDYQNRLAAALGIRSFRNSSLNQEEEEFNLTALALENGTEFVSSNTDIIVGSNYSSPSNISKFTVNNLAEPQKAPSHQQATTAGSPLRHLIGKNSVLNSSTAEHSSPYSEDPIEDPLQPDVTGIRLLSLGAGEFKSQEHAKHKGPKVERDQAAKHRFSWMKLLAHKVGRHLSQDTGSPSGMRPWEDLPSQDTGSPSRMRPWKDPPSDLLLLKQSNSSKILVGRWHLASEKGSYEIIQDTDEDTAVNNWLISPQNASRAWGESTPLANKPGKQSGHPKFPRVRHKSLQVRQDGGKSRLKKSQFLIKTRKKKKEKHTHHAPLSPRTFHPLRSEAYNTFSERRLKHSLVLHKSNETSLPTDLNQTLPSMDFGWIASLPDHNQNSSNDTGQASCPPGLYQTVPPEEHYQTFPIQDPDQMHSTSDPSHRSSSPELSEMLEYDRSHKSFPTDISQMSPSSEHEVWQTVISPDLSQVTLSPELSQTNLSPDLSHTTLSPELIQRNLSPALGQMPISPDLSHTTLSPDLSHTTLSLDLSQTNLSPELSQTNLSPALGQMPLSPDLSHTTLSLDFSQTNLSPELSHMTLSPELSQTNLSPALGQMPISPDLSHTTLSLDFSQTNLSPELSQTNLSPALGQMPLSPDPSHTTLSLDLSQTNLSPELSQTNLSPDLSEMPLFADLSQIPLTPDLDQMTLSPDLGETDLSPNFGQMSLSPDLSQVTLSPDISDTTLLPDLSQISPPPDLDQIFYPSESSQSLLLQEFNESFPYPDLGQMPSPSSPTLNDTFLSKEFNPLVIVGLSKDGTDYIEIIPKEEVQSSEDDYAEIDYVPYDDPYKTDVRTNINSSRDPDNIAAWYLRSNNGNRRNYYIAAEEISWDYSEFVQRETDIEDSDDIPEDTTYKKVVFRKYLDSTFTKRDPRGEYEEHLGILGPIIRAEVDDVIQVRFKNLASRPYSLHAHGLSYEKSSEGKTYEDDSPEWFKEDNAVQPNSSYTYVWHATERSGPESPGSACRAWAYYSAVNPEKDIHSGLIGPLLICQKGILHKDSNMPMDMREFVLLFMTFDEKKSWYYEKKSRSSWRLTSSEMKKSHEFHAINGMIYSLPGLKMYEQEWVRLHLLNIGGSQDIHVVHFHGQTLLENGNKQHQLGVWPLLPGSFKTLEMKASKPGWWLLNTEVGENQRAGMQTPFLIMDRDCRMPMGLSTGIISDSQIKASEFLGYWEPRLARLNNGGSYNAWSVEKLAAEFASKPWIQVDMQKEVIITGIQTQGAKHYLKSCYTTEFYVAYSSNQINWQIFKGNSTRNVMYFNGNSDASTIKENQFDPPIVARYIRISPTRAYNRPTLRLELQGCEVNGCSTPLGMENGKIENKQITASSFKKSWWGDYWEPFRARLNAQGRVNAWQAKANNNKQWLEIDLLKIKKITAIITQGCKSLSSEMYVKSYTIHYSEQGVEWKPYRLKSSMVDKIFEGNTNTKGHVKNFFNPPIISRFIRVIPKTWNQSIALRLELFGCDIY

SEQ ID NO: 4973 - protein, 2229 aa, Homo Sapiens
MFPGCPRLWVLVVLGTSWVGWGSQGTEAAQLRQFYVAAQGISWSYRPEPTNSSLNLSVTSFKKIVYREYEPYFKKEKPQSTISGLLGPTLYAEVGDIIKVHFKNKADKPLSIHPQGIRYSKLSEGASYLDHTFPAEKMDDAVAPGREYTYEWSISEDSGPTHDDPPCLTHIYYSHENLIEDFNSGLIGPLLICKKGTLTEGGTQKTFDKQIVLLFAVFDESKSWSQSSSLMYTVNGYVNGTMPDITVCAHDHISWHLLGMSSGPELFSIHFNGQVLEQNHHKVSAITLVSATSTTANMTVGPEGKWIISSLTPKHLQAGMQAYIDIKNCPKKTRNLKKITREQRRHMKRWEYFIAAEEVIWDYAPVIPANMDKKYRSQHLDNFSNQIGKHYKKVMYTQYEDESFTKHTVNPNMKEDGILGPIIRAQVRDTLKIVFKNMASRPYSIYPHGVTFSPYEDEVNSSFTSGRNNTMIRAVQPGETYTYKWNILEFDEPTENDAQCLTRPYYSDVDIMRDIASGLIGLLLICKSRSLDRRGIQRAADIEQQAVFAVFDENKSWYLEDNINKFCENPDEVKRDDPKFYESNIMSNFTLSAINGYVPESITTLGFCFDDTVQWHFCSVGTQNEILTIHFTGHSFIYGKRHEDTLTLFPMRGESVTVTMDNVGTWMLTSMNSSPRSKKLRLKFRDVKCIPDDDEDSYEIFEPPESTVMATRKMHDRLEPEDEESDADYDYQNRLAAALGIRSFRNSSLNQEEEEFNLTALALENGTEFVSSNTDIIVGSNYSSPSNISKFTVNNLAEPQKAPSHQQATTAGSPLRHLIGKNSVLNSSTAEHSSPYSEDPIEDPLQPDVTGIRLLSLGAGEFKSQEHAKHKGPKVERDQAAKHRFSWMKLLAHKVGRHLSQDTGSPSGMRPWEDLPSQDTGSPSRMRPWKDPPSDLLLLKQSNSSKILVGRWHLASEKGSYEIIQDTDEDTAVNNWLISPQNASRAWGESTPLANKPGKQSGHPKFPRVRHKSLQVRQDGGKSRLKKSQFLIKTRKKKKEKHTHHAPLSPRTFHPLRSEAYNTFSERRLKHSLVLHKSNETSLPTDLNQTLPSMDFGWIASLPDHNQNSSNDTGQASCPPGLYQTVPPEEHYQTFPIQDPDQMHSTSDPSHRSSSPELSEMLEYDRSHKSFPTDISQMSPSSEHEVWQTVISPDLSQVTLSPELSQTNLSPDLSHTTLSPELIQRNLSPALGQMPISPDLSHTTLSPDLSHTTLSLDLSQTNLSPELSQTNLSPALGQMPLSPDLSHTTLSLDFSQTNLSPELSHMTLSPELSQTNLSPALGQMPISPDLSHTTLSLDFSQTNLSPELSQTNLSPALGQMPLSPDPSHTTLSLDLSQTNLSPELSQTNLSPDLSEMPLFADLSQIPLTPDLDQMTLSPDLGETDLSPNFGQMSLSPDLSQVTLSPDISDTTLLPDLSQISPPPDLDQIFYPSESSQSLLLQEFNESFPYPDLGQMPSPSSPTLNDTFLSKEFNPLVIVGLSKDGTDYIEIIPKEEVQSSEDDYAEIDYVPYDDPYKTDVRTNINSSRDPDNIAAWYLRSNNGNRRNYYIAAEEISWDYSEFVQRETDIEDSDDIPEDTTYKKVVFRKYLDSTFTKRDPRGEYEEHLGILGPIIRAEVDDVIQVRFKNLASRPYSLHAHGLSYEKSSEGKTYEDDSPEWFKEDNAVQPNSSYTYVWHATERSGPESPGSACRAWAYYSAVNPEKDIHSGLIGPLLICQKGILHKDSNMPMDMREFVLLFMTFDEKKSWYYEKKSRSSWRLTSSEMKKSHEFHAINGMIYSLPGLKMYEQEWVRLHLLNIGGSQDIHVVHFHGQTLLENGNKQHQLGVWPLLPGSFKTLEMKASKPGWWLLNTEVGENQRAGMQTPFLIMDRDCRMPMGLSTGIISDSQIKASEFLGYWEPRLARLNNGGSYNAWSVEKLAAEFASKPWIQVDMQKEVIITGIQTQGAKHYLKSCYTTEFYVAYSSNQINWQIFKGNSTRNVMYFNGNSDASTIKENQFDPPIVARYIRISPTRAYNRPTLRLELQGCEVNGCSTPLGMENGKIENKQITASSFKKSWWGDYWEPFRARLNAQGRVNAWQAKANNNKQWLEIDLLKIKKITAIITQGCKSLSSEMYVKSYTIHYSEQGVEWKPYRLKSSMVDKIFEGNTNTKGHVKNFFNPPIISRFIRVIPKTWNQSIALRLELFGCDIY

SEQ ID NO: 4974 - protein, 382 aa, Homo Sapiens
MVSQALRLLCLLLGLQGCLAADGDQCASSPCQNGGSCKDQLQSYICFCLPAFEGRNCETHKDDQLICVNENGGCEQYCSDHTGTKRSCRCHEGYSLLADGVSCTPTVEYPCGKIPILEKRNASKPQGRIVGGKVCPKGECPWQVLLLVNGAQLCGGTLINTIWVVSAAHCFDKIKNWRNLIAVLGEHDLSEHDGDEQSRRVAQVIIPSTYVPGTTNHDIALLRLHQPVVLTDHVVPLCLPERTFSERTLAFVRFSLVSGWGQLLDRGATALELMVLNVPRLMTQDCLQQSRKVGDSPNITEYMFCAGYSDGSKDSCKGDSGGPHATHYRGTWYLTGIVSWGQGCATVGHFGVYTRVSQYIEWLQKLMRSEPRPGVLLRAPFP

SEQ ID NO: 4975 - protein, 74 aa, Homo Sapiens
MVSQALRLLCLLLGLQGCLAAGGSPRRPAPAPARQRVPGGAAAGLPGEGVQGGAVLLRGGPGDLQGRGEDVVSG

SEQ ID NO: 4976 - protein, 466 aa, Homo Sapiens
MVSQALRLLCLLLGLQGCLAAGGVAKASGGETRDMPWKPGPHRVFVTQEEAHGVLHRRRRANAFLEELRPGSLERECKEEQCSFEEAREIFKDAERTKLFWISYSDGDQCASSPCQNGGSCKDQLQSYICFCLPAFEGRNCETHKDDQLICVNENGGCEQYCSDHTGTKRSCRCHEGYSLLADGVSCTPTVEYPCGKIPILEKRNASKPQGRIVGGKVCPKGECPWQVLLLVNGAQLCGGTLINTIWVVSAAHCFDKIKNWRNLIAVLGEHDLSEHDGDEQSRRVAQVIIPSTYVPGTTNHDIALLRLHQPVVLTDHVVPLCLPERTFSERTLAFVRFSLVSGWGQLLDRGATALELMVLNVPRLMTQDCLQQSRKVGDSPNITEYMFCAGYSDGSKDSCKGDSGGPHATHYRGTWYLTGIVSWGQGCATVGHFGVYTRVSQYIEWLQKLMRSEPRPGVLLRAPFP

SEQ ID NO: 4977 - protein, 444 aa, Homo Sapiens
MVSQALRLLCLLLGLQGCLAAVFVTQEEAHGVLHRRRRANAFLEELRPGSLERECKEEQCSFEEAREIFKDAERTKLFWISYSDGDQCASSPCQNGGSCKDQLQSYICFCLPAFEGRNCETHKDDQLICVNENGGCEQYCSDHTGTKRSCRCHEGYSLLADGVSCTPTVEYPCGKIPILEKRNASKPQGRIVGGKVCPKGECPWQVLLLVNGAQLCGGTLINTIWVVSAAHCFDKIKNWRNLIAVLGEHDLSEHDGDEQSRRVAQVIIPSTYVPGTTNHDIALLRLHQPVVLTDHVVPLCLPERTFSERTLAFVRFSLVSGWGQLLDRGATALELMVLNVPRLMTQDCLQQSRKVGDSPNITEYMFCAGYSDGSKDSCKGDSGGPHATHYRGTWYLTGIVSWGQGCATVGHFGVYTRVSQYIEWLQKLMRSEPRPGVLLRAPFP

SEQ ID NO: 4978 - protein, 165 aa, Homo Sapiens [sequence omitted]

SEQ ID NO: 4979 - protein, 222 aa, Homo Sapiens
MHRDARAQKASRGFPPRVPKSFPFNTSVVYKKTLFVEFTDHLFNIAKPRPPWMGLLGPTIQAEVYDTVVITLKNMASHPVSLHAVGVSYWKASEGAEYDDQTSQREKEDDKVFPGGSHTYVWQVLKENGPMASDPLCLTYSYLSHVDLVKDLNSGLIGALLVCREGSLAKEKTQTLHKFILLFAVFDEGKSWHSETKNSLMQDRDAASARAWPKMHTVNGYV

SEQ ID NO: 4980 - protein, 262 aa, Homo Sapiens
MLEQEEERENARKGGSAAHFQTIIRSCERSIRRIARGKSAPMIQSPPTRPFLQQVFFGNVDSSGIKHNIFNPPIIARYIRLHPTHYSIRSTLRMELMGCDLNSCSMPLGMESKAISDAQITASSYFTNMFATWSPSKARLHLQGRSNAWRPQVNNPKEWLQVDFQKTMKVTGVTTQGVKSLLTSMYVKEFLISSSQDGHQWTLFFQNGKVKVFQGNQDSFTPVVNSLDPPLLTRYLRIHPQSWVHQIALRMEVLGCEAQDLY

SEQ ID NO: 4981 - protein, 63 aa, Homo Sapiens
MQIELSTCFFLCLLRFCFSATRRYYLGAVELSWDYMQSDLDFLLECQNLFHSTPQSCTKRLCL

SEQ ID NO: 4982 - protein, 2351 aa, Homo Sapiens
MQIELSTCFFLCLLRFCFSATRRYYLGAVELSWDYMQSDLGELPVDARFPPRVPKSFPFNTSVVYKKTLFVEFTDHLFNIAKPRPPWMGLLGPTIQAEVYDTVVITLKNMASHPVSLHAVGVSYWKASEGAEYDDQTSQREKEDDKVFPGGSHTYVWQVLKENGPMASDPLCLTYSYLSHVDLVKDLNSGLIGALLVCREGSLAKEKTQTLHKFILLFAVFDEGKSWHSETKNSLMQDRDAASARAWPKMHTVNGYVNRSLPGLIGCHRKSVYWHVIGMGTTPEVHSIFLEGHTFLVRNHRQASLEISPITFLTAQTLLMDLGQFLLFCHISSHQHDGMEAYVKVDSCPEEPQLRMKNNEEAEDYDDDLTDSEMDVVRFDDDNSPSFIQIRSVAKKHPKTWVHYIAAEEEDWDYAPLVLAPDDRSYKSQYLNNGPQRIGRKYKKVRFMAYTDETFKTREAIQHESGILGPLLYGEVGDTLLIIFKNQASRPYNIYPHGITDVRPLYSRRLPKGVKHLKDFPILPGEIFKYKWTVTVEDGPTKSDPRCLTRYYSSFVNMERDLASGLIGPLLICYKESVDQRGNQIMSDKRNVILFSVFDENRSWYLTENIQRFLPNPAGVQLEDPEFQASNIMHSINGYVFDSLQLSVCLHEVAYWYILSIGAQTDFLSVFFSGYTFKHKMVYEDTLTLFPFSGETVFMSMENPGLWILGCHNSDFRNRGMTALLKVSSCDKNTGDYYEDSYEDISAYLLSKNNAIEPRSFSQNSRHPSTRQKQFNATTIPENDIEKTDPWFAHRTPMPKIQNVSSSDLLMLLRQSPTPHGLSLSDLQEAKYETFSDDPSPGAIDSNNSLSEMTHFRPQLHHSGDMVFTPESGLQLRLNEKLGTTAATELKKLDFKVSSTSNNLISTIPSDNLAAGTDNTSSLGPPSMPVHYDSQLDTTLFGKKSSPLTESGGPLSLSEENNDSKLLESGLMNSQESSWGKNVSSTESGRLFKGKRAHGPALLTKDNALFKVSISLLKTNKTSNNSATNRKTHIDGPSLLIENSPSVWQNILESDTEFKKVTPLIHDRMLMDKNATALRLNHMSNKTTSSKNMEMVQQKKEGPIPPDAQNPDMSFFKMLFLPESARWIQRTHGKNSLNSGQGPSPKQLVSLGPEKSVEGQNFLSEKNKVVVGKGEFTKDVGLKEMVFPSSRNLFLTNLDNLHENNTHNQEKKIQEEIEKKETLIQENVVLPQIHTVTGTKNFMKNLFLLSTRQNVEGSYDGAYAPVLQDFRSLNDSTNRTKKHTAHFSKKGEEENLEGLGNQTKQIVEKYACTTRISPNTSQQNFVTQRSKRALKQFRLPLEETELEKRIIVDDTSTQWSKNMKHLTPSTLTQIDYNEKEKGAITQSPLSDCLTRSHSIPQANRSPLPIAKVSSFPSIRPIYLTRVLFQDNSSHLPAASYRKKDSGVQESSHFLQGAKKNNLSLAILTLEMTGDQREVGSLGTSATNSVTYKKVENTVLPKPDLPKTSGKVELLPKVHIYQKDLFPTETSNGSPGHLDLVEGSLLQGTEGAIKWNEANRPGKVPFLRVATESSAKTPSKLLDPLAWDNHYGTQIPKEEWKSQEKSPEKTAFKKKDTILSLNACESNHAIAAINEGQNKPEIEVTWAKQGRTERLCSQNPPVLKRHQREITRTTLQSDQEEIDYDDTISVEMKKEDFDIYDEDENQSPRSFQKKTRHYFIAAVERLWDYGMSSSPHVLRNRAQSGSVPQFKKVVFQEFTDGSFTQPLYRGELNEHLGLLGPYIRAEVEDNIMVTFRNQASRPYSFYSSLISYEEDQRQGAEPRKNFVKPNETKTYFWKVQHHMAPTKDEFDCKAWAYFSDVDLEKDVHSGLIGPLLVCHTNTLNPAHGRQVTVQEFALFFTIFDETKSWYFTENMERNCRAPCNIQMEDPTFKENYRFHAINGYIMDTLPGLVMAQDQRIRWYLLSMGSNENIHSIHFSGHVFTVRKKEEYKMALYNLYPGVFETVEMLPSKAGIWRVECLIGEHLHAGMSTLFLVYSNKCQTPLGMASGHIRDFQITASGQYGQWAPKLARLHYSGSINAWSTKEPFSWIKVDLLAPMIIHGIKTQGARQKFSSLYISQFIIMYSLDGKKWQTYRGNSTGTLMVFFGNVDSSGIKHNIFNPPIIARYIRLHPTHYSIRSTLRMELMGCDLNSCSMPLGMESKAISDAQITASSYFTNMFATWSPSKARLHLQGRSNAWRPQVNNPKEWLQVDFQKTMKVTGVTTQGVKSLLTSMYVKEFLISSSQDGHQWTLFFQNGKVKVFQGNQDSFTPVVNSLDPPLLTRYLRIHPQSWVHQIALRMEVLGCEAQDLY

SEQ ID NO: 4983 - protein, 216 aa, Homo Sapiens
MRIQDPGKVFFGNVDSSGIKHNIFNPPIIARYIRLHPTHYSIRSTLRMELMGCDLNSCSMPLGMESKAISDAQITASSYFTNMFATWSPSKARLHLQGRSNAWRPQVNNPKEWLQVDFQKTMKVTGVTTQGVKSLLTSMYVKEFLISSSQDGHQWTLFFQNGKVKVFQGNQDSFTPVVNSLDPPLLTRYLRIHPQSWVHQIALRMEVLGCEAQDLY

SEQ ID NO: 4984 - protein, 461 aa, Homo Sapiens
MQRVNMIMAESPGLITICLLGYLLSAECTVFLDHENANKILNRPKRYNSGKLEEFVQGNLERECMEEKCSFEEAREVFENTERTTEFWKQYVDGDQCESNPCLNGGSCKDDINSYECWCPFGFEGKNCELDVTCNIKNGRCEQFCKNSADNKVVCSCTEGYRLAENQKSCEPAVPFPCGRVSVSQTSKLTRAETVFPDVDYVNSTEAETILDNITQSTQSFNDFTRVVGGEDAKPGQFPWQVVLNGKVDAFCGGSIVNEKWIVTAAHCVETGVKITVVAGEHNIEETEHTEQKRNVIRIIPHHNYNAAINKYNHDIALLELDEPLVLNSYVTPICIADKEYTNIFLKFGSGYVSGWGRVFHKGRSALVLQYLRVPLVDRATCLRSTKFTIYNNMFCAGFHEGGRDSCQGDSGGPHVTEVEGTSFLTGIISWGEECAMKGKYGIYTKVSRYVNWIKEKTKLT

SEQ ID NO: 4985 - protein, 423 aa, Homo Sapiens
MQRVNMIMAESPGLITICLLGYLLSAECTVFLDHENANKILNRPKRYNSGKLEEFVQGNLERECMEEKCSFEEAREVFENTERTTEFWKQYVDVTCNIKNGRCEQFCKNSADNKVVCSCTEGYRLAENQKSCEPAVPFPCGRVSVSQTSKLTRAETVFPDVDYVNSTEAETILDNITQSTQSFNDFTRVVGGEDAKPGQFPWQVVLNGKVDAFCGGSIVNEKWIVTAAHCVETGVKITVVAGEHNIEETEHTEQKRNVIRIIPHHNYNAAINKYNHDIALLELDEPLVLNSYVTPICIADKEYTNIFLKFGSGYVSGWGRVFHKGRSALVLQYLRVPLVDRATCLRSTKFTIYNNMFCAGFHEGGRDSCQGDSGGPHVTEVEGTSFLTGIISWGEECAMKGKYGIYTKVSRYVNWIKEKTKLT

SEQ ID NO: 4986 - protein, 38 aa, Homo Sapiens
LTQVLRAVLSACTWVSRKGDLQRMKQTHKGKRTFSQDG

SEQ ID NO: 4987 - protein, 128 aa, Homo Sapiens
MAFTGKFEMESEKNYDEFMKLLGISSDVIEKARNFKIVTEVQQDGQDFTWSQHYSGGHTMTNKFTVGKESNIQTMGGKTFKATVQMEGGKLVVNFPNYHQTSEIVGDKLVEVSTIGGVTYERVSKRLA

SEQ ID NO: 4988 - protein, 177 aa, Homo Sapiens
MKTVTMMMVVEMQALTQVLRAVLSACTWVSRKGDLQRMKQTHKGKPPSSMAFTGKFEMESEKNYDEFMKLLGISSDVIEKARNFKIVTEVQQDGQDFTWSQHYSGGHTMTNKFTVGKESNIQTMGGKTFKATVQMEGGKLVVNFPNYHQTSEIVGDKLVEVSTIGGVTYERVSKRLA

SEQ ID NO: 4989 - protein, 67 aa, Homo Sapiens
MAEPDYIEDDNPELIRPQKLINPVKTSRNHQDLHRELLMNQKRGLAPQNKPELQKVMEKRKRDQVIK

SEQ ID NO: 4990 - protein, 84 aa, Homo Sapiens
MAEPDYIEDDNPELIRPQKLINPVKTSRNHQDLHRELLMNQKRGLAPQNKPELQKVMEKRKRDQVIKQKEEEAQKKKSDLEIEL

SEQ ID NO: 4991 - protein, 90 aa, Homo Sapiens
MAEPDYIEDDNPELIRPQKLINPVKTSRNHQDLHRELLMNQKRGLAPQNKPELQKVMEKRKRDQVIKQKEEEAQKKKSDLEIELLKRQQK

SEQ ID NO: 4992 - protein, 93 aa, Homo Sapiens
MAEPDYIEDDNPELIRPQKLINPVKTSRNHQDLHRELLMNQKRGLAPQNKPELQKVMEKRKRDQVIKQKEEEAQKKKSDLEIELLKRQQKLEQ

SEQ ID NO: 4993 - protein, 101 aa, Homo Sapiens
MAEPDYIEDDNPELIRPQKLINPVKTSRNHQDLHRELLMNQKRGLAPQNKPELQKVMEKRKRDQVIKQKEEEAQKKKSDLEIELLKRQQKLEQLELEKQKL

SEQ ID NO: 4994 - protein, 125 aa, Homo Sapiens
MAEPDYIEDDNPELIRPQKLINPVKTSRNHQDLHRELLMNQKRGLAPQNKPELQKVMEKRKRDQVIKQKEEEAQKKKSDLEIELLKRQQKLEQLELEKQKLQEEQENAPEFVKVKGNLRRTGQEV

SEQ ID NO: 4995 - protein, 126 aa, Homo Sapiens
MAEPDYIEDDNPELIRPQKLINPVKTSRNHQDLHRELLMNQKRGLAPQNKPELQKVMEKRKRDQVIKQKEEEAQKKKSDLEIELLKRQQKLEQLELEKQKLQEEQENAPEFVKVKGNLRRTGQEVA

SEQ ID NO: 4996 - protein, 128 aa, Homo Sapiens
MAEPDYIEDDNPELIRPQKLINPVKTSRNHQDLHRELLMNQKRGLAPQNKPELQKVMEKRKRDQVIKQKEEEAQKKKSDLEIELLKRQQKLEQLELEKQKLQEEQENAPEFVKVKGNLRRTGQEVAQA

SEQ ID NO: 4997 - protein, 131 aa, Homo Sapiens
MAEPDYIEDDNPELIRPQKLINPVKTSRNHQDLHRELLMNQKRGLAPQNKPELQKVMEKRKRDQVIKQKEEEAQKKKSDLEIELLKRQQKLEQLELEKQKLQEEQENAPEFVKVKGNLRRTGQEVAQAQES

SEQ ID NO: 4998 - protein, 131 aa, Homo Sapiens; identical to SEQ ID NO: 4997

SEQ ID NO: 4999 - protein, 131 aa, Homo Sapiens; identical to SEQ ID NO: 4997

SEQ ID NO: 5000 - protein, 131 aa, Homo Sapiens; identical to SEQ ID NO: 4997

SEQ ID NO: 5001 - protein, 131 aa, Homo Sapiens; identical to SEQ ID NO: 4997

SEQ ID NO: 5002 - protein, 131 aa, Homo Sapiens; identical to SEQ ID NO: 4997

SEQ ID NO: 5003 - protein, 131 aa, Homo Sapiens; identical to SEQ ID NO: 4997

SEQ ID NO: 5004 - protein, 131 aa, Homo Sapiens; identical to SEQ ID NO: 4997

SEQ ID NO: 5005 - protein, 131 aa, Homo Sapiens; identical to SEQ ID NO: 4997

SEQ ID NO: 5006 - protein, 131 aa, Homo Sapiens; identical to SEQ ID NO: 4997

SEQ ID NO: 5007 - protein, 131 aa, Homo Sapiens; identical to SEQ ID NO: 4997

SEQ ID NO: 5008 - protein, 51 aa, Homo Sapiens
MAEPDYIEDDNPELIRPQKLINPVKTSRNHQDLHRELLMNQKRILVWLEIH

SEQ ID NO: 5009 - protein, 306 aa, Homo Sapiens
MSTWKARLTKRLKSPSRSMHPFPCSALLACFGNTRESASFNQSGVADTHSTVRVQPVAKAGRQPRHPSAEGAPEKRQDSSTHAERNGSANRNSSHRTAAQPAETPEDVPGSLDDGADCEAVVFHASIPRPSIIDTPKEEEFREEPKCLELEQKMTSDSPPEDIDHKDSYLITRSIMAEPDYIEDDNPELIRPQKLINPVKTSRNHQDLHRELLMNQKRGLAPQNKPELQKVMEKRKRDQVIKQKEEEAQKKKSDLEIELLKRQQKLEQLELEKQKLQEEQENAPEFVKVKGNLRRTGQEVAQAQES

SEQ ID NO: 5010 - protein, 160 aa, Homo Sapiens
MSTWKARLTKRLKSPSRSMHPFPCSALLACFGNTRESASFNQSGVADTHSTVRVQPVAKAGRQPRHPSAEGAPEKRQDSSTHAERNGSANRNSSHRTAAQPAETPEDVPGSLDDGADCEAVVFHASIPRPSIIDTPKEEEFREEPKCLELEQKMTSGECS

SEQ ID NO: 5011 - protein, 251 aa, Homo Sapiens
MAQGRVAHLIEWKGWSKPSDSPAALESAFSSYSDLSEGEQEARFAAGVAEQFAIAEAKLRAWSSVDGEDSTDDSYDEDFAGGMDTDMAGQLPLGPHLQDLFTGHRFSRPVRQGSVEPESDCSQTVSPDTLCSSLCSLEDGLLGSPARLASQLLGDELLLAKLPPSRESAFRSLGPLEAQDSLYNSPLTEGWLLPSRSLWVEPSLKGPCPAGLVLCFIHLSIVSKSSSFFLKTEGFWSVFSVGSSLLWEALE

SEQ ID NO: 5012 - protein, 335 aa, Homo Sapiens
MFLATLSFLLPFAHPFGTVSCEYMLGSPLSSLAQVNLSPFSHPKVHMDPNYCHPSTSLHLCSLAWSFTRLLHPPLSPGISQVVKDHVTKPTAMAQGRVAHLIEWKGWSKPSDSPAALESAFSSYSDLSEGEQEARFAAGVAEQFAIAEAKLRAWSSVDGEDSTDDSYDEDFAGGMDTDMAGQLPLGPHLQDLFTGHRFSRPVRQGSVEPESDCSQTVSPDTLCSSLCSLEDGLLGSPARLASQLLGDELLLAKLPPSRESAFRSLGPLEAQDSLYNSPLTESCLSPAEEEPAPCKDCQPLCPPLTGSWERQRQASDLASSGVVSLDEDEAEPEEQ

SEQ ID NO: 5013 - protein, 123 aa, Homo Sapiens
MLPKSRRALTIQEIAALARSSLHGISQVVKDHVTKPTAMAQGRVAHLIEWKGWSKPSDSPAALESAFSSYSDLSEGEQEARFAAGVAEQFAIAEAKLRAWSSVDGEDSTDDSYDEDFAGGMDT

SEQ ID NO: 5014 - protein, 232 aa, Homo Sapiens
MLPKSRRALTIQEIAALARSSLHGISQVVKDHVTKPTAMAQGRVAHLIEWKGWSKPSDSPAALESAFSSYSDLSEGEQEARFAAGVAEQFAIAEAKLRAWSSVDGEDSTDDSYDEDFAGGMDTDMAGQLPLGPHLQDLFTGHRFSRPVRQGSVEPESDCSQTVSPDTLCSSLCSLEDGLLGSPARLASQLLGDELLLAKLPPSRESAFRSLGPLEAQDSLYNSPLTESCLSP

SEQ ID NO: 5015 - protein, 281 aa, Homo Sapiens
MLPKSRRALTIQEIAALARSSLHGISQVVKDHVTKPTAMAQGRVAHLIEWKGWSKPSDSPAALESAFSSYSDLSEGEQEARFAAGVAEQFAIAEAKLRAWSSVDGEDSTDDSYDEDFAGGMDTDMAGQLPLGPHLQDLFTGHRFSRPVRQGSVEPESDCSQTVSPDTLCSSLCSLEDGLLGSPARLASQLLGDELLLAKLPPSRESAFRSLGPLEAQDSLYNSPLTESCLSPAEEEPAPCKDCQPLCPPLTGSWERQRQASDLASSGVVSLDEDEAEPEEQ

SEQ ID NO: 5016 - protein, 281 aa, Homo Sapiens; identical to SEQ ID NO: 5015

SEQ ID NO: 5017 - protein, 281 aa, Homo Sapiens; identical to SEQ ID NO: 5015

SEQ ID NO: 5018 - protein, 366 aa, Homo Sapiens
MPMISVLGKMFLWQREGPGGRWTCQTSRRVSSDPAWAVEWIELPRGLSLSSLGSARTLRGWSRSSRPSSVDSQDLPEVNVGDTVAMLPKSRRALTIQEIAALARSSLHGISQVVKDHVTKPTAMAQGRVAHLIEWKGWSKPSDSPAALESAFSSYSDLSEGEQEARFAAGVAEQFAIAEAKLRAWSSVDGEDSTDDSYDEDFAGGMDTDMAGQLPLGPHLQDLFTGHRFSRPVRQGSVEPESDCSQTVSPDTLCSSLCSLEDGLLGSPARLASQLLGDELLLAKLPPSRESAFRSLGPLEAQDSLYNSPLTESCLSPAEEEPAPCKDCQPLCPPLTGSWERQRQASDLASSGVVSLDEDEAEPEEQ

SEQ ID NO: 5019 - protein, 359 aa, Homo Sapiens
MPMISVLGKMFLWQREGPGGRWTCQTSRRVSSDPAWAVEWIELPRGLSLSSLGSARTLRGWSRSSRPSSVDSQDLPEVNVGDTVAMLPKSRRALTIQEIAALARSSLHGISQVVKDHVTKPTAMAQGRVAHLIEWKGWSKPSDSPAALESAFSSYSDLSEGEQEARFAAGVAEQFAIAEAKLRAWSSVDGEDSTDDSYDEDFAGGMDTDMAGQLPLGPHLQDLFTGHRFSRPVRQGSVEPESDCSQTVSPDTLCSSLCSLEDGLLGSPARLASQLLGDELLLAKLPPSRESAFRSLGPLEAQDSLYNSPLTESCLSPAEEEPAPCKDCQPLCPPLTGSWERQRQASDLGLAPALPEPMG

SEQ ID NO: 5020 - protein, 890 aa, Homo Sapiens
MSRSATLLLCLLGCHVWKAVTKTLREPGAGAQEVTLKVHISDASTHQPVADALIEIFTNQASIASGTSGTDGVAFIKFQYKLGSQLIVTASKHAYVPNSAPWKPIRLPVFSSLSLGLLPERSATLMVYEDVVQIVSGFQGARPQPRVHFQRRALRLPENTSYSDLTAFLTAASSPSEVDSFPYLRGLDGNGTGNSTRHDLTPVTAVSVHLLSSNGTPVLVDGPIYVTVPLATQSSLRHNAYVAAWRFDQKLGTWLKSGLGLVHQEGSQLTWTYIAPQLGYWVAAMSPPIPGPVVTQDITTYHTVFLLAILGGMAFILLVLLCLLLYYCRRKCLKPRQHHRKLQLPAGLESSKRDQSTSMSHINLLFSRRASEFPGPLSVTSHGRPEAPGTKELMSGVHLEMMSPGGEGDLHTPMLKLSYSTSQEFSSREELLSCKEEDKSQISFDNLTPSGTLGKDYHKSVEVFPLKARKSMEREGYESSGNDDYRGSYNTVLSQPLFEKQDREGPASTGSKLTIQEHLYPAPSSPEKEQLLDRRPTECMMSRSVDHLERPTSFPRPGQLICCSSVDQVNDSVYRKVLPALVIPAHYMKLPGDHSYVSQPLVVPADQQLEIERLQAELSNPHAGIFPHPSSQIQPQPLSSQAISQQHLQDAGTREWSPQNASMSESLSIPASLNDAALAQMNSEVQLLTEKALMELGGGKPLPHPRAWFVSLDGRSNAHVRHSYIDLQRAGRNGSNDASLDSGVDMNEPKSARKGRGDALSLQQNYPPVQEHQQKEPRAPDSTAYTQLVYLDDVEQSGSECGTTVCTPEDSALRCLLEGSSRRSGGQLPSLQEETTRRTADAPSEPAASPHQRRSAHEEEEDDDDDDQGEDKKSPWQKREERPLMAFNIK

SEQ ID NO: 5021 - protein, 198 aa, Homo Sapiens
MSRSATLLLCLLGCHVWKAVTKTLREPGAGAQEVTLKVHISDASTHQPVADALIEIFTNQASIASGTSGTDGVAFIKFQYKLGSQLIVTASKHAYVPNSAPWKPIRLPVFSSLSLGLLPERSATLMVYEDVVQIVSGFQGNSTRHDLTPVTAVSVHLLSSNGTPVLVDGPIYVTVPLATQSSLRHNAYVAAWRFDQKL

SEQ ID NO: 5022 - protein, 826 aa, Homo Sapiens
MARLCRRVPCTLLLGLAVVLLKARLVPAAARAELSRSDLSLIQQQQQQQQQQQQQQKQLEEAEEERTEVPGATSTLTVPVSVFMLKVQVNDIISRQYLSQAVVEVFVNYTKTNSTVTKSNGAVLIKVPYKLGLSLTIIAYKDGYVLTPLPWKTRRMPIYSSVTLSLFPQSQANIWLFEDTVLITGKLADAKSQPSVQFSKALIKLPDNHHISNVTGYLTVLQQFLKVDNFLHTTGITLNKPGFENIELTPLAAICVKIYSGGKELKVNGSIQVSLPLLRLNDISAGDRIPAWTFDMNTGAWVNHGRGMVKEHNNHLIWTYDAPHLGYWIAAPLPGTRGSGINEDSKDITAYHTVFLTAILGGTIVIVIGFFAVLLCYCRDKCGTPQKRERNITKLEVLKRDQTTSTTHINHISTVKVALKAEDKSQLFNAKNSSYSPQKKEPSKAETEERVSMVKTRDDFKIYNEDVSFLSVNQNNYSRNPTQSLEPNVGSKQPKHINNNLSSSLGDAQDEKRYLTGNEEAYGRSHIPEQLMHIYSQPIAILQTSDLFSTPEQLHTAKSATLPRKGQLVYGQLMEPVNRENFTQTLPKMPIHSHAQPPDAREEDIILEGQQSLPSQASDWSRYSSSLLESVSVPGTLNEAVVMTPFSSELQGISEQTLLELSKGKPSPHPRAWFVSLDGKPVAQVRHSFIDLKKGKRTQSNDTSLDSGVDMNELHSSRKLEREKTFIKSMHQPKILYLEDLDLSSSESGTTVCSPEDPALRHILDGGSGVIMEHPGEESPGRKSTVEDFEANTSPTKRRGRPPLAKRDSKTNIWKKREERPLIPIN

SEQ ID NO: 5023 - protein, 238 aa, Homo Sapiens
MARLCRRVPCTLLLGLAVVLLKARLVPAAARAELSRSDLSLIQQQQQQQQQQQQQQKQLEEAEEERTEVPGATSTLTVPVSVFMLKVQVNDIISRQYLSQAVVEVFVNYTKTNSTVTKSNGAVLIKVPYKLGLSLTIIAYKDGYVLTPLPWKTRRMPIYSSVTLSLFPQSQANIWLFEDTVLITGKLADAKSQPSVQFSKALIKLPDNHHISNVTGYLTVLQQFLKVDNFLHTTGITQ

SEQ ID NO: 5024 - protein, 306 aa, Homo Sapiens
MKKDEPPLDFPDTLEGFEYAFNEKGQLRHIKTGEPFVFNYREDLHRWNQKRYEALGEIITKYVYELLEKDCNLKKVSIPEGYGVIVLNPNENYIEVEKPKIHVQSSSDSSDEPAEKRERKDKVSKETKKRRDFYEKYRNPQREKEMMQLYIRENGSPEEHAIYVWDHFIAQAAAENVFFVAHSYGGLAFVELMIQREADVKNKVTAVALTDSVHNVWHQEAGKTIREWMRENCCNWVSSSEPLDTSVESMLPDCPRVSAGTDRHELTSWKSFPSIFKFFTEASEAKTSSLKPAVTRRSHRIKHEEL

SEQ ID NO: 5025 - protein, 370 aa, Homo Sapiens
MKKDEPPLDFPDTLEGFEYAFNEKGQLRHIKTGEPFVFNYREDLHRWNQKRYEALGEIITKYVYELLEKDCNLKKVSIPVDATESEPKSFIFMSEDALTNPQKLMVLIHGSGVVRAGQWARRLIINEDLDSGTQIPFIKRAVAEGYGVIVLNPNENYIEVEKPKIHVQSSSDSSDEPAEKRERKDKVSKETKKRRDFYEKYRNPQREKEMMQLYIRENGSPEEHAIYVWDHFIAQAAAENVFFVAHSYGGLAFVELMIQREADVKNKVTAVALTDSVHNVWHQEAGKTIREWMRENCCNWVSSSEPLDTSVESMLPDCPRVSAGTDRHELTSWKSFPSIFKFFTEASEAKTSSLKPAVTRRSHRIKHEEL

SEQ ID NO: 5026 - protein, 269 aa, Homo Sapiens
MNRLLIFLIPWKDLNMLLMKIITKYVYELLEKDCNLKKVSIPEGYGVIVLNPNENYIEVEKPKIHVQSSSDSSDEPAEKRERKDKVSKETKKRRDFYEKYRNPQREKEMMQLYIRENGSPEEHAIYVWDHFIAQAAAENVFFVAHSYGGLAFVELMIQREADVKNKVTAVALTDSVHNVWHQEAGKTIREWMRENCCNWVSSSEPLDTSVESMLPDCPRVSAGTDRHELTSWKSFPSIFKFFTEASEAKTSSLKPAVTRRSHRIKHEEL

SEQ ID NO: 5027 - protein, 305 aa, Homo Sapiens
MNRLLIFLIPWKDLNMLLMKIITKYVYELLEKDCNLKKVSIPVDATESEPKSFIFMSEDALTNPQKLMVLIHGSGVVRAGQWARRLIINEDLDSGTQIPFIKRAVAEGYGVIVLNPNENYIEVEKPKIHVQSSSDSSDEPAEKRERKDKVSKETKKRRDFYEKYRNPQREKEMMQLYIRENGSPEEHAIYVWDHFIAQAAAENVFFVAHSYGGLAFVELMIQREADVKNKVTAVALTDSVHNVWHQEAGKTIREWMRENCCNWVSSSEPLDTSVESMLPDCPRVSAGFSCCQMQSHEDLLLCFLL

SEQ ID NO: 5028 - protein, 416 aa, Homo Sapiens
MSISLSSLILLPIWINMAQIQQGGPDEKEKTTALKDLLSRIDLDELMKKDEPPLDFPDTLEGFEYAFNEKGQLRHIKTGEPFVFNYREDLHRWNQKRYEALGEIITKYVYELLEKDCNLKKVSIPVDATESEPKSFIFMSEDALTNPQKLMVLIHGSGVVRAGQWARRLIINEDLDSGTQIPFIKRAVAEGYGVIVLNPNENYIEVEKPKIHVQSSSDSSDEPAEKRERKDKVSKETKKRRDFYEKYRNPQREKEMMQLYIRENGSPEEHAIYVWDHFIAQAAAENVFFVAHSYGGLAFVELMIQREADVKNKVTAVALTDSVHNVWHQEAGKTIREWMRENCCNWVSSSEPLDTSVESMLPDCPRVSAGTDRHELTSWKSFPSIFKFFTEASEAKTSSLKPAVTRRSHRIKHEEL

SEQ ID NO: 5029 - protein, 36 aa, Homo Sapiens
AAAAAFGESAGQVGGAAEADVRGAEPPPCLLRGPLF

SEQ ID NO: 5030 - protein, 76 aa, Homo Sapiens
MDQEPVGGVERGEAVAASGAAAAAAFGESAGQMSNERGFENVELGVIGKKKKVPRRVIHFVSGETMEEYSTDEDEV

SEQ ID NO: 5031 - protein, 213 aa, Homo Sapiens
MDQEPVGGVERGEAVAASGAAAAAAFGESAGQMSNERGFENVELGVIGKKKKVPRRVIHFVSGETMEEYSTDEDEVDGLEKKDVLPTVDPTKLTWGPYLWFYMLRAATSTLSVCDFLGEKIASVLGISTPKYQYAIDEYYRMKKEEEEEEEENRMSEEAEKQYQQNKLQTDSIVQTDQPETVISSSFVNVNFEMEGDSEVIMESKQNPVSVPP

SEQ ID NO: 5032 - protein, 213 aa, Homo Sapiens; identical to SEQ ID NO: 5031

SEQ ID NO: 5033 - protein, 236 aa, Homo Sapiens
MEVGLPAITLFLTSASSPVVATTMDQEPVGGVERGEAVAASGAAAAAAFGESAGQMSNERGFENVELGVIGKKKKVPRRVIHFVSGETMEEYSTDEDEVDGLEKKDVLPTVDPTKLTWGPYLWFYMLRAATSTLSVCDFLGEKIASVLGISTPKYQYAIDEYYRMKKEEEEEEEENRMSEEAEKQYQQNKLQTDSIVQTDQPETVISSSFVNVNFEMEGDSEVIMESKQNPVSVPP

SEQ ID NO: 5034 - protein, 89 aa, Homo Sapiens
MEVGLPAITLFLTSASSPVVATTMDQEPVGGVERGEAVAASGAAAAAAFGESAGQNLTLLPRLKFMARSRLAATSTSRVQAILLPQPPV

SEQ ID NO: 5035 - protein, 140 aa, Homo Sapiens
MSNERGFENVELGVIGKKKKVPRRVIHFVSGETMEEYSTDEDEVDGLEKKDVLPTVDPTKLTWGPYLWFYMLRAATSTLSVCDFLGEKIASVLGISTPKYQYAIDEYYRMKKEEEEEEEENRMSEEAEKQYQQNKLQTDS

SEQ ID NO: 5036 - protein, 39 aa, Homo Sapiens
  misc_feature (1)..(1): Xaa can be any naturally occurring amino acid
XAFGESAGQEIKGSKKLSHGPKGNVDVRTAIAKFYLKDE

SEQ ID NO: 5037 - protein, 7 aa, Homo Sapiens
  misc_feature (1)..(1): Xaa can be any naturally occurring amino acid
XLRGPLF

SEQ ID NO: 5038 - protein, 49 aa, Homo Sapiens
  misc_feature (1)..(1): Xaa can be any naturally occurring amino acid
XNKLQTDSIVQTDQPETVISSSFVNVNFEMEGDSEVIMESKQNPVSVPP

SEQ ID NO: 5039 - protein, 173 aa, Homo Sapiens
MHWKMLLLLLLYYNAEASMCHRWSRAVLFPAAHRPKRSSSLPLNPVLQTSLEEVELLYEFLLAELEISPDLQISIKDEELASLRKASDFRTVCNNVIPKSIPDIRRLSASLSSHPGILKKEDFERTVLTLAYTAYRTALSHGHQKDIWAQSLVSLFQALRHDLMRSSQPGVPP

SEQ ID NO: 5040 - protein, 173 aa, Homo Sapiens; identical to SEQ ID NO: 5039

SEQ ID NO: 5041 - protein, 173 aa, Homo Sapiens; identical to SEQ ID NO: 5039

SEQ ID NO: 5042 - protein, 78 aa, Homo Sapiens
MLLSAVCVMLNLAGSILSCQNAQLVNSLEGCQLIKFDSVEVCVCCELQHQSSGCSNLGETLKLNPLQENCNAVRLTLK

SEQ ID NO: 5043 - protein, 539 aa, Homo Sapiens
MPPAGGPRAPRPAALPRSLSRLRECPGRSRIVLALGATQMALGCLIVAVSFAALALTTSARVRHSCPFWAGFSVLLSGLIGVVSWKRPLSLVITFFMLLSAVCVMLNLAGSILSCQNAQLVNSLEGCQLIKFDSVEVCVCCELQHQSSGCSNLGETLKLNPLQENCNAVRLTLKDLLFSVCALNVLSTIVCALATAMCCMQMVSSDVLQMFLPQRSHPANPTCVTPHGTVLHQTLDFDEFIPPLPPPPYYPPEYTCTPSTEAQRGLHLDFAPSPFGTLYDVAINSPGLLYPAELPPPYEAVVGQPPASQVTSIGQQVAESSSGDPNTSAGFSTPVPADSTSLLVSEGTATPGSSPSPDGPVGAPAPSEPALPPGHVSPEDPGMGSQVQPGPGRVSRSTSDPTLCTSSMAGDASSHRPSCSQDLEAGLSEAVPGSASMSRSATAACRAQLSPAGDPDTWKTDQRPTPEPFPATSKERPRSLVDSKAYADARVLVAKFLEHSHCALPTEAQHMVGAMRLAVTNEERLEEEAVFGADVLDQV

SEQ ID NO: 5044 - protein, 575 aa, Homo Sapiens
MASWLRRKLRGKRRPVIAFCLLMILSAMAVTRFPPQRPSAGPDPGPMEPQGVTGAPATHIRQALSSSRRQRARNMGFWRSRALPRNSILVCAEEQGHRARVDRSRESPGGDLRHPGRVRRDITLSGHPRLSTQHVVLLREDEVGDPGTKDLGHPQHGSPIQETQSEVVTLVSPLPGSDMAALPAWRATSGLTLWPHTAEGRDLLGAENRALTGGQQAEDPTLASGAHQWPGSVEKLQGSVWCDAETLLSSSRTGGQAPPWLTDHDVQMLRLLAQGEVVDKARVPAHGQVLQVGFSTEAALQDLSSPRLSQLCSQGLCGLIKRPGDLPEVLSFHVDRVLGLRRSLPAVARRFHSPLLPYRYTDGGARPVIWWAPDVQHLSDPDEDQNSLALGWLQYQALLAHSCNWPGQAPCPGIHHTEWARLALFDFLLQVHDRLDRYCCGFEPEPSDPCVEERLREKCQNPAELRLVHILVRSSDPSHLVYIDNAGNLQHPEDKLNFRLLEGIDGFPESAVKVLASGCLQNMLLKSLQMDPVFWESQGGAQGLKQVLQTLEQRGQVLLGHIQKHNLTLFRDEDP

SEQ ID NO: 5045 - protein, 575 aa, Homo Sapiens; identical to SEQ ID NO: 5044

SEQ ID NO: 5046 - protein, 140 aa, Homo Sapiens
MVHDRLDRYCCGFEPEPSDPCVEERLREKCQNPAELRLVHILVRSSDPSHLVYIDNAGNLQHPEDKLNFRLLEGIDGFPESAVKVLASGCLQNMLLKSLQMDPVFWESQGGAQGLKQVLQTLEQRGQVLLGHIQKHNLTL

SEQ ID NO: 5047 - protein, 133 aa, Homo Sapiens [sequence omitted]

SEQ ID NO: 5048 - protein, 133 aa, Homo Sapiens [sequence omitted]

SEQ ID NO: 5049 - protein, 52 aa, Homo Sapiens [sequence omitted]

SEQ ID NO: 5050 - protein, 87 aa, Homo Sapiens
MMSKRYLQKATKGKLLIIIFIVTLWGKVVSSANHHKAHHVKTGTCEVVALHRCCNKNKIEERSQTVKCSCFPGQVAGTTRAAPSCVD

SEQ ID NO: 5051 - protein, 110 aa, Homo Sapiens
MMSKRYLQKATKGKLLIIIFIVTLWGKVVSSANHHKAHHVKTGTCEVVALHRCCNKNKIEERSQTVKCSCFPGQVAGTTRAAPSCVDASIVEQKWWCHMQPCLEGEECKV

SEQ ID NO: 5052 - protein, 34 aa, Homo Sapiens
MQPCLEGEECKVLPDRKGWSCSSGNKVKTTRVTH

SEQ ID NO: 5053 - protein, 131 aa, Homo Sapiens
MSKRYLQKATKGKLLIIIFIVTLWGKVVSSANHHKAHHVKTGTCEVVALHRCCNKNKIEERSQTVKCSCFPGQVAGTTRAAPSCVDASIVEQKWWCHMQPCLEGEECKVLPDRKGWSCSSGNKVKTTRANV

SEQ ID NO: 5054 - protein, 131 aa, Homo Sapiens
MSKRYLQKATKGKLLIIIFIVTLWGKVVSSANHHKAHHVKTGTCEVVALHRCCNKNKIEERSQTVKCSCFPGQVAGTTRAAPSCVDASIVEQKWWCHMQPCLEGEECKVLPDRKGWSCSSGNKVKTTRVTH

SEQ ID NO: 5055 - protein, 131 aa, Homo Sapiens; identical to SEQ ID NO: 5054

SEQ ID NO: 5056 - protein, 49 aa, Homo Sapiens
MSKRYLQKATKGKLLIIIFIVTLWGKVVSSANHHKGNPLTQEKSSDPQG

SEQ ID NO: 5057 - protein, 101 aa, Homo Sapiens
MVTPITRMSKRYLQKATKGKLLIIIFIVTLWGKVVSSANHHKAHHVKTGTCEVVALHRCCNKNKIEERSQTVKCSCFPGQVAGTTRAAPSCVDASIVEQKW

SEQ ID NO: 5058 - protein, 133 aa, Homo Sapiens
MSERVERNWSTGGWLLALCLAWLWTHLTLAALQPPTATVLVQQGTCEVIAAHRCCNRNRIEERSQTVKCSCFSGQVAGTTRAKPSCVDASIVLQRWWCQMEPCLPGEECKVLPDLSGWSCSSGHKVKTTKVTR

SEQ ID NO: 5059 - protein, 169 aa, Homo Sapiens
MSERVERNWSTGGWLLALCLAWLWTHLTLAALQPPTATVLVQQGTCEVIAAHRCCNRNRIEERSQTVKCSCFSGQVAGTTRAKPSCVDDLLLAAHCARRDPRAALRLLLPQPPSSCRDGGVRWSPACRGRSVRCSRTCRDGAAAVDTKSKPPRSHDSSWGSRPGQERLD

SEQ ID NO: 5060 - protein, 58 aa, Homo Sapiens
MRSPRMRVCAKSVLLSHWLFLAYVLMVCCKLMSASSQHLRGHAGHHQIKQGTCEVVAV

SEQ ID NO: 5061 - protein, 77 aa, Homo Sapiens
MRSPRMRVCAKSVLLSHWLFLAYVLMVCCKLMSASSQHLRGHAGHHQIKQGTCEVVAVHRCCNKNRIEERSQTVKCS

SEQ ID NO: 5062 - protein, 140 aa, Homo Sapiens
MRSPRMRVCAKSVLLSHWLFLAYVLMVCCKLMSASSQHLRGHAGHHQIKQGTCEVVAVHRCCNKNRIEERSQTVKCSCFPGQVAGTTRAQPSCVEASIVIQKWWCHMNPCLEGEDCKVLPDYSGWSCSSGNKVKTTKVTR

SEQ ID NO: 5063 - protein, 181 aa, Homo Sapiens
MAPSPRTGSRQDATALPSMSSTFWAFMILASLLIAYCSQLAAGTCEIVTLDRDSSQPRRTIARQTARCACRKGQIAGTTRARPACVDARIIKTKQWCDMLPCLEGEGCDLLINRSGWTCTQPGGRIKTTTSPSKPPKRAPPGIPSCRQRAGGSLGSRDLRTSLLCQGSHLADRRRWLRPSQ

SEQ ID NO: 5064 - protein, 132 aa, Homo Sapiens
MAPSPRTGSRQDATALPSMSSTFWAFMILASLLIAYCSQLAAGTCEIVTLDRDSSQPRRTIARQTARCACRKGQIAGTTRARPACVDARIIKTKQWCDMLPCLEGEGCDLLINRSGWTCTQPGGRIKTTTVS

SEQ ID NO: 5065 - protein, 125 aa, Homo Sapiens
MQLLKALWALAGAALCCFLVLVIHAQFLKEGQLAAGTCEIVTLDRDSSQPRRTIARQTARCACRKGQIAGTTRARPACVDARIIKTKQWCDMLPCLEGEGCDLLINRSGWTCTQPGGRIKTTTVS

SEQ ID NO: 5066 - protein, 53 aa, Homo Sapiens
MYHHREWPARIIKTKQWCDMLPCLEGEGCDLLINRSGWTCTQPGGRIKTTTVS

SEQ ID NO: 5067 - protein, 145 aa, Homo Sapiens
MFTSPSEGKPGNMDRHHYEMFTKFGDDGFLIHLDNARGFGRHSHDEISILSPLSQCCMIKKKTLLHLQLLAQADYRLSDVMRESLLEDQLSPVLTEPHLLALDRRLQTILRTVEGCIVAHGQQSVIVDGPVEQLAPDSGQANLTS

SEQ ID NO: 5068 - protein, 541 aa, Homo Sapiens
MPGLRRDRLLTLLLLGALLSADLYFHLWPQVQRQLRPRERPRGCPCTGRASSLARDSAAAASDPGTIVHNFSRTEPRTEPAGGSHSGSSSKLQALFAHPLYNVPEEPPLLGAEDSLLASQEALRYYRRKVARWNRRHKMYREQMNLTSLDPPLQLRLEASWVQFHLGINRHGLYSRSSPVVSKLLQDMRHFPTISADYSQDEKALLGACDCTQIVKPSGVHLKLVLRFSDFGKAMFKPMRQQRDEETPVDFFYFIDFQRHNAEIAAFHLDRILDFRRVPPTVGRIVNVTKEILEVTKNEILQSVFFVSPASNVCFFAKCPYMCKTEYAVCGNPHLLEGSLSAFLPSLNLAPRLSVPNPWIRSYTLAGKEEWEVNPLYCDTVKQIYPYNNSQRLLNVIDMAIFDFLIGNMDRHHYEMFTKFGDDGFLIHLDNARGFGRHSHDEISILSPLSQCCMIKKKTLLHLQLLAQADYRLSDVMRESLLEDQLSPVLTEPHLLALDRRLQTILRTVEGCIVAHGQQSVIVDGPVEQLAPDSGQANLTS

SEQ ID NO: 5069 - protein, 21 aa, Homo Sapiens
QRHNAEIAAFHLDREYGPAPL

SEQ ID NO: 5070 - protein, 127 aa, Homo Sapiens
  misc_feature (1)..(1): Xaa can be any naturally occurring amino acid
XFHLWPQVQRQLRPRERPRGCPCTGRASSLARDSAAAASDPGTIVHNFSRTEPRTEPAGGSHSGSSSKLQALFAHPLYNVPEEPPLLGAEDSLLASQEALRYYRRKVARWNRPQFLLLKGRGGVCDP

SEQ ID NO: 5071 - protein, 584 aa, Homo Sapiens
MKMMLVRRFRVLILMVFLVACALHIALDLLPRLERRGARPSGEPGCSCAQPAAEVAAPGWAQVRGRPGEPPAASSAAGDAGWPNKHTLRILQDFSSDPSSNLSSHSLEKLPPAAEPAERALRGRDPGALRPHDPAHRPLLRDPGPRRSESPPGPGGDASLLARLFEHPLYRVAVPPLTEEDVLFNVNSDTRLSPKAAENPDWPHAGAEGAEFLSPGEAAVDSYPNWLKFHIGINRYELYSRHNPAIEALLHDLSSQRITSVAMKSGGTQLKLIMTFQNYGQALFKPMKQTREQETPPDFFYFSDYERHNAEIAAFHLDRILDFRRVPPVAGRMVNMTKEIRDVTRDKKLWRTFFISPANNICFYGECSYYCSTEHALCGKPDQIEGSLAAFLPDLSLAKRKTWRNPWRRSYHKRKKAEWEVDPDYCEEVKQTPPYDSSHRILDVMDMTIFDFLMGNMDRHHYETFEKFGNETFIIHLDNGRGFGKYSHDELSILVPLQQCCRIRKSTYLRLQLLAKEEYKLSLLMAESLRGDQVAPVLYQPHLEALDRRLRVVLKAVRDCVERNGLHSVVDDDLDTEHRAASAR

SEQ ID NO: 5072 - protein, 218 aa, Homo Sapiens
MGMWSIGAGALGAAALALLLANTDVFLSKPQKAALEYLEDIDLKTLEKEPRTFKAKELWEKNGAVIMAVRRPGCFLCREEAADLSSLKSMLDQLGVPLYAVVKEHIRTEVKDFQPYFKGEIFLDEKKKFYGPQRRKMMFMGFIRLGVWYNFFRAWNGGFSGNLEGEGFILGGVFVVGSGKQGILLEHREKEFGDKVNLLSVLEAAKMIKPQTLASEKK

SEQ ID NO: 5073 - protein, 229 aa, Homo Sapiens
MSFLQDPSFFTMGMWSIGAGALGAAALALLLANTDVFLSKPQKAALEYLEDIDLKTLEKEPRTFKAKELWEKNGAVIMAVRRPGCFLCREEAADLSSLKSMLDQLGVPLYAVVKEHIRTEVKDFQPYFKGEIFLDEKKKFYGPQRRKMMFMGFIRLGVWYNFFRAWNGGFSGNLEGEGFILGGVFVVGSGKQGILLEHREKEFGDKVNLLSVLEAAKMIKPQTLASEKK

SEQ ID NO: 5074 - protein, 229 aa, Homo Sapiens; identical to SEQ ID NO: 5073

SEQ ID NO: 5075 - protein, 229 aa, Homo Sapiens; identical to SEQ ID NO: 5073

SEQ ID NO: 5076 - protein, 229 aa, Homo Sapiens; identical to SEQ ID NO: 5073

SEQ ID NO: 5077 - protein, 229 aa, Homo Sapiens; identical to SEQ ID NO: 5073

SEQ ID NO: 5078 - protein, 425 aa, Homo Sapiens
MMPSESGAERRDRAAAQVGTAAATAVATAAPAGGGPDPEALSAFPGRHLSGLSWPQVKRLDALLSEPIPIHGRGNFPTLSVQPRQIVQVVRSTLEEQGLHVHSVRLHGSAASHVLHPESGLGYKDLDLVFRVDLRSEASFQLTKAVVLACLLDFLPAGVSRAKITPLTLKEAYVQKLVKVCTDSDRWSLISLSNKSGKNVELKFVDSVRRQFEFSIDSFQIILDSLLLFGQCSSTPMSEAFHPTVTGESLYGDFTEALEHLRHRVIATRSPEEIRGGGLLKYCHLLVRGFRPRPSTDVRALQRYMCSRFFIDFPDLVEQRRTLERYLEAHFGGADAARRYACLVTLHRVVNESTVCLMNHERRQTLDLIAALALQALAEQGPAATAALAWRPPGTDGVVPATVNYYVTPVQPLLAHAYPTWLPCN

SEQ ID NO: 5079 - protein, 113 aa, Homo Sapiens
MISTRYRRRRDAPRGPGRCPPHPTRPRGPGRKRGAAGSPGAAPSASRRPEFPKPLRVLPWRERGRGGREWPMSLRSPLPTSACGWGESGRRAGPGSLRSSDRTERARCSLRPR

SEQ ID NO: 5080 - protein, 225 aa, Homo Sapiens
MLLTLAGGALFFPGLFALCTWALRRSQPGWSRTDCVMISTRLVSSVHAVLATGSGIVIIRSCDDVITGRHWLAREYVWFLIPYMIYDSYAMYLCEWCRTRDQNRAPSLTLRNFLSRNRLMITHHAVILFVLVPVAQLKQQHTLLYKVNGILTLATFLSCRILLFPFMYWSYGRQQGLSLLQVPFSIPFYCNVANAFLVAPQIYWFCLLCRKAVRLFDTPQAKKDG

SEQ ID NO: 5081 - protein, 257 aa, Homo Sapiens
MLLTLAGGALFFPGLFALCTWALRRSQPGWSRTDCVMISTRLVSSVHAVLATGSGIVIIRSCDDVITGRHWLAREYVWFLIPYMIYDSYAMYLCEWCRTRDQNRAPSLTLRNFLSRNRLMITHHAVILFVLVPVAQRLRGDLGDFFVGCIFTAELSTPFVSLGRVLIQLKQQHTLLYKVNGILTLATFLSCRILLFPFMYWSYGRQQGLSLLQVPFSIPFYCNVANAFLVAPQIYWFCLLCRKAVRLFDTPQAKKDG

SEQ ID NO: 5082 - protein, 69 aa, Homo Sapiens
MLLTLAGGALFFPGLFALCTWALRRSQPGWSRTDCVMISTRLVSSVHAVLATGSGIVIIRSCDDVITGS

SEQ ID NO: 5083 - protein, 149 aa, Homo Sapiens
MLLTLAGGALFFPGLFALCTWALRRSQPGWSRTDCVMISTRYRRRRDAPRGPGRCPPHPTRPRGPGRKRGAAGSPGAAPSASRRPEFPKPLRVLPWRERGRGGREWPMSLRSPLPTSACGWGESGRRAGPGSLRSSDRTERARCSLRPR

SEQ ID NO: 5084 - protein, 38 aa, Homo Sapiens
  misc_feature (1)..(1): Xaa can be any naturally occurring amino acid
XATGSGIVIIRSCDDVITGRGSGETLGTSLSAASSRQN

SEQ ID NO: 5085 - protein, 252 aa, Homo Sapiens
GQGIAAALIHLPSTGNKHWRPRSPEASTDCCWLHQATGSGSVTQAGVQWYDLGSLQPLPPRFKRFSCLSLPSSWDYRSSWELPDLQEGKIQAISDSDGVNYPWYGNTTETCTIVGPTKRDSKFIISMNDNFYPSVTWAVPVSESNVAKLTNIYRDQSFTTWLVATNTSTNDMIILQTLHWRMQLSIEVNPNRPLGQRARLREPIAQDQPKILSKNEPIPPSALVKPNANDAQVLMWRPKYGQPLVVIPPKHR

SEQ ID NO: 5086 - protein, 283 aa, Homo Sapiens
MPGFFCDCWPSLEIRALLYAMGCIQSIGGKARVFREGITVIDVKASIDPVPTSIDESSSVVLRYRTPHFRASAQVVMPPIPKKETWVVGWIQACSHMEFYNQYGEQGMSSWELPDLQEGKIQAISDSDGVNYPWYGNTTETCTIVGPTKRDSKFIISMNDNFYPSVTWAVPVSESNVAKLTNIYRDQSFTTWLVATNTSTNDMIILQTLHWRMQLSIEVNPNRPLGQRARLREPIAQDQPKILSKNEPIPPSALVKPNANDAQVLMWRPKYGQPLVVIPPKHR

SEQ ID NO: 5087 - protein, 280 aa, Homo Sapiens
MTSYILISFVLLIGVGCIEKDQSCPVFGGRKRLHLLFVGGQLRQVRMLRGSPEASTDCCWLHQATGSGSVTQAGVQWYDLGSLQPLPPRFKRFSCLSLPSSWDYRSSWELPDLQEGKIQAISDSDGVNYPWYGNTTETCTIVGPTKRDSKFIISMNDNFYPSVTWAVPVSESNVAKLTNIYRDQSFTTWLVATNTSTNDMIILQTLHWRMQLSIEVNPNRPLGQRARLREPIAQDQPKILSKNEPIPPSALVKPNANDAQVLMWRPKYGQPLVVIPPKHR

SEQ ID NO: 5088 - protein, 160 aa, Homo Sapiens
MQRVSGLLSWTLSRVLWLSGLSEPGAARQPRIMEEKALEVYDLIRTIRDPEKPNTLEELEVVSESCVEVQEINEEEYLVIIRFTPTVPHCSLATLIGLCLRVKLQRCLPFKHKLEIYISEGTHSTEEDINKQINDKERVAAAMENPNLREIVEQCVLEPD

SEQ ID NO: 5089 - protein, 130 aa, Homo Sapiens
MQRVSGLLSWTLSRVLWLSGLSEPGAARQPRIMEEKALEVYDLIRTIRDPEKPNTLEELEVVSESCVEVQEINEEEYLVIIRFTPTVPHCSLATLIGLCLRVKLQRCLPFKHKLEIYISEGTHSTEEDSK

SEQ ID NO: 5090 - protein, 102 aa, Homo Sapiens
MQRVSGLLSWTLSRVLWLSGLSEPGAARQPRIMEEKALEVYDLIRTIRDPEKPNTLEELEVVSESCVEVQEINEEEYLVIIRFTPTVPHCSLATLIVGNLHF

SEQ ID NO: 5091 - protein, 102 aa, Homo Sapiens; identical to SEQ ID NO: 5090

SEQ ID NO: 5092 - protein, 69 aa, Homo Sapiens
MQRVSGLLSWTLSRVLWLSGLSEPGAARQPRIMEEKALEVYGWNAMAGSRLTATSAFWFQVILLPQSPK

SEQ ID NO: 5093 - protein, 186 aa, Homo Sapiens
MAAWGKKHAGKDPVRDECEERNRFTETREEDVTDEHGEREPFAETDEHTGANTKKPEDTAEDLTAKRKRMKMDKTCSKTKNKSKHALRKKQLKRQKRDYIHSLKLLNVLEEYITDEQKEEEEEEGEEEELIRIFQEQQKKWQQYRSVRRERLKEMKLLRDQFVKALEDFEDLCDRVFSDEDSELDN

SEQ ID NO: 5094 - protein, 186 aa, Homo Sapiens; identical to SEQ ID NO: 5093

SEQ ID NO: 5095 - protein, 90 aa, Homo Sapiens
MKAKKAHPRVEYNKTSGNAFEEQFSLPTKVRGSPLASQDNQPRILWAGGLPRPSWRLNLWRPGGRSMQERIQSVMNVRKETVLQKQGRKM

SEQ ID NO: 5096 - protein, 226 aa, Homo Sapiens
MPGFLSFLSVSLRSPGSGIASSFPGQPATDPVGRRAAKAQLEAQFMAAWGKKHAGKDPVRDECEERNRFTETREEDVTDEHGEREPFAETDEHTGANTKKPEDTAVGANNFKNYPVHIGVSSEQHILLDCSLSRQKRDYIHSLKLLNVLEEYITDEQKEEEEEEGEEEELIRIFQEQQKKWQQYRSVRRERLKEMKLLRDQFVKALEDFEDLCDRVFSDEDSELDN

SEQ ID NO: 5097 - protein, 25 aa, Homo Sapiens
KERCQYYTASFSDYAKYYALVCYGE

SEQ ID NO: 5098 - protein, 155 aa, Homo Sapiens
MCIVLRPSRVHNSEENTMRALTLKDILNGTFSYKTFFPNWISGQEYLHQSADNNIVLYNIETGQSYTILSNRTMKSVNASNYGLSPDRQFVYLESDYSKLWRYSYTATYYIYDLSNGEFVRGNELPRPIQYLCWSPVGSKLAYVYQNNIYLKQRP

SEQ ID NO: 5099 - protein, 121 aa, Homo Sapiens
MCIVLRPSRVHNSEENTMRALTLKDILNGTFSYKTFFPNWISGQEYLHQSADNNIVLYNIETGQSYTILSNRTMKSVNASNYGLSPDRQFVYLESDYSKLWRYSYTATYYIYDLSNGKWQL

SEQ ID NO: 5100 - protein, 760 aa, Homo Sapiens
MKTWVKIVFGVATSAVLALLVMCIVLRPSRVHNSEENTMRALTLKDILNGTFSYKTFFPNWISGQEYLHQSADNNIVLYNIETGQSYTILSNRTMKSVNASNYGLSPDRQFVYLESDYSKLWRYSYTATYYIYDLSNGEFVRGNELPRPIQYLCWSPVGSKLAYVYQNNIYLKQRPGDPPFQITFNGRENKIFNGIPDWVYEEEMLATKYALWWSPNGKFLAYAEFNDTDIPVIAYSYYGDEQYPRTINIPYPKAGAKNPVVRIFIIDTTYPAYVGPQEVPVPAMIASSDYYFSWLTWVTDERVCLQWLKRVQNVSVLSICDFREDWQTWDCPKTQEHIEESRTGWAGGFFVSTPVFSYDAISYYKIFSDKDGYKHIHYIKDTVENAIQITSGKWEAINIFRVTQDSLFYSSNEFEEYPGRRNIYRISIGSYPPSKKCVTCHLRKERCQYYTASFSDYAKYYALVCYGPGIPISTLHDGRTDQEIKILEENKELENALKNIQLPKEEIKKLEVDEITLWYKMILPPQFDRSKKYPLLIQVYGGPCSQSVRSVFAVNWISYLASKEGMVIALVDGRGTAFQGDKLLYAVYRKLGVYEVEDQITAVRKFIEMGFIDEKRIAIWGWSYGGYVSSLALASGTGLFKCGIAVAPVSSWEYYASVYTERFMGLPTKDDNLEHYKNSTVMARAEYFRNVDYLLIHGTADDNVHFQNSAQIAKALVNAQVDFQAMWYSDQNHGLSGLSTNHLYTHMTHFLKQCFSLSD

SEQ ID NO: 5101 - protein, 735 aa, Homo Sapiens
MKTWVKIVFGVATSAVLALLVMCIVLRPSRVHNSEENTMRALTLKDILNGTFSYKTFFPNWISGQEYLHQSADNNIVLYNIETGQSYTILSNRTMLWRYSYTATYYIYDLSNGEFVRGNELPRPIQYLCWSPVGSKLAYVYQNNIYLKQRPGDPPFQITFNGRENKIFNGIPDWVYEEEMLATKYALWWSPNGKFLAYAEFNDTDIPVIAYSYYGDEQYPRTINIPYPKAGAKNPVVRIFIIDTTYPAYVGPQEVPVPAMIASSDYYFSWLTWVTDERVCLQWLKRVQNVSVLSICDFREDWQTWDCPKTQEHIEESRTGWAGGFFVSTPVFSYDAISYYKIFSDKDGYKHIHYIKDTVENAIQITSGKWEAINIFRVTQDSLFYSSNEFEEYPGRRNIYRISIGSYPPSKKCVTCHLRKERCQYYTASFSDYAKYYALVCYGPGIPISTLHDGRTDQEIKILEENKELENALKNIQLPKEEIKKLEVDEITLWYKMILPPQFDRSKKYPLLIQVYGGPCSQSVRSVFAVNWISYLASKEGMVIALVDGRGTAFQGDKLLYAVYRKLGVYEVEDQITAVRKFIEMGFIDEKRIAIWGWSYGGYVSSLALASGTGLFKCGIAVAPVSSWEYYASVYTERFMGLPTKDDNLEHYKNSTVMARAEYFRNVDYLLIHGTADDNVHFQNSAQIAKALVNAQVDFQAMWYSDQNHGLSGLSTNHLYTHMTHFLKQCFSLSD

SEQ ID NO: 5102 - protein, 759 aa, Homo Sapiens
MTWVKIVFGVATSAVLALLVMCIVLRPSRVHNSEENTMRALTLKDILNGTFSYKTFFPNWISGQEYLHQSADNNIVLYNIETGQSYTILSNRTMKSVNASNYGLSPDRQFVYLESDYSKLWRYSYTATYYIYDLSNGEFVRGNELPRPIQYLCWSPVGSKLAYVYQNNIYLKQRPGDPPFQITFNGRENKIFNGIPDWVYEEEMLATKYALWWSPNGKFLAYAEFNDTDIPVIAYSYYGDEQYPRTINIPYPKAGAKNPVVRIFIIDTTYPAYVGPQEVPVPAMIASSDYYFSWLTWVTDERVCLQWLKRVQNVSVLSICDFREDWQTWDCPKTQEHIEESRTGWAGGFFVSTPVFSYDAISYYKIFSDKDGYKHIHYIKDTVENAIQITSGKWEAINIFRVTQDSLFYSSNEFEEYPGRRNIYRISIGSYPPSKKCVTCHLRKERCQYYTASFSDYAKYYALVCYGPGIPISTLHDGRTDQEIKILEENKELENALKNIQLPKEEIKKLEVDEITLWYKMILPPQFDRSKKYPLLIQVYGGPCSQSVRSVFAVNWISYLASKEGMVIALVDGRGTAFQGDKLLYAVYRKLGVYEVEDQITAVRKFIEMGFIDEKRIAIWGWSYGGYVSSLALASGTGLFKCGIAVAPVSSWEYYASVYTERFMGLPTKDDNLEHYKNSTVMARAEYFRNVDYLLIHGTADDNVHFQNSAQIAKALVNAQVDFQAMWYSDQNHGLSGLSTNHLYTHMTHFLKQCFSLSD

SEQ ID NO: 5103 - protein, 47 aa, Homo Sapiens
  misc_feature (1)..(1): Xaa can be any naturally occurring amino acid
XYTERFMGLPTKDDNLEHYKNSTVMARAEYFRNVDYLLIHGTADGEV

SEQ ID NO: 5104 - protein, 86 aa, Homo Sapiens
MLGIWTLLPLVLTSVARLSSKSVNAQVTDINSKGLELRKTVTTVETQNLEGLHHDGQFCHKPCPPDVNMESSRNAHSPATPSAKRK

SEQ ID NO: 5105 - protein, 103 aa, Homo Sapiens
MLGIWTLLPLVLTSVARLSSKSVNAQVTDINSKGLELRKTVTTVETQNLEGLHHDGQFCHKPCPPDVNMESSRNAHSPATPSAKRKDPDLTWGGFVFFFCQFH

SEQ ID NO: 5106 - protein, 132 aa, Homo Sapiens
MLGIWTLLPLVLTSVARLSSKSVNAQVTDINSKGLELRKTVTTVETQNLEGLHHDGQFCHKPCPPGERKARDCTVNGDEPDCVPCQEGKEYTDKAHFSSKCRRCRLCDEGHDVNMESSRNAHSPATPSAKRK

SEQ ID NO: 5107 - protein, 149 aa, Homo Sapiens
MLGIWTLLPLVLTSVARLSSKSVNAQVTDINSKGLELRKTVTTVETQNLEGLHHDGQFCHKPCPPGERKARDCTVNGDEPDCVPCQEGKEYTDKAHFSSKCRRCRLCDEGHDVNMESSRNAHSPATPSAKRKDPDLTWGGFVFFFCQFH

SEQ ID NO: 5108 - protein, 149 aa, Homo Sapiens; identical to SEQ ID NO: 5107

SEQ ID NO: 5109 - protein, 335 aa, Homo Sapiens
MLGIWTLLPLVLTSVARLSSKSVNAQVTDINSKGLELRKTVTTVETQNLEGLHHDGQFCHKPCPPGERKARDCTVNGDEPDCVPCQEGKEYTDKAHFSSKCRRCRLCDEGHGLEVEINCTRTQNTKCRCKPNFFCNSTVCEHCDPCTKCEHGIIKECTLTSNTKCKEEGSRSNLGWLCLLLLPIPLIVWVKRKEVQKTCRKHRKENQGSHESPTLNPETVAINLSDVDLSKYITTIAGVMTLSQVKGFVRKNGVNEAKIDEIKNDNVQDTAEQKVQLLRNWHQLHGKKEAYDTLIKDLKKANLCTLAEKIQTIILKDITSDSENSNFRNEIQSLV

SEQ ID NO: 5110 - protein, 233 aa, Homo Sapiens [sequence omitted]

SEQ ID NO: 5111 - protein, 244 aa, Homo Sapiens
MLGIWTLLPLVLTSVARLSSKSVNAQVTDINSKGLELRKTVTTVETQNLEGLHHDGQFCHKPCPPGERKARDCTVNGDEPDCVPCQEGKEYTDKAHFSSKCRRCRLCDEGHGLEVEINCTRTQNTKCRCKPNFFCNSTVCEHCDPCTKCEHGIIKECTLTSNTKCKEEGSRSNLGWLCLLLLPIPLIVWVKRKEVQKTCRKHRKENQGSHESPTLNPMESCSIAQAGVQGCNHGSLQPQSPGLK

SEQ ID NO: 5112 - protein, 220 aa, Homo Sapiens
MLGIWTLLPLVLTSVARLSSKSVNAQVTDINSKGLELRKTVTTVETQNLEGLHHDGQFCHKPCPPGERKARDCTVNGDEPDCVPCQEGKEYTDKAHFSSKCRRCRLCDEGHGLEVEINCTRTQNTKCRCKPNFFCNSTVCEHCDPCTKCEHGIIKECTLTSNTKCKEEGSRSNLGWLCLLLLPIPLIVWVKRKEVQKTCRKHRKENQGSHESPTLNPMLT

SEQ ID NO: 5113 - protein, 314 aa, Homo Sapiens
MLGIWTLLPLVLTSVARLSSKSVNAQVTDINSKGLELRKTVTTVETQNLEGLHHDGQFCHKPCPPGERKARDCTVNGDEPDCVPCQEGKEYTDKAHFSSKCRRCRLCDEGHGLEVEINCTRTQNTKCRCKPNFFCNSTVCEHCDPCTKCEHGIIKECTLTSNTKCKEEVKRKEVQKTCRKHRKENQGSHESPTLNPETVAINLSDVDLSKYITTIAGVMTLSQVKGFVRKNGVNEAKIDEIKNDNVQDTAEQKVQLLRNWHQLHGKKEAYDTLIKDLKKANLCTLAEKIQTIILKDITSDSENSNFRNEIQSLV

SEQ ID NO: 5114 - protein, 119 aa, Homo Sapiens
LSKKPLEEKPSQPYSARESLSEVQSLSSFQSESCDDNASIVTVMHLVNAVVDTVSTEESLAAPDLSKPRGYHWDTSDWMPSVPLPDIQEFPNYEVIDEQTPLYSADPNAIDTDYYPGGY

SEQ ID NO: 5115 - protein, 4588 aa, Homo Sapiens
MGRHLALLLLLLLLFQHFGDSDGSQRLEQTPLQFTHLEYNVTVQENSAAKTYVGHPVKMGVYITHPAWEVRYKIVSGDSENLFKAEEYILGDFCFLRIRTKGGNTAILNREVKDHYTLIVKALEKNTNVEARTKVRVQVLDTNDLRPLFSPTSYSVSLPENTAIRTSIARVSATDADIGTNGEFYYSFKDRTDMFAIHPTSGVIVLTGRLDYLETKLYEMEILAADRGMKLYGSSGISSMAKLTVHIEQANECAPVITAVTLSPSELDRDPAYAIVTVDDCDQGANGDIASLSIVAGDLLQQFRTVRSFPGSKEYKVKAIGGIDWDSHPFGYNLTLQAKDKGTPPQFSSVKVIHVTSPQFKAGPVKFEKDVYRAEISEFAPPNTPVVMVKAIPAYSHLRYVFKSTPGKAKFSLNYNTGLISILEPVKRQQAAHFELEVTTSDRKASTKVLVKVLGANSNPPEFTQTAYKAAFDENVPIGTTVMSLSAVDPDEGENGYVTYSIANLNHVPFAIDHFTGAVSTSENLDYELMPRVYTLRIRASDWGLPYRREVEVLATITLNNLNDNTPLFEKINCEGTIPRDLGVGEQITTVSAIDADELQLVQYQIEAGNELDFFSLNPNSGVLSLKRSLMDGLGAKVSFHSLRITATDGENFATPLYINITVAASHKLVNLQCEETGVAKMLAEKLLQANKLHNQGEVEDIFFDSHSVNAHIPQFRSTLPTGIQVKENQPVGSSVIFMNSTDLDTGFNGKLVYAVSGGNEDSCFMIDMETGMLKILSPLDRETTDKYTLNITVYDLGIPQKAAWRLLHVVVVDANDNPPEFLQESYFVEVSEDKEVHSEIIQVEATDKDLGPNGHVTYSIVTDTDTFSIDSVTGVVNIARPLDRELQHEHSLKIEARDQAREEPQLFSTVVVKVSLEDVNDNPPTFIPPNYRVKVREDLPEGTVIMWLEAHDPDLGQSGQVRYSLLDHGEGNFDVDKLSGAVRIVQQLDFEKKQVYNLTVRAKDKGKPVSLSSTCYVEVEVVDVNENLHPPVFSSFVEKGTVKEDAPVGSLVMTVSAHDEDARRDGEIRYSIRDGSGVGVFKIGEETGVIETSDRLDRESTSHYWLTVFATDQGVVPLSSFIEIYIEVEDVNDNAPQTSEPVYYPEIMENSPKDVSVVQIEAFDPDSSSNDKLMYKITSGNPQGFFSIHPKTGLITTTSRKLDREQQDEHILEVTVTDNGSPPKSTIARVIVKILDENDNKPQFLQKFYKIRLPEREKPDRERNARREPLYHVIATDKDEGPNAEISYSIEDGNEHGKFFIEPKTGVVSSKRFSAAGEYDILSIKAVDNGRPQKSSTTRLHIEWISKPKPSLEPISFEESFFTFTVMESDPVAHMIGVISVEPPGIPLWFDITGGNYDSHFDVDKGTGTIIVAKPLDAEQKSNYNLTVEATDGTTTILTQVFIKVIDTNDHRPQFSTSKYEVVIPEDTAPETEILQISAVDQDEKNKLIYTLQSSRDPLSLKKFRLDPATGSLYTSEKLDHEAVHQHTLTVMVRDQDVPVKRNFARIVVNVSDTNDHAPWFTASSYKGRVYESAAVGSVVLQVTALDKDKGKNAEVLYSIESGNIGNSFMIDPVLGSIKTAKELDRSNQAEYDLMVKATDKGSPPMSEITSVRIFVTIADNASPKFTSKEYSVELSETVSIGSFVGMVTAHSQSSVVYEIKDGNTGDAFDINPHSGTIITQKALDFETLPIYTLIIQGTNMAGLSTNTTVLVHLQDENDNAPVFMQAEYTGLISESASINSVVLTDRNVPLVIRAADADKDSNALLVYHIVEPSVHTYFAIDSSTGAIHTVLSLDYEETSIFHFTVQVHDMGTPRLFAEYAANVTVHVIDINDCPPVFAKPLYEASLLLPTYKGVKVITVNATDADSSAFSQLIYSITEGNIGEKFSMDYKTGALTVQNTTQLRSRYELTVRASDGRFAGLTSVKINVKESKESHLKFTQDVYSAVVKENSTEAETLAVITAIGNPINEPLFYHILNPDRRFKISRTSGVLSTTGTPFDREQQEAFDVVVEVTEEHKPSAVAHVVVKVIVEDQNDNAPVFVNLPYYAVVKVDTEVGHVIRYVTAVDRDSGRNGEVHYYLKEHHEHFQIGPLGEISLKKQFELDTLNKEYLVTVVAKDGGNPAFSAEVIVPITVMNKAMPVFEKPFYSAEIAESIQVHSPVVHVQANSPEGLKVFYSITDGDPFSQFTINFNTGVINVIAPLDFEAHPAYKLSIRATDSLTGAHAEVFVDIIVDDINDNPPVFAQQSYAVTLSEASVIGTSVVQVRATDSDSEPNRGISYQMFGNHSKSHDHFHVDSSTGLISLLRTLDYEQSRQHTIFVRAVDGGMPTLSSDVIVTVDVTDLNDNPPLFEQQIYEARISEHAPHGHFVTCVKAYDADSSDIDKLQYSILSGNDHKHFVIDSATGIITLSNLHRHALKPFYSLNLSVSDGVFRSSTQVHVTVIGGNLHSPAFLQNEYEVELAENAPLHTLVMEVKTTDGDSGIYGHVTYHIVNDFAKDRFYINERGQIFTLEKLDRETPAEKVISVRLMAKDAGGKVAFCTVNVILTDDNDNAPQFRATKYEVNIGSSAAKGTSVVKVLASDADEGSNADITYAIEADSESVKENLEINKLSGVITTKESLIGLENEFFTFFVRAVDNGSPSKESVVLVYVKILPPEMQLPKFSEPFYTFTVSEDVPIGTEIDLIRAEHSGTVLYSLVKGNTPESNRDESFVIDRQSGRLKLEKSLDHETTKWYQFSILARCTQDDHEMVASVDVSIQVKDANDNSPVFESSPYEAFIVENLPGGSRVIQIRASDADSGTNGQVMYSLDQSQSVEVIESFAINMETGWITTLKELDHEKRDNYQIKVVASDHGEKIQLSSTAIVDVTVTDVNDSPPRFTAEIYKGTVSEDDPQGGVIAILSTTDADSEEINRQVTYFITGGDPLGQFAVETIQNEWKVYVKKPLDREKRDNYLLTITATDGTFSSKAIVEVKVLDANDNSPVCEKTLYSDTIPEDVLPGKLIMQISATDADIRSNAEITYTLLGSGAEKFKLNPDTGELKTSTPLDREEQAVYHLLVRATDGGGRFCQASIVLTLEDVNDNAPEFSADPYAITVFENTEPGTLLTRVQATDADAGLNRKILYSLIDSADGQFSINELSGIIQLEKPLDRELQAVYTLSLKAVDQGLPRRLTATGTVIVSVLDINDNPPVFEYREYGATVSEDILVGTEVLQVYAASRDIEANAEITYSIISGNEHGKFSIDSKTGAVFIIENLDYESSHEYYLTVEATDGGTPSLSDVATVNVNVTDINDNTPVFSQDTYTTVISEDAVLEQSVITVMADDADGPSNSHIHYSIIDGNQGSSFTIDPVRGEVKVTKLLDRETISGYTLTVQASDNGSPPRVNTTTVNIDVSDVNDNAPVFSRGNYSVIIQENKPVGFSVLQLVVTDEDSSHNGPPFFFTIVTGNDEKAFEVNPQGVLLTSSAIKRKEKDHYLLQVKVADNGKPQLSSLTYIDIRVIEESIYPPAILPLEIFITSSGEEYSGGVIGKIHATDQDVYDTLTYSLDPQMDNLFSVSSTGGKLIAHKKLDIGQYLLNVSVTDGKFTTVADITVHIRQVTQEMLNHTIAIRFANLTPEEFVGDYWRNFQRALRNILGVRRNDIQIVSLQSSEPHPHLDVLLFVEKPGSAQISTKQLLHKINSSVTDIEEIIGVRILNVFQKLCAGLDCPWKFCDEKVSVDESVMSTHSTARLSFVTPRHHRAAVCLCKEGRCPPVHHGCEDDPCPEGSECVSDPWEEKHTCVCPSGRFGQCPGSSSMTLTGNSYVKYRLTENENKLEMKLTMRLRTYSTHAVVMYARGTDYSILEIHHGRLQYKFDCGSGPGIVSVQSIQVNDGQWHAVALEVNGNYARLVLDQVHTASGTAPGTLKTLNLDNYVFFGGHIRQQGTRHGRSPQVGNGFRGCMDSIYLNGQELPLNSKPRSYAHIEESVDVSPGCFLTATEDCASNPCQNGGVCNPSPAGGYYCKCSALYIGTHCEISVNPCSSKPCLYGGTCVVDNGGFVCQCRGLYTGQRCQLSPYCKDEPCKNGGTCFDSLDGAVCQCDSGFRGERCQSDIDECSGNPCLHGALCENTHGSYHCNCSHEYRGRHCEDAAPNQYVSTPWNIGLAEGIGIVVFVAGIFLLVVVFVLCRKMISRKKKHQAEPKDKHLGPATAFLQRPYFDSKLNKNIYSDIPPQVPVRPISYTPSIPSDSRNNLDRNSFEGSAIPEHPEFSTFNPESVHGHRKAVAVCSVAPNLPPPPPSNSPSDSDSIQKPSWDFDYDTKVVDLDPCLSKKPLEEKPSQPYSARESLSEVQSLSSFQSESCDDNGYHWDTSDWMPSVPLPDIQEFPNYEVIDEQTPLYSADPNAIDTDYYPGGYDIESDFPPPPEDFPAADELPPLPPEFSNQFESIHPPRDMPAAGSLGSSSRNRQRFNLNQYLPNFYPLDMSEPQTKGTGENSTCREPHAPYPPGYQRHFEAPAVESMPMSVYASTASCSDVSACCEVESEVMMSDYESGDDGHFEEVTIPPLDSQQHTEV

SEQ ID NO: 5116 - protein, 488 aa, Homo Sapiens
MGRHLALLLLLLLLFQHFGDSDGSQRLEQTPLQFTHLEYNVTVQENSAAKTYVGHPVKMGVYITHPAWEVRYKIVSGDSENLFKAEEYILGDFCFLRIRTKGGNTAILNREVKDHYTLIVKALEKNTNVEARTKVRVQVLDTNDLRPLFSPTSYSVSLPENTAIRTSIARVSATDADIGTNGEFYYSFKDRTDMFAIHPTSGVIVLTGRLDYLETKLYEMEILAADRGMKLYGSSGISSMAKLTVHIEQANECAPVITAVTLSPSELDRDPAYAIVTVDDCDQGANGDIASLSIVAGDLLQQFRTVRSFPGSKEYKVKAIGGIDWDSHPFGYNLTLQAKDKGTPPQFSSVKVIHVTSPQFKAGPVKFEKDVYRAEISEFAPPNTPVVMVKAIPAYSHLRYVFKSTPGKAKFSLNYNTGLISILEPVKRQQAAHFELEVTTSDRKASTKVLVKVLGANSNPPEFTQTAYKAAFDENVPIGTTVMSLSAV

SEQ ID NO: 5117 - protein, 4590 aa, Homo Sapiens
MGRHLALLLLLLLLFQHFGDSDGSQRLEQTPLQFTHLEYNVTVQENSAAKTYVGHPVKMGVYITHPAWEVRYKIVSGDSENLFKAEEYILGDFCFLRIRTKGGNTAILNREVKDHYTLIVKALEKNTNVEARTKVRVQVLDTNDLRPLFSPTSYSVSLPENTAIRTSIARVSATDADIGTNGEFYYSFKDRTDMFAIHPTSGVIVLTGRLDYLETKLYEMEILAADRGMKLYGSSGISSMAKLTVHIEQANECAPVITAVTLSPSELDRDPAYAIVTVDDCDQGANGDIASLSIVAGDLLQQFRTVRSFPGSKEYKVKAIGGIDWDSHPFGYNLTLQAKDKGTPPQFSSVKVIHVTSPQFKAGPVKFEKDVYRAEISEFAPPNTPVVMVKAIPAYSHLRYVFKSTPGKAKFSLNYNTGLISILEPVKRQQAAHFELEVTTSDRKASTKVLVKVLGANSNPPEFTQTAYKAAFDENVPIGTTVMSLSAVDPDEGENGYVTYSIANLNHVPFAIDHFTGAVSTSENLDYELMPRVYTLRIRASDWGLPYRREVEVLATITLNNLNDNTPLFEKINCEGTIPRDLGVGEQITTVSAIDADELQLVQYQIEAGNELDFFSLNPNSGVLSLKRSLMDGLGAKVSFHSLRITATDGENFATPLYINITVAASHKLVNLQCEETGVAKMLAEKLLQANKLHNQGEVEDIFFDSHSVNAHIPQFRSTLPTGIQVKENQPVGSSVIFMNSTDLDTGFNGKLVYAVSGGNEDSCFMIDMETGMLKILSPLDRETTDKYTLNITVYDLGIPQKAAWRLLHVVVVDANDNPPEFLQESYFVEVSEDKEVHSEIIQVEATDKDLGPNGHVTYSIVTDTDTFSIDSVTGVVNIARPLDRELQHEHSLKIEARDQAREEPQLFSTVVVKVSLEDVNDNPPTFIPPNYRVKVREDLPEGTVIMWLEAHDPDLGQSGQVRYSLLDHGEGNFDVDKLSGAVRIVQQLDFEKKQVYNLTVRAKDKGKPVSLSSTCYVEVEVVDVNENLHPPVFSSFVEKGTVKEDAPVGSLVMTVSAHDEDARRDGEIRYSIRDGSGVGVFKIGEETGVIETSDRLDRESTSHYWLTVFATDQGVVPLSSFIEIYIEVEDVNDNAPQTSEPVYYPEIMENSPKDVSVVQIEAFDPDSSSNDKLMYKITSGNPQGFFSIHPKTGLITTTSRKLDREQQDEHILEVTVTDNGSPPKSTIARVIVKILDENDNKPQFLQKFYKIRLPEREKPDRERNARREPLYHVIATDKDEGPNAEISYSIEDGNEHGKFFIEPKTGVVSSKRFSAAGEYDILSIKAVDNGRPQKSSTTRLHIEWISKPKPSLEPISFEESFFTFTVMESDPVAHMIGVISVEPPGIPLWFDITGGNYDSHFDVDKGTGTIIVAKPLDAEQKSNYNLTVEATDGTTTILTQVFIKVIDTNDHRPQFSTSKYEVVIPEDTAPETEILQISAVDQDEKNKLIYTLQSSRDPLSLKKFRLDPATGSLYTSEKLDHEAVPAHLTVMVRDQDVPVKRNFARIVVNVSDTNDHAPWFTASSYKGRVYESAAVGSVVLQVTALDKDKGKNAEVLYSIESGTFGNIGNSFMIDPVLGSIKTAKELDRSNQAEYDLMVKATDKGSPPMSEITSVRIFVTIADNASPKFTSKEYSVELSETVSIGSFVGMVTAHSQSSVVYEIKDGNTGDAFDINPHSGTIITQKALDFETLPIYTLIIQGTNMAGLSTNTTVLVHLQDENDNAPVFMQAEYTGLISESASINSVVLTDRNVPLVIRAADADKDSNALLVYHIVEPSVHTYFAIDSSTGAIHTVLSLDYEETSIFHFTVQVHDMGTPRLFAEYAANVTVHVIDINDCPPVFAKPLYEASLLLPTYKGVKVITVNATDADSSAFSQLIYSITEGNIGEKFSMDYKTGALTVQNTTQLRSRYELTVRASDGRFAGLTSVKINVKESKESHLKFTQDVYSAVVKENSTEAETLAVITAIGNPINEPLFYHILNPDRRFKISRTSGVLSTTGTPFDREQQEAFDVVVEVTEEHKPSAVAHVVVKVIVEDQNDNAPVFVNLPYYAVVKVDTEVGHVIRYVTAVDRDSGRNGEVHYYLKEHHEHFQIGPLGEISLKKQFELDTLNKEYLVTVVAKDGGNPAFSAEVIVPITVMNKAMPVFEKPFYSAEIAESIQVHSPVVHVQANSPEGLKVFYSITDGDPFSQFTINFNTGVINVIAPLDFEAHPAYKLSIRATDSLTGAHAEVFVDIIVDDINDNPPVFAQQSYAVTLSEASVIGTSVVQVRATDSDSEPNRGISYQMFGNHSKSHDHFHVDSSTGLISLLRTLDYEQSRQHTIFVRAVDGGMPTLSSDVIVTVDVTDLNDNPPLFEQQIYEARISEHAPHGHFVTCVKAYDADSSDIDKLQYSILSGNDHKHFVIDSATGIITLSNLHRHALKPFYSLNLSVSDGVFRSSTQVHVTVIGGNLHSPAFLQNEYEVELAENAPLHTLVMEVKTTDGDSGIYGHVTYHIVNDFAKDRFYINERGQIFTLEKLDRETPAEKVISVRLMAKDAGGKVAFCTVNVILTDDNDNAPQFRATKYEVNIGSSAAKGTSVVKVLASDADEGSNADITYAIEADSESVKENLEINKLSGVITTKESLIGLENEFFTFFVRAVDNGSPSKESVVLVYVKILPPEMQLPKFSEPFYTFTVSEDVPIGTEIDLIRAEHSGTVLYSLVKGNTPESNRDESFVIDRQSGRLKLEKSLDHETTKWYQFSILARCTQDDHEMVASVDVSIQVKDANDNSPVFESSPYEAFIVENLPGGSRVIQIRASDADSGTNGQVMYSLDQSQSVEVIESFAINMETGWITTLKELDHEKRDNYQIKVVASDHGEKIQLSSTAIVDVTVTDVNDSPPRFTAEIYKGTVSEDDPQGGVIAILSTTDADSEEINRQVTYFITGGDPLGQFAVETIQNEWKVYVKKPLDREKRDNYLLTITATDGTFSSKAIVEVKVLDANDNSPVCEKTLYSDTIPEDVLPGKLIMQISATDADIRSNAEITYTLLGSGAEKFKLNPDTGELKTSTPLDREEQAVYHLLVRATDGGGRFCQASIVLTLEDVNDNAPEFSADPYAITVFENTEPGTLLTRVQATDADAGLNRKILYSLIDSADGQFSINELSGIIQLEKPLDRELQAVYTLSLKAVDQGLPRRLTATGTVIVSVLDINDNPPVFEYREYGATVSEDILVGTEVLQVYAASRDIEANAEITYSIISGNEHGKFSIDSKTGAVFIIENLDYESSHEYYLTVEATDGGTPSLSDVATVNVNVTDINDNTPVFSQDTYTTVISEDAVLEQSVITVMADDADGPSNSHIHYSIIDGNQGSSFTIDPVRGEVKVTKLLDRETISGYTLTVQASDNGSPPRVNTTTVNIDVSDVNDNAPVFSRGNYSVIIQENKPVGFSVLQLVVTDEDSSHNGPPFFFTIVTGNDEKAFEVNPQGVLLTSSAIKRKEKDHYLLQVKVADNGKPQLSSLTYIDIRVIEESIYPPAILPLEIFITSSGEEYSGGVIGKIHATDQDVYDTLTYSLDPQMDNLFSVSSTGGKLIAHKKLDIGQYLLNVSVTDGKFTTVADITVHIRQVTQEMLNHTIAIRFANLTPEEFVGDYWRNFQRALRNILGVRRNDIQIVSLQSSEPHPHLDVLLFVEKPGSAQISTKQLLHKINSSVTDIEEIIGVRILNVFQKLCAGLDCPWKFCDEKVSVDESVMSTHSTARLSFVTPRHHRAAVCLCKEGRCPPVHHGCEDDPCPEGSECVSDPWEEKHTCVCPSGRFGQCPGSSSMTLTGNSYVKYRLTENENKLEMKLTMRLRTYSTHAVVMYARGTDYSILEIHHGRLQYKFDCGSGPGIVSVQSIQVNDGQWHAVALEVNGNYARLVLDQVHTASGTAPGTLKTLNLDNYVFFGGHIRQQGTRHGRSPQVGNGFRGCMDSIYLNGQELPLNSKPRSYAHIEESVDVSPGCFLTATEDCASNPCQNGGVCNPSPAGGYYCKCSALYIGTHCEISVNPCSSKPCLYGGTCVVDNGGFVCQCRGLYTGQRCQLSPYCKDEPCKNGGTCFDSLDGAVCQCDSGFRGERCQSDIDECSGNPCLHGALCENTHGSYHCNCSHEYRGRHCEDAAPNQYVSTPWNIGLAEGIGIVVFVAGIFLLVVVFVLCRKMISRKKKHQAEPKDKHLGPATAFLQRPYFDSKLNKNIYSDIPPQVPVRPISYTPSIPSDSRNNLDRNSFEGSAIPEHPEFSTFNPESVHGHRKAVAVCSVAPNLPPPPPSNSPSDSDSIQKPSWDFDYDTKVVDLDPCLSKKPLEEKPSQPYSARESLSEVQSLSSFQSESCDDNGYHWDTSDWMPSVPLPDIQEFPNYEVIDEQTPLYSADPNAIDTDYYPGGYDIESDFPPPPEDFPAADELPPLPPEFSNQFESIHPPRDMPAAGSLGSSSRNRQRFNLNQYLPNFYPLDMSEPQTKGTGENSTCREPHAPYPPGYQRHFEAPAVESMPMSVYASTASCSDVSACCEVESEVMMSDYESGDDGHFEEVTIPPLDSQQHTEV

SEQ ID NO: 5118 - protein, 52 aa, Homo Sapiens
MTMAVIVRNKEKKVIFEFSGQISGSSFRSHFPPLPYSILFVVHTFLSHLELS

SEQ ID NO: 5119 - protein, 368 aa, Homo Sapiens
  misc_feature (1)..(1): Xaa can be any naturally occurring amino acid
XDSKLNKNIYSDIPPQVPVRPISYTPSIPSDSRNNLDRNSFEGSAIPEHPEFSTFNPESVHGHRKAVAVCSVAPNLPPPPPSNSPSDSDSIQKPSWDFDYDTKVVDLDPCLSKKPLEEKPSQPYSARESLSEVQSLSSFQSESCDDNESLAAPDLSKPRGYHWDTSDWMPSVPLPDIQEFPNYEVIDEQTPLYSADPNAIDTDYYPGGYDIESDFPPPPEDFPAADELPPLPPEFSNQFESIHPPRDMPAAGSLGSSSRNRQRFNLNQYLPNFYPLDMSEPQTKGTGENSTCREPHAPYPPGYQRHFEAPAVESMPMSVYASTASCSDVSACCEVESEVMMSDYESGDDGHFEEVTIPPLDSQQHTEV

SEQ ID NO: 5120 - protein, 285 aa, Homo Sapiens
  misc_feature (1)..(1): Xaa can be any naturally occurring amino acid
XSTTEALFASVEDYILVRGVSLVHTAKMNPVRMAEHALTVWMAPFVSVIRVLGEKGVRVISTSALETLACTGPSVRTRTAPITATAATSTGDVTARMLRPTTKVVDLDPCLSKKPLEEKPSQPYSARESLSEVQSLSSFQSESCDDNGYHWDTSDWMPSVPLPDIQEFPNYEVIDEQTPLYSADPNAIDTDYYPGGYDIESDFPPPPEDFPAADELPPLPPEFSNQFESIHPPRDMPAAGSLGSSSRNRQRFNLNQYLPNFYPLDMSEPQTKGTGENSTCREPHA

SEQ ID NO: 5121 - protein, 92 aa, Homo Sapiens
ALLAAGGRGVPGPPPQLRVPTPSASRSLRVSEPRGLGVRALPCAAPPDCQRRGLGDAPLPHGQLRSSSPPRPGDLFQNRIPPPLKHTVLPQS

SEQ ID NO: 5122 - protein, 181 aa, Homo Sapiens
CRMVQEQCCHSQLEELHCATGISLANEQDRCATPHGDNASLEATFVKRCCHCCLLGRAAQAQGQSCEYSLMVGYQCGQVFQACCVKSQETGDLDVGGLQETGGGPCKQQCRDTGDEVVCSCFVGYQLLSDGVSCEDVNECITGSHSCRLGESCINTVGSFRCQRDSSCGTGYELTEDNSCK

SEQ ID NO: 5123 - protein, 60 aa, Homo Sapiens
DITEGNLRDSFDIIKRYMDGMTVAPLLNCHILKDLQSWEMKTVASAILDSDLYSEHFQSS

SEQ ID NO: 5124 - protein, 65 aa, Homo Sapiens
MATHQKDCSLPYATESKECRMVQEQCCHSQLEELHCATGISLANEQDRCATPHGDNASLEATFVK

SEQ ID NO: 5125 - protein, 139 aa, Homo Sapiens
MATHQKDCSLPYATESKECRMVQEQCCHSQLEELHCATGISLANEQDRCATPHGDNASLEATFVKRCCHCCLLGRAAQAQGQSCEYSLMVGYQCGQVFQACCVKSQETGDLDVGGLQETDKIIEVEEEQEDPYLNDRCR

SEQ ID NO: 5126 - protein, 721 aa, Homo Sapiens
MERAAPSRRVPLPLLLLGGLALLAAGVDADVLLEACCADGHRMATHQKDCSLPYATESKECRAVGLASLCQDLNGAWAVWKVGRASQAEGTASARAQRRGMVQEQCCHSQLEELHCATGISLANEQDRCATPHGDNASLEATFVKRCCHCCLLGRAAQAQGQSCEYSLMVGYQCGQVFQACCVKSQETGDLDVGGLQETDKIIEVEEEQEDPYLNDRCRGGGPCKQQCRDTGDEVVCSCFVGYQLLSDGVSCEDVNECITGSHSCRLGESCINTVGSFRCQRDSSCGTGYELTEDNSCKDIDECESGIHNCLPDFICQNTLGSFRCRPKLQCKSGFIQDALGNCIDINECLSISAPCPIGHTCINTEGSYTCQKNVPNCGRGYHLNEEGTRCVDVDECAPPAEPCGKGHRCVNSPGSFRCECKTGYYFDGISRMCVDVNECQRYPGRLCGHKCENTLGSYLCSCSVGFRLSVDGRSCEDINECSSSPCSQECANVYGSYQCYCRRGYQLSDVDGVTCEDIDECALPTGGHICSYRCINIPGSFQCSCPSSGYRLAPNGRNCQDIDECVTGIHNCSINETCFNIQGGFRCLAFECPENYRRSAATRCERLPCHENRECSKLPLRITYYHLSFPTNIQAPAVVFRMGPSSAVPGDSMQLAITGGNEEGFFTTRKVSPHSGVVALTKPVPEPRDLLLTVKMDLSRHGTVSSFVAKLFIFVSAEL

SEQ ID NO: 5127 - protein, 683 aa, Homo Sapiens
MERAAPSRRVPLPLLLLGGLALLAAGVDADVLLEACCADGHRMATHQKDCSLPYATESKECRMVQEQCCHSQLEELHCATGISLANEQDRCATPHGDNASLEATFVKRCCHCCLLGRAAQAQGQSCEYSLMVGYQCGQVFQACCVKSQETGDLDVGGLQETDKIIEVEEEQEDPYLNDRCRGGGPCKQQCRDTGDEVVCSCFVGYQLLSDGVSCEDVNECITGSHSCRLGESCINTVGSFRCQRDSSCGTGYELTEDNSCKDIDECESGIHNCLPDFICQNTLGSFRCRPKLQCKSGFIQDALGNCIDINECLSISAPCPIGHTCINTEGSYTCQKNVPNCGRGYHLNEEGTRCVDVDECAPPAEPCGKGHRCVNSPGSFRCECKTGYYFDGISRMCVDVNECQRYPGRLCGHKCENTLGSYLCSCSVGFRLSVDGRSCEDINECSSSPCSQECANVYGSYQCYCRRGYQLSDVDGVTCEDIDECALPTGGHICSYRCINIPGSFQCSCPSSGYRLAPNGRNCQDIDECVTGIHNCSINETCFNIQGGFRCLAFECPENYRRSAATRCERLPCHENRECSKLPLRITYYHLSFPTNIQAPAVVFRMGPSSAVPGDSMQLAITGGNEEGFFTTRKVSPHSGVVALTKPVPEPRDLLLTVKMDLSRHGTVSSFVAKLFIFVSAEL

SEQ ID NO: 5128 - protein, 703 aa, Homo Sapiens
MERAAPSRRVPLPLLLLGGLALLAAGVDADVLLEACCADGHRMATHQKDCSLPYATESKECRMVQEQCCHSQLEELHCATGISLANEQDRCATPHGDNASLEATFVKRCCHCCLLGRAAQAQGQSCEYSLMVGYQCGQVFQACCVKSQETGDLDVGGLQETDKIIEVEEEQEDPYLNDRCRGGGPCKQQCRDTGDEVVCSCFVGYQLLSDGVSCEDVNECITGSHSCRLGESCINTVGSFRCQRDSSCGTGYELTEDNSCKDIDECESGIHNCLPDFICQNTLGSFRCRPKLQCKSGFIQDALGNCIDINECLSISAPCPIGHTCINTEGSYTCQKNVPNCGRGYHLNEEGTRCVDVDECAPPAEPCGKGHRCVNSPGSFRCECKTGYYFDGISRMCVDVNECQRYPGRLCGHKCENTLGSYLCSCSVGFRLSVDGRSCEDINECSSSPCSQECANVYGSYQCYCRRGYQLSDVDGVTCEDIDECALPTGGHICSYRCINIPGSFQCSCPSSGYRLAPNGRNCQDIDECVTGIHNCSINETCFNIQGGFRCLAFECPENYRRSAATLQQEKTDTVRCIKSCRPNDVTCVFDPVHTISHTVISLPTFREFTRPEEIIFLRAITPPHPASQANIIFDITEGNLRDSFDIIKRYMDGMTVGVVRQVRPIVGPFHAVLKLEMNYVVGGVVSHRNVVNVHIFVSEYWF

SEQ ID NO: 5129 - protein, 566 aa, Homo Sapiens
MERAAPSRRVPLPLLLLGGLALLAAGVDADVLLEACCADGHRMATHQKDCSLPYATESKECRMVQEQCCHSQLEELHCATGISLANEQDRCATPHGDNASLEATFVKRCCHCCLLGRAAQAQGQSCEYSLMVGYQCGQVFQACCVKSQETGDLDVGGLQETDKIIEVEEEQEDPYLNDRCRGGGPCKQQCRDTGDEVVCSCFVGYQLLSDGVSCEDVNECITGSHSCRLGESCINTVGSFRCQRDSSCGTGYELTEDNSCKDIDECESGIHNCLPDFICQNTLGSFRCRPKLQCKSGFIQDALGNCIDINECLSISAPCPIGHTCINTEGSYTCQKNVPNCGRGYHLNEEGTRCVDVDECAPPAEPCGKGHRCVNSPGSFRCECKTGYYFDGISRMCVDVNECQRYPGRLCGHKCENTLGSYLCSCSVGFRLSVDGRSCEDINECSSSPCSQECANVYGSYQCYCRRGYQLSDVDGVTCEDIDECALPTGGHICSYRCINIPGSFQCSCPSSGYRLAPNGRNCQDIDECVTGIHNCSINETCFNIQGGFRCLAFECPENYRRSAAT

SEQ ID NO: 5130 - protein, 601 aa, Homo Sapiens
MERAAPSRRVPLPLLLLGGLALLAAGVDADVLLEACCADGHRMATHQKDCSLPYATESKECRMVQEQCCHSQLEELHCATGISLANEQDRCATPHGDNASLEATFVKRCCHCCLLGRAAQAQGQSCEYSLMVGYQCGQVFQACCVKSQETGDLDVGGLQETDKIIEVEEEQEDPYLNDRCRGGGPCKQQCRDTGDEVVCSCFVGYQLLSDGVSCEDVNECITGSHSCRLGESCINTVGSFRCQRDSSCGTGYELTEDNSCKDIDECESGIHNCLPDFICQNTLGSFRCRPKLQCKSGFIQDALGNCIDINECLSISAPCPIGHTCINTEGSYTCQKNVPNCGRGYHLNEEGTRCVDVDECAPPAEPCGKGHRCVNSPGSFRCECKTGYYFDGISRMCVDVNECQRYPGRLCGHKCENTLGSYLCSCSVGFRLSVDGRSCEDINECSSSPCSQECANVYGSYQCYCRRGYQLSDVDGVTCEDIDECALPTGGHICSYRCINIPGSFQCSCPSSGYRLAPNGRNCQDIDECVTGIHNCSINETCFNIQGGFRCLAFECPENYRRSAATQKSKKGRQNTPAGSSKEDCRVLPWKQGLEDTHLDA

SEQ ID NO: 5131 - protein, 172 aa, Homo Sapiens
MERAAPSRRVPLPLLLLGGLALLAAGVDADVLLEACCADGHRMATHQKDCSLPYATESKECRMVQEQCCHSQLEELHCATGISLANEQDRCATPHGDNASLEATFVKRCCHCCLLGRAAQAQGQSCEYSLMVGYQCGQVFQACCVKSQETGDLDVGGLQETGGGPCKQQCRD

SEQ ID NO: 5132 - protein, 189 aa, Homo Sapiens
MNSYTRGSRRPSAKAASPAASVTSRVSPSGPGVPVDADVLLEACCADGHRMATHQKDCSLPYATESKECRMVQEQCCHSQLEELHCATGISLANEQDRCATPHGDNASLEATFVKRCCHCCLLGRAAQAQGQSCEYSLMVGYQCGQVFQACCVKSQETGDLDVGGLQETDKIIEVEEEQEDPYLNDRCR

SEQ ID NO: 5133 - protein, 183 aa, Homo Sapiens
  misc_feature (1)..(1): Xaa can be any naturally occurring amino acid
XKRCCHCCLLGRAAQAQGQSCEYSLMVGYQCGQVFQACCVKSQETGDLDVGGLQETDKIIEVEEEQEDPYLNDRCRGGGPCKQQCRDTGDEVVCSCFVGYQLLSDGVSCEDVNECITGSHSCRLGESCINTVGSFRCQRDSSCGTGYELTEDNSCKEYSGILPLPTQATVQEWLYTRCSRQLY

SEQ ID NO: 5134 - protein, 159 aa, Homo Sapiens
MVLLWEPAGAWLALGLALALGPSVAAAAPRQDCTGVECPPLENCIEEALEPGACCATCVQQGCACEGYQYYDCLQGGFVRGRVPAGQSYFVDFGSTECSCPPGGGKISCQFMLCPELPPNCIEAVVVADSCPQCGQVGCVHAGHKYAAGHTVHLPPCRA

SEQ ID NO: 5135 - protein, 1184 aa, Homo Sapiens
MVLLWEPAGAWLALGLALALGPSVAAAAPRQDCTGVECPPLENCIEEALEPGACCATCVQQGCACEGYQYYDCLQGGFVRGRVPAGQSYFVDFGSTECSCPPGGGKISCQFMLCPELPPNCIEAVVVADSCPQCGQVGCVHAGHKYAAGHTVHLPPCRACHCPDAGGELICYQLPGCHGNFSDAEEGDPERHYEDPYSYDQEVAEVEAATALGGEVQAGAVQAGAGGPPAALGGGSQPLSTIQAPPWPAVLPRPTAAAALGPPAPVQAKARRVTEDSEEEEEEEEEREEMAVTEQLAAGGHRGLDGLPTTAPAGPSLPIQEERAEAGARAEAGARPEENLILDAQATSRSTGPEGVTHAPSLGKAALVPTQAVPGSPRDPVKPSPHNILSTSLPDAAWIPPTREVPRKPQVLPHSHVEEDTDPNSVHSIPRSSPEGSTKDLIETCCAAGQQWAIDNDECLEIPESGTEDNVCRTAQRHCCVSYLQEKSCMAGVLGAKEGETCGAEDNDSCGISLYKQCCDCCGLGLRVRAEGQSCESNPNLGYPCNHVMLSCCEGEEPLIVPEVRRPPEPAAAPRRVSEAEMAGREALSLGTEAELPNSLPGDDQDECLLLPGELCQHLCINTVGSYHCACFPGFSLQDDGRTCRPEGHPPQPEAPQEPALKSEFSQVASNTIPLPLPQPNTCKDNGPCKQVCSTVGGSAICSCFPGYAIMADGVSCEDINECVTDLHTCSRGEHCVNTLGSFHCYKALTCEPGYALKDGECEDVDECAMGTHTCQPGFLCQNTKGSFYCQARQRCMDGFLQDPEGNCVDINECTSLSEPCRPGFSCINTVGSYTCQRNPLICARGYHASDDGTKCVDVNECETGVHRCGEGQVCHNLPGSYRCDCKAGFQRDAFGRGCIDVNECWASPGRLCQHTCENTLGSYRCSCASGFLLAADGKRCEDVNECEAQRCSQECANIYGSYQCYCRQGYQLAEDGHTCTDIDECAQGAGILCTFRCLNVPGSYQCACPEQGYTMTANGRSCKDVDECALGTHNCSEAETCHNIQGSFRCLRFECPPNYVQVSKTKCERTTCHDFLECQNSPARITHYQLNFQTGLLVPAHIFRIGPAPAFTGDTIALNIIKGNEEGYFGTRRLNAYTGVVYLQRAVLEPRDFALDVEMKLWRQGSVTTFLAKMHIFFTTFAL

SEQ ID NO: 5136 - protein, 1231 aa, Homo Sapiens
MVLLWEPAGAWLALGLALALGPSVAAAAPRQDCTGVECPPLENCIEEALEPGACCATCVQQGCACEGYQYYDCLQGGFVRGRVPAGQSYFVDFGSTECSCPPGGGKISCQFMLCPELPPNCIEAVVVADSCPQCGQVGCVHAGHKYAAGHTVHLPPCRACHCPDAGGELICYQLPGCHGNFSDAEEGDPERHYEDPYSYDQEVAEVEAATALGGEVQAGAVQAGAGGPPAALGGGSQPLSTIQAPPWPAVLPRPTAAAALGPPAPVQAKARRVTEDSEEEEEEEEEREEMAVTEQLAAGGHRGLDGLPTTAPAGPSLPIQEERAEAGARAEAGARPEENLILDAQATSRSTGPEGVTHAPSLGKAALVPTQAVPGSPRDPVKPSPHNILSTSLPDAAWIPPTREVPRKPQVLPHSHVEEDTDPNSVHSIPRSSPEGSTKDLIETCCAAGQQWAIDNDECLEIPESGTEDNVCRTAQRHCCVSYLQEKSCMAGVLGAKEGETCGAEDNDSCGISLYKQCCDCCGLGLRVRAEGQSCESNPNLGYPCNHVMLSCCEGEEPLIVPEVRRPPEPAAAPRRVSEAEMAGREALSLGTEAELPNSLPGDDQDECLLLPGELCQHLCINTVGSYHCACFPGFSLQDDGRTCRPEGHPPQPEAPQEPALKSEFSQVASNTIPLPLPQPNTCKDNGPCKQVCSTVGGSAICSCFPGYAIMADGVSCEDQDECLMGAHDCSRRQFCVNTLGSFYCVNHTVLCADGYILNAHRKCVDINECVTDLHTCSRGEHCVNTLGSFHCYKALTCEPGYALKDGECEDVDECAMGTHTCQPGFLCQNTKGSFYCQARQRCMDGFLQDPEGNCVDINECTSLSEPCRPGFSCINTVGSYTCQRNPLICARGYHASDDGTKCVDVNECETGVHRCGEGQVCHNLPGSYRCDCKAGFQRDAFGRGCIDVNECWASPGRLCQHTCENTLGSYRCSCASGFLLAADGKRCEDVNECEAQRCSQECANIYGSYQCYCRQGYQLAEDGHTCTDIDECAQGAGILCTFRCLNVPGSYQCACPEQGYTMTANGRSCKDVDECALGTHNCSEAETCHNIQGSFRCLRFECPPNYVQVSKTKCERTTCHDFLECQNSPARITHYQLNFQTGLLVPAHIFRIGPAPAFTGDTIALNIIKGNEEGYFGTRRLNAYTGVVYLQRAVLEPRDFALDVEMKLWRQGSVTTFLAKMHIFFTTFAL

SEQ ID NO: 5137 - protein, 1231 aa, Homo Sapiens; identical to SEQ ID NO: 5136

SEQ ID NO: 5138 - protein, 109 aa, Homo Sapiens
  misc_feature (1)..(1): Xaa can be any naturally occurring amino acid
XIDECAQGAGILCTFRCLNVPGSYQCACPEQGYTMTANGRSCKDVDECALGTHNCSEAETCHNIQGSFRCLRFECPPNYVQVSKTWCVPTQAPSGSLHGGPRPWRVPCG

SEQ ID NO: 5139 - protein, 101 aa, Homo Sapiens
  misc_feature (1)..(1): Xaa can be any naturally occurring amino acid
XVDECALGTHNCSEAETCHNIQGSFRCLRFECPPNYVQVSKTKCERTKWKLARWATAVAGALWVRLGDDLRTRDTRPCWGSWTPLDDPSPKLTFHFMFHCD

SEQ ID NO: 5140 - protein, 44 aa, Homo Sapiens
MPGIKRILTVTILALCLPSPGNAQAQCTNGFDLDRQSGQCLASL

SEQ ID NO: 5141 - protein, 489 aa, Homo Sapiens
MPGIKRILTVTILALCLPSPGNAQAQCTNGFDLDRQSGQCLDGVSLSSPRLECNGAISAHCNLCLPGSSDSSASASQVAGITDIDECRTIPEACRGDMMCVNQNGGYLCIPRTNPVYRGPYSNPYSTPYSGPYPAAAPPLSAPNYPTISRPLICRFGYQMDESNQCVDVDECATDSHQCNPTQICINTEGGYTCSCTDGYWLLEGQCLDIDECRYGYCQQLCANVPGSYSCTCNPGFTLNEDGRSCQDVNECATENPCVQTCVNTYGSFICRCDPGYELEEDGVHCSDMDECSFSEFLCQHECVNQPGTYFCSCPPGYILLDDNRSCQDINECEHRNHTCNLQQTCYNLQGGFKCIDPIRCEEPYLRISDNRCMCPAENPGCRDQPFTILYRDMDVVSGRSVPADIFQMQATTRYPGAYYIFQIKSGNEGREFYMRQTGPISATLVMTRPIKGPREIQLDLEMITVNTVINFRGSSVIRLRIYVSQYPF

SEQ ID NO: 5142 - protein, 91 aa, Homo Sapiens
MPGIKRILTVTILALCLPSPGNAQAQCTNGFDLDRQSGQCLDIDECRTIPEACRGDMMCVNQNGGYLCIPRTNPVYRGPYSNPYSTPYSGP

SEQ ID NO: 5143 - protein, 448 aa, Homo Sapiens
MPGIKRILTVTILALCLPSPGNAQAQCTNGFDLDRQSGQCLDIDECRTIPEACRGDMMCVNQNGGYLCIPRTNPVYRGPYSNPYSTPYSGPYPAAAPPLSAPNYPTISRPLICRFGYQMDESNQCVDVDECATDSHQCNPTQICINTEGGYTCSCTDGYWLLEGQCLDIDECRYGYCQQLCANVPGSYSCTCNPGFTLNEDGRSCQDVNECATENPCVQTCVNTYGSFICRCDPGYELEEDGVHCSDMDECSFSEFLCQHECVNQPGTYFCSCPPGYILLDDNRSCQDINECEHRNHTCNLQQTCYNLQGGFKCIDPIRCEEPYLRISDNRCMCPAENPGCRDQPFTILYRDMDVVSGRSVPADIFQMQATTRYPGAYYIFQIKSGNEGREFYMRQTGPISATLVMTRPIKGPREIQLDLEMITVNTVINFRGSSVIRLRIYVSQYPF

SEQ ID NO: 5144 - protein, 35 aa, Homo Sapiens
MPGIKRILTVTILALCLPSPGNAQQQERWTPVCQP

SEQ ID NO: 5145 - protein, 453 aa, Homo Sapiens
MRSGNCRQRYMILTVTILALCLPSPGNAQAQCTNGFDLDRQSGQCLDIDECRTIPEACRGDMMCVNQNGGYLCIPRTNPVYRGPYSNPYSTPYSGPYPAAAPPLSAPNYPTISRPLICRFGYQMDESNQCVDVDECATDSHQCNPTQICINTEGGYTCSCTDGYWLLEGQCLDIDECRYGYCQQLCANVPGSYSCTCNPGFTLNEDGRSCQDVNECATENPCVQTCVNTYGSFICRCDPGYELEEDGVHCSDMDECSFSEFLCQHECVNQPGTYFCSCPPGYILLDDNRSCQDINECEHRNHTCNLQQTCYNLQGGFKCIDPIRCEEPYLRISDNRCMCPAENPGCRDQPFTILYRDMDVVSGRSVPADIFQMQATTRYPGAYYIFQIKSGNEGREFYMRQTGPISATLVMTRPIKGPREIQLDLEMITVNTVINFRGSSVIRLRIYVSQYPF

SEQ ID NO: 5146 - protein, 261 aa, Homo Sapiens
AGSARTLGTARGGHGAGKGLSPTALLPARVASCARSQKAWPLCIIDVNECELYGQEGRPRLCMHACVNTPGSYRCTCPGGYRTLADGKSCEDVDECVGLQPVCPQGTTCINTGGSFQCVSPECPEGSGNVSYVKTSPFQCERNPCPMDSRPCRHLPKTISFHYLSLPSNLKTPITLFRMATASAPGRAGPNSLRFGIVGGNSRGHFVMQRSDRQTGDLILVQNLEGPQTLEVDVDMSEYLDRSFQANHVSKVTIFVSPYDF

SEQ ID NO: 5147 - protein, 305 aa, Homo Sapiens
MVPSSPRALFLLLLILACPEPRASQNCLSKQQLLSAIRQLQQLLKGQETRFAEGIRHMKSRLAALQNSVGRVGPDALPVSCPALNTPADGRKFGSKYLVDHEVHFTCNPGFRLVGPSSVVCLPNGTWTGEQPHCRDVDECVGLQPVCPQGTTCINTGGSFQCVSPECPEGSGNVSYVKTSPFQCERNPCPMDSRPCRHLPKTISFHYLSLPSNLKTPITLFRMATASAPGRAGPNSLRFGIVGGNSRGHFVMQRSDRQTGDLILVQNLEGPQTLEVDVDMSEYLDRSFQANHVSKVTIFVSPYDF

SEQ ID NO: 5148 - protein, 439 aa, Homo Sapiens
MVPSSPRALFLLLLILACPEPRASQNCLSKQQLLSAIRQLQQLLKGQETRFAEGIRHMKSRLAALQNSVGRVGPDALPVSCPALNTPADGRKFGSKYLVDHEVHFTCNPGFRLVGPSSVVCLPNGTWTGEQPHCRGISECSSQPCQNGGTCVEGVNQYRCICPPGRTGNRCQHQAQTAAPEGSVAGDSAFSRAPRCAQVERAQHCSCEAGFHLSGAAGDSVCQDVNECELYGQEGRPRLCMHACVNTPGSYRCTCPGGYRTLADGKSCEDVDECVGLQPVCPQGTTCINTGGSFQCVSPECPEGSGNVSYVKTSPFQCERNPCPMDSRPCRHLPKTISFHYLSLPSNLKTPITLFRMATASAPGRAGPNSLRFGIVGGNSRGHFVMQRSDRQTGDLILVQNLEGPQTLEVDVDMSEYLDRSFQANHVSKVTIFVSPYDF

SEQ ID NO: 5149 - protein, 366 aa, Homo Sapiens
MVPSSPRALFLLLLILACPEPRASQNCLSKQQLLSAIRQLQQLLKGQETRFAEGIRHMKSRLAALQNSVGRVGPDALPVSCPALNTPADGRKFGSKYLVDHEVHFTCNPGFRLVGPSSVVCLPNGTWTGEQPHCRGISECSSQPCQNGGTCVEGVNQYRCICPPGRTGNRCQHQAQTAAPEGSVAGDSAFSRAPRCAQVERAQHCSCEAGFHLSGAAGDSVCQDVNECELYGQEGRPRLCMHACVNTPGSYRCTCPGGYRTLADGKSCEDVDECVGLQPVCPQGTTCINTGGSFQCVSPECPEGSGNVSYVKTSPLTWRGLRRWRWTSTCRNTWTAPSRPTTCPRSPSLYPPMTSEGTQGHWGVES

SEQ ID NO: 5150 - protein, 393 aa, Homo Sapiens
MVPSSPRALFLLLLILACPEPRASQNCLSKQQLLSAIRQLQQLLKGQETRFAEGIRHMKSRLAALQNSVGRVGPDALPVSCPALNTPADGRKFGSKYLVDHEVHFTCNPGFRLVGPSSVVCLPNGTWTGEQPHCRGISECSSQPCQNGGTCVEGVNQYRCICPPGRTGNRCQHQAQTDVNECELYGQEGRPRLCMHACVNTPGSYRCTCPGGYRTLADGKSCEDVDECVGLQPVCPQGTTCINTGGSFQCVSPECPEGSGNVSYVKTSPFQCERNPCPMDSRPCRHLPKTISFHYLSLPSNLKTPITLFRMATASAPGRAGPNSLRFGIVGGNSRGHFVMQRSDRQTGDLILVQNLEGPQTLEVDVDMSEYLDRSFQANHVSKVTIFVSPYDF

SEQ ID NO: 5151 - protein, 273 aa, Homo Sapiens
RFAEGIRHMKSRLAALQNSVGRVGPDALPGISECSSQPCQNGGTCVEGVNQYRCICPPGRTGNRCQHQAQTAAPEGSVAGDSAFSRAPRCAQVERAQHCSCEAGFHLSGAAGDSVCQDVNECELYGQEGRPRLCMHACVNTPGSYRCTCPGGYRTLADGKSCEDVDECVGLQPVCPQGTTCINTGGSFQCVSPECPEGSGNVSYVKTSPFQCERNPCPMDSRPCRHLPKTISFHYLSLPSNLKTPITLFRMATASAPGRAGPNSLRFGIVGGN

SEQ ID NO: 5152 - protein, 55 aa, Homo Sapiens
MRRGRLLEIALGFTVLLASYTSHGADANLEAGNVKETRASRAKRRGGGGHDALKG

SEQ ID NO: 5153 - protein, 302 aa, Homo Sapiens
MRRGRLLEIALGFTVLLASYTSHGADANLEAGNVKETRASRAKRRGGGGHDALKGPNVCGSRYNAYCCPGWKTLPGGNQCIVPICRHSCGDGFCSRPNMCTCPSGQIAPSCGSRSIQHCNIRCMNGGSCSDDHCLCQKGYIGTHCGQPVCESGCLNGGRCVAPNRCACTYGFTGPQCERDYRTGPCFTVISNQMCQGQLSGIVCTKTLCCATTSMNVKLEHTTVANMLYVPIQQEASNVAAVPGGLEMALSALIWTNVPMEPICAASMQTARIPWDLTAVCARKDTQVMASLVQTLMSALRT

SEQ ID NO: 5154 - protein, 2871 aa, Homo Sapiens
MRRGRLLEIALGFTVLLASYTSHGADANLEAGNVKETRASRAKRRGGGGHDALKGPNVCGSRYNAYCCPGWKTLPGGNQCIVPICRHSCGDGFCSRPNMCTCPSGQIAPSCGSRSIQHCNIRCMNGGSCSDDHCLCQKGYIGTHCGQPVCESGCLNGGRCVAPNRCACTYGFTGPQCERDYRTGPCFTVISNQMCQGQLSGIVCTKTLCCATVGRAWGHPCEMCPAQPHPCRRGFIPNIRTGACQDVDECQAIPGLCQGGNCINTVGSFECKCPAGHKLNEVSQKCEDIDECSTIPGICEGGECTNTVSSYFCKCPPGFYTSPDGTRCIDVRPGYCYTALTNGRCSNQLPQSITKMQCCCDAGRCWSPGVTVAPEMCPIRATEDFNKLCSVPMVIPGRPEYPPPPLGPIPPVLPVPPGFPPGPQIPVPRPPVEYLYPSREPPRVLPVNVTDYCQLVRYLCQNGRCIPTPGSYRCECNKGFQLDLRGECIDVDECEKNPCAGGECINNQGSYTCQCRAGYQSTLTRTECRDIDECLQNGRICNNGRCINTDGSFHCVCNAGFHVTRDGKNCEDMDECSIRNMCLNGMCINEDGSFKCICKPGFQLASDGRYCKDINECETPGICMNGRCVNTDGSYRCECFPGLAVGLDGRVCVDTHMRSTCYGGYKRGQCIKPLFGAVTKSECCCASTEYAFGEPCQPCPAQNSAEYQALCSSGPGMTSAGSDINECALDPDICPNGICENLRGTYKCICNSGYEVDSTGKNCVDINECVLNSLLCDNGQCRNTPGSFVCTCPKGFIYKPDLKTCEDIDECESSPCINGVCKNSPGSFICECSSESTLDPTKTICIETIKGTCWQTVIDGRCEININGATLKSQCCSSLGAAWGSPCTLCQVDPICGKGYSRIKGTQCEDIDECEVFPGVCKNGLCVNTRGSFKCQCPSGMTLDATGRICLDIRLETCFLRYEDEECTLPIAGRHRMDACCCSVGAAWGTEECEECPMRNTPEYEELCPRGPGFATKEITNGKPFFKDINECKMIPSLCTHGKCRNTIGSFKCRCDSGFALDSEERNCTDIDECRISPDLCGRGQCVNTPGDFECKCDEGYESGFMMMKNCMDIDECQRDPLLCRGGVCHNTEGSYRCECPPGHQLSPNISACIDINECELSAHLCPNGRCVNLIGKYQCACNPGYHSTPDRLFCVDIDECSIMNGGCETFCTNSEGSYECSCQPGFALMPDQRSCTDIDECEDNPNICDGGQCTNIPGEYRCLCYDGFMASEDMKTCVDVNECDLNPNICLSGTCENTKGSFICHCDMGYSGKKGKTGCTDINECEIGAHNCGKHAVCTNTAGSFKCSCSPGWIGDGIKCTDLDECSNGTHMCSQHADCKNTMGSYRCLCKEGYTGDGFTCTDLDECSENLNLCGNGQCLNAPGGYRCECDMGFVPSADGKACEDIDECSLPNICVFGTCHNLPGLFRCECEIGYELDRSGGNCTDVNECLDPTTCISGNCVNTPGSYICDCPPDFELNPTRVGCVDTRSGNCYLDIRPRGDNGDTACSNEIGVGVSKASCCCSLGKAWGTPCEMCPAVNTSEYKILCPGGEGFRPNPITVILEDIDECQELPGLCQGGKCINTFGSFQCRCPTGYYLNEDTRVCDDVNECETPGICGPGTCYNTVGNYTCICPPDYMQVNGGNNCMDMRRSLCYRNYYADNQTCDGELLFNMTKKMCCCSYNIGRAWNKPCEQCPIPSTDEFATLCGSQRPGFVIDIYTGLPVDIDECREIPGVCENGVCINMVGSFRCECPVGFFYNDKLLVCEDIDECQNGPVCQRNAECINTAGSYRCDCKPGYRFTSTGQCNDRNECQEIPNICSHGQCIDTVGSFYCLCHTGFKTNDDQTMCLDINECERDACGNGTCRNTIGSFNCRCNHGFILSHNNDCIDVDECASGNGNLCRNGQCINTVGSFQCQCNEGYEVAPDGRTCVDINECLLEPRKCAPGTCQNLDGSYRCICPPGYSLQNEKCEDIDECVEEPEICALGTCSNTEGSFKCLCPEGFSLSSSGRRCQDLRMSYCYAKFEGGKCSSPKSRNHSKQECCCALKGEGWGDPCELCPTEPDEAFRQICPYGSGIIVGPDDSAVDMDECKEPDVCKHGQCINTDGSYRCECPFGYILAGNECVDTDECSVGNPCGNGTCKNVIGGFECTCEEGFEPGPMMTCEDINECAQNPLLCAFRCVNTYGSYECKCPVGYVLREDRRMCKDEDECEEGKHDCTEKQMECKNLIGTYMCICGPGYQRRPDGEGCVDENECQTKPGICENGRCLNTRGSYTCECNDGFTASPNQDECLDNREGYCFTEVLQNMCQIGSSNRNPVTKSECCCDGGRGWGPHCEICPFQGTVAFKKLCPHGRGFMTNGADIDECKVIHDVCRNGECVNDRGSYHCICKTGYTPDITGTSCVDLNECNQAPKPCNFICKNTEGSYQCSCPKGYILQEDGRSCKDLDECATKQHNCQFLCVNTIGGFTCKCPPGFTQHHTSCIDNNECTSDINLCGSKGICQNTPGSFTCECQRGFSLDQTGSSCEDVDECEGNHRCQHGCQNIIGGYRCSCPQGYLQHYQWNQCVDENECLSAHICGGASCHNTLGSYKCMCPAGFQYEQFSGGCQDINECGSAQAPCSYGCSNTEGGYLCGCPPGYFRIGQGHCVSGMGMGRGNPEPPVSGEMDDNSLSPEACYECKINGYPKRGRKRRSTNETDASNIEDQSETEANVSLASWDVEKTAIFAFNISHVSNKVRILELLPALTTLTNHNRYLIESGNEDGFFKINQKEGISYLHFTKKKPVAGTYSLQISSTPLYKKKELNQLEDKYDKDYLSGELGDNLKMKIQVLLH

SEQ ID NO: 5155 - protein, 853 aa, Homo Sapiens
  misc_feature (1)..(1): Xaa can be any naturally occurring amino acid
XLGKAWGTPCEMCPAVNTSEYKILCPGGEGFRPNPITVILEDIDECQELPGLCQGGKCINTFGSFQCRCPTGYYLNEDTRVCDDVNECETPGICGPGTCYNTVGNYTCICPPDYMQVNGGNNCMDMRRSLCYRNYYADNQTCDGELLFNMTKKMCCCSYNIGRAWNKPCEQCPIPSTDEFATLCGSQRPGFVIDIYTGLPVDIDECREIPGVCENGVCINMVGSFRCECPVGFFYNDKLLVCEDIDECQNGPVCQRNAECINTAGSYRCDCKPGYRFTSTGQCNDRNECQEIPNICSHGQCIDTVGSFYCLCHTGFKTNDDQTMCLDINECERDACGNGTCRNTIGSFNCRCNHGFILSHNNDCIDVDECASGNGNLCRNGQCINTVGSFQCQCNEGYEVAPDGRTCVDINECLLEPRKCAPGTCQNLDGSYRCICPPGYSLQNEKCEDIDECVEEPEICALGTCSNTEGSFKCLCPEGFSLSSSGRRCQDLRMSYCYAKFEGGKCSSPKSRNHSKQECCCALKGEGWGDPCELCPTEPDEAFRQICPYGSGIIVGPDDSAVDMDECKEPDVCKHGQCINTDGSYRCECPFGYILAGNECVDTDECSVGNPCGNGTCKNVIGGFECTCEEGFEPGPMMTCEDINECAQNPLLCAFRCVNTYGSYECKCPVGYVLREDRRMCKDEDECEEGKHDCTEKQMECKNLIGTYMCICGPGYQRRPDGEGCVDENECQTKPGICENGRCLNTRGSYTCECNDGFTASPNQDECLDVILSLLLLSPAFPSCFFSPRTIGKGTASQRCYKTCVRSAPATGTPSPNRNAAVTEGEAGVPTVRSALSRGLWLSRNSVPMAEDS

SEQ ID NO: 5156 - protein, 1473 aa, Homo Sapiens
MGRRRRLCLQLYFLWLGCVVLWAQGTAGQPQPPPPKPPRPQPPPQQVRSATAGSEGGFLAPEYREEGAAVASRVRRRGQQDVLRGPNVCGSRFHSYCCPGWKTLPGGNQCIVLQQCSVRCMNGGTCADDHCQCQKGYIGTYCGQPVCENGCQNGGRCIGPNRCACVYGFTGPQCERDYRTGPCFTQVNNQMCQGQLTGIVCTKTLCCATIGRAWGHPCEMCPAQPQPCRRGFIPNIRTGACQDVDECQAIPGICQGGNCINTVGSFECRCPAGHKQSETTQKCEDIDECSIIPGICETGECSNTVGSYFCVCPRGYVTSTDGSRCIDQRTGMCFSGLVNGRCAQELPGRMTKMQCCCEPGRCWGIGTIPEACPVRGSEEYRRLCMDGLPMGGIPGSAGSRPGGTGGNGFAPSGNGNGYGPGGTGFIPIPGGNGFSPGVGGAGVGAGGQGPIITGLTILNQTIDICKHHANLCLNGRCIPTVSSYRCECNMGYKQDANGDCIDVDECTSNPCTNGDCVNTPGSYYCKCHAGFQRTPTKQACIDIDECIQNGVLCKNGRCVNTDGSFQCICNAGFELTTDGKNCVDHDECTTTNMCLNGMCINEDGSFKCICKPGFVLAPNGRYCTDVDECQTPGICMNGHCINSEGSFRCDCPPGLAVGMDGRVCVDTHMRSTCYGGIKKGVCVRPFPGAVTKSECCCANPDYGFGEPCQPCPAKNSAEFHGLCSSGVGITVDGRDINECALDPDICANGICENLRGSYRCNCNSGYEPDASGRNCIDIDECLVNRLLCDNGLCRNTPGSYSCTCPPGYVFRTETETCEDINECESNPCVNGACRNNLGSFNCECSPGSKLSSTGLICIDSLKGTCWLNIQDSRCEVNINGATLKSECCATLGAAWGSPCERCELDTACPRGLARIKGVTCEDVNECEVFPGVCPNGRCVNSKGSFHCECPEGLTLDGTGRVCLDIRMEQCYLKWDEDECIHPVPGKFRMDACCCAVGAAWGTECEECPKPGTKEYETLCPRGAGFANRGDVLTGRPFYKDINECKAFPGMCTYGKCRNTIGSFKCRCNSGFALDMEERNCTDIDECRISPDLCGSGICVNTPGSFECECFEGYESGFMMMKNCMDIDECERNPLLCRGGTCVNTEGSFQCDCPLGHELSPSREDCVDINECSLSDNLCRNGKCVNMIGTYQCSCNPGYQATPDRQGCTDIDECMIMNGGCDTQCTNSEGSYECSCSEGYALMPDGRSCADIDECENNPDICDGGQCTNIPGEYRCLCYDGFMASMDMKTCIDVNECDLNSNICMFGECENTKGSFICHCQLGYSVKKGTTGCTDVDECEIGAHNCDMHASCLNIPGSFKCSCREGWIGNGIKCIDLDECSNGTHQCSINAQCVNTPGSYRCACSEGFTGDGFTCSDVDECAENINLCENGQCLNVPGAYRCECEMGFTPASDSRSCQGGSPGFQLIFKLDQPQ

SEQ ID NO: 5157 - protein, 2912 aa, Homo Sapiens
MGRRRRLCLQLYFLWLGCVVLWAQGTAGQPQPPPPKPPRPQPPPQQVRSATAGSEGGFLAPEYREEGAAVASRVRRRGQQDVLRGPNVCGSRFHSYCCPGWKTLPGGNQCIVPICRNSCGDGFCSRPNMCTCSSGQISSTCGSKSIQQCSVRCMNGGTCADDHCQCQKGYIGTYCGQPVCENGCQNGGRCIGPNRCACVYGFTGPQCERDYRTGPCFTQVNNQMCQGQLTGIVCTKTLCCATIGRAWGHPCEMCPAQPQPCRRGFIPNIRTGACQDVDECQAIPGICQGGNCINTVGSFECRCPAGHKQSETTQKCEDIDECSIIPGICETGECSNTVGSYFCVCPRGYVTSTDGSRCIDQRTGMCFSGLVNGRCAQELPGRMTKMQCCCEPGRCWGIGTIPEACPVRGSEEYRRLCMDGLPMGGIPGSAGSRPGGTGGNGFAPSGNGNGYGPGGTGFIPIPGGNGFSPGVGGAGVGAGGQGPIITGLTILNQTIDICKHHANLCLNGRCIPTVSSYRCECNMGYKQDANGDCIDVDECTSNPCTNGDCVNTPGSYYCKCHAGFQRTPTKQACIDIDECIQNGVLCKNGRCVNTDGSFQCICNAGFELTTDGKNCVDHDECTTTNMCLNGMCINEDGSFKCICKPGFVLAPNGRYCTDVDECQTPGICMNGHCINSEGSFRCDCPPGLAVGMDGRVCVDTHMRSTCYGGIKKGVCVRPFPGAVTKSECCCANPDYGFGEPCQPCPAKNSAEFHGLCSSGVGITVDGRDINECALDPDICANGICENLRGSYRCNCNSGYEPDASGRNCIDIDECLVNRLLCDNGLCRNTPGSYSCTCPPGYVFRTETETCEDINECESNPCVNGACRNNLGSFNCECSPGSKLSSTGLICIDSLKGTCWLNIQDSRCEVNINGATLKSECCATLGAAWGSPCERCELDTACPRGLARIKGVTCEDVNECEVFPGVCPNGRCVNSKGSFHCECPEGLTLDGTGRVCLDIRMEQCYLKWDEDECIHPVPGKFRMDACCCAVGAAWGTECEECPKPGTKEYETLCPRGAGFANRGDVLTGRPFYKDINECKAFPGMCTYGKCRNTIGSFKCRCNSGFALDMEERNCTDIDECRISPDLCGSGICVNTPGSFECECFEGYESGFMMMKNCMDIDECERNPLLCRGGTCVNTEGSFQCDCPLGHELSPSREDCVDINECSLSDNLCRNGKCVNMIGTYQCSCNPGYQATPDRQGCTDIDECMIMNGGCDTQCTNSEGSYECSCSEGYALMPDGRSCADIDECENNPDICDGGQCTNIPGEYRCLCYDGFMASMDMKTCIDVNECDLNSNICMFGECENTKGSFICHCQLGYSVKKGTTGCTDVDECEIGAHNCDMHASCLNIPGSFKCSCREGWIGNGIKCIDLDECSNGTHQCSINAQCVNTPGSYRCACSEGFTGDGFTCSDVDECAENINLCENGQCLNVPGAYRCECEMGFTPASDSRSCQDIDECSFQNICVFGTCNNLPGMFHCICDDGYELDRTGGNCTDIDECADPINCVNGLCVNTPGRYECNCPPDFQLNPTGVGCVDNRVGNCYLKFGPRGDGSLSCNTEIGVGVSRSSCCCSLGKAWGNPCETCPPVNSTEYYTLCPGGEGFRPNPITIILEDIDECQELPGLCQGGNCINTFGSFQCECPQGYYLSEDTRICEDIDECFAHPGVCGPGTCYNTLGNYTCICPPEYMQVNGGHNCMDMRKSFCYRSYNGTTCENELPFNVTKRMCCCTYNVGKAWNKPCEPCPTPGTADFKTICGNIPGFTFDIHTGKAVDIDECKEIPGICANGVCINQIGSFRCECPTGFSYNDLLLVCEDIDECSNGDNLCQRNADCINSPGSYRCECAAGFKLSPNGACVDRNECLEIPNVCSHGLCVDLQGSYQCICHNGFKASQDQTMCMDVDECERHPCGNGTCKNTVGSYNCLCYPGFELTHNNDCLDIDECSSFFGQVCRNGRCFNEIGSFKCLCNEGYELTPDGKNCIDTNECVALPGSCSPGTCQNLEGSFRCICPPGYEVKSENCIDINECDEDPNICLFGSCTNTPGGFQCLCPPGFVLSDNGRRCFDTRQSFCFTNFENGKCSVPKAFNTTKAKCCCSKMPGEGWGDPCELCPKDDEVAFQDLCPYGHGTVPSLHDTREDVNECLESPGICSNGQCINTDGSFRCECPMGYNLDYTGVRCVDTDECSIGNPCGNGTCTNVIGSFECNCNEGFEPGPMMNCEDINECAQNPLLCAFRCMNTFGSYECTCPIGYALREDQKMCKDLDECAEGLHDCESRGMMCKNLIGTFMCICPPGMARRPDGEGCVDENECRTKPGICENGRCVNIIGSYRCECNEGFQSSSSGTECLDNRQGLCFAEVLQTICQMASSSRNLVTKSECCCDGGRGWGHQCELCPLPGTAQYKKICPHGPGYTTDGRDIDECKVMPNLCTNGQCINTMGSFRCFCKVGYTTDISGTSCIDLDECSQSPKPCNYICKNTEGSYQCSCPRGYVLQEDGKTCKDLDECQTKQHNCQFLCVNTLGGFTCKCPPGFTQHHTACIDNNECGSQPSLCGAKGICQNTPGSFSCECQRGFSLDATGLNCEDVDECDGNHRCQHGCQNILGGYRCGCPQGYIQHYQWNQCVDENECSNPNACGSASCYNTLGSYKCACPSGFSFDQFSSACHDVNECSSSKNPCNYGCSNTEGGYLCGCPPGYYRVGQGHCVSGMGFNKGQYLSLDTEVDEENALSPEACYECKINGYSKKDSRQKRSIHEPDPTAVEQISLESVDMDSPVNMKFNLSHLGSKEHILELRPAIQPLNNHIRYVISQGNDDSVFRIHQRNGLSYLHTAKKKLMPGTYTLEITSIPLYKKKELKKLEESNEDDYLLGELGEALRMRLQIQLY

SEQ ID NO: 5158 - protein, 341 aa, Homo Sapiens
MGRRRRLCLQLYFLWLGCVVLWAQGTAGQPQPPPPKPPRPQPPPQQVRSATAGSEGGFLAPEYREEGAAVASRVRRRGQQDVLRGPNVCGSRFHSYCCPGWKTLPGGNQCIVPICRNSCGDGFCSRPNMCTCSSGQISSTCGSKSIQQCSVRCMNGGTCADDHCQCQKGYIGTYCGQPVCENGCQNGGRCIGPNRCACVYGFTGPQCERDYRTGPCFTQVNNQMCQGQLTGIVCTKTLCCATIGRAWGHPCEMCPAQPQPCRRGFIPNIRTGACQDVDECQAIPGICQGGNCINTVGSFECRCPAGHKQSETTQKCEVHVDKAQAGARCPCVILPSRLYLR

SEQ ID NO: 5159 - protein, 2912 aa, Homo Sapiens; identical to SEQ ID NO: 5157

SEQ ID NO: 5160 - protein, 2911 aa, Homo Sapiens
MGRRRRLCLQLYFLWLGCVVLWAQGTAGQPQPPPPKPPRPQPPPQQVRSATAGSEGGFLAPEYREEGAAVASRVRRRGQQDVLRGPNVCGSRFHSYCCPGWKTLPGGNQCIVPICRNSCGDGFCSRPNMCTCSSGQISSTCGSKSIQQCSVRCMNGGTCADDHCQCQKGYIGTYCGQPVCENGCQNGGRCITQPCACVYGFTGPQCERDYRTGPCFTQVNNQMCQGQLTGIVCTKTLCCATIGRAWGHPCEMCPAQPQPCRRGFIPNIRTGACQDVDECQAIPGICQGGNCINTVGSFECRCPAGHKQSETTQKCEDIDECSIIPGICETGECSNTVGSYFCVCPRGYVTSTDGSRCIDQRTGMCFSGLVNGRCAQELPGRMTKMQCCCEPGRCWGIGTIPEACPVRGSEEYRRLCMDGLPMGGIPGSAGSRPGGTGGNGFAPSGNGNGYGPGGTGFIPIPGGNGFSPGVGGAGVGAGGQGPIITGLTILNQTIDICKHHANLCLNGRCIPTVSSYRCECNMGYKQDANGDCIDVDECTSNPCTNGDCVNTPGSYYCKCHAGFQRTPTKQACIDIDECIQNGVLCKNGRCVNTDGSFQCICNAGFELTTDGKNCVDHDECTTTNMCLNGMCINEDGSFKCICKPGFVLAPNGRYCTDVDECQTPGICMNGHCINSEGSFRCDCPPGLAVGMDGRVCVDTHMRSTCYGGIKKGVCVRPFPGAVTKSECCCANPDYGFGEPCQPCPAKNSAEFHGLCSSGVGITVDGRDINECALDPDICANGICENLRGSYRCNCNSGYEPDASGRNCIDIDECLVNRLLCDNGLCRNTPGSYSCTCPPGYVFRTETETCEDINECESNPCVNGACRNNLGSFNCECSPGSKLSSTGLICIDSLKGTCWLNIQDSRCEVNINGATLKSECCATLGAAWGSPCERCELDTACPRGLARIKGVTCEDVNECEVFPGVCPNGRCVNSKGSFHCECPEGLTLDGTGRVCLDIRMEQCYLKWDEDECIHPVPGKFRMDACCCAVGAAWGTECEECPKPGTKEYETLCPRGAGFANRGDVLTGRPFYKDINECKAFPGMCTYGKCRNTIGSFKCRCNSGFALDMEERNCTDIDECRISPDLCGSGICVNTPGSFECECFEGYESGFMMMKNCMDIDECERNPLLCRGGTCVNTEGSFQCDCPLGHELSPSREDCVDINECSLSDNLCRNGKCVNMIGTYQCSCNPGYQATPDRQGCTDIDECMIMNGGCDTQCTNSEGSYECSCSEGYALMPDGRSCADIDECENNPDICDGGQCTNIPGEYRCLCYDGFMASMDMKTCIDVNECDLNSNICMFGECENTKGSFICHCQLGYSVKKGTTGCTDVDECEIGAHNCDMHASCLNIPGSFKCSCREGWIGNGIKCIDLDECSNGTHQCSINAQCVNTPGSYRCACSEGFTGDGFTCSDVDECAENINLCENGQCLNVPGAYRCECEMGFTPASDSRSCQDIDECSFQNICVFGTCNNLPGMFHCICDDGYELDRTGGNCTDIDECADPINCVNGLCVNTPGRYECNCPPDFQLNPTGVGCVDNRVGNCYLKFGPRGDGSLSCNTEIGVGVSRSSCCCSLGKAWGNPCETCPPVNSTEYYTLCPGGEGFRPNPITIILEDIDECQELPGLCQGGNCINTFGSFQCECPQGYYLSEDTRICEDIDECFAHPGVCGPGTCYNTLGNYTCICPPEYMQVNGGHNCMDMRKSFCYRSYNGTTCENELPFNVTKRMCCCTYNVGKAWNKPCEPCPTPGTADFKTICGNIPGFTFDIHTGKAVDIDECKEIPGICANGVCINQIGSFRCECPTGFSYNDLLLVCEDIDECSNGDNLCQRNADCINSPGSYRCECAAGFKLSPNGACVDRNECLEIPNVCSHGLCVDLQGSYQCICHNGFKASQDQTMCMDVDECERHPCGNGTCKNTVGSYNCLCYPGFELTHNNDCLDIDECSSFFGQVCRNGRCFNEIGSFKCLCNEGYELTPDGKNCIDTNECVALPGSCSPGTCQNLEGSFRCICPPGYEVKSENCIDINECDEDPNICLFGSCTNTPGGFQCLCPPGFVLSDNGRRCFDTRQSFCFTNFENGKCSVPKAFNTTKAKCCCSKMPGEGWGDPCELCPKDDEVAFQDLCPYGHGTVPSLHDTREDVNECLESPGICSNGQCINTDGSFRCECPMGYNLDYTGVRCVDTDECSIGNPCGNGTCTNVIGSFECNCNEGFEPGPMMNCEDINECAQNPLLCAFRCMNTFGSYECTCPIGYALREDQKMCKDLDECAEGLHDCESRGMMCKNLIGTFMCICPPGMARRPDGEGCVDENECRTKPGICENGRCVNIIGSYRCECNEGFQSSSSGTECLDNRQGLCFAEVLQTICQMASSSRNLVTKSECCCDGGRGWGHQCELCPLPGTAQYKKICPHGPGYTTDGRDIDECKVMPNLCTNGQCINTMGSFRCFCKVGYTTDISGTSCIDLDECSQSPKPCNYICKNTEGSYQCSCPRGYVLQEDGKTCKDLDECQTKQHNCQFLCVNTLGGFTCKCPPGFTQHHTACIDNNECGSQPSLCGAKGICQNTPGSFSCECQRGFSLDATGLNCEDVDECDGNHRCQHGCQNILGGYRCGCPQGYIQHYQWNQCVDENECSNPNACGSASCYNTLGSYKCACPSGFSFDQFSSACHDVNECSSSKNPCNYGCSNTEGGYLCGCPPGYYRVGQGHCVSGMGFNKGQYLSLDTEVDEENALSPEACYECKINGYSKKDSRQKRSIHEPDPTAVEQISLESVDMDSPVNMKFNLSHLGSKEHILELRPAIQPLNNHIRYVISQGNDDSVFRIHQRNGLSYLHTAKKKLMPGTYTLEITSIPLYKKKELKKLEESNEDDYLLGELGEALRMRLQIQLY

SEQ ID NO: 5161 - protein, 356 aa, Homo Sapiens
MMMKNCMDIDECERNPLLCRGGTCVNTEGSFQCDCPLGHELSPSREDCVDINECSLSDNLCRNGKCVNMIGTYQCSCNPGYQATPDRQGCTDIDECMIMNGGCDTQCTNSEGSYECSCSEGYALMPDGRSCADIDECENNPDICDGGQCTNIPGEYRCLCYDGFMASMDMKTCIDVNECDLNSNICMFGECENTKGSFICHCQLGYSVKKGTTGCTDVDECEIGAHNCDMHASCLNIPGSFKCSCREGWIGNGIKCIDLDECSNGTHQCSINAQCVNTPGSYRCACSEGFTGDGFTCSDVDECAENINLCENGQCLNVPGAYRCECEMGFTPASDSRSCQGGSPGFQLIFKLDQPQ

SEQ ID NO: 5162 - protein, 2809 aa, Homo Sapiens
MTLEGLYLARGPLARLLLAWSALLCMAGGQGRWDGALEAAGPGRVRRRGSPGILQGPNVCGSRFHAYCCPGWRTFPGRSQCVVPICRRACGEGFCSQPNLCTCADGTLAPSCGVSRGSGCSVSCMNGGTCRGASCLCQKGYTGTVCGQPICDRGCHNGGRCIGPNRCACVYGFMGPQCERDYRTGPCFGQVGPEGCQHQLTGLVCTKALCCATVGRAWGLPCELCPAQPHPCRRGFIPNIHTGACQDVDECQAVPGLCQGGSCVNMVGSFHCRCPVGHRLSDSSAACEDYRAGACFSVLFGGRCAGDLAGHYTRRQCCCDRGRCWAAGPVPELCPPRGSNEFQQLCAQRLPLLPGHPGLFPGLLGFGSNGMGPPLGPARLNPHGSDARGIPSLGPGNSNIGTATLNQTIDICRHFTNLCLNGRCLPTPSSYRCECNVGYTQDVRGECIDVDECTSSPCHHGDCVNIPGTYHCRCYPGFQATPTRQACVDVDECIVSGGLCHLGRCVNTEGSFQCVCNAGFELSPDGKNCVDHNECATSTMCVNGVCLNEDGSFSCLCKPGFLLAPGGHYCMDIDECQTPGICVNGHCTNTEGSFRCQCLGGLAVGTDGRVCVDTHVRSTCYGAIEKGSCARPFPGTVTKSECCCANPDHGFGEPCQLCPAKDSAEFQALCSSGLGITTDGRDINECALDPEVCANGVCENLRGSYRCVCNLGYEAGASGKDCTDVDECALNSLLCDNGWCQNSPGSYSCSCPPGFHFWQDTEICKDVDECLSSPCVSGVCRNLAGSYTCKCGPGSRLDPSGTFCLDSTKGTCWLKIQESRCEVNLQGASLRSECCATLGAAWGSPCERCEIDPACARGFARMTGVTCDDVNECESFPGVCPNGRCVNTAGSFRCECPEGLMLDASGRLCVDVRLEPCFLRWDEDECGVTLPGKYRMDVCCCSIGAVWGVECEACPDPESLEFASLCPRGLGFASRDFLSGRPFYKDVNECKVFPGLCTHGTCRNTVGSFHCACAGGFALDAQERNCTDIDECRISPDLCGQGTCVNTPGSFECECFPGYESGFMLMKNCMDVDECARDPLLCRGGTCTNTDGSYKCQCPPGHELTAKGTACEDIDECSLSDGLCPHGQCVNVIGAFQCSCHAGFQSTPDRQGCVDINECRVQNGGCDVHCINTEGSYRCSCGQGYSLMPDGRACADVDECEENPRVCDQGHCTNMPGGHRCLCYDGFMATPDMRTCVDVDECDLNPHICLHGDCENTKGSFVCHCQLGYMVRKGATGCSDVDECEVGGHNCDSHASCLNIPGSFSCRCLPGWVGDGFECHDLDECVSQEHRCSPRGDCLNVPGSYRCTCRQGFAGDGFFCEDRDECAENVDLCDNGQCLNAPGGYRCECEMGFDPTEDHRACQDVDECAQGNLCAFGSCENLPGMFRCICNGGYELDRGGGNCTDINECADPVNCINGVCINTPGSYLCSCPQDFELNPSGVGCVDTRAGNCFLETHDRGDSGISCSAEIGVGVTRASCCCSLGRAWGNPCELCPMANTTEYRTLCPGGEGFQPNRITVILEDIDECQELPGLCQGGDCVNTFGSFQCECPPGYHLSEHTRICEDIDECSTHSGICGPGTCYNTLGNYTCVCPAEYLQVNGGNNCMDMRKSVCFRHYNGTCQNELAFNVTRKMCCCSYNIGQAWNRPCEACPTPISPDYQILCGNQAPGFLTDIHTGKPLDIDECGEIPAICANGICINQIGSFRCECPAGFNYNSILLACEDVDECGSRESPCQQNADCINIPGSYRCKCTRGYKLSPGGACVGRNECREIPNVCSHGDCMDTEGSYMCLCHRGFQASADQTLCMDIDECDRQPCGNGTCKNIIGSYNCLCFPGFVVTHNGDCVDFDECTTLVGQVCRFGHCLNTAGSFHCLCQDGFELTADGKNCVDTNECLSLAGTCLPGTCQNLEGSFRCICPPGFQVQSDHCIDIDECSEEPNLCLFGTCTNSPGSFQCLCPPGFVLSDNGHRCFDTRQSFCFTRFEAGKCSVPKAFNTTKTRCCCSKRPGEGWGDPCELCPQEGSAAFQELCPFGHGAVPGPDDSREDVNECAENPGVCTNGVCVNTDGSFRCECPFGYSLDFTGINCVDTDECSVGHPCGQGTCTNVIGGFECACADGFEPGLMMTCEDIDECSLNPLLCAFRCHNTEGSYLCTCPAGYTLREDGAMCRDVDECADGQQDCHARGMECKNLIGTFACVCPPGMRPLPGSGEGCTDDNECHAQPDLCVNGRCVNTAGSFRCDCDEGFQPSPTLTECHDIRQGPCFAEVLQTMCRSLSSSSEAVTRAECCCGGGRGWGPRCELCPLPGTSAYRKLCPHGSGYTAEGRDVDECRMLAHLCAHGECINSLGSFRCHCQAGYTPDATATTCLDMDECSQVPKPCTFLCKNTKGSFLCSCPRGYLLEEDGRTCKDLDECTSRQHNCQFLCVNTVGAFTCRCPPGFTQHHQACFDNDECSAQPGPCGAHGHCHNTPGSFRCECHQGFTLVSSGHGCEDVNECDGPHRCQHGCQNQLGGYRCSCPQGFTQHSQWAQCVDENECALSPPTCGSASCRNTLGGFRCVCPSGFDFDQALGGCQEVDECAGRRGPCSYSCANTPGGFLCGCPQGYFRAGQGHCVSGLGFSPGPQDTPDKEELLSSEACYECKINGLSPRDRPRRSAHRDHQVNLATLDSEALLTLGLNLSHLGRAERILELRPALEGLEGRIRYVIVRGNEQGFFRMHHLRGVSSLQLGRRRPGPGTYRLEVVSHMAGPWGVQPEGQPGPWGQALRLKVQLQLL

SEQ ID NO: 5163 - protein, 2809 aa, Homo Sapiens; identical to SEQ ID NO: 5162

SEQ ID NO: 5164 - protein, 2809 aa, Homo Sapiens; identical to SEQ ID NO: 5162

SEQ ID NO: 5165 - protein, 171 aa, Homo Sapiens
  misc_feature (1)..(1): Xaa can be any naturally occurring amino acid
XFTRFEAGKCSVPKAFNTTKTRCCCSKRPGEGWGDPCELCPQEGSDVNECAENPGVCTNGVCVNTDGSFRCECPFGYSLDFTGINCVDTDECSVGHPCGQGTCTNVIGGFECACADGFEPGLMMTCEDIDECSLNPLLCAFRCHNTEGSYLCTCPAGYTLREDGAMCRDVD

SEQ ID NO: 5166 - protein, 188 aa, Homo Sapiens
  misc_feature (1)..(1): Xaa can be any naturally occurring amino acid
XYQILCGNQAPGFLTDIHTGKPLDVDECGSRESPCQQNADCINIPGSYRCKCTRGYKLSPGGACVGRNECREIPNVCSHGDCMDTEGSYMCLCHRGFQASADQTLCMDIDECDRQPCGNGTCKNIIGSYNCLCFPGFVVTHNGDCVDFDECTTLVGQVCRFGHCLNTAGSFHCLCQDGFELTADGKNC

SEQ ID NO: 5167 - protein, 627 aa, Homo Sapiens
MCVPRSGLILSCICLYCGVLLPVLLPNLPFLTCLSMSTLESVTYLPEKGLYCQRLPSSRTHGGTESLKGKNTENMGFYGTLKMIFYKMKRKLDHGSEVRSFSLGKKPCKVSEYTSTTGLVPCSATPTTFGDLRAANGQGQQRRRITSVQPPTGLQEWLKMFQSWSGPEKLLALDELIDSCEPTQVKHMMQVIEPQFQRDFISLLPKELALYVLSFLEPKDLLQAAQTCRYWRILAEDNLLWREKCKEEGIDEPLHIKRRKVIKPGFIHSPWKSAYIRQHRIDTNWRRGELKSPKVLKGHDDHVITCLQFCGNRIVSGSDDNTLKVWSAVTGKCLRTLVGHTGGVWSSQMRDNIIISGSTDRTLKVWNAETGECIHTLYGHTSTVRCMHLHEKRVVSGSRDATLRVWDIETGQCLHVLMGHVAAVRCVQYDGRRVVSGAYDFMVKVWDPETETCLHTLQGHTNRVYSLQFDGIHVVSGSLDTSIRVWDVETGNCIHTLTGHQSLTSGMELKDNILVSGNADSTVKIWDIKTGQCLQTLQGPNKHQSAVTCLQFNKNFVITSSDDGTVKLWDLKTGEFIRNLVTLESGGSGGVVWRIRASNTKLVCAVGSRNGTEETKLLVLDFDVDMK

SEQ ID NO: 5168 - protein, 627 aa, Homo Sapiens; identical to SEQ ID NO: 5167

SEQ ID NO: 5169 - protein, 70 aa, Homo Sapiens
MNQELLSVGSKRRRTGGSLRGNPSSSQVDEEQMNRVVEEEQQQQLRQQEEEHTARNGEVVGVEPRPGGQN

SEQ ID NO: 5170 - protein, 70 aa, Homo Sapiens; identical to SEQ ID NO: 5169

SEQ ID NO: 5171 - protein, 70 aa, Homo Sapiens; identical to SEQ ID NO: 5169

SEQ ID NO: 5172 - protein, 158 aa, Homo Sapiens
MNQELLSVGSKRRRTGGSLRGNPSSSQVDEEQMNRVVEEEQQQQLRQQEEEHTARNGEVVGVEPRPGGQNDSQQGQLEENNNRFISVDEDSSGNQEEQEEDEEHAGEQDEEDEEEEEMDQESDDFDQSDDSSREDEHTHTNSVTNSSSIVDLPVHQLS

SEQ ID NO: 5173 - protein, 707 aa, Homo Sapiens
MNQELLSVGSKRRRTGGSLRGNPSSSQVDEEQMNRVVEEEQQQQLRQQEEEHTARNGEVVGVEPRPGGQNDSQQGQLEENNNRFISVDEDSSGNQEEQEEDEEHAGEQDEEDEEEEEMDQESDDFDQSDDSSREDEHTHTNSVTNSSSIVDLPVHQLSSPFYTKTTKMKRKLDHGSEVRSFSLGKKPCKVSEYTSTTGLVPCSATPTTFGDLRAANGQGQQRRRITSVQPPTGLQEWLKMFQSWSGPEKLLALDELIDSCEPTQVKHMMQVIEPQFQRDFISLLPKELALYVLSFLEPKDLLQAAQTCRYWRILAEDNLLWREKCKEEGIDEPLHIKRRKVIKPGFIHSPWKSAYIRQHRIDTNWRRGELKSPKVLKGHDDHVITCLQFCGNRIVSGSDDNTLKVWSAVTGKCLRTLVGHTGGVWSSQMRDNIIISGSTDRTLKVWNAETGECIHTLYGHTSTVRCMHLHEKRVVSGSRDATLRVWDIETGQCLHVLMGHVAAVRCVQYDGRRVVSGAYDFMVKVWDPETETCLHTLQGHTNRVYSLQFDGIHVVSGSLDTSIRVWDVETGNCIHTLTGHQSLTSGMELKDNILVSGNADSTVKIWDIKTGQCLQTLQGPNKHQSAVTCLQFNKNFVITSSDDGTVKLWDLKTGEFIRNLVTLESGGSGGVVWRIRASNTKLVCAVGSRNGTEETKLLVLDFDVDMK

SEQ ID NO: 5174 - protein, 707 aa, Homo Sapiens; identical to SEQ ID NO: 5173

SEQ ID NO: 5175 - protein, 707 aa, Homo Sapiens; identical to SEQ ID NO: 5173

SEQ ID NO: 5176 - protein, 176 aa, Homo Sapiens
MNQELLSVGSKRRRTGGSLRGNPSSSQVDEEQMNRVVEEEQQQQLRQQEEEHTARNGEVVGVEPRPGGQNDSQQGQLEENNNRFISVDEDSSGNQEEQEEDEEHAGEQDEEDEEEEEMDQESDDFDQSDDSSREDEHTHTNSVTNSSSIVDLPVHQLSSPFYTKTTKVSIFNILLT

SEQ ID NO: 5177 - protein, 589 aa, Homo Sapiens
MSKPGKPTLNHGLVPVDLKSAKEPLPHQTVMKIFSISIIAQGLPFCRRRMKRKLDHGSEVRSFSLGKKPCKVSEYTSTTGLVPCSATPTTFGDLRAANGQGQQRRRITSVQPPTGLQEWLKMFQSWSGPEKLLALDELIDSCEPTQVKHMMQVIEPQFQRDFISLLPKELALYVLSFLEPKDLLQAAQTCRYWRILAEDNLLWREKCKEEGIDEPLHIKRRKVIKPGFIHSPWKSAYIRQHRIDTNWRRGELKSPKVLKGHDDHVITCLQFCGNRIVSGSDDNTLKVWSAVTGKCLRTLVGHTGGVWSSQMRDNIIISGSTDRTLKVWNAETGECIHTLYGHTSTVRCMHLHEKRVVSGSRDATLRVWDIETGQCLHVLMGHVAAVRCVQYDGRRVVSGAYDFMVKVWDPETETCLHTLQGHTNRVYSLQFDGIHVVSGSLDTSIRVWDVETGNCIHTLTGHQSLTSGMELKDNILVSGNADSTVKIWDIKTGQCLQTLQGPNKHQSAVTCLQFNKNFVITSSDDGTVKLWDLKTGEFIRNLVTLESGGSGGVVWRIRASNTKLVCAVGSRNGTEETKLLVLDFDVDMK

SEQ ID NO: 5178 - protein, 179 aa, Homo Sapiens
MDPKQTTLLCLGDFPMPFISAKSSPVIPLDGSVKIQCQAIREAYLTQLMIIKNSTYREIGRRLKFWNETDPEFVIDHMDANKAGRYQCQYRIGHYRFRYSDTLELVVTDSIHQDYTTQNLIRMAVAGLVLVALLAILVENWHSHTALNKEASADVAEPSWSQQMCQPGLTFARTPSVCK

SEQ ID NO: 5179 - protein, 253 aa, Homo Sapiens
MDPKQTTLLCLGDFPMPFISAKSSPVIPLDGSVKIQCQAIREAYLTQLMIIKNSTYREIGRRLKFWNETDPEFVIDHMDANKAGRYQCQYRIGHYRFRYSDTLELVVTGLYGKPFLSADRGLVLMPGENISLTCSSAHIPFDRFSLAKEGELSLPQHQSGEHPANFSLGPVDLNVSGIYRCYDSIHQDYTTQNLIRMAVAGLVLVALLAILVENWHSHTALNKEASADVAEPSWSQQMCQPGLTFARTPSVCK

SEQ ID NO: 5180 - protein, 275 aa, Homo Sapiens
MDPKQTTLLCLGDFPMPFISAKSSPVIPLDGSVKIQCQAIREAYLTQLMIIKNSTYREIGRRLKFWNETDPEFVIDHMDANKAGRYQCQYRIGHYRFRYSDTLELVVTGLYGKPFLSADRGLVLMPGENISLTCSSAHIPFDRFSLAKEGELSLPQHQSGEHPANFSLGPVDLNVSGIYRCYGWYNRSPYLWSFPSNALELVVTDSIHQDYTTQNLIRMAVAGLVLVALLAILVENWHSHTALNKEASADVAEPSWSQQMCQPGLTFARTPSVCK

SEQ ID NO: 5181 - protein, 227 aa, Homo Sapiens
MDPKQTTLLCLGDFPMPFISAKSSPVIPLDGSVKIQCQAIREAYLTQLMIIKNSTYREIGRRLKFWNETDPEFVIDHMDANKAGRYQCQYRIGHYRFRYSDTLELVVTGLYGKPFLSADRGLVLMPGENISLTCSSAHIPFDRFSLAKEGELSLPQHQSGEHPANFSLGPVDLNVSGIYRCYGWYNRSPYLWSFPSNALELVVTGRYRPVQPCVWVGCPGPCHRAGI

SEQ ID NO: 5182 - protein, 209 aa, Homo Sapiens
MDPKQTTLLCLGDFPMPFISAKSSPVIPLDGSVKIQCQAIREAYLTQLMIIKNSTYREIGRRLKFWNETDPEFVIDHMDANKAGRYQCQYRIGHYRFRYSDTLELVVTGLYGKPFLSADRGLVLMPGENISLTCSSAHIPFDRFSLAKEGELSLPQHQSGEHPANFSLGPVDLNVSGIYRLHPPRLHDAELDPHGRGRTGPRGSLGHTG

SEQ ID NO: 5183 - protein, 178 aa, Homo Sapiens
MDPKQTTLLCLGLYGKPFLSADRGLVLMPGENISLTCSSAHIPFDRFSLAKEGELSLPQHQSGEHPANFSLGPVDLNVSGIYRCYGWYNRSPYLWSFPSNALELVVTDSIHQDYTTQNLIRMAVAGLVLVALLAILVENWHSHTALNKEASADVAEPSWSQQMCQPGLTFARTPSVCK

SEQ ID NO: 5184 - protein, 191 aa, Homo Sapiens
MDPKQTTLLCLVLCLGQRIQAQEGDFPMPFISAKSSPVIPLDGSVKIQCQAIREAYLTQLMIIKNSTYREIGRRLKFWNETDPEFVIDHMDANKAGRYQCQYRIGHYRFRYSDTLELVVTDSIHQDYTTQNLIRMAVAGLVLVALLAILVENWHSHTALNKEASADVAEPSWSQQMCQPGLTFARTPSVCK

SEQ ID NO: 5185 - protein, 265 aa, Homo Sapiens
MDPKQTTLLCLVLCLGQRIQAQEGDFPMPFISAKSSPVIPLDGSVKIQCQAIREAYLTQLMIIKNSTYREIGRRLKFWNETDPEFVIDHMDANKAGRYQCQYRIGHYRFRYSDTLELVVTGLYGKPFLSADRGLVLMPGENISLTCSSAHIPFDRFSLAKEGELSLPQHQSGEHPANFSLGPVDLNVSGIYRCYDSIHQDYTTQNLIRMAVAGLVLVALLAILVENWHSHTALNKEASADVAEPSWSQQMCQPGLTFARTPSVCK

SEQ ID NO: 5186 - protein, 287 aa, Homo Sapiens
MDPKQTTLLCLVLCLGQRIQAQEGDFPMPFISAKSSPVIPLDGSVKIQCQAIREAYLTQLMIIKNSTYREIGRRLKFWNETDPEFVIDHMDANKAGRYQCQYRIGHYRFRYSDTLELVVTGLYGKPFLSADRGLVLMPGENISLTCSSAHIPFDRFSLAKEGELSLPQHQSGEHPANFSLGPVDLNVSGIYRCYGWYNRSPYLWSFPSNALELVVTDSIHQDYTTQNLIRMAVAGLVLVALLAILVENWHSHTALNKEASADVAEPSWSQQMCQPGLTFARTPSVCK

SEQ ID NO: 5187 - protein, 239 aa, Homo Sapiens
MDPKQTTLLCLVLCLGQRIQAQEGDFPMPFISAKSSPVIPLDGSVKIQCQAIREAYLTQLMIIKNSTYREIGRRLKFWNETDPEFVIDHMDANKAGRYQCQYRIGHYRFRYSDTLELVVTGLYGKPFLSADRGLVLMPGENISLTCSSAHIPFDRFSLAKEGELSLPQHQSGEHPANFSLGPVDLNVSGIYRCYGWYNRSPYLWSFPSNALELVVTGRYRPVQPCVWVGCPGPCHRAGI

SEQ ID NO: 5188 - protein, 1642 aa, Homo Sapiens
CPPHSHYEACSYGCPLSCGDLPVPEGCESACREGCVCDAGFVLSGDTCVPVGQCGCLHDDRYYPLGQTFYPGPGCDSLCRCREGGEVSCEPSSCGPHETCRPSGGSLGCVAVGSTTCQASGDPHYTTFDGHRFDFMGTCVYVLAQTCGTRPGLHRFAVLQENVAWGNGRVSVTRVITVQVANFTLRLEQRQWKVTVNGVDMKLPVVLANGQIRASQHGSDVVIETDFGLRVAYDLVYYVRVTVPGNYYQLMCGLCGNYNGDPKDDFQKPNGSQAGNANEFGNSWEEVVSDSPCLPPPTCPPGSEGCIPSEECPPELEKKYQKEEFCGLLSSPTGPLSSCHKLVDPQGPLKDCIFDLCLGGGNLSILCSNIHAYVSACQVAGGHVEPWRNETFCPMECPQNSHYELCADTCSLGCSALSAPLQCPDGCAEGCQCDSGFLYNGQACVPIQQCGCYHNGAYYEPEQTVLIDNCRQQCTCHAGKVVVCQEHSCKPGQVCQPSGGILSCVTKDPCHGVTCRPQETCKEQGGQGVCLPNYEATCWLWGDPHYHSFDGRKFDFQGTCNYVLATTGCPGVSTQGLTPFTVTTKNQNRGNPAVSYVRVVTVAALGTNISIHKDEIGKVRVNGVLTALPVSVADGRISVTQGASKALLVADFGLQVSYDWNWRVDVTLPSSYHGAVCGLCGNMDRNPNNDQVFPNGTLAPSIPIWGGSWRAPGWDPLCWDECRGSCPTCPEDRLEQYEGPGFCGPLAPGTGGPFTTCHAHVPPESFFKGCVLDVCMGGGDRDILCKALASYVAACQAAGVVIEDWRAQVGCEITCPENSHYEVCGPPCPASCPSPAPLTTPAVCEGPCVEGCQCDAGFVLSADRCVPLNNGCGCWANGTYHEAGSEFWADGTCSQWCRCGPGGGSLVCTPASCGLGEVCGLLPSGQHGCQPVSTAECQAWGDPHYVTLDGHRFDFQGTCEYLLSAPCHGPPLGAENFTVTVANEHRGSQAVSYTRSVTLQIYNHSLTLSARWPRKLQVDGVFVTLPFQLDSLLHAHLSGADVVVTTTSGLSLAFDGDSFVRLRVPAAYAGSLCGLCGNYNQDPADDLKAVGGKPAGWQVGGAQGCGECVSKPCPSPCTPEQQESFGGPDACGVISATDGPLAPCHGLVPPAQYFQGCLLDACQVQGHPGGLCPAVATYVAACQAAGAQLREWRRPDFCPFQCPAHSHYELCGDSCPGSCPSLSAPEGCESACREGCVCDAGFVLSGDTCVPVGQCGCLHDDRYYPLGQTFYPGPGCDSLCRCREGGEVSCEPSSCGPHETCRPSGGSLGCVAVGSTTCQASGDPHYTTFDGHRFDFMGTCVYVLAQTCGTRPGLHRFAVLQENVAWGNGRVSVTRVITVQVANFTLRLEQRQWKVTVNGVDMKLPVVLANGQIRASQHGSDVVIETDFGLRVAYDLVYYVRVTVPGNYYQLMCGLCGNYNGDPKDDFQKPNGSQAGNANEFGNSWEEVVPDSPCLPPPTCPPGSAGCIPSDKCPPELEKKYQKEEFCGLLSSPTGPLSSCHKLVDPQGPLKDCIFDLCLGGGNLSILCSNIHAYVSACQAAGGHVEPWRNETFCPMECPQNSHYELCADTCSLGCSALSAPLQCPDGCAEGCQCDSGFLYNG

SEQ ID NO: 5189 - protein, 1132 aa, Homo Sapiens
MGALWSWWILWAGATLLWGLTQEASVDLKNTGREEFLTAFLQNYQLAYSKAYPRLLISSLSESPASVSILSQADNTSKKVTVRPGESVMVNISAKAEMIGSKIFQHAVVIHSDYAISVQALNAKPDTAELTLLRPIQALGTEYFVLTPPGTSARNVKEFAVVAGAAGASVSVTLKGSVTFNGKFYPAGDVLRVTLQPYNVAQLQSSVDLSGSKVTASSPVAVLSGHSCAQKHTTCNHVVEQLLPTSAWGTHYVVPTLASQSRYDLAFVVASQATKLTYNHGGITGSRGLQAGDVVEFEVRPSWPLYLSANVGIQVLLFGTGAIRNEVTYDPYLVLIPDVAAYCPAYVVKSVPGCEGVALVVAQTKAISGLTIDGHAVGAKLTWEAVPGSEFSYAEVELGTADMIHTAEATTNLGLLTFGLAKAIGYATAADCGRTVLSPVEPSCEGMQCAAGQRCQVVGGKAGCVAESTAVCRAQGDPHYTTFDGRRYDMMGTCSYTMVELCSEDDTLPAFSVEAKNEHRGSRRVSYVGLVTVRAYSHSVSLTRGEVGFVLVDNQRSRLPVSLSEGRLRVYQSGPRAVVELVFGLVVTYDWDCQLALSLPARFQDQVCGLCGNYNGDPADDFLTPDGALAPDAVEFASSWKLDDGDYLCEDGCQNNCPACTPGQAQHYEGDRLCGMLTKLDGPFAVCHDTLDPRPFLEQCVYDLCVVGGERLSLCRGLSAYAQACLELGISVGDWRSPANCPLSCPANSRYELCGPACPTSCNGAAAPSNCSGRPCVEGCVCLPGFVASGGACVPASSCGCTFQGLQLAPGQEVWADELCQRRCTCNGATHQVTCRDKQSCPAGERCSVQNGLLGCYPDRFGTCQGSGDPHYVSFDGRRFDFMGTCTYLLVGSCGQNAALPAFRVLVENEHRGSQTVSYTRAVRVEARGVKVAVRREYPGQVLVDDVLQYLPFQAADGQVQVFRQGRDAVVRTDFGLTVTYDWNARVTAKVPSSYAEALCGLCGNFNGDPADDLALRGGGQAANALAFGNSWQEETRPGCGATEPGDCPKLDSLVAQQLQSKNECGILADPKGPFRECHSKLDPQGAVRDCVYDRCLLPGQSGPLCDALATYAAACQAAGATVHPWRSEELC

SEQ ID NO: 5190 - protein, 3072 aa, Homo Sapiens
  misc_feature (1)..(1): Xaa can be any naturally occurring amino acid
XLSCPPHSHYEACSYGCPLSCGDLPVPEGCESACREGCVCDAGFVLSGDTCVPVGQCGCLHDDRYYPLGQTFYPGPGCDSLCRCREGGEVSCEPSSCGPHETCRPSGGSLGCVAVGSTTCQASGDPHYTTFDGHRFDFMGTCVYVLAQTCGTRPGLHRFAVLQENVAWGNGRVSVTRVITVQVANFTLRLEQRQWKVTVNGVDMKLPVVLANGQIRASQHGSDVVIETDFGLRVAYDLVYYVRVTVPGNYYQLMCGLCGNYNGDPKDDFQKPNGSQAGNANEFGNSWEEVVSDSPCLPPPTCPPGSEGCIPSEECPPELEKKYQKEEFCGLLSSPTGPLSSCHKLVDPQGPLKDCIFDLCLGGGNLSILCSNIHAYVSACQVAGGHVEPWRNETFCPMECPQNSHYELCADTCSLGCSALSAPLQCPDGCAEGCQCDSGFLYNGQACVPIQQCGCYHNGAYYEPEQTVLIDNCRQQCTCHAGKVVVCQEHSCKPGQVCQPSGGILSCVTKDPCHGVTCRPQETCKEQGGQGVCLPNYEATCWLWGDPHYHSFDGRKFDFQGTCNYVLATTGCPGVSTQGLTPFTVTTKNQNRGNPAVSYVRVVTVAALGTNISIHKDEIGKVRVNGVLTALPVSVADGRISVTQGASKALLVADFGLQVSYDWNWRVDVTLPSSYHGAVCGLCGNMDRNPNNDQVFPNGTLAPSIPIWGGSWRAPGWDPLCWDECRGSCPTCPEDRLEQYEGPGFCGPLAPGTGGPFTTCHAHVPPESFFKGCVLDVCMGGGDRDILCKALASYVAACQAAGVVIEDWRAQVGCEITCPENSHYEVCGPPCPASCPSPAPLTTPAVCEGPCVEGCQCDAGFVLSADRCVPLNNGCGCWANGTYHEAGSEFWADGTCSQWCRCGPGGGSLVCTPASCGLGEVCGLLPSGQHGCQPVSTAECQAWGDPHYVTLDGHRFDFQGTCEYLLSAPCHGPPLGAENFTVTVANEHRGSQAVSYTRSVTLQIYNHSLTLSARWPRKLQVDGVFVTLPFQLDSLLHAHLSGADVVVTTTSGLSLAFDGDSFVRLRVPAAYAGSLCGLCGNYNQDPADDLKAVGGKPAGWQVGGAQGCGECVSKPCPSPCTPEQQESFGGPDACGVISATDGPLAPCHGLVPPAQYFQGCLLDACQVQGHPGGLCPAVATYVAACQAAGAQLREWRRPDFCPFQCPAHSHYELCGDSCPGSCPSLSAPEGCESACREGCVCDAGFVLSGDTCVPVGQCGCLHDDRYYPLGQTFYPGPGCDSLCRCREGGEVSCEPSSCGPHETCRPSGGSLGCVAVGSTTCQASGDPHYTTFDGHRFDFMGTCVYVLAQTCGTRPGLHRFAVLQENVAWGNGRVSVTRVITVQVANFTLRLEQRQWKVTVNGVDMKLPVVLANGQIRASQHGSDVVIETDFGLRVAYDLVYYVRVTVPGNYYQLMCGLCGNYNGDPKDDFQKPNGSQAGNANEFGNSWEEVVPDSPCLPPPTCPPGSAGCIPSDKCPPELEKKYQKEEFCGLLSSPTGPLSSCHKLVDPQGPLKDCIFDLCLGGGNLSILCSNIHAYVSACQAAGGHVEPWRNETFCPMECPQNSHYELCADTCSLGCSALSAPLQCPDGCAEGCQCDSGFLYNGQACVPIQQCGCYHNGVYYEPEQTVLIDNCRQQCTCHVGKVVVCQEHSCKPGQVCQPSGGILSCVTKDPCHGVTCRPQETCKEQGGQGVCLPNYEATCWLWGDPHYHSFDGRKFDFQGTCNYVLATTGCPGVSTQGLTPFTVTTKNQNRGNPAVSYVRVVTVAALGTNISIHKDEIGKVRVNGVLTALPVSVADGRISVAQGASKALLVADFGLQVSYDWNWRVDVTLPSSYHGAVCGLCGNMDRNPNNDQVFPNGTLAPSIPIWGGSWRAPGWDPLCWDECRGSCPTCPEDRLEQYEGPGFCGPLSSGTGGPFTTCHAHVPPESFFKGCVLDVCMGGGDRDILCKALASYVAACQAAGVVIEDWRAQVGCEITCPENSHYEVCGPPCPASCPSPAPLTTPAVCEGPCVEGCQCDAGFVLSADRCVPLNNGCGCWANGTYHEAGSEFWADGTCSQWCRCGPGGGSLVCTPASCGLGEVCGLLPSGQHGCQPVSTAECQAWGDPHYVTLDGHRFDFQGTCEYLLSAPCHGPPLGAENFTVTVANEHRGSQAVSYTRSVTLQIYNHSLTLSARWPRKLQVDGVFVALPFQLDSLLHAHLSGADVVVTTTSGLSLAFDGDSFVRLRVPAAYAASLCGLCGNYNQDPADDLKAVGGKPAGWQVGGAQGCGECVSKPCPSPCTPEQQESFGGPDACGVISATDGPLAPCHGLVPPAQYFQGCLLDACQVQGHPGGLCPAVATYVAACQAAGAQLGEWRRPDFCPLQCPAHSHYELCGDSCPVSCPSLSAPEGCESACREGCVCDAGFVLSGDTCVPVGQCGCLHDGRYYPLGEVFYPGPECERRCECGPGGHVTCQEGAACGPHEECRLEDGVQACHATGCGRCLANGGIHYITLDGRVYDLHGSCSYVLAQVCHPKPGDEDFSIVLEKNAAGDLQRLLVTVAGQVVSLAQGQQVTVDGEAVALPVAVGRVRVTAEGRNMVLQTTKGLRLLFDGDAHLLMSIPSPFRGRLCGLCGNFNGNWSDDFVLPNGSAASSVETFGAAWRAPGSSKGCGEGCGPQGCPVCLAEETAPYESNEACGQLRNPQGPFATCQAVLSPSEYFRQCVYDLCAQKGDKAFLCRSLAAYTAACQAAGVAVKPWRTDSFCPLHCPAHSHYSICTRTCQGSCAALSGLTGCTTRCFEGCECDDRFLLSQGVCIPVQDCGCTHNGRYLPVNSSLLTSDCSERCSCSSSSGLTCQAAGCPPGRVCEVKAEARNCWATRGLCVLSVGANLTTFDGARGATTSPGVYELSSRCPGLQNTIPWYRVVAEVQICHGKTEAVGQVHIFFQDGMVTLTPNKGVWVNGLRVDLPAEKLASVSVSRTPDGSLLVRQKAGVQVWLGANGKVAVIVSNDHAGKLCGACGNFDGDQTNDWHDSQEKPAMEKWRAQDFSPCYG

SEQ ID NO: 5191 - protein, 250 aa, Homo Sapiens
MGKWPPWVSVFQEETITLHCEVLHLPGSSSTQWFLNGTATQTSTPSYRITSASVNDSGEYRCQRGLSGRSDPIQLEIHRGWLLLQVSSRVFMEGEPLALRCHAWKDKLVYNVLYYRNGKAFKFFHWNSNLTILKTNISHNGTYHCSGMGKHRYTSAGISQYTVKGLQLPTPVWFHVLFYLAVGIMFLVNTVLWVTIRKELKRKKKWNLEISLDSGHEKKVISSLQEDRHLEEELKCQEQKEEQLQEGVHR

SEQ ID NO: 5192 - protein, 188 aa, Homo Sapiens
MWFLTTLLLWGWLLLQVSSRVFMEGEPLALRCHAWKDKLVYNVLYYRNGKAFKFFHWNSNLTILKTNISHNGTYHCSGMGKHRYTSAGISQYTVKGLQLPTPVWFHVLFYLAVGIMFLVNTVLWVTIRKELKRKKKWNLEISLDSGHEKKVISSLQEDRHLEEELKCQEQKEEQLQEGVHRKEPQGAT

SEQ ID NO: 5193 - protein, 224 aa, Homo Sapiens
MWFLTTLLLWVPVDGQVDTTKAVITLQPPWVSVFQEETITLHCEVLHLPGSSSTQWFLNGTATQTSTPSYRITSASVNDSGEYRCQRGLSGRSDPIQLEIHRGWLLLQVSSRVFMEGEPLALRCHAWKDKLVYNVLYYRNGKAFKFFHWNSNLTILKTNISHNGTYHCSGMGKHRYTSAGISQYTVKELFPAPVLNASVTSPLLEGNLVTLSCETKLLLQRPGL

SEQ ID NO: 5194 - protein, 224 aa, Homo Sapiens; identical to SEQ ID NO: 5193

SEQ ID NO: 5195 - protein, 280 aa, Homo Sapiens
MWFLTTLLLWVPVDGQVDTTKAVITLQPPWVSVFQEETITLHCEVLHLPGSSSTQWFLNGTATQTSTPSYRITSASVNDSGEYRCQRGLSGRSDPIQLEIHRGWLLLQVSSRVFMEGEPLALRCHAWKDKLVYNVLYYRNGKAFKFFHWNSNLTILKTNISHNGTYHCSGMGKHRYTSAGISQYTVKGLQLPTPVWFHVLFYLAVGIMFLVNTVLWVTIRKELKRKKKWNLEISLDSGHEKKVISSLQEDRHLEEELKCQEQKEEQLQEGVHRKEPQGAT

SEQ ID NO: 5196 - protein, 225 aa, Homo Sapiens
MWFLTTLLLWVPVDGQVVDTTKAVITLQPPWVSVFQEETITLHCEVLHLPGSSSTQWFLNGTATQTSTPSYRITSASVNDSGEYRCQRGLSGRSDPIQLEIHRGWLLLQVSSRVFMEGEPLALRCHAWKDKLVYNVLYYRNGKAFKFFHWNSNLTILKTNISHNGTYHCSGMGKHRYTSAGISQYTVKELFPAPVLNASVTSPLLEGNLVTLSCETKLLLQRPGL

SEQ ID NO: 5197 - protein, 359 aa, Homo Sapiens
MAEGTLWQILCVSSDAQPQTFEGVKGADPPTLPPGSFLPGPVLWWGSLARLQTEKSDEVSRKGNWWVTEMGGGAGERLFTSSCLVGLVPLGLRISLVTCPLQCGIMWQLLLPTALLLLVSAGMRTEDLPKAVVFLEPQWYRVLEKDSVTLKCQGAYSPEDNSTQWFHNESLISSQASSYFIDAATVDDSGEYRCQTNLSTLSDPVQLEVHIGWLLLQAPRWVFKEEDPIHLRCHSWKNTALHKVTYLQNGKGRKYFHHNSDFYIPKATLKDSGSYFCRGLFGSKNVSSETVNITITQGLAVSTISSFFPPGYQVSFCLVMVLLFAVDTGLYFSVKTNIRSSTRDWKDHKFKWRKDPQDK

SEQ ID NO: 5198 - protein, 290 aa, Homo Sapiens
MGGGAGERLFTSSCLVGLVPLGLRISLVTCPLQCGIMWQLLLPTALLLLVSAGMRTEDLPKAVVFLEPQWYRVLEKDSVTLKCQGAYSPEDNSTQWFHNESLISSQASSYFIDAATVDDSGEYRCQTNLSTLSDPVQLEVHIGWLLLQAPRWVFKEEDPIHLRCHSWKNTALHKVTYLQNGKGRKYFHHNSDFYIPKATLKDSGSYFCRGLFGSKNVSSETVNITITQGLAVSTISSFFPPGYQVSFCLVMVLLFAVDTGLYFSVKTNIRSSTRDWKDHKFKWRKDPQDK

SEQ ID NO: 5199 - protein, 105 aa, Homo Sapiens
MWQLLLPTALLLLVSAGMRTDLPKAVVFLEPQWYRVLEKDSVTLKCQGAYSPEDNSTQWFHNESLISSQASSYFIDAATVDDSGEYRCQTNLSTLSDPVQLEVHI

SEQ ID NO: 5200 - protein, 254 aa, Homo Sapiens
MWQLLLPTALLLLVSAGMRTEDLPKAVVFLEPQWYRVLEKDSVTLKCQGAYSPEDNSTQWFHNESLISSQASSYFIDAATVDDSGEYRCQTNLSTLSDPVQLEVHIGWLLLQAPRWVFKEEDPIHLRCHSWKNTALHKVTYLQNGKGRKYFHHNSDFYIPKATLKDSGSYFCRGLFGSKNVSSETVNITITQGLAVSTISSFFPPGYQVSFCLVMVLLFAVDTGLYFSVKTNIRSSTRDWKDHKFKWRKDPQDK

SEQ ID NO: 5201 - protein, 254 aa, Homo Sapiens; identical to SEQ ID NO: 5200

SEQ ID NO: 5202 - protein, 254 aa, Homo Sapiens; identical to SEQ ID NO: 5200

SEQ ID NO: 5203 - protein, 307 aa, Homo Sapiens
QTEKSDEVSRKGNWWVTEMGGGAGERLFTSSCLVGLVPLGLRISLVTCPLQCGIMWQLLLPTALLLLVSAGMRTDLPKAVVFLEPQWYRVLEKDSVTLKCQGAYSPEDNSTQWFHNESLISSQASSYFIDAATVDDSGEYRCQTNLSTLSDPVQLEVHIGWLLLQAPRWVFKEEDPIHLRCHSWKNTALHKVTYLQNGKGRKYFHHNSDFYIPKATLKDSGSYFCRGLFGSKNVSSETVNITITQGLAVSTISSFFPPGYQVSFCLVMVLLFAVDTGLYFSVKTNIRSSTRDWKDHKFKWRKDPQDK

SEQ ID NO: 5204 - protein, 211 aa, Homo Sapiens
GVPRPQPWALGLLLFLLPGSLGAESHLSLLYHLTAVSSPAPGTPAFWVSGWLGPQQYLSYNSLRGEAEPCGAWVWENQVSWYWEKETTDLRIKEKLFLEAFKALGGKGPYTLQGLLGCELGPDNTSVPTAKFALNGEEFMNFDLKQGTWGGDWPEALAISQRWQQQDKAANKELTFLLFSCPHRLREHLERGRGNLEWKEPKARQIFCAWI

SEQ ID NO: 5205 - protein, 273 aa, Homo Sapiens
MGVPRPQPWALGLLLFLLPGSLGAESHLSLLYHLTAVSSPAPGTPAFWVSGWLGPQQYLSYNSLRGEAEPCGAWVWENQVSWYWEKETTDLRIKEKLFLEAFKALGGKEPPSMRLKARPSSPGFSVLTCSAFSFYPPELQLRFLRNGLAAGTGQGDFGPNSDGSFHASSSLTVKSGDEHHYCCIVQHAGLAQPLRVELESPAKSSVLVVGIVIGVLLLTAAAVGGALLWRRMRSGLPAPWISLRGDDTGVLLPTPGEAQDADLKDVNVIPATA

SEQ ID NO: 5206 - protein, 141 aa, Homo Sapiens
MGVPRPQPWALGLLLFLLPGSLGAESHLSLLYHLTAVSSPAPGTPAFWVSGWLGPQQYLSYNSLRGEAEPCGAWVWENQVSWYWEKETTDLRIKEKLFLEAFKALGGKGPYTLQGLLGCELGPDNTSVPTAKFALNGEEFM

SEQ ID NO: 5207 - protein, 167 aa, Homo Sapiens
MGVPRPQPWALGLLLFLLPGSLGAESHLSLLYHLTAVSSPAPGTPAFWVSGWLGPQQYLSYNSLRGEAEPCGAWVWENQVSWYWEKETTDLRIKEKLFLEAFKALGGKGPYTLQGLLGCELGPDNTSVPTAKFALNGEEFMNFDLKQGTWGGDWPEALAISQRWQQQ

SEQ ID NO: 5208 - protein, 225 aa, Homo Sapiens
MGVPRPQPWALGLLLFLLPGSLGAESHLSLLYHLTAVSSPAPGTPAFWVSGWLGPQQYLSYNSLRGEAEPCGAWVWENQVSWYWEKETTDLRIKEKLFLEAFKALGGKGPYTLQGLLGCELGPDNTSVPTAKFALNGEEFMNFDLKQGTWGGDWPEALAISQRWQQQDKAANKELTFLLFSCPHRLREHLERGRGNLEWKDTVSHYVAQAGLELLGSSDSPALVS

SEQ ID NO: 5209 - protein, 365 aa, Homo Sapiens
MGVPRPQPWALGLLLFLLPGSLGAESHLSLLYHLTAVSSPAPGTPAFWVSGWLGPQQYLSYNSLRGEAEPCGAWVWENQVSWYWEKETTDLRIKEKLFLEAFKALGGKGPYTLQGLLGCELGPDNTSVPTAKFALNGEEFMNFDLKQGTWGGDWPEALAISQRWQQQDKAANKELTFLLFSCPHRLREHLERGRGNLEWKEPPSMRLKARPSSPGFSVLTCSAFSFYPPELQLRFLRNGLAAGTGQGDFGPNSDGSFHASSSLTVKSGDEHHYCCIVQHAGLAQPLRVELESPAKSSVLVVGIVIGVLLLTAAAVGGALLWRRMRSGLPAPWISLRGDDTGVLLPTPGEAQDADLKDVNVIPATA

SEQ ID NO: 5210 - protein, 365 aa, Homo Sapiens; identical to SEQ ID NO: 5209

SEQ ID NO: 5211 - protein, 99 aa, Homo Sapiens
MGVPRPQPWALGLLLFLLPGSLGAESPAKSSVLVVGIVIGVLLLTAAAVGGALLWRRMRSGLPAPWISLRGDDTGVLLPTPGEAQDADLKDVNVIPATA

SEQ ID NO: 5212 - protein, 39 aa, Homo Sapiens
MNFDLKQGTWGGDWPEALAISQRWQQQDKAANKELTFLL

SEQ ID NO: 5213 - protein, 153 aa, Homo Sapiens
WEKETTDLRIKEKLFLEAFKALGGKGPYTLQGLLGCELGPDNTSVPTAKFALNGEEFMNFDLKQGTWGGDWPEALAISQRWQQQDKAANKELTFLLFSCPHRLREHLERGRGNLEWKAPWISLRGDDTGVLLPTPGEAQDADLKDVNVIPATA

SEQ ID NO: 5214 - protein, 189 aa, Homo Sapiens
  misc_feature (1)..(1): Xaa can be any naturally occurring amino acid
XSSPAPGTPAFWVSGWLGPQQYLSYNSLRGEAEPCGAWVWENQVSWYWEKETTDLRIKEKLFLEAFKALGGKGPYTLQGLLGCELGPDNTSVPTAKFALNGEEFMNFDLKQGTWGGDWPEALAISQRWQQQDKAANKELTFLLFSCPHRLREHLERGRGNLEWKAPSPSTLRSCNFGSCGMGWPLAPAR

SEQ ID NO: 5215 - protein, 141 aa, Homo Sapiens
MDFWLWPLYFLPEMESCCVAQDGLELVALSDPPGSASQSAGITVSGALRILPEVKVEGELGGSVTIKCPLPEMHVRIYLCREMAGSGTCGTVVSTTNFIKAEYKGRVTLKQYPRKNLFLVEVTQLTESDSGVYACGAGMNT

SEQ ID NO: 5216 - protein, 278 aa, Homo Sapiens
MDFWLWPLYFLPEYEPSWEEQPMPETPKWFHLPYLFQMPAYASSSKFVTRVTTPAQRGKVPPVHHSSPTTQITHRPRVSRASSVAGDKPRTFLPSTTASKISALEGLLKPQTPSYNHHTRLHRQRALDYGSQSGREGQGFHILIPTILGLFLLALLGLVVKRAVERRKALSRRARRLAVRMRALESSQRPRGSPRPRSQNNIYSACPRRARGADAAGTGEAPVPGPGAPLPPAPLQVSESPWLHAPSLKTSCEYVSLYHQPAAMMEDSDSDDYINVPA

SEQ ID NO: 5217 - protein, 125 aa, Homo Sapiens
MDFWLWPLYFLPVSGALRILPEVKVEGELGGSVTIKCPLPEMHVRIYLCREMAGSGTCGTVVSTTNFIKAEYKGRVTLKQYPRKNLFLVENTSHHGKSSQCLRLQNGFICPICSRCLHMPVLPNS

SEQ ID NO: 5218 - protein, 147 aa, Homo Sapiens
MDFWLWPLYFLPVSGALRILPEVKVEGELGGSVTIKCPLPEMHVRIYLCREMAGSGTCGTVVSTTNFIKAEYKGRVTLKQYPRKNLFLVEVTQLTESDSGVYACGAGMNTDRGKTQKVTLNVHSEYEPSWEEQPMPETPKWFHLPYL

SEQ ID NO: 5219 - protein, 151 aa, Homo Sapiens
MDFWLWPLYFLPVSGALRILPEVKVEGELGGSVTIKCPLPEMHVRIYLCREMAGSGTCGTVVSTTNFIKAEYKGRVTLKQYPRKNLFLVEVTQLTESDSGVYACGAGMNTDRGKTQKVTLNVHSEYEPSWEEQPMPETPKWFHLPYLFQMP

SEQ ID NO: 5220 - protein, 390 aa, Homo Sapiens
MDFWLWPLYFLPVSGALRILPEVKVEGELGGSVTIKCPLPEMHVRIYLCREMAGSGTCGTVVSTTNFIKAEYKGRVTLKQYPRKNLFLVEVTQLTESDSGVYACGAGMNTDRGKTQKVTLNVHSEYEPSWEEQPMPETPKWFHLPYLFQMPAYASSSKFVTRVTTPAQRGKVPPVHHSSPTTQITHRPRVSRASSVAGDKPRTFLPSTTASKISALEGLLKPQTPSYNHHTRLHRQRALDYGSQSGREGQGFHILIPTILGLFLLALLGLVVKRAVERRKALSRRARRLAVRMRALESSQRPRGSPRPRSQNNIYSACPRRARGADAAGTGEAPVPGPGAPLPPAPLQVSESPWLHAPSLKTSCEYVSLYHQPAAMMEDSDSDDYINVPA

SEQ ID NO: 5221 - protein, 306 aa, Homo Sapiens
MDFWLWPLYFLPVSGALRILPEVKVEGELGGSVTIKCPLPEMHVRIYLCREMAGSGTCGTVVSTTNFIKAEYKGRVTLKQYPRKNLFLVEVTQLTESDSGVYACGAGMNTDRGKTQKVTLNVHSEYEPSWEEQPMPETPKWFHLPYLFQMPAYASSSKFVTRVTTPAQRGKVPPVHHSSPTTQITHRPRVSRASSVAGDKPRTFLPSTTASKISALEGLLKPQTPSYNHHTRLHRQSPLQAGPPTGREDARPGELPEAPRVAATALPKQHLQRLPAARSWSGRCRHRGGPRSRPRSAVAPRPAAGV

SEQ ID NO: 5222 - protein, 326 aa, Homo Sapiens
MELSGATMARGLAVLLVLFLHIKNLPAQAADTCPEVKVVGLEGSDKLTILRGCPGLPGAPGPKGEAGVIGERGERGLPGAPGKAGPVGPKGDRGEKGMRGEKGDAGQSQSCATGPRNCKDLLDRGYFLSGWHTIYLPDCRPLTVLCDMDTDGGGWTVFQRRMDGSVDFYRDWAAYKQGFGSQLGEFWLGNDNIHALTAQGSSELRVDLVDFEGNHQFAKYKSFKVADEAEKYKLVLGAFVGGSAGNSLTGHNNNFFSTKDQDNDVSSSNCAEKFQGAWWYADCHASNLNGLYLMGPHESYANGINWSAAKGYKYSYKVSEMKVRPA

SEQ ID NO: 5223 - protein, 360 aa, Homo Sapiens
MELSGATMARGLAVLLVLFLHIKNLPAQAADTCPEVKVVGLEGSDKLTILRGCPGLPGAPGPKGEAGVIGERGERGLPGAPGKAGPVGPKGDRGEKGMRGEKGDAGQSQSCATGPRNCKDLLDRGYFLSGWHTIYLPDCRPLTVLCDMDTDGGGWTVFQRRMDGSVDFYRDWAAYKQGFGSQTHSHDAHSCPFAPSSVKPPHAHNLTRGRIMFLNMFTLGQKSFTSFNVCFLNTSGFDHFPVSVARQVFPWNLVSREESGPLFSRWHYRCSGRLSDFCEDFPPPVIDTGRSSPPPPSLPHPPMPHSQHFTLLEKGHFGVQKTLTKKGESLVGTFLLPTTAEFMLWAGWLLGRDKHLALTK

SEQ ID NO: 5224 - protein, 313 aa, Homo Sapiens
MELDRAVGVLGAATLLLSFLGMAWALQAADTCPEVKMVGLEGSDKLTILRGCPGLPGAPGPKGEAGTNGKRGERGPPGPPGKAGPPGPNGAPGEPQPCLTGPRTCKDLLDRGHFLSGWHTIYLPDCRPLTVLCDMDTDGGGWTVFQRRVDGSVDFYRDWATYKQGFGSRLGEFWLGNDNIHALTAQGTSELRVDLVDFEDNYQFAKYRSFKVADEAEKYNLVLGAFVEGSAGDSLTFHNNQSFSTKDQDNDLNTGNCAVMFQGAWWYKNCHVSNLNGRYLRGTHGSFANGINWKSGKGYNYSYKVSEMKVRPA

SEQ ID NO: 5225 - protein, 275 aa, Homo Sapiens
MELDRAVGVLGAATLLLSFLGMAWALQAADTCPGERGPPGPPGKAGPPGPNGAPGEPQPCLTGPRTCKDLLDRGHFLSGWHTIYLPDCRPLTVLCDMDTDGGGWTVFQRRVDGSVDFYRDWATYKQGFGSRLGEFWLGNDNIHALTAQGTSELRVDLVDFEDNYQFAKYRSFKVADEAEKYNLVLGAFVEGSAGDSLTFHNNQSFSTKDQDNDLNTGNCAVMFQGAWWYKNCHVSNLNGRYLRGTHGSFANGINWKSGKGYNYSYKVSEMKVRPA

SEQ ID NO: 5226 - protein, 299 aa, Homo Sapiens
MDLLWILPSLWLLLLGGPACLKTQEHPSCPGPRELEASKVVLLPSCPGAPGSPGEKGAPGPQGPPGPPGKMGPKGEPGDPVNLLRCQEGPRNCRELLSQGATLSGWYHLCLPEGRALPVFCDMDTEGGGWLVFQRRQDGSVDFFRSWSSYRAGFGNQESEFWLGNENLHQLTLQGNWELRVELEDFNGNRTFAHYATFRLLGEVDHYQLALGKFSEGTAGDSLSLHSGRPFTTYDADHDSSNSNCAVIVHGAWWYASCYRSNLNGRYAVSEAAAHKYGIDWASGRGVGHPYRRVRMMLR

SEQ ID NO: 5227 - protein, 288 aa, Homo Sapiens
MDLLWILPSLWLLLLGGPACLKTQEHPSCPGPRELEASKVVLLPSCPGAPGSPGEKGAPGPQGPPGPPGKMGPKGEPGPRNCRELLSQGATLSGWYHLCLPEGRALPVFCDMDTEGGGWLVFQRRQDGSVDFFRSWSSYRAGFGNQESEFWLGNENLHQLTLQGNWELRVELEDFNGNRTFAHYATFRLLGEVDHYQLALGKFSEGTAGDSLSLHSGRPFTTYDADHDSSNSNCAVIVHGAWWYASCYRSNLNGRYAVSEAAAHKYGIDWASGRGVGHPYRRVRMMLR

SEQ ID NO: 5228 - protein, 429 aa, Homo Sapiens
MLPRLLLLICAPLCEPAELFLIASPSHPTEGSPVTLTCKMPFLQSSDAQFQFCFFRDTRALGPGWSSSPKLQIAAMWKEDTGSYWCEAQTMASKVLRSRRSQINVHRVPVADVSLETQPPGGQVMEGDRLVLICSVAMGTGDITFLWYKGAVGLNLQSKTQRSLTAEYEIPSVRESDAEQYYCVAENGYGPSPSGLVSITVRIPVSRPILMLRAPRAQAAVEDVLELHCEALRGSPPILYWFYHEDITLGSRSAPSGGGASFNLSLTEEHSGNYSCEANNGLGAQRSEAVTLNFTVPTGARSNHLTSGVIEGLLSTLGPATVALLFCYGLKRKIGRRSARDPLRSLPSPLPQEFTYLNSPTPGQLQPIYENVNVVSGDEVYSLAYYNQPEQESVAAETLGTHMEDKVSLDIYSRLRKANITDVDYEDAM

SEQ ID NO: 5229 - protein, 366 aa, Homo Sapiens
MLPRLLLLICAPLCEPAELFLIASPSHPTEGSPVTLTCKMPFLQSSDAQFQFCFFRDTRALGPGWSSSPKLQIAAMWKEDTGSYWCEAQTMASKVLRSRRSQINVHRVPVADVSLETQPPGGQVMEGDRLVLICSVAMGTGDITFLWYKGAVGLNLQSKTQRSLTAEYEIPSVRESDAEQYYCVAENGYGPSPSGLVSITVRIPVSRPILMLRAPRAQAAVEDVLELHCEALRGSPPILYWFYHEDITLGSRSAPSGGGASFNLSLTEEHSGNYSCEANNGLGAQRSEAVTLNFTGRRSARDPLRSLPSPLPQEFTYLNSPTPGQLQPIYENEPREQSVAVHGRQQHSSEQKAQKPWGHIWRTRFP

SEQ ID NO: 5230 - protein, 428 aa, Homo Sapiens
MLPRLLLLICAPLCEPAELFLIASPSHPTEGSPVTLTCKMPFLQSSDAQFQFCFFRDTRALGPGWSSSPKLQIAAMWKEDTGSYWCEAQTMASKVLRSRRSQINVHRVPVADVSLETQPPGGQVMEGDRLVLICSVAMGTGDITFLWYKGAVGLNLQSKTQRSLTAEYEIPSVRESDAEQYYCVAENGYGPSPSGLVSITVRIPVSRPILMLRAPRAQAAVEDVLELHCEALRGSPPILYWFYHEDITLGSRSAPSGGGASFNLSLTEEHSGNYSCEANNGLGAQRSEAVTLNFTVPTGARSNHLTSGVIEGLLSTLGPATVALLFCYGLKRKIGRRSARDPLRSLPSPLPQEFTYLNSPTPGQLQPIYENVNVVSGDEVYSLAYYNQPEQESVAETLGTHMEDKVSLDIYSRLRKANITDVDYEDAM

SEQ ID NO: 5231 - protein, 742 aa, Homo Sapiens
MLLWLLLLILTPGREQSGVAPKAVLLLNPPWSTAFKGEKVALICSSISHSLAQGDTYWYHDEKLLKIKHDKIQITEPGNYQCKTRGSSLSDAVHVEFSPDWLILQALHPVFEGDNVILRCQGKDNKNTHQKVYYKDGKQLPNSYNLEKITVNSVSRDNSKYHCTAYRKFYILDIEVTSKPLNIQVQELFLHPVLRASSSTPIEGSPMTLTCETQLSPQRPDVQLQFSLFRDSQTLGLGWSRSPRLQIPAMWTEDSGSYWCEVETVTHSIKKRSLRSQIRVQRVPVSNVNLEIRPTGGQLIEGENMVLICSVAQGSGTVTFSWHKEGRVRSLGRKTQRSLLAELHVLTVKESDAGRYYCAADNVHSPILSTWIRVTVRIPVSHPVLTFRAPRAHTVVGDLLELHCESLRGSPPILYRFYHEDVTLGNSSAPSGGGASFNLSLTAEHSGNYSCDADNGLGAQHSHGVSLRVTVPVSRPVLTLRAPGAQAVVGDLLELHCESLRGSFPILYWFYHEDDTLGNISAHSGGGASFNLSLTTEHSGNYSCEADNGLGAQHSKVVTLNVTGTSRNRTGLTAAGITGLVLSILVLAAAAALLHYARARRKPGGLSATGTSSHSPSECQEPSSSRPSRIDPQEPTHSKPLAPMELEPMYSNVNPGDSNPIYSQIWSIQHTKENSANCPMMHQEHEELTVLYSELKKTHPDDSAGEASSRGRAHEEDDEENYENILNPRKNKVQDFPCLCNT

SEQ ID NO: 5232 - protein, 734 aa, Homo Sapiens
MLLWLLLLILTPGREQSGVAPKAVLLLNPPWSTAFKGEKVALICSSISHSLAQGDTYWYHDEKLLKIKHDKIQITEPGNYQCKTRGSSLSDAVHVEFSPDWLILQALHPVFEGDNVILRCQGKDNKNTHQKVYYKDGKQLPNSYNLEKITVNSVSRDNSKYHCTAYRKFYILDIEVTSKPLNIQVQELFLHPVLRASSSTPIEGSPMTLTCETQLSPQRPDVQLQFSLFRDSQTLGLGWSRSPRLQIPAMWTEDSGSYWCEVETVTHSIKKRSLRSQIRVQRVPVSNVNLEIRPTGGQLIEGENMVLICSVAQGSGTVTFSWHKEGRVRSLGRKTQRSLLAELHVLTVKESDAGRYYCAADNVHSPILSTWIRVTVRIPVSHPVLTFRAPRAHTVVGDLLELHCESLRGSPPILYRFYHEDVTLGNSSAPSGGGASFNLSLTAEHSGNYSCDADNGLGAQHSHGVSLRVTVPVSRPVLTLRAPGAQAVVGDLLELHCESLRGSFPILYWFYHEDDTLGNISAHSGGGASFNLSLTTEHSGNYSCEADNGLGAQHSKVVTLNVTGTSRNRTGLTAAGITGLVLSILVLAAAAALLHYARARRKPGGLSATGTSSHSPSECQEPSSSRPSRIDPQEPTHSKPLAPMELEPMYSNVNPGDSNPIYSQIWSIQHTKENSANCPMMHQEHEELTVLYSELKKTHPDDSAGEASSRGRAHEEDDEENYENVPRVLLASDH

SEQ ID NO: 5233 - protein, 256 aa, Homo Sapiens
MLLWLLLLILTPGREQSGVAPKAVLLLNPPWSTAFKGEKVALICSSISHSLAQGDTYWYHDEKLLKIKHDKIQITEPGNYQCKTRGSSLSDAVHVEFSPDWLILQALHPVFEGDNVILRCQGKDNKNTHQKVYYKDGKQLPNSYNLEKITVNSVSRDNSKYHCTAYRKFYILDIEVTSKPLNIQVQELFLHPVLRASSSTPIEGSPMTLTCETQLSPQRPDVQLQFSLFRDSQTLGLGWSRSPRLQIPAMWTEDSG

SEQ ID NO: 5234 - protein, 740 aa, Homo Sapiens
MLLWLLLLILTPGREQSGVAPKAVLLLNPPWSTAFKGEKVALICSSISHSLAQGDTYWYHDEKLLKIKHDKIQITEPGNYQCKTRGSSLSDAVHVEFSPDWLILQALHPVFEGDNVILRCQGKDNKNTHQKVYYKDGKQLPNSYNLEKITVNSVSRDNSKYHCTAYRKFYILDIEVTSKPLNIQVQELFLHPVLRASSSTPIEGSPMTLTCETQLSPQRPDVQLQFSLFRDSQTLGLGWSRSPRLQIPAMWTEDSGSYWCEVETVTHSIKKRSLRSQIRVQRVPVSNVNLEIRPTGGQLIEGENMVLICSVAQGSGTVTFSWHKEGRVRSLGRKTQRSLLAELHVLTVKESDAGRYYCAADNVHSPILSTWIRVTVRTLLSPSVPVSHPVLTFRAPRAHTVVGDLLELHCESLRGSPPILYRFYHEDVTLGNSSAPSGGGASFNLSLTAEHSGNYSCDADNGLGAQHSHGVSLRVTVPVSRPVLTLRAPGAQAVVGDLLELHCESLRGSFPILYWFYHEDDTLGNISAHSGGGASFNLSLTTEHSGNYSCEADNGLGAQHSKVVTLNVTGTSRNRTGLTAAGITGLVLSILVLAAAAALLHYARARRKPGGLSATGTSSHSPSECQEPSSSRPSRIDPQEPTHSKPLAPMELEPMYSNVNPGDSNPIYSQIWSIQHTKENSANCPMMHQEHEELTVLYSELKKTHPDDSAGEASSRGRAHEEDDEENYENVPRVLLASDH

SEQ ID NO: 5235 - protein, 734 aa, Homo Sapiens; identical to SEQ ID NO: 5232

SEQ ID NO: 5236 - protein, 639 aa, Homo Sapiens
MLLWLLLLILTPGREQSGVAPKAVLLLNPPWSTAFKGEKVALICSSISHSLAQGDTYWYHDEKLLKIKHDKIQITEPGNYQCKTRGSSLSDAVHVEFSPDWLILQALHPVFEGDNVILRCQGKDNKNTHQKVYYKDGKQLPNSYNLEKITVNSVSRDNSKYHCTAYRKFYILDIEVTSKPLNIQVQGVPVSNVNLEIRPTGGQLIEGENMVLICSVAQGSGTVTFSWHKEGRVRSLGRKTQRSLLAELHVLTVKESDAGRYYCAADNVHSPILSTWIRVTVRIPVSHPVLTFRAPRAHTVVGDLLELHCESLRGSPPILYRFYHEDVTLGNSSAPSGGGASFNLSLTAEHSGNYSCDADNGLGAQHSHGVSLRVTVPVSRPVLTLRAPGAQAVVGDLLELHCESLRGSFPILYWFYHEDDTLGNISAHSGGGASFNLSLTTEHSGNYSCEADNGLGAQHSKVVTLNVTGTSRNRTGLTAAGITGLVLSILVLAAAAALLHYARARRKPGGLSATGTSSHSPSECQEPSSSRPSRIDPQEPTHSKPLAPMELEPMYSNVNPGDSNPIYSQIWSIQHTKENSANCPMMHQEHEELTVLYSELKKTHPDDSAGEASSRGRAHEEDDEENYENVPRVLLASDH

SEQ ID NO: 5237 - protein, 592 aa, Homo Sapiens
MLLWVILLVLAPVSGQFARTPRPIIFLQPPWTTVFQGERVTLTCKGFRFYSPQKTKWYHRYLGKEILRETPDNILEVQESGEYRCQAQGSPLSSPVHLDFSSASLILQAPLSVFEGDSVVLRCRAKAEVTLNNTIYKNDNVLAFLNKRTDFHIPHACLKDNGAYRCTGYKESCCPVSSNTVKIQVQEPFTRPVLRASSFQPISGNPVTLTCETQLSLERSDVPLRFRFFRDDQTLGLGWSLSPNFQITAMWSKDSGFYWCKAATMPYSVISDSPRSWIQVQIPASHPVLTLSPEKALNFEGTKVTLHCETQEDSLRTLYRFYHEGVPLRHKSVRCERGASISFSLTTENSGNYYCTADNGLGAKPSKAVSLSVTVPVSHPVLNLSSPEDLIFEGAKVTLHCEAQRGSLPILYQFHHEGAALERRSANSAGGVAISFSLTAEHSGNYYCTADNGFGPQRSKAVSLSVTVPVSHPVLTLSSAEALTFEGATVTLHCEVQRGSPQILYQFYHEDMPLWSSSTPSVGRVSFSFSLTEGHSGNYYCTADNGFGPQRSEVVSLFVTGKCWVLASHPPLAEFSLTHSFKNLFALSSFLP

SEQ ID NO: 5238 - protein, 977 aa, Homo Sapiens
MLLWVILLVLAPVSGQFARTPRPIIFLQPPWTTVFQGERVTLTCKGFRFYSPQKTKWYHRYLGKEILRETPDNILEVQESGEYRCQAQGSPLSSPVHLDFSSASLILQAPLSVFEGDSVVLRCRAKAEVTLNNTIYKNDNVLAFLNKRTDFHIPHACLKDNGAYRCTGYKESCCPVSSNTVKIQVQEPFTRPVLRASSFQPISGNPVTLTCETQLSLERSDVPLRFRFFRDDQTLGLGWSLSPNFQITAMWSKDSGFYWCKAATMPYSVISDSPRSWIQVQIPASHPVLTLSPEKALNFEGTKVTLHCETQEDSLRTLYRFYHEGVPLRHKSVRCERGASISFSLTTENSGNYYCTADNGLGAKPSKAVSLSVTVPVSHPVLNLSSPEDLIFEGAKVTLHCEAQRGSLPILYQFHHEGAALERRSANSAGGVAISFSLTAEHSGNYYCTADNGFGPQRSKAVSLSVTVPVSHPVLTLSSAEALTFEGATVTLHCEVQRGSPQILYQFYHEDMPLWSSSTPSVGRVSFSFSLTEGHSGNYYCTADNGFGPQRSEVVSLFVTVPVSRPILTLRVPRAQAVVGDLLELHCEAPRGSPPILYWFYHEDVTLGSSSAPSGGEASFNLSLTAEHSGNYSCEANNGLVAQHSDTISLSVIVPVSRPILTFRAPRAQAVVGDLLELHCEALRGSSPILYWFYHEDVTLGKISAPSGGGASFNLSLTTEHSGIYSCEADNGLEAQRSEMVTLKVAVPVSRPVLTLRAPGTHAAVGDLLELHCEALRGSPLILYRFFHEDVTLGNRSSPSGGASLNLSLTAEHSGNYSCEADNGLGAQRSETVTLYITGLTANRSGPFATGVAGGLLSIAGLAAGALLLYCWLSRKAGRKPASDPARSPSDSDSQEPTYHNVPAWEELQPVYTNANPRGENVVYSEVRIIQEKKKHAVASDPRHLRNKGSPIIYSEVKVASTPVSGSLFLASSAPHR

SEQ ID NO: 5239 - protein, 759 aa, Homo Sapiens
MLLWVILLVLAPVSGQFARTPRPIIFLQPPWTTVFQGERVTLTCKGFRFYSPQKTKWYHRYLGKEILRETPDNILEVQESGEYRCQAQGSPLSSPVHLDFSSASLILQAPLSVFEGDSVVLRCRAKAEVTLNNTIYKNDNVLAFLNKRTDFHIPHACLKDNGAYRCTGYKESCCPVSSNTVKIQVQEPFTRPVLRASSFQPISGNPVTLTCETQLSLERSDVPLRFRFFRDDQTLGLGWSLSPNFQITAMWSKDSGFYWCKAATMPYSVISDSPRSWIQVQIPASHPVLTLSPEKALNFEGTKVTLHCETQEDSLRTLYRFYHEGVPLRHKSVRCERGASISFSLTTENSGNYYCTADNGLGAKPSKAVSLSVTVPVSHPVLNLSSPEDLIFEGAKVTLHCEAQRGSLPILYQFHHEGAALERRSANSAGGVAISFSLTAEHSGNYYCTADNGFGPQRSKAVSLSVTVPVSHPVLTLSSAEALTFEGATVTLHCEVQRGSPQILYQFYHEDMPLWSSSTPSVGRVSFSFSLTEGHSGNYYCTADNGFGPQRSEVVSLFVTVPVSRPILTLRVPRAQAVVGDLLELHCEAPRGSPPILYWFYHEDVTLGSSSAPSGGEASFNLSLTAEHSGNYSCEANNGLVAQHSDTISLSVIVPVSRPILTFRAPRAQAVVGDLLELHCEALRGSSPILYWFYHEDVTLGKISAPSGGGASFNLSLTTEHSGIYSCEADNGLEAQRSEMVTLKVAGEWALPTSSTSEN

SEQ ID NO: 5240 - protein, 365 aa, Homo Sapiens
MKLGCVLMAWALYLSLGVLWVAQMLLAAGCHAAASFETLQCEGPVCTEESSCHTEDDLTDAREAGFQVKAYTFSEPFHLIVSYDWLILQGPAKPVFEGDLLVLRCQAWQDWPLTQVTFYRDGSALGPPGPNREFSITVVQKADSGHYHCSGIFQSPGPGIPETASVVAITVQELFPAPILRAVPSAEPQAGSPMTLSCQTKLPLQRSAARLLFSFYKDGRIVQSRGLSSEFQIPTASEDHSGSYWCEAATEDNQVWKQSPQLEIRVQGASSSAAPPTLNPAPQKSAAPGTAPEEAPGPLPPPPTPSSEDPGFSSPLGMPDPHLYHQMGLLLKHMQDVRVLLGHLLMELRELSGHRKPGTTKATAE

SEQ ID NO: 5241 - protein, 225 aa, Homo Sapiens
MKLGCVLMAWALYLSLGVLWVAQMLLAAGCHAELFPAPILRAVPSAEPQAGSPMTLSCQTKLPLQRSAARLLFSFYKDGRIVQSRGLSSEFQIPTASEDHSGSYWCEAATEDNQVWKQSPQLEIRVQGASSSAAPPTLNPAPQKSAAPGTAPEEAPGPLPPPPTPSSEDPGFSSPLGMPDPHLYHQMGLLLKHMQDVRVLLGHLLMELRELSGHRKPGTTKATAE

SEQ ID NO: 5242 - protein, 264 aa, Homo Sapiens
MKLGCVLMAWALYLSLGVLWVAQMLLAASFETLQCEGPVCTEESSCHTEDDLTDAREAGFQVKAYTFSEPFHLIVSYDWLILQGPAKPVFEGDLLVLRCQAWQDWPLTQVTFYRDGSALGPPGPNREFSITVVQKADSGHYHCSGIFQSPGPGIPETASVVAITVQGASSSAAPPTLNPAPQKSAAPGTAPEEAPGPLPPPPTPSSEDPGFSSPLGMPDPHLYHQMGLLLKHMQDVRVLLGHLLMELRELSGHRKPGTTKATAE

SEQ ID NO: 5243 - protein, 270 aa, Homo Sapiens
MKLGCVLMAWALYLSLGVLWVAQMLLAASFETLQCEGPVCTEESSCHTEDDLTDAREAGFQVKAYTFSEPFHLIVSYELFPAPILRAVPSAEPQAGSPMTLSCQTKLPLQRSAARLLFSFYKDGRIVQSRGLSSEFQIPTASEDHSGSYWCEAATEDNQVWKQSPQLEIRVQGASSSAAPPTLNPAPQKSAAPGTAPEEAPGPLPPPPTPSSEDPGFSSPLGMPDPHLYHQMGLLLKHMQDVRVLLGHLLMELRELSGHRKPGTTKATAE

SEQ ID NO: 5244 - protein, 382 aa, Homo Sapiens
MLKKISVGVAGDLNTVTMKLGCVLMAWALYLSLGVLWVAQMLLAAGCHAAASFETLQCEGPVCTEESSCHTEDDLTDAREAGFQVKAYTFSEPFHLIVSYDWLILQGPAKPVFEGDLLVLRCQAWQDWPLTQVTFYRDGSALGPPGPNREFSITVVQKADSGHYHCSGIFQSPGPGIPETASVVAITVQELFPAPILRAVPSAEPQAGSPMTLSCQTKLPLQRSAARLLFSFYKDGRIVQSRGLSSEFQIPTASEDHSGSYWCEAATEDNQVWKQSPQLEIRVQGASSSAAPPTLNPAPQKSAAPGTAPEEAPGPLPPPPTPSSEDPGFSSPLGMPDPHLYHQMGLLLKHMQDVRVLLGHLLMELRELSGHRKPGTTKATAE

SEQ ID NO: 5245 - protein, 242 aa, Homo Sapiens
MLKKISVGVAGDLNTVTMKLGCVLMAWALYLSLGVLWVAQMLLAAGCHAELFPAPILRAVPSAEPQAGSPMTLSCQTKLPLQRSAARLLFSFYKDGRIVQSRGLSSEFQIPTASEDHSGSYWCEAATEDNQVWKQSPQLEIRVQGASSSAAPPTLNPAPQKSAAPGTAPEEAPGPLPPPPTPSSEDPGFSSPLGMPDPHLYHQMGLLLKHMQDVRVLLGHLLMELRELSGHRKPGTTKATAE

SEQ ID NO: 5246 - protein, 376 aa, Homo Sapiens
MLKKISVGVAGDLNTVTMKLGCVLMAWALYLSLGVLWVAQMLLAASFETLQCEGPVCTEESSCHTEDDLTDAREAGFQVKAYTFSEPFHLIVSYDWLILQGPAKPVFEGDLLVLRCQAWQDWPLTQVTFYRDGSALGPPGPNREFSITVVQKADSGHYHCSGIFQSPGPGIPETASVVAITVQELFPAPILRAVPSAEPQAGSPMTLSCQTKLPLQRSAARLLFSFYKDGRIVQSRGLSSEFQIPTASEDHSGSYWCEAATEDNQVWKQSPQLEIRVQGASSSAAPPTLNPAPQKSAAPGTAPEEAPGPLPPPPTPSSEDPGFSSPLGMPDPHLYHQMGLLLKHMQDVRVLLGHLLMELRELSGHRKPGTTKATAE

SEQ ID NO: 5247 - protein, 287 aa, Homo Sapiens
MLKKISVGVAGDLNTVTMKLGCVLMAWALYLSLGVLWVAQMLLAASFETLQCEGPVCTEESSCHTEDDLTDAREAGFQVKAYTFSEPFHLIVSYELFPAPILRAVPSAEPQAGSPMTLSCQTKLPLQRSAARLLFSFYKDGRIVQSRGLSSEFQIPTASEDHSGSYWCEAATEDNQVWKQSPQLEIRVQGASSSAAPPTLNPAPQKSAAPGTAPEEAPGPLPPPPTPSSEDPGFSSPLGMPDPHLYHQMGLLLKHMQDVRVLLGHLLMELRELSGHRKPGTTKATAE

SEQ ID NO: 5248 - protein, 192 aa, Homo Sapiens
MLKKISVGVAGDLNTVTMKLGCVLMAWALYLSLGVLWVAQMLLAASFETLQCEGPVCTEESSCHTEDDLTDAREAGFQVKAYTFSEPFHLIVSYGASSSAAPPTLNPAPQKSAAPGTAPEEAPGPLPPPPTPSSEDPGFSSPLGMPDPHLYHQMGLLLKHMQDVRVLLGHLLMELRELSGHRKPGTTKATAE

SEQ ID NO: 5249 - protein, 236 aa, Homo Sapiens
MLKKISVGVAGDLNTVTMKLGCVLMAWALYLSLGVLWVAQMLLELFPAPILRAVPSAEPQAGSPMTLSCQTKLPLQRSAARLLFSFYKDGRIVQSRGLSSEFQIPTASEDHSGSYWCEAATEDNQVWKQSPQLEIRVQGASSSAAPPTLNPAPQKSAAPGTAPEEAPGPLPPPPTPSSEDPGFSSPLGMPDPHLYHQMGLLLKHMQDVRVLLGHLLMELRELSGHRKPGTTKATAE

SEQ ID NO: 5250 - protein, 141 aa, Homo Sapiens
MLKKISVGVAGDLNTVTMKLGCVLMAWALYLSLGVLWVAQMLLGASSSAAPPTLNPAPQKSAAPGTAPEEAPGPLPPPPTPSSEDPGFSSPLGMPDPHLYHQMGLLLKHMQDVRVLLGHLLMELRELSGHRKPGTTKATAE

SEQ ID NO: 5251 - protein, 152 aa, Homo Sapiens
MLLAASFETLQCEGPVCTEESSCHTEDDLTDAREAGFQVKAYTFSEPFHLIVSYGASSSAAPPTLNPAPQKSAAPGTAPEEAPGPLPPPPTPSSEDPGFSSPLGMPDPHLYHQMGLLLKHMQDVRVLLGHLLMELRELSGHRKPGTTKATAE

SEQ ID NO: 5252 - protein, 311 aa, Homo Sapiens
MWPLTALLLLATLEKPILSLHPPWTTIFKGERVTLKCDGYHPLLLELQPISTLWYLGHLLLPSHKKSIEVQTPGVYRCQTRGAPVSDPIHLSVSNDWLILQVPYAPVFEGEPLVLRCRGWYDKVVYKLHYYHDGQAVRYFHSSANYTVLQARASDSGRYQCSGTMRIPVESAPMFSAKVAVTVQAARCAASTGAPSTQSRSPRSRSSNRTGARRLPPPAVSGNAVRGCSSRGRVLPWTRPPPPPQLHGPQPWLLVIGRFPSESPRCPDRSRWSPPSGTPPPPGCSSRRAAPRLRGHPPALRRRPWNNRLEP

SEQ ID NO: 5253 - protein, 268 aa, Homo Sapiens
MWPLTALLLLATLEKPILSLHPPWTTIFKGERVTLKCDGYHPLLLELQPISTLWYLGHLLLPSHKKSIEVQTPGVYRCQTRGAPVSDPIHLSVSNDWLILQVPYAPVFEGEPLVLRCRGWYDKVVYKLHYYHDGQAVRYFHSSANYTVLQARASDSGRYQCSGTMRIPVESAPMFSAKVAVTVQEARHAAAVRVLQVQPRGAPLRLGRRVHSPGARGRGARIVLVRGGYRHPQCPETQSVAAAPGAGFSPGPGLHHRPSSMGRSLGSW

SEQ ID NO: 5254 - protein, 318 aa, Homo Sapiens
MWPLTALLLLVPSSGQAATLEKPILSLHPPWTTIFKGERVTLKCDGYHPLLLELQPISTLWYLGHLLLPSHKKSIEVQTPGVYRCQTRGAPVSDPIHLSVSNDWLILQVPYAPVFEGEPLVLRCRGWYDKVVYKLHYYHDGQAVRYFHSSANYTVLQARASDSGRYQCSGTMRIPVESAPMFSAKVAVTVQAARCAASTGAPSTQSRSPRSRSSNRTGARRLPPPAVSGNAVRGCSSRGRVLPWTRPPPPPQLHGPQPWLLVIGRFPSESPRCPDRSRWSPPSGTPPPPGCSSRRAAPRLRGHPPALRRRPWNNRLEP

SEQ ID NO: 5255 - protein, 275 aa, Homo Sapiens
MWPLTALLLLVPSSGQAATLEKPILSLHPPWTTIFKGERVTLKCDGYHPLLLELQPISTLWYLGHLLLPSHKKSIEVQTPGVYRCQTRGAPVSDPIHLSVSNDWLILQVPYAPVFEGEPLVLRCRGWYDKVVYKLHYYHDGQAVRYFHSSANYTVLQARASDSGRYQCSGTMRIPVESAPMFSAKVAVTVQEARHAAAVRVLQVQPRGAPLRLGRRVHSPGARGRGARIVLVRGGYRHPQCPETQSVAAAPGAGFSPGPGLHHRPSSMGRSLGSW

SEQ ID NO: 5256 - protein, 426 aa, Homo Sapiens
MWPLTALLLLVPSSGQAATLEKPILSLHPPWTTIFKGERVTLKCDGYHPLLLELQPISTLWYLGHLLLPSHKKSIEVQTPGVYRCQTRGAPVSDPIHLSVSNDWLILQVPYAPVFEGEPLVLRCRGWYDKVVYKLHYYHDGQAVRYFHSSANYTVLQARASDSGRYQCSGTMRIPVESAPMFSAKVAVTVQELFRAPVLRVMGPREARGAALGGVVLRCDTRLHPQKRDTPLQFAFYKYSRAVRRFDWGAEYTVPEPEVEELESYWCEAATATRSVRKRSPWLQLPGPGSPLDPASTTAPAPWAAALAPGNRPLSFRKPPVSRSVPLVTSVRNTTSTGLQFPASGAPTAGPPACAPPTPLEQSAGALKPDVDLLLREMQLLKGLLSRVVLELKEPQALRELRGTPETPTSHFAVSPGTPETTPVES

SEQ ID NO: 5257 - protein, 85 aa, Homo Sapiens
MKKVLLLITAILAVAVGFPVSQDQEREKRSISDSDELASGFFVFPYPYPFRPLPPIPFPRFPWFRRNFPIPIPESAPTTPLPSEK

SEQ ID NO: 5258 - protein, 317 aa, Homo Sapiens
MGLLLPLALCILVLCCGAMSPPQLALNPSALLSRGCNDSDVLAVAGFALRDINKDRKDGYVLRLNRVNDAQEYRRAISKKKIYMTCPDCPSSIPTDSSNHQVLEAATESLAKYNNENTSKQYSLFKVTRASSQWVVGPSYFVEYLIKESPCTKSQASSCSLQSSDSVPVGLCKGSLTRTHWEKFVSVTCDFFESQAPATGSENSAVNQKPTNLPKVEESQQKNTPPTDSPSKAGPRGSVQYLPDLDDKNSQEKGPQEAFPVHLDLTTNPQGETLDISFLFLEPMEEKLVVLPFPKEKARTAECPGPAQNASPLVLPP

SEQ ID NO: 5259 - protein, 92 aa, Homo Sapiens
MGLLLPLALCILVLCCGAMSPPQLALNPSALLSRGCNDSDVLAVAGFALRDINKDRKDGYVLRLNRVNDAQEYRRARWPGISVLSYTGCARD

SEQ ID NO: 5260 - protein, 119 aa, Homo Sapiens
MGLLLPLALCILVLCCGAMSPPQLALNPSALLSRGCNDSDVLAVAGFALRDINKDRKDGYVLRLNRVNDAQEYRRGGLGSLFYLTLDVLETDCHVLRKKAWQDCGMRIFFESFQKKRFT

SEQ ID NO: 5261 - protein, 382 aa, Homo Sapiens
MGLLLPLALCILVLCCGAMSPPQLALNPSALLSRGCNDSDVLAVAGFALRDINKDRKDGYVLRLNRVNDAQEYRRGGLGSLFYLTLDVLETDCHVLRKKAWQDCGMRIFFESVYGQCKAIFYMNNPSRVLYLAAYNCTLRPVSKKKIYMTCPDCPSSIPTDSSNHQVLEAATESLAKYNNENTSKQYSLFKVTRASSQWVVGPSYFVEYLIKESPCTKSQASSCSLQSSDSVPVGLCKGSLTRTHWEKFVSVTCDFFESQAPATGSENSAVNQKPTNLPKVEESQQKNTPPTDSPSKAGPRGSVQYLPDLDDKNSQEKGPQEAFPVHLDLTTNPQGETLDISFLFLEPMEEKLVVLPFPKEKARTAECPGPAQNASPLVLPP

SEQ ID NO: 5262 - protein, 382 aa, Homo Sapiens; identical to SEQ ID NO: 5261

SEQ ID NO: 5263 - protein, 345 aa, Homo Sapiens
MGLLLPLALCILVLCCGAMSPPQLALNPSALLSRGCNDSDVLAVAGFALRDINKDRKDGYVLRLNRVNDAQEYRRVYGQCKAIFYMNNPSRVLYLAAYNCTLRPVSKKKIYMTCPDCPSSIPTDSSNHQVLEAATESLAKYNNENTSKQYSLFKVTRASSQWVVGPSYFVEYLIKESPCTKSQASSCSLQSSDSVPVGLCKGSLTRTHWEKFVSVTCDFFESQAPATGSENSAVNQKPTNLPKVEESQQKNTPPTDSPSKAGPRGSVQYLPDLDDKNSQEKGPQEAFPVHLDLTTNPQGETLDISFLFLEPMEEKLVVLPFPKEKARTAECPGPAQNASPLVLPP

SEQ ID NO: 5264 - protein, 104 aa, Homo Sapiens
MTCPDCPSSIPTDSSNHQVLEAATESLAKYNNENTSKQYSLFKVTRASSQWVVGPSYFVEYLIKESPCTKSQASSCSLQSSDSVPVGLCKGSLTRTHWEKFVSV

SEQ ID NO: 5265 - protein, 289 aa, Homo Sapiens [sequence omitted]

SEQ ID NO: 5266 - protein, 866 aa, Homo Sapiens
MFSMRIVCLVLSVVGTAWTADSGEGDFLAEGGGVRGPRVVERHQSACKDSDWPFCSDEDWNYKCPSGCRMKGLIDEVNQDFTNRINKLKNSLFEYQKNNKDSHSLTTNIMEILRGDFSSANNRDNTYNRVSEDLRSRIEVLKRKVIEKVQHIQLLQKNVRAQLVDMKRLEVDIDIKIRSCRGSCSRALAREVDLKDYEDQQKQLEQVIAKDLLPSRDRQHLPLIKMKPVPDLVPGNFKSQLQKVPPEWKALTDMPQMRMELERPGGNEITRGGSTSYGTGSETESPRNPSSAGSWNSGSSGPGSTGNRNPGSSGTGGTATWKPGSSGPGSTGSWNSGSSGTGSTGNQNPGSPRPGSTGTWNPGSSERGSAGHWTSESSVSGSTGQWHSESGSFRPDSPGSGNARPNNPDWGTFEEVSGNVSPGTRREYHTEKLVTSKGDKELRTGKEKVTSGSTTTTRRSCSKTVTKTVIGPDGHKEVTKEVVTSEDGSDCPEAMDLGTLSGIGTLDGFRHRHPDEAAFFDTASTGKTFPGFFSPMLGEFVSETESRGSESGIFTNTKESSSHHPGIAEFPSRGKSSSYSKQFTSSTSYNRGDSTFESKSYKMADEAGSEADHEGTHSTKRGHAKSRPVRDCDDVLQTHPSGTQSGIFNIKLPGSSKIFSVYCDQETSLGGWLLIQQRMDGSLNFNRTWQDYKRGFGSLNDEGEGEFWLGNDYLHLLTQRGSVLRVELEDWAGNEAYAEYHFRVGSEAEGYALQVSSYEGTAGDALIEGSVEEGAEYTSHNNMQFSTFDRDADQWEENCAEVYGGGWWYNNCQAANLNGIYYPGGSYDPRNNSPYEIENGVVWVSFRGADYSLRAVRMKIRPLVTQ

SEQ ID NO: 5267 - protein, 644 aa, Homo Sapiens
MFSMRIVCLVLSVVGTAWTADSGEGDFLAEGGGVRGPRVVERHQSACKDSDWPFCSDEDWNYKCPSGCRMKGLIDEVNQDFTNRINKLKNSLFEYQKNNKDSHSLTTNIMEILRGDFSSANNRDNTYNRVSEDLRSRIEVLKRKVIEKVQHIQLLQKNVRAQLVDMKRLEVDIDIKIRSCRGSCSRALAREVDLKDYEDQQKQLEQVIAKDLLPSRDRQHLPLIKMKPVPDLVPGNFKSQLQKVPPEWKALTDMPQMRMELERPGGNEITRGGSTSYGTGSETESPRNPSSAGSWNSGSSGPGSTGNRNPGSSGTGGTATWKPGSSGPGSTGSWNSGSSGTGSTGNQNPGSPRPGSTGTWNPGSSERGSAGHWTSESSVSGSTGQWHSESGSFRPDSPGSGNARPNNPDWGTFEEVSGNVSPGTRREYHTEKLVTSKGDKELRTGKEKVTSGSTTTTRRSCSKTVTKTVIGPDGHKEVTKEVVTSEDGSDCPEAMDLGTLSGIGTLDGFRHRHPDEAAFFDTASTGKTFPGFFSPMLGEFVSETESRGSESGIFTNTKESSSHHPGIAEFPSRGKSSSYSKQFTSSTSYNRGDSTFESKSYKMADEAGSEADHEGTHSTKRGHAKSRPVRGIHTSPLGKPSLSP

SEQ ID NO: 5268 - protein, 272 aa, Homo Sapiens
MEYCRTPCTVSCNIPVVSGKECEEIIRKGGETSEMYLIQPDSSVKPYRVYCDMNTENGGWTVIQNRQDGSVDFGRKWDPYKQGFGNVATNTDGKNYCGLPGEYWLGNDKISQLTRMGPTELLIEMEDWKGDKVKAHYGGFTVQNEANKYQISVNKYRGTAGNALMDGASQLMGENRTMTIHNGMFFSTYDRDNDGWLTSDPRKQCSKEDGGGWWYNRCHAANPNGRYYWGGQYTWDMAKHGTDDGVVWMNWKGSWYSMRKMSMKIRPFFPQQ

SEQ ID NO: 5269 - protein, 491 aa, Homo Sapiens
MKRMVSWSFHKLKTMKHLLLLLLCVFLVKSQGVNDNEEGFFSARGHRPLDKKREEAPSLRPAPPPISGGGYRARPAKAAATQKKVERKAPDAGGCLHADPDLGVLCPTGCQLQEALLQQERPIRNSVDELNNNVEAVSQTSSSSFQYMYLLKDLWQKRQKQVKDNENVVNEYSSELEKHQLYIDETVNSNIPTNLRVLRSILENLRSKIQKLESDVSAQMEYCRTPCTVSCNIPVVSGKECEEIIRKGGETSEMYLIQPDSSVKPYRVYCDMNTENGGWTVIQNRQDGSVDFGRKWDPYKQGFGNVATNTDGKNYCGLPGEYWLGNDKISQLTRMGPTELLIEMEDWKGDKVKAHYGGFTVQNEANKYQISVNKYRGTAGNALMDGASQLMGENRTMTIHNGMFFSTYDRDNDGWLTSDPRKQCSKEDGGGWWYNRCHAANPNGRYYWGGQYTWDMAKHGTDDGVVWMNWKGSWYSMRKMSMKIRPFFPQQ

SEQ ID NO: 5270 - protein, 45 aa, Homo Sapiens
MKRMVSWSFHKLKTMKHLLLLLLCVFLVKSQGVNDNEEMRKLGHR

SEQ ID NO: 5271 - protein, 66 aa, Homo Sapiens
MWKWILTHCASAFPHLPGCCCCCFLLLFLVSSVPVTCQALGQDMVSPEATNSSSSSFSSPSSAGRH

SEQ ID NO: 5272 - protein, 208 aa, Homo Sapiens
MWKWILTHCASAFPHLPGCCCCCFLLLFLVSSVPVTCQALGQDMVSPEATNSSSSSFSSPSSAGRHVRSYNHLQGDVRWRKLFSFTKYFLKIEKNGKVSGTKKENCPYSILEITSVEIGVVAVKAINSNYYLAMNKKGKLYGSKEFNNDCKLKERIEENGYNTYASFNWQHNGRQMYVALNGKGAPRRGQKTRRKNTSAHFLPMVVHS

SEQ ID NO: 5273 - protein, 216 aa, Homo Sapiens
MGAARLLPNLTLCLQLLILCCQTQGENHPSPNFNQYVRDQGAMTDQLSRRQIREYQLYSRTSGKHVQVTGRRISATAEDGNKFAKLIVETDTFGSRVRIKGAESEKYICMNKRGKLIGKPSGKSKDCVFTEIVLENNYTAFQNARHEGWFMAFTRQGRPRQASRSRQNQREAHFIKRLYQGQLPFPNHAEKQKQFEFVGSAPTRRTKRTRRPQPLT

SEQ ID NO: 5274 - protein, 205 aa, Homo Sapiens
MGAARLLPNLTLCLQLLILCCQTQYVRDQGAMTDQLSRRQIREYQLYSRTSGKHVQVTGRRISATAEDGNKFAKLIVETDTFGSRVRIKGAESEKYICMNKRGKLIGKPSGKSKDCVFTEIVLENNYTAFQNARHEGWFMAFTRQGRPRQASRSRQNQREAHFIKRLYQGQLPFPNHAEKQKQFEFVGSAPTRRTKRTRRPQPLT

SEQ ID NO: 5275 - protein, 207 aa, Homo Sapiens
MYSAPSACTCLCLHFLLLCFQVQVLVAEENVDFRIHVENQTRARDDVSRKQLRLYQLYSRTSGKHIQVLGRRISARGEDGDKYAQLLVETDTFGSQVRIKGKETEFYLCMNRKGKLVGKPDGTSKECVFIEKVLENNYTALMSAKYSGWYVGFTKKGRPRKGPKTRENQQDVHFMKRYPKGQPELQKPFKYTTVTKRSRRIRPTHPA

SEQ ID NO: 5276 - protein, 216 aa, Homo Sapiens
MRSGCVVVHVWILAGLWLAVAGRPLAFSDAGPHVHYGWGDPIRLRHLYTSGPHGLSSCFLRIRADGVVDCARGQSAHSLLEIKAVALRTVAIKGVHSVRYLCMGADGKMQGLLQYSEEDCAFEEEIRPDGYNVYRSEKHRLPVSLSSAKQRQLYKNRGFLPLSHFLPMLPMVPEEPEDLRGHLESDMFSSPLETDSMDPFGLVTGLEAVRSPSFEK

SEQ ID NO: 5277 - protein, 209 aa, Homo Sapiens
MDSDETGFEHSGLWVSVLAGLLLGACQAHPIPDSSPLLQFGGQVRQRYLYTDDAQQTEAHLEIREDGTVGGAADQSPESLLQLKALKPGVIQILGVKTSRFLCQRPDGALYGSLHFDPEACSFRELLLEDGYNVYQSEAHGLPLHLPGNKSPHRDPAPRGPARFLPLPGLPPALPEPPGILAPQPPDVGSSDPLSMVGPSQGRSPSYAS

SEQ ID NO: 5278 - protein, 209 aa, Homo Sapiens; identical to SEQ ID NO: 5277

SEQ ID NO: 5279 - protein, 170 aa, Homo Sapiens
MRRRLWLGLAWLLLARAPDAAGTPSASRGPRSYPHLEGDVRWRRLFSSTHFFLRVDPGGRVQGTRWRHGQDSILEIRSVHVGVVVIKAVSSGFYVAMNRRGRLYGSRLYTVDCRFRERIEENGHNTYASQRWRRRGQPMFLALDRRGGPRPGGRTRRYHLSAHFLPVLVS

SEQ ID NO: 5280 - protein, 165 aa, Homo Sapiens
MRRRLWLGLAWLLLARAPDAAGTPSASRGPRSYPHLEGDVRWRRLFSSTHFFLRVDPGGRVQGTRWRHGQDSILEIRSVHVGVVVIKAVSSGFYVAMNRRGRLYGSVPGAHRRERPQHLRLTALAPPRPAHVPGAGQEGGAPARRPDAAVPPVRPLPARPGLLRP

SEQ ID NO: 5281 - protein, 251 aa, Homo Sapiens
MLGARLRLWVCALCSVCSMSVLRAYPNASPLLGSSWGGLIHLYTATARNSYHLQIHKNGHVDGAPHQTIYSALMIRSEDAGFVVITGVMSRRYLCMDFRGNIFGSHYFDPENCRFQHQTLENGYDVYHSPQYHFLVSLGRAKRAFLPGMNPPPYSQFLSRRNEIPLIHFNTPIPRRHTRSAEDDSERDPLNVLKPRARMTPAPASCSQELPSAEDNSPMASDPLGVVRGGRVNTHAGGTGPEGCRPFAKFI

SEQ ID NO: 5282 - protein, 239 aa, Homo Sapiens
MGLIWLLLLSLLEPGWPAAGPGARLRRDAGGRGGVYEHLGGAPRRRKLYCATKYHLQLHPSGRVNGSLENSAYSILEITAVEVGIVAIRGLFSGRYLAMNKRGRLYASEHYSAECEFVERIHELGYNTYASRLYRTVSSTPGARRQPSAERLWYVSVNGKGRPRRGFKTRRTQKSSLFLPRVLDHRDHEMVRQLQSGLPRPPGKGVQPRRRRQKQSPDNLEPSHVQASRLGSQLEASAH

SEQ ID NO: 5283 - protein, 206 aa, Homo Sapiens
MSGPGTAAVALLPAVLLALLAPWAGRGGAAAPTAPNGTLEAELERRWESLVALSLARLPVAAQPKEAAVQSGAGDYLLGIKRLRRLYCNVGIGFHLQALPDGRIGGAHADTRDSLLELSPVERGVVSIFGVASRFFVAMSSKGKLYGSPFFTDECTFKEILLPNNYNAYESYKYPGMFIALSKNGKTKKGNRVSPTMKVTHFLPRL

SEQ ID NO: 5284 - protein, 123 aa, Homo Sapiens
MSLSFLLLLFFSHLILSAWAHGEKRLAPKGQPGPAATDRNPRGSSSRQSSSSAMSSSSASSSPAASLGSQGSGLEQSSFQWSPSGRRTGSLYCRVGIGFHLQIYPDGKVNGSHEANMLSQVHR

SEQ ID NO: 5285 - protein, 268 aa, Homo Sapiens
MSLSFLLLLFFSHLILSAWAHGEKRLAPKGQPGPAATDRNPRGSSSRQSSSSAMSSSSASSSPAASLGSQGSGLEQSSFQWSPSGRRTGSLYCRVGIGFHLQIYPDGKVNGSHEANMLSVLEIFAVSQGIVGIRGVFSNKFLAMSKKGKLHASAKFTDDCKFRERFQENSYNTYASAIHRTEKTGREWYVALNKRGKAKRGCSPRVKPQHISTHFLPRFKQSEQPELSFTVTVPEKKKPPSPIKPKIPLSAPRKNTNSVKYRLKFRFG

SEQ ID NO: 5286 - protein, 119 aa, Homo Sapiens
NPRGSSSRQSSSSAMSSSSASSSPAASLGSQGSGLEQSSFQWSPSGRRTGSLYCRVGIGFHLQIYPDGKVNGSHEANMLSVLEIFAVSQGIVGIRGVFSNKFLAMSKKGKLHASNTLET

SEQ ID NO: 5287 - protein, 122 aa, Homo Sapiens
MEGGDIRVRRLFCRTQWYLRIDKRGKVKGTQEMKNNYNIMEIRTVAVGIVAIKGVESEFYLAMNKEGKLYAKKECNEDCNFKELILENHYNTYASAKWTHNGGEMFVALNQKGIPVRGKKTK

SEQ ID NO: 5288 - protein, 194 aa, Homo Sapiens
MHKWILTWILPTLLYRSCFHIICLVGTISLACNDMTPEQMATNVNCSSPERHTRSYDYMEGGDIRVRRLFCRTQWYLRIDKRGKVKGTQEMKNNYNIMEIRTVAVGIVAIKGVESEFYLAMNKEGKLYAKKECNEDCNFKELILENHYNTYASAKWTHNGGEMFVALNQKGIPVRGKKTKKEQKTAHFLPMAIT

SEQ ID NO: 5289 - protein, 194 aa, Homo Sapiens; identical to SEQ ID NO: 5288

SEQ ID NO: 5290 - protein, 194 aa, Homo Sapiens; identical to SEQ ID NO: 5288

SEQ ID NO: 5291 - protein, 97 aa, Homo Sapiens
MHKWILTWILPTLLYRSCFHIICLVGTISLACNDMTPEQMATNVNCSSPERHTRSYDYMEGGDIRVRRLFCRTQWYLRIDKRGKVKGTQEMKNNYSK

SEQ ID NO: 5292 - protein, 140 aa, Homo Sapiens
MAEDGDPFAKLIVETDTFGSRVRVRGAETGLYICMNKKGKLIAKSNGKGKDCVFTEIVLENNYTALQNAKYEGWYMAFTRKGRPRKGSKTRQHQREVHFMKRLPRGHHTTEQSLRFEFLNYPPFTRSLRGSQRTWAPEPR

SEQ ID NO: 5293 - protein, 233 aa, Homo Sapiens
MGSPRSALSCLLLHLLVLCLQAQEGPGRGPALGRELASLFRAGREPQGVSQQHVREQSLVTDQLSRRLIRTYQLYSRTSGKHVQVLANKRINAMAEDGDPFAKLIVETDTFGSRVRVRGAETGLYICMNKKGKLIAKSNGKGKDCVFTEIVLENNYTALQNAKYEGWYMAFTRKGRPRKGSKTRQHQREVHFMKRLPRGHHTTEQSLRFEFLNYPPFTRSLRGSQRTWAPEPR

SEQ ID NO: 5294 - protein, 244 aa, Homo Sapiens
MGSPRSALSCLLLHLLVLCLQAQEGPGRGPALGRELASLFRAGREPQGVSQQVTVQSSPNFTQHVREQSLVTDQLSRRLIRTYQLYSRTSGKHVQVLANKRINAMAEDGDPFAKLIVETDTFGSRVRVRGAETGLYICMNKKGKLIAKSNGKGKDCVFTEIVLENNYTALQNAKYEGWYMAFTRKGRPRKGSKTRQHQREVHFMKRLPRGHHTTEQSLRFEFLNYPPFTRSLRGSQRTWAPEPR

SEQ ID NO: 5295 - protein, 204 aa, Homo Sapiens
MGSPRSALSCLLLHLLVLCLQAQHVREQSLVTDQLSRRLIRTYQLYSRTSGKHVQVLANKRINAMAEDGDPFAKLIVETDTFGSRVRVRGAETGLYICMNKKGKLIAKSNGKGKDCVFTEIVLENNYTALQNAKYEGWYMAFTRKGRPRKGSKTRQHQREVHFMKRLPRGHHTTEQSLRFEFLNYPPFTRSLRGSQRTWAPEPR

SEQ ID NO: 5296 - protein, 37 aa, Homo Sapiens
MGSPRSALSCLLLHLLVLCLQAQVRRGARRRGPGAPV

SEQ ID NO: 5297 - protein, 215 aa, Homo Sapiens
MGSPRSALSCLLLHLLVLCLQAQVTVQSSPNFTQHVREQSLVTDQLSRRLIRTYQLYSRTSGKHVQVLANKRINAMAEDGDPFAKLIVETDTFGSRVRVRGAETGLYICMNKKGKLIAKSNGKGKDCVFTEIVLENNYTALQNAKYEGWYMAFTRKGRPRKGSKTRQHQREVHFMKRLPRGHHTTEQSLRFEFLNYPPFTRSLRGSQRTWAPEPR

SEQ ID NO: 5298 - protein, 234 aa, Homo Sapiens [sequence omitted]

SEQ ID NO: 5299 - protein, 223 aa, Homo Sapiens
MKFVPCLLLVTLSCLGTLGQAPRQKQGSTGEEFHFQTGGRDSCTMRPSSLGQGAGEVWLRVDCRNTDQTYWCEYRGQPSMCQAFAADPKPYWNQALQELRRLHHACQGAPVLRPSVCREAGPQAHMQQVTSSLKGSPEPNQQPEAGTPSLRPKATVKLTEATQLGKDSMEELGKAKPTTRPTAKPTQPGPRPGGNEEAKKKAWEHCWKPFQALCAFLISFFRG

SEQ ID NO: 5300 - protein, 258 aa, Homo Sapiens
MTPPKLRASLSPSLLLLLSGCLLAAARREKGAASNVAEPVPGPTGGSSGRFLSPEQHACSWQLLLPAPEAAAGSELALRCQSPDGARHQCAYRGHPERCAAYAARRAHFWKQVLGGLRKKRRPCHDPAPLQARLCAGKKGHGAELRLVPRASPPARPTVAGFAGESKPRARNRGRTRERASGPAAGTPPPQSAPPKENPSERKTNEGKRKAALVPNEERPMGTGPDPDGLDGNAELTETYCAEKWHSLCNFFVNFWNG

SEQ ID NO: 5301 - protein, 812 aa, Homo Sapiens
MAAVTRDFGEMLLHSGRVLPAEAQPWGAPVEVESFLVHPGDLLQLRCRLRDDVQSINWLRDGVQLAESNRTRITGEEVEVQDSVPADSGLYACVTSSPSGSDTTYFSVNVSDALPSSEDDDDDDDSSSEEKETDNTKPNRMPVAPYWTSPEKMEKKLHAVPAAKTVKFKCPSSGTPNPTLRWLKNGKEFKPDHRIGGYKVRYATWSIIMDSVVPSDKGNYTCIVENEYGSINHTYQLDVVERSPHRPILQAGLPANKTVALGSNVEFMCKVYSDPQPHIQWLKHIEVNGSKIGPDNLPYVQILKTAGVNTTDKEMEVLHLRNVSFEDAGEYTCLAGNSIGLSHHSAWLTVLEALEERPAVMTSPLYLEIIIYCTGAFLISCMVGSVIVYKMKSGTKKSDFHSQMAVHKLAKSIPLRRQVSADSSASMNSGVLLVRPSRLSSSGTPMLAGVSEYELPEDPRWELPRDRLVLGKPLGEGCFGQVVLAEAIGLDKDKPNRVTKVAVKMLKSDATEKDLSDLISEMEMMKMIGKHKNIINLLGACTQDGPLYVIVEYASKGNLREYLQARRPPGLEYCYNPSHNPEEQLSSKDLVSCAYQVARGMEYLASKKCIHRDLAARNVLVTEDNVMKIADFGLARDIHHIDYYKKTTNGRLPVKWMAPEALFDRIYTHQSDVWSFGVLLWEIFTLGGSPYPGVPVEELFKLLKEGHRMDKPSNCTNELYMMMRDCWHAVPSQRPTFKQLVEDLDRIVALTSNQEYLDLSMPLDQYSPSFPDTRSSTCSSGEDSVFSHEPLPEEPCLPRHPAQLANGGLKRR

SEQ ID NO: 5302 - protein, 853 aa, Homo Sapiens
MEARVSLKRRIELTVEYPWRCGALSPTSNCRTGMWSWKCLLFWAVLVTATLCTARPSPTLPEQAQPWGAPVEVESFLVHPGDLLQLRCRLRDDVQSINWLRDGVQLAESNRTRITGEEVEVQDSVPADSGLYACVTSSPSGSDTTYFSVNVSDALPSSEDDDDDDDSSSEEKETDNTKPNPVAPYWTSPEKMEKKLHAVPAAKTVKFKCPSSGTPNPTLRWLKNGKEFKPDHRIGGYKVRYATWSIIMDSVVPSDKGNYTCIVENEYGSINHTYQLDVVERSPHRPILQAGLPANKTVALGSNVEFMCKVYSDPQPHIQWLKHIEVNGSKIGPDNLPYVQILKTAGVNTTDKEMEVLHLRNVSFEDAGEYTCLAGNSIGLSHHSAWLTVLEALEERPAVMTSPLYLEIIIYCTGAFLISCMVGSVIVYKMKSGTKKSDFHSQMAVHKLAKSIPLRRQVTVSADSSASMNSGVLLVRPSRLSSSGTPMLAGVSEYELPEDPRWELPRDRLVLGKPLGEGCFGQVVLAEAIGLDKDKPNRVTKVAVKMLKSDATEKDLSDLISEMEMMKMIGKHKNIINLLGACTQDGPLYVIVEYASKGNLREYLQARRPPGLEYCYNPSHNPEEQLSSKDLVSCAYQVARGMEYLASKKCIHRDLAARNVLVTEDNVMKIADFGLARDIHHIDYYKKTTNGRLPVKWMAPEALFDRIYTHQSDVWSFGVLLWEIFTLGGSPYPGVPVEELFKLLKEGHRMDKPSNCTNELYMMMRDCWHAVPSQRPTFKQLVEDLDRIVALTSNQEYLDLSMPLDQYSPSFPDTRSSTCSSGEDSVFSHEPLPEEPCLPRHPAQLANGGLKRR

SEQ ID NO: 5303 - protein, 139 aa, Homo Sapiens
MEKKLHAVPAAKTVKFKCPSSGTPNPTLRWLKNGKEFKPDHRIGGYKVRYATWSIIMDSVVPSDKGNYTCIVENEYGSINHTYQLDVVERSPHRPILQAGLPANKTVALGSNVEFMCKVYSDPQPHIQWLKHIEVNGSK

SEQ ID NO: 5304 - protein, 61 aa, Homo Sapiens
MWSWKCLLFWAVLVTATLCTARPSPTLPEQACPDLQEAKWCSASFHSITPLPFGLGTRLSD

SEQ ID NO: 5305 - protein, 107 aa, Homo Sapiens
MWSWKCLLFWAVLVTATLCTARPSPTLPEQAQPWGAPVEVESFLVHPGDLLQLRCRLRDDVQSINWLRDGVQLAESNRTRITGEEVEVQDSVPADSGLYACVTSSPS

SEQ ID NO: 5306 - protein, 150 aa, Homo Sapiens
MWSWKCLLFWAVLVTATLCTARPSPTLPEQAQPWGAPVEVESFLVHPGDLLQLRCRLRDDVQSINWLRDGVQLAESNRTRITGEEVEVQDSVPADSGLYACVTSSPSGSDTTYFSVNVSACPDLQEAKWCSASFHSITPLPFGLGTRLSD

SEQ ID NO: 5307 - protein, 820 aa, Homo Sapiens
MWSWKCLLFWAVLVTATLCTARPSPTLPEQAQPWGAPVEVESFLVHPGDLLQLRCRLRDDVQSINWLRDGVQLAESNRTRITGEEVEVQDSVPADSGLYACVTSSPSGSDTTYFSVNVSDALPSSEDDDDDDDSSSEEKETDNTKPNPVAPYWTSPEKMEKKLHAVPAAKTVKFKCPSSGTPNPTLRWLKNGKEFKPDHRIGGYKVRYATWSIIMDSVVPSDKGNYTCIVENEYGSINHTYQLDVVERSPHRPILQAGLPANKTVALGSNVEFMCKVYSDPQPHIQWLKHIEVNGSKIGPDNLPYVQILKTAGVNTTDKEMEVLHLRNVSFEDAGEYTCLAGNSIGLSHHSAWLTVLEALEERPAVMTSPLYLEIIIYCTGAFLISCMVGSVIVYKMKSGTKKSDFHSQMAVHKLAKSIPLRRQVTVSADSSASMNSGVLLVRPSRLSSSGTPMLAGVSEYELPEDPRWELPRDRLVLGKPLGEGCFGQVVLAEAIGLDKDKPNRVTKVAVKMLKSDATEKDLSDLISEMEMMKMIGKHKNIINLLGACTQDGPLYVIVEYASKGNLREYLQARRPPGLEYCYNPSHNPEEQLSSKDLVSCAYQVARGMEYLASKKCIHRDLAARNVLVTEDNVMKIADFGLARDIHHIDYYKKTTNGRLPVKWMAPEALFDRIYTHQSDVWSFGVLLWEIFTLGGSPYPGVPVEELFKLLKEGHRMDKPSNCTNELYMMMRDCWHAVPSQRPTFKQLVEDLDRIVALTSNQEYLDLSMPLDQYSPSFPDTRSSTCSSGEDSVFSHEPLPEEPCLPRHPAQLANGGLKRR

SEQ ID NO: 5308 - protein, 820 aa, Homo Sapiens; identical to SEQ ID NO: 5307

SEQ ID NO: 5309 - protein, 820 aa, Homo Sapiens; identical to SEQ ID NO: 5307

SEQ ID NO: 5310 - protein, 822 aa, Homo Sapiens [sequence omitted]

SEQ ID NO: 5311 - protein, 298 aa, Homo Sapiens
MWSWKCLLFWAVLVTATLCTARPSPTLPEQAQPWGAPVEVESFLVHPGDLLQLRCRLRDDVQSINWLRDGVQLAESNRTRITGEEVEVQDSVPADSGLYACVTSSPSGSDTTYFSVNVSDALPSSEDDDDDDDSSSEEKETDNTKPNRMPVAPYWTSPEKMEKKLHAVPAAKTVKFKCPSSGTPNPTLRWLKNGKEFKPDHRIGGYKVRYATWSIIMDSVVPSDKGNYTCIVENEYGSINHTYQLDVVERSPHRPILQAGLPANKTVALGSNVEFMCKVYSDPQPHIQWLKHIEVNGS

SEQ ID NO: 5312 - protein, 820 aa, Homo Sapiens
MWSWKCLLFWAVLVTATLCTARPSPTLPEQAQPWGAPVEVESFLVHPGDLLQLRCRLRDDVQSINWLRDGVQLAESNRTRITGEEVEVQDSVPADSGLYACVTSSPSGSDTTYFSVNVSDALPSSEDDDDDDDSSSEEKETDNTKPNRMPVAPYWTSPEKMEKKLHAVPAAKTVKFKCPSSGTPNPTLRWLKNGKEFKPDHRIGGYKVRYATWSIIMDSVVPSDKGNYTCIVENEYGSINHTYQLDVVERSPHRPILQAGLPANKTVALGSNVEFMCKVYSDPQPHIQWLKHIEVNGSKIGPDNLPYVQILKTAGVNTTDKEMEVLHLRNVSFEDAGEYTCLAGNSIGLSHHSAWLTVLEALEERPAVMTSPLYLEIIIYCTGAFLISCMVGSVIVYKMKSGTKKSDFHSQMAVHKLAKSIPLRRQVSADSSASMNSGVLLVRPSRLSSSGTPMLAGVSEYELPEDPRWELPRDRLVLGKPLGEGCFGQVVLAEAIGLDKDKPNRVTKVAVKMLKSDATEKDLSDLISEMEMMKMIGKHKNIINLLGACTQDGPLYVIVEYASKGNLREYLQARRPPGLEYCYNPSHNPEEQLSSKDLVSCAYQVARGMEYLASKKCIHRDLAARNVLVTEDNVMKIADFGLARDIHHIDYYKKTTNGRLPVKWMAPEALFDRIYTHQSDVWSFGVLLWEIFTLGGSPYPGVPVEELFKLLKEGHRMDKPSNCTNELYMMMRDCWHAVPSQRPTFKQLVEDLDRIVALTSNQEYLDLSMPLDQYSPSFPDTRSSTCSSGEDSVFSHEPLPEEPCLPRHPAQLANGGLKRR

SEQ ID NO: 5313 - protein, 367 aa, Homo Sapiens
MWSWKCLLFWAVLVTATLCTARPSPTLPEQAQPWGAPVEVESFLVHPGDLLQLRCRLRDDVQSINWLRDGVQLAESNRTRITGEEVEVQDSVPADSGLYACVTSSPSGSDTTYFSVNVSVPIDALPSSEDDDDDDDSSSEEKETDNTKPNPVAPYWTSPEKMEKKLHAVPAAKTVKFKCPSSGTPNPTLRWLKNGKEFKPDHRIGGYKVRYATWSIIMDSVVPSDKGNYTCIVENEYGSINHTYQLDVVERSPHRPILQAGLPANKTVALGSNVEFMCKVYSDPQPHIQWLKHIEVNGSKIGPDNLPYVQILKHSGINSSDAEVLTLFNVTEAQSGEYVCKVSNYIGEANQSAWLTVTRPVAKDCWS

SEQ ID NO: 5314 - protein, 55 aa, Homo Sapiens
MWSWKCLLFWAVLVTATLCTARPSPTLPEQDALPSSEDDDDDDDSSSEEKETDNT

SEQ ID NO: 5315 - protein, 85 aa, Homo Sapiens
MWSWKCLLFWAVLVTATLCTARPSPTLPEQDALPSSEDDDDDDDSSSEEKETDNTKPNPVAPYWTSPEKMEKKLHAVPAAKTVKF

SEQ ID NO: 5316 - protein, 145 aa, Homo Sapiens
MWSWKCLLFWAVLVTATLCTARPSPTLPEQDALPSSEDDDDDDDSSSEEKETDNTKPNPVAPYWTSPEKMEKKLHAVPAAKTVKFKCPSSGTPNPTLRWLKNGKEFKPDHRIGGYKVRYATWSIIMDSVVPSDKGNYTCIVENEY

SEQ ID NO: 5317 - protein, 733 aa, Homo Sapiens
MWSWKCLLFWAVLVTATLCTARPSPTLPEQDALPSSEDDDDDDDSSSEEKETDNTKPNPVAPYWTSPEKMEKKLHAVPAAKTVKFKCPSSGTPNPTLRWLKNGKEFKPDHRIGGYKVRYATWSIIMDSVVPSDKGNYTCIVENEYGSINHTYQLDVVERSPHRPILQAGLPANKTVALGSNVEFMCKVYSDPQPHIQWLKHIEVNGSKIGPDNLPYVQILKHSGINSSDAEVLTLFNVTEAQSGEYVCKVSNYIGEANQSAWLTVTRPVAKALEERPAVMTSPLYLEIIIYCTGAFLISCMVGSVIVYKMKSGTKKSDFHSQMAVHKLAKSIPLRRQVTVSADSSASMNSGVLLVRPSRLSSSGTPMLAGVSEYELPEDPRWELPRDRLVLGKPLGEGCFGQVVLAEAIGLDKDKPNRVTKVAVKMLKSDATEKDLSDLISEMEMMKMIGKHKNIINLLGACTQDGPLYVIVEYASKGNLREYLQARRPPGLEYCYNPSHNPEEQLSSKDLVSCAYQVARGMEYLASKKCIHRDLAARNVLVTEDNVMKIADFGLARDIHHIDYYKKTTNGRLPVKWMAPEALFDRIYTHQSDVWSFGVLLWEIFTLGGSPYPGVPVEELFKLLKEGHRMDKPSNCTNELYMMMRDCWHAVPSQRPTFKQLVEDLDRIVALTSNQEYLDLSMPLDQYSPSFPDTRSSTCSSGEDSVFSHEPLPEEPCLPRHPAQLANGGLKRR

SEQ ID NO: 5318 - protein, 228 aa, Homo Sapiens
MWSWKCLLFWAVLVTATLCTARPSPTLPEQDALPSSEDDDDDDDSSSEEKETDNTKPNPVAPYWTSPEKMEKKLHAVPAAKTVKFKCPSSGTPNPTLRWLKNGKEFKPDHRIGGYKVRYATWSIIMDSVVPSDKGNYTCIVENEYGSINHTYQLDVVERSPHRPILQAGLPANKTVALGSNVEFMCKVYSDPQPHIQWLKHIEVNGSKIGPDNLPYVQILKPWKRGRQ

SEQ ID NO: 5319 - protein, 731 aa, Homo Sapiens
MWSWKCLLFWAVLVTATLCTARPSPTLPEQDALPSSEDDDDDDDSSSEEKETDNTKPNPVAPYWTSPEKMEKKLHAVPAAKTVKFKCPSSGTPNPTLRWLKNGKEFKPDHRIGGYKVRYATWSIIMDSVVPSDKGNYTCIVENEYGSINHTYQLDVVERSPHRPILQAGLPANKTVALGSNVEFMCKVYSDPQPHIQWLKHIEVNGSKIGPDNLPYVQILKTAGVNTTDKEMEVLHLRNVSFEDAGEYTCLAGNSIGLSHHSAWLTVLEALEERPAVMTSPLYLEIIIYCTGAFLISCMVGSVIVYKMKSGTKKSDFHSQMAVHKLAKSIPLRRQVTVSADSSASMNSGVLLVRPSRLSSSGTPMLAGVSEYELPEDPRWELPRDRLVLGKPLGEGCFGQVVLAEAIGLDKDKPNRVTKVAVKMLKSDATEKDLSDLISEMEMMKMIGKHKNIINLLGACTQDGPLYVIVEYASKGNLREYLQARRPPGLEYCYNPSHNPEEQLSSKDLVSCAYQVARGMEYLASKKCIHRDLAARNVLVTEDNVMKIADFGLARDIHHIDYYKKTTNGRLPVKWMAPEALFDRIYTHQSDVWSFGVLLWEIFTLGGSPYPGVPVEELFKLLKEGHRMDKPSNCTNELYMMMRDCWHAVPSQRPTFKQLVEDLDRIVALTSNQEYLDLSMPLDQYSPSFPDTRSSTCSSGEDSVFSHEPLPEEPCLPRHPAQLANGGLKRR

SEQ ID NO: 5320 - protein, 142 aa, Homo Sapiens
MWSWKCLLFWAVLVTATLCTARPSPTLPEQDALPSSEDDDDDDDSSSEEKETDNTKPNRMPVAPYWTSPEKMEKKLHAVPAAKTVKFKCPSSGTPNPTLRWLKNGKEFKPDHRIGGYKVRYATWSIIMDSVVPSDKGNYTCI

SEQ ID NO: 5321 - protein, 733 aa, Homo Sapiens
MWSWKCLLFWAVLVTATLCTARPSPTLPEQDALPSSEDDDDDDDSSSEEKETDNTKPNRMPVAPYWTSPEKMEKKLHAVPAAKTVKFKCPSSGTPNPTLRWLKNGKEFKPDHRIGGYKVRYATWSIIMDSVVPSDKGNYTCIVENEYGSINHTYQLDVVERSPHRPILQAGLPANKTVALGSNVEFMCKVYSDPQPHIQWLKHIEVNGSKIGPDNLPYVQILKTAGVNTTDKEMEVLHLRNVSFEDAGEYTCLAGNSIGLSHHSAWLTVLEALEERPAVMTSPLYLEIIIYCTGAFLISCMVGSVIVYKMKSGTKKSDFHSQMAVHKLAKSIPLRRQVTVSADSSASMNSGVLLVRPSRLSSSGTPMLAGVSEYELPEDPRWELPRDRLVLGKPLGEGCFGQVVLAEAIGLDKDKPNRVTKVAVKMLKSDATEKDLSDLISEMEMMKMIGKHKNIINLLGACTQDGPLYVIVEYASKGNLREYLQARRPPGLEYCYNPSHNPEEQLSSKDLVSCAYQVARGMEYLASKKCIHRDLAARNVLVTEDNVMKIADFGLARDIHHIDYYKKTTNGRLPVKWMAPEALFDRIYTHQSDVWSFGVLLWEIFTLGGSPYPGVPVEELFKLLKEGHRMDKPSNCTNELYMMMRDCWHAVPSQRPTFKQLVEDLDRIVALTSNQEYLDLSMPLDQYSPSFPDTRSSTCSSGEDSVFSHEPLPEEPCLPRHPAQLANGGLKRR

SEQ ID NO: 5322 - protein, 134 aa, Homo Sapiens
VSCAYQVARGMEYLASKKCIHRDLAARNVLVTEDNVMKIADFGLARDIHHIDYYKKTTNGRLPVKWMAPEALFDRIYTHQSDVWSFGVLLWEIFTLGGSPYPGVPVEELFKLLKEGHRMDKPSNCTNELPAAGT

SEQ ID NO: 5323 - protein, 371 aa, Homo Sapiens
FSSQPAVHKLTKRIPLRRQVTVSAESSSSMNSNTPLVRITTRLSSTADTPMLAGVSEYELPEDPKWEFPRDKLTLGKPLGEGCFGQVVMAEAVGIDKDKPKEAVTVAVKMLKDDATEKDLSDLVSEMEMMKMIGKHKNIINLLGACTQDGPLYVIVEYASKGNLREYLRARRPPGMEYSYDINRVPEEQMTFKDLVSCTYQLARGMEYLASQKCIHRDLAARNVLVTENNVMKIADFGLARDINNIDYYKKTTNGRLPVKWMAPEALFDRVYTHQSDVWSFGVLMWEIFTLGGSPYPGIPVEELFKLLKEGHRMDKPANCTNELNTWTSANLSNSIHLVTLTQEVLVLQEMILFFLQTPCLTNHAFLSIHT

SEQ ID NO: 5324 - protein, 593 aa, Homo Sapiens
MCLNKTKQLFGVAKRLPFWRKERSPHRPILQAGLPANASTVVGGDVEFVCKVYSDAQPHIQWIKHVEKNGSKYGPDGLPYLKVLKAAGVNTTDKEIEVLYIRNVTFEDAGEYTCLAGNSIGISFHSAWLTVLPAPGREKEITASPDYLEIAIYCIGVFLIACMVVTVILCRMKNTTKKPDFSSQPAVHKLTKRIPLRRQVTVSAESSSSMNSNTPLVRITTRLSSTADTPMLAGVSEYELPEDPKWEFPRDKLTLGKPLGEGCFGQVVMAEAVGIDKDKPKEAVTVAVKMLKDDATEKDLSDLVSEMEMMKMIGKHKNIINLLGACTQDGPLYVIVEYASKGNLREYLRARRPPGMEYSYDINRVPEEQMTFKDLVSCTYQLARGMEYLASQKCIHRDLAARNVLVTENNVMKIADFGLARDINNIDYYKKTTNGRLPVKWMAPEALFDRVYTHQSDVWSFGVLMWEIFTLGGSPYPGIPVEELFKLLKEGHRMDKPANCTNELYMMMRDCWHAVPSQRPTFKQLVEDLDRILTLTTNEEYLDLSQPLEQYSPSYPDTRSSCSSGDDSVFSPDPMPYEPCLPQYPHINGSVKT

SEQ ID NO: 5325 - protein, 669 aa, Homo Sapiens
MVSWGRFICLVVVTMATLSLARPSFSLVEDTTLEPEDAISSGDDEDDTDGAEDFVSENSNNKRAPYWTNTEKMEKRLHAVPAANTVKFRCPAGGNPMPTMRWLKNGKEFKQEHRIGGYKVRNQHWSLIMESVVPSDKGNYTCVVENEYGSINHTYHLDVVERSPHRPILQAGLPANASTVVGGDVEFVCKVYSDAQPHIQWIKHVEKNGSKYGPDGLPYLKVLKAAGVNTTDKEIEVLYIRNVTFEDAGEYTCLAGNSIGISFHSAWLTVLPAPGREKEITASPDYLEIAIYCIGVFLIACMVVTVILCRMKNTTKKPDFSSQPAVHKLTKRIPLRRQVSAESSSSMNSNTPLVRITTRLSSTADTPMLAGVSEYELPEDPKWEFPRDKLTLGKPLGEGCFGQVVMAEAVGIDKDKPKEAVTVAVKMLKDDATEKDLSDLVSEMEMMKMIGKHKNIINLLGACTQDGPLYVIVEYASKGNLREYLRARRPPGMEYSYDINRVPEEQMTFKDLVSCTYQLARGMEYLASQKCIHRDLAARNVLVTENNVMKIADFGLARDINNIDYYKKTTNGRLPVKWMAPEALFDRVYTHQSDVWSFGVLMWEIFTLGGSPYPGIPVEELFKLLKEGHRMDKPANCTNELYMMMRDCWHAVPSQRPTFKQLVEDLDRI

SEQ ID NO: 5326 - protein, 707 aa, Homo Sapiens
MVSWGRFICLVVVTMATLSLARPSFSLVEDTTLEPEDAISSGDDEDDTDGAEDFVSENSNNKRAPYWTNTEKMEKRLHAVPAANTVKFRCPAGGNPMPTMRWLKNGKEFKQEHRIGGYKVRNQHWSLIMESVVPSDKGNYTCVVENEYGSINHTYHLDVVERSPHRPILQAGLPANASTVVGGDVEFVCKVYSDAQPHIQWIKHVEKNGSKYGPDGLPYLKVLKAAGVNTTDKEIEVLYIRNVTFEDAGEYTCLAGNSIGISFHSAWLTVLPAPGREKEITASPDYLEIAIYCIGVFLIACMVVTVILCRMKNTTKKPDFSSQPAVHKLTKRIPLRRQVTVSAESSSSMNSNTPLVRITTRLSSTADTPMLAGVSEYELPEDPKWEFPRDKLTLGKPLGEGCFGQVVMAEAVGIDKDKPKEAVTVAVKMLKDDATEKDLSDLVSEMEMMKMIGKHKNIINLLGACTQDGPLYVIVEYASKGNLREYLRARRPPGMEYSYDINRVPEEQMTFKDLVSCTYQLARGMEYLASQKCIHRDLAARNVLVTENNVMKIADFGLARDINNIDYYKKTTNGRLPVKWMAPEALFDRVYTHQSDVWSFGVLMWEIFTLGGSPYPGIPVEELFKLLKEGHRMDKPANCTNELYMMMRDCWHAVPSQRPTFKQLVEDLDRILTLTTNEEEKKVSGAVDCHKPPCNPSHLPCVLAVDQ

SEQ ID NO: 5327 - protein, 732 aa, Homo Sapiens
MVSWGRFICLVVVTMATLSLARPSFSLVEDTTLEPEDAISSGDDEDDTDGAEDFVSENSNNKRAPYWTNTEKMEKRLHAVPAANTVKFRCPAGGNPMPTMRWLKNGKEFKQEHRIGGYKVRNQHWSLIMESVVPSDKGNYTCVVENEYGSINHTYHLDVVERSPHRPILQAGLPANASTVVGGDVEFVCKVYSDAQPHIQWIKHVEKNGSKYGPDGLPYLKVLKAAGVNTTDKEIEVLYIRNVTFEDAGEYTCLAGNSIGISFHSAWLTVLPAPGREKEITASPDYLEIAIYCIGVFLIACMVVTVILCRMKNTTKKPDFSSQPAVHKLTKRIPLRRQVTVSAESSSSMNSNTPLVRITTRLSSTADTPMLAGVSEYELPEDPKWEFPRDKLTLGKPLGEGCFGQVVMAEAVGIDKDKPKEAVTVAVKMLKDDATEKDLSDLVSEMEMMKMIGKHKNIINLLGACTQDGPLYVIVEYASKGNLREYLRARRPPGMEYSYDINRVPEEQMTFKDLVSCTYQLARGMEYLASQKCIHRDLAARNVLVTENNVMKIADFGLARDINNIDYYKKTTNGRLPVKWMAPEALFDRVYTHQSDVWSFGVLMWEIFTLGGSPYPGIPVEELFKLLKEGHRMDKPANCTNELYMMMRDCWHAVPSQRPTFKQLVEDLDRILTLTTNEEYLDLSQPLEQYSPSYPDTRSSCSSGDDSVFSPDPMPYEPCLPQYPHINGSVKT

SEQ ID NO: 5328 - protein, 680 aa, Homo Sapiens
MVSWGRFICLVVVTMATLSLARPSFSLVEDTTLEPEDAISSGDDEDDTDGAEDFVSENSNNKRAPYWTNTEKMEKRLHAVPAANTVKFRCPAGGNPMPTMRWLKNGKEFKQEHRIGGYKVRNQHWSLIMESVVPSDKGNYTCVVENEYGSINHTYHLDVVERSPHRPILQAGLPANASTVVGGDVEFVCKVYSDAQPHIQWIKHVEKNGSKYGPDGLPYLKVLKHSGINSSNAEVLALFNVTEADAGEYICKVSNYIGQANQSAWLTVLPKQQAPGREKEITASPDYLEIAIYCIGVFLIACMVVTVILCRMKNTTKKPDFSSQPAVHKLTKRIPLRRQVTVSAESSSSMNSNTPLVRITTRLSSTADTPMLAGVSEYELPEDPKWEFPRDKLTLGKPLGEGCFGQVVMAEAVGIDKDKPKEAVTVAVKMLKDDATEKDLSDLVSEMEMMKMIGKHKNIINLLGACTQDGPLYVIVEYASKGNLREYLRARRPPGMEYSYDINRVPEEQMTFKDLVSCTYQLARGMEYLASQKCIHRDLAARNVLVTENNVMKIADFGLARDINNIDYYKKTTNGRLPVKWMAPEALFDRVYTHQSDVWSFGVLMWEIFTLGGSPYPGIPVEELFKLLKEGHRMDKPANCTNELYMMMRDCWHAVPSQRPTFKQLVEDLDRILTLTTNEI

SEQ ID NO: 5329 - protein, 64 aa, Homo Sapiens
MVSWGRFICLVVVTMATLSLARPSFSLVEDTTLEPEDAISSGDDEDDTDGAEDFVSENSNNKSK

SEQ ID NO: 5330 - protein, 144 aa, Homo Sapiens
MVSWGRFICLVVVTMATLSLARPSFSLVEDTTLEPEEPPTKYQISQPEVYVAAPGESLEMPSHPEMMRMTPMVRKILSVRTVTTRVSNCPAPMVPERGAWREVLPVTCLLVDSSAPCCVPRPLPFPAVSTFLTFKPENKPVLLH

SEQ ID NO: 5331 - protein, 709 aa, Homo Sapiens
MVSWGRFICLVVVTMATLSLARPSFSLVEDTTLEPEEPPTKYQISQPEVYVAAPGESLEVRCLLKDAAVISWTKDGVHLGPNNRTVLIGEYLQIKGATPRDSGLYACTASRTVDSETWYFMVNVTDAISSGDDEDDTDGAEDFVSENSNNKRAPYWTNTEKMEKRLHAVPAANTVKFRCPAGGNPMPTMRWLKNGKEFKQEHRIGGYKVRNQHWSLIMESVVPSDKGNYTCVVENEYGSINHTYHLDVVAPGREKEITASPDYLEIAIYCIGVFLIACMVVTVILCRMKNTTKKPDFSSQPAVHKLTKRIPLRRQVTVSAESSSSMNSNTPLVRITTRLSSTADTPMLAGVSEYELPEDPKWEFPRDKLTLGKPLGEGCFGQVVMAEAVGIDKDKPKEAVTVAVKMLKDDATEKDLSDLVSEMEMMKMIGKHKNIINLLGACTQDGPLYVIVEYASKGNLREYLRARRPPGMEYSYDINRVPEEQMTFKDLVSCTYQLARGMEYLASQKCIHRDLAARNVLVTENNVMKIADFGLARDINNIDYYKKTTNGRLPVKWMAPEALFDRVYTHQSDVWSFGVLMWEIFTLGGSPYPGIPVEELFKLLKEGHRMDKPANCTNELYMMMRDCWHAVPSQRPTFKQLVEDLDRILTLTTNEEYLDLSQPLEQYSPSYPDTRSSCSSGDDSVFSPDPMPYEPCLPQYPHINGSVKT

SEQ ID NO: 5332 - protein, 821 aa, Homo Sapiens
MVSWGRFICLVVVTMATLSLARPSFSLVEDTTLEPEEPPTKYQISQPEVYVAAPGESLEVRCLLKDAAVISWTKDGVHLGPNNRTVLIGEYLQIKGATPRDSGLYACTASRTVDSETWYFMVNVTDAISSGDDEDDTDGAEDFVSENSNNKRAPYWTNTEKMEKRLHAVPAANTVKFRCPAGGNPMPTMRWLKNGKEFKQEHRIGGYKVRNQHWSLIMESVVPSDKGNYTCVVENEYGSINHTYHLDVVERSPHRPILQAGLPANASTVVGGDVEFVCKVYSDAQPHIQWIKHVEKNGSKYGPDGLPYLKVLKAAGVNTTDKEIEVLYIRNVTFEDAGEYTCLAGNSIGISFHSAWLTVLPAPGREKEITASPDYLEIAIYCIGVFLIACMVVTVILCRMKNTTKKPDFSSQPAVHKLTKRIPLRRQVTVSAESSSSMNSNTPLVRITTRLSSTADTPMLAGVSEYELPEDPKWEFPRDKLTLGKPLGEGCFGQVVMAEAVGIDKDKPKEAVTVAVKMLKDDATEKDLSDLVSEMEMMKMIGKHKNIINLLGACTQDGPLYVIVEYASKGNLREYLRARRPPGMEYSYDINRVPEEQMTFKDLVSCTYQLARGMEYLASQKCIHRDLAARNVLVTENNVMKIADFGLARDINNIDYYKKTTNGRLPVKWMAPEALFDRVYTHQSDVWSFGVLMWEIFTLGGSPYPGIPVEELFKLLKEGHRMDKPANCTNELYMMMRDCWHAVPSQRPTFKQLVEDLDRILTLTTNEEYLDLSQPLEQYSPSYPDTRSSCSSGDDSVFSPDPMPYEPCLPQYPHINGSVKT

SEQ ID NO: 5333 - protein, 821 aa, Homo Sapiens
MVSWGRFICLVVVTMATLSLARPSFSLVEDTTLEPEEPPTKYQISQPEVYVAAPGESLEVRCLLKDAAVISWTKDGVHLGPNNRTVLIGEYLQIKGATPRDSGLYACTASRTVDSETWYFMVNVTDAISSGDDEDDTDGAEDFVSENSNNKRAPYWTNTEKMEKRLHAVPAANTVKFRCPAGGNPMPTMRWLKNGKEFKQEHRIGGYKVRNQHWSLIMESVVPSDKGNYTCVVENEYGSINHTYHLDVVERSPHRPILQAGLPANASTVVGGDVEFVCKVYSDAQPHIQWIKHVEKNGSKYGPDGLPYLKVLKVFAAGVNTTDKEIEVLYIRNVTFEDAGEYTCLAGNSIGISFHSAWLTVLPAPGREKEITASPDYLEIAIYCIGVFLIACMVVTVILCRMKNTTKKPDFSSQPAVHKLTKRIPLRRQVSAESSSSMNSNTPLVRITTRLSSTADTPMLAGVSEYELPEDPKWEFPRDKLTLGKPLGEGCFGQVVMAEAVGIDKDKPKEAVTVAVKMLKDDATEKDLSDLVSEMEMMKMIGKHKNIINLLGACTQDGPLYVIVEYASKGNLREYLRARRPPGMEYSYDINRVPEEQMTFKDLVSCTYQLARGMEYLASQKCIHRDLAARNVLVTENNVMKIADFGLARDINNIDYYKKTTNGRLPVKWMAPEALFDRVYTHQSDVWSFGVLMWEIFTLGGSPYPGIPVEELFKLLKEGHRMDKPANCTNELYMMMRDCWHAVPSQRPTFKQLVEDLDRILTLTTNEEYLDLSQPLEQYSPSYPDTRSSCSSGDDSVFSPDPMPYEPCLPQYPHINGSVKT

SEQ ID NO: 5334 - protein, 819 aa, Homo Sapiens
MVSWGRFICLVVVTMATLSLARPSFSLVEDTTLEPEEPPTKYQISQPEVYVAAPGESLEVRCLLKDAAVISWTKDGVHLGPNNRTVLIGEYLQIKGATPRDSGLYACTASRTVDSETWYFMVNVTDAISSGDDEDDTDGAEDFVSENSNNKRAPYWTNTEKMEKRLHAVPAANTVKFRCPAGGNPMPTMRWLKNGKEFKQEHRIGGYKVRNQHWSLIMESVVPSDKGNYTCVVENEYGSINHTYHLDVVERSPHRPILQAGLPANASTVVGGDVEFVCKVYSDAQPHIQWIKHVEKNGSKYGPDGLPYLKVLKAAGVNTTDKEIEVLYIRNVTFEDAGEYTCLAGNSIGISFHSAWLTVLPAPGREKEITASPDYLEIAIYCIGVFLIACMVVTVILCRMKNTTKKPDFSSQPAVHKLTKRIPLRRQVSAESSSSMNSNTPLVRITTRLSSTADTPMLAGVSEYELPEDPKWEFPRDKLTLGKPLGEGCFGQVVMAEAVGIDKDKPKEAVTVAVKMLKDDATEKDLSDLVSEMEMMKMIGKHKNIINLLGACTQDGPLYVIVEYASKGNLREYLRARRPPGMEYSYDINRVPEEQMTFKDLVSCTYQLARGMEYLASQKCIHRDLAARNVLVTENNVMKIADFGLARDINNIDYYKKTTNGRLPVKWMAPEALFDRVYTHQSDVWSFGVLMWEIFTLGGSPYPGIPVEELFKLLKEGHRMDKPANCTNELYMMMRDCWHAVPSQRPTFKQLVEDLDRILTLTTNEEYLDLSQPLEQYSPSYPDTRSSCSSGDDSVFSPDPMPYEPCLPQYPHINGSVKT

SEQ ID NO: 5335 - protein, 768 aa, Homo Sapiens
MVSWGRFICLVVVTMATLSLARPSFSLVEDTTLEPEEPPTKYQISQPEVYVAAPGESLEVRCLLKDAAVISWTKDGVHLGPNNRTVLIGEYLQIKGATPRDSGLYACTASRTVDSETWYFMVNVTDAISSGDDEDDTDGAEDFVSENSNNKRAPYWTNTEKMEKRLHAVPAANTVKFRCPAGGNPMPTMRWLKNGKEFKQEHRIGGYKVRNQHWSLIMESVVPSDKGNYTCVVENEYGSINHTYHLDVVERSPHRPILQAGLPANASTVVGGDVEFVCKVYSDAQPHIQWIKHVEKNGSKYGPDGLPYLKVLKHSGINSSNAEVLALFNVTEADAGEYICKVSNYIGQANQSAWLTVLPKQQAPGREKEITASPDYLEIAIYCIGVFLIACMVVTVILCRMKNTTKKPDFSSQPAVHKLTKRIPLRRQVTVSAESSSSMNSNTPLVRITTRLSSTADTPMLAGVSEYELPEDPKWEFPRDKLTLGKPLGEGCFGQVVMAEAVGIDKDKPKEAVTVAVKMLKDDATEKDLSDLVSEMEMMKMIGKHKNIINLLGACTQDGPLYVIVEYASKGNLREYLRARRPPGMEYSYDINRVPEEQMTFKDLVSCTYQLARGMEYLASQKCIHRDLAARNVLVTENNVMKIADFGLARDINNIDYYKKTTNGRLPVKWMAPEALFDRVYTHQSDVWSFGVLMWEIFTLGGSPYPGIPVEELFKLLKEGHRMDKPANCTNELYMMMRDCWHAVPSQRPTFKQLVEDLDRILTLTTNE

SEQ ID NO: 5336 - protein, 769 aa, Homo Sapiens
MVSWGRFICLVVVTMATLSLARPSFSLVEDTTLEPEEPPTKYQISQPEVYVAAPGESLEVRCLLKDAAVISWTKDGVHLGPNNRTVLIGEYLQIKGATPRDSGLYACTASRTVDSETWYFMVNVTDAISSGDDEDDTDGAEDFVSENSNNKRAPYWTNTEKMEKRLHAVPAANTVKFRCPAGGNPMPTMRWLKNGKEFKQEHRIGGYKVRNQHWSLIMESVVPSDKGNYTCVVENEYGSINHTYHLDVVERSPHRPILQAGLPANASTVVGGDVEFVCKVYSDAQPHIQWIKHVEKNGSKYGPDGLPYLKVLKHSGINSSNAEVLALFNVTEADAGEYICKVSNYIGQANQSAWLTVLPKQQAPGREKEITASPDYLEIAIYCIGVFLIACMVVTVILCRMKNTTKKPDFSSQPAVHKLTKRIPLRRQVTVSAESSSSMNSNTPLVRITTRLSSTADTPMLAGVSEYELPEDPKWEFPRDKLTLGKPLGEGCFGQVVMAEAVGIDKDKPKEAVTVAVKMLKDDATEKDLSDLVSEMEMMKMIGKHKNIINLLGACTQDGPLYVIVEYASKGNLREYLRARRPPGMEYSYDINRVPEEQMTFKDLVSCTYQLARGMEYLASQKCIHRDLAARNVLVTENNVMKIADFGLARDINNIDYYKKTTNGRLPVKWMAPEALFDRVYTHQSDVWSFGVLMWEIFTLGGSPYPGIPVEELFKLLKEGHRMDKPANCTNELYMMMRDCWHAVPSQRPTFKQLVEDLDRILTLTTNEI

SEQ ID NO: 5337 - protein, 705 aa, Homo Sapiens
MVSWGRFICLVVVTMATLSLARPSFSLVEDTTLEPEEPPTKYQISQPEVYVAAPGESLEVRCLLKDAAVISWTKDGVHLGPNNRTVLIGEYLQIKGATPRDSGLYACTASRTVDSETWYFMVNVTDAISSGDDEDDTDGAEDFVSENSNNKRAPYWTNTEKMEKRLHAVPAANTVKFRCPAGGNPMPTMRWLKNGKEFKQEHRIGGYKVRNQHWSLIMESVVPSDKGNYTCVVENEYGSINHTYHLDVVERSPHRPILQAGLPANASTVVGGDVEFVCKVYSDAQPHIQWIKHVEKNGSKYGPDGLPYLKVLKVSAESSSSMNSNTPLVRITTRLSSTADTPMLAGVSEYELPEDPKWEFPRDKLTLGKPLGEGCFGQVVMAEAVGIDKDKPKEAVTVAVKMLKDDATEKDLSDLVSEMEMMKMIGKHKNIINLLGACTQDGPLYVIVEYASKGNLREYLRARRPPGMEYSYDINRVPEEQMTFKDLVSCTYQLARGMEYLASQKCIHRDLAARNVLVTENNVMKIADFGLARDINNIDYYKKTTNGRLPVKWMAPEALFDRVYTHQSDVWSFGVLMWEIFTLGGSPYPGIPVEELFKLLKEGHRMDKPANCTNELYMMMRDCWHAVPSQRPTFKQLVEDLDRILTLTTNEEYLDLSQPLEQYSPSYPDTRSSCSSGDDSVFSPDPMPYEPCLPQYPHINGSVKT

SEQ ID NO: 5338 - protein, 822 aa, Homo Sapiens
MVSWGRFICLVVVTMATLSLARPSFSLVEDTTLEPEEPPTKYQISQPEVYVAAPGESLEVRCLLKDAAVISWTKDGVHLGPNNRTVLIGEYLQIKGATPRDSGLYACTASRTVDSETWYFMVNVTDAISSGDDEDDTDGAEDFVSENSNNKRAPYWTNTEKMEKRLHAVPAANTVKFRCPAGGNPMPTMRWLKNGKEFKQEHRIGGYKVRNQHWSLIMESVVPSDKGNYTCVVENEYGSINHTYHLDVVERSPHRPILQAGLPANASTVVGGDVEFVCKVYSDAQPHIQWIKHVEKNGSKYGPDGLPYLKVLKHSGINSSNAEVLALFNVTEADAGEYICKVSNYIGQANQSAWLTVLPKQQAPGREKEITASPDYLEIAIYCIGVFLIACMVVTVILCRMKNTTKKPDFSSQPAVHKLTKRIPLRRQVTVSAESSSSMNSNTPLVRITTRLSSTADTPMLAGVSEYELPEDPKWEFPRDKLTLGKPLGEGCFGQVVMAEAVGIDKDKPKEAVTVAVKMLKDDATEKDLSDLVSEMEMMKMIGKHKNIINLLGACTQDGPLYVIVEYASKGNLREYLRARRPPGMEYSYDINRVPEEQMTFKDLVSCTYQLARGMEYLASQKCIHRDLAARNVLVTENNVMKIADFGLARDINNIDYYKKTTNGRLPVKWMAPEALFDRVYTHQSDVWSFGVLMWEIFTLGGSPYPGIPVEELFKLLKEGHRMDKPANCTNELYMMMRDCWHAVPSQRPTFKQLVEDLDRILTLTTNEEYLDLSQPLEQYSPSYPDTRSSCSSGDDSVFSPDPMPYEPCLPQYPHINGSVKT

SEQ ID NO: 5339 - protein, 254 aa, Homo Sapiens
MVSWGRFICLVVVTMATLSLARPSFSLVEDTTLEPEEPPTKYQISQPEVYVAAPGESLEVRCLLKDAAVISWTKDGVHLGPNNRTVLIGEYLQIKGATPRDSGLYACTASRTVDSETWYFMVNVTDAISSGDDEDDTDGAEDFVSENSNNKRAPYWTNTEKMEKRLHAVPAANTVKFRCPAGGNPMPTMRWLKNGKEFKQEHRIGGYKVRNQHWSLIMESVVPSDKGNYTCVVENEYGSINHTYHLDVVGSQGL

SEQ ID NO: 5340 - protein, 704 aa, Homo Sapiens
MVSWGRFICLVVVTMATLSLARPSFSLVEDTTLEPEGAPYWTNTEKMEKRLHAVPAANTVKFRCPAGGNPMPTMRWLKNGKEFKQEHRIGGYKVRNQHWSLIMESVVPSDKGNYTCVVENEYGSINHTYHLDVVERSPHRPILQAGLPANASTVVGGDVEFVCKVYSDAQPHIQWIKHVEKNGSKYGPDGLPYLKVLKAAGVNTTDKEIEVLYIRNVTFEDAGEYTCLAGNSIGISFHSAWLTVLPAPGREKEITASPDYLEIAIYCIGVFLIACMVVTVILCRMKNTTKKPDFSSQPAVHKLTKRIPLRRQVSAESSSSMNSNTPLVRITTRLSSTADTPMLAGVSEYELPEDPKWEFPRDKLTLGKPLGEGCFGQVVMAEAVGIDKDKPKEAVTVAVKMLKDDATEKDLSDLVSEMEMMKMIGKHKNIINLLGACTQDGPLYVIVEYASKGNLREYLRARRPPGMEYSYDINRVPEEQMTFKDLVSCTYQLARGMEYLASQKCIHRDLAARNVLVTENNVMKIADFGLARDINNIDYYKKTTNGRLPVKWMAPEALFDRVYTHQSDVWSFGVLMWEIFTLGGSPYPGIPVEELFKLLKEGHRMDKPANCTNELYMMMRDCWHAVPSQRPTFKQLVEDLDRILTLTTNEEYLDLSQPLEQYSPSYPDTRSSCSSGDDSVFSPDPMPYEPCLPQYPHINGSVKT

SEQ ID NO: 5341 - protein, 707 aa, Homo Sapiens
MVSWGRFICLVVVTMATLSLARPSFSLVEDTTLEPEGAPYWTNTEKMEKRLHAVPAANTVKFRCPAGGNPMPTMRWLKNGKEFKQEHRIGGYKVRNQHWSLIMESVVPSDKGNYTCVVENEYGSINHTYHLDVVERSPHRPILQAGLPANASTVVGGDVEFVCKVYSDAQPHIQWIKHVEKNGSKYGPDGLPYLKVLKHSGINSSNAEVLALFNVTEADAGEYICKVSNYIGQANQSAWLTVLPKQQAPGREKEITASPDYLEIAIYCIGVFLIACMVVTVILCRMKNTTKKPDFSSQPAVHKLTKRIPLRRQVTVSAESSSSMNSNTPLVRITTRLSSTADTPMLAGVSEYELPEDPKWEFPRDKLTLGKPLGEGCFGQVVMAEAVGIDKDKPKEAVTVAVKMLKDDATEKDLSDLVSEMEMMKMIGKHKNIINLLGACTQDGPLYVIVEYASKGNLREYLRARRPPGMEYSYDINRVPEEQMTFKDLVSCTYQLARGMEYLASQKCIHRDLAARNVLVTENNVMKIADFGLARDINNIDYYKKTTNGRLPVKWMAPEALFDRVYTHQSDVWSFGVLMWEIFTLGGSPYPGIPVEELFKLLKEGHRMDKPANCTNELYMMMRDCWHAVPSQRPTFKQLVEDLDRILTLTTNEEYLDLSQPLEQYSPSYPDTRSSCSSGDDSVFSPDPMPYEPCLPQYPHINGSVKT

SEQ ID NO: 5342 - protein, 251 aa, Homo Sapiens
MVSWGRFICLVVVTMATLSLARPSFSLVEDTTLEPEGAPYWTNTEKMEKRLHAVPAANTVKFRCPAGGNPMPTMRWLKNGKEFKQEHRIGGYKVRNQHWSLIMESVVPSDKGNYTCVVENEYGSINHTYHLDVVERSPHRPILQAGLPANASTVVGGDVEFVCKVYSDAQPHIQWIKHVEKNGSKYGPDGLPYLKVLKHSGINSSNAEVLALFNVTEADAGEYICKVSNYIGQANQSAWLTVLPKQQGRRC

SEQ ID NO: 5343 - protein, 86 aa, Homo Sapiens
  misc_feature (1)..(1): Xaa can be any naturally occurring amino acid
XPYPGIPVEELFKLLKEGHRMDKPANCTNELYMMMRDCWHAVPSQRPTFKQLVEDLDRILTLTTNEEYLDLSQPLEPYSPCYPDPR

SEQ ID NO: 5344 - protein, 136 aa, Homo Sapiens
  misc_feature (1)..(1): Xaa can be any naturally occurring amino acid
XSLARPSFSLVEDTTLEPEEPPTKYQISQPEVYVAAPGESLEVRCLLKDAAVISWTKDGVHLGPNNRTVLIGEYLQIKGATPRDSGLYACTASRTVDSETWYFMVNVTDAISSGDDEDDTDGAEDFVSENSNNKSK

SEQ ID NO: 5345 - protein, 364 aa, Homo Sapiens
MGAPACALALCVAVAIVAGASSESLGTEQRVVGRAAEVPGPEPGQQEQLVFGSGDAVELSCPPPGGGPMGPTVWVKDGTGLVPSERVLVGPQRLQVLNASHEDSGAYSCRQRLTQRVLCHFSVRVTDAPSSGDDEDGEDEAEDTGVDTGAPYWTRPERMDKKLLAVPAANTVRFRCPAAGNPTPSISWLKNGREFRGEHRIGGIKLRHQQWSLVMESVVPSDRGNYTCVVENKFGSIRQTYTLDVLERSPHRPILQAGLPANQTAVLGSDVEFHCKVYSDAQPHIQWLKHVEVNGSKVGPDGTPYVTVLKSWISESVEADVRLRLANVSERDGGEYLCRATNFIGVAEKAFWLSVHGPRADGGR

SEQ ID NO: 5346 - protein, 694 aa, Homo Sapiens
MGAPACALALCVAVAIVAGASSESLGTEQRVVGRAAEVPGPEPGQQEQLVFGSGDAVELSCPPPGGGPMGPTVWVKDGTGLVPSERVLVGPQRLQVLNASHEDSGAYSCRQRLTQRVLCHFSVRVTDAPSSGDDEDGEDEAEDTGVDTGAPYWTRPERMDKKLLAVPAANTVRFRCPAAGNPTPSISWLKNGREFRGEHRIGGIKLRHQQWSLVMESVVPSDRGNYTCVVENKFGSIRQTYTLDVLERSPHRPILQAGLPANQTAVLGSDVEFHCKVYSDAQPHIQWLKHVEVNGSKVGPDGTPYVTVLKVSLESNASMSSNTPLVRIARLSSGEGPTLANVSELELPADPKWELSRARLTLGKPLGEGCFGQVVMAEAIGIDKDRAAKPVTVAVKMLKDDATDKDLSDLVSEMEMMKMIGKHKNIINLLGACTQGGPLYVLVEYAAKGNLREFLRARRPPGLDYSFDTCKPPEEQLTFKDLVSCAYQVARGMEYLASQKCIHRDLAARNVLVTEDNVMKIADFGLARDVHNLDYYKKTTNGRLPVKWMAPEALFDRVYTHQSDVWSFGVLLWEIFTLGGSPYPGIPVEELFKLLKEGHRMDKPANCTHDLYMIMRECWHAAPSQRPTFKQLVEDLDRVLTVTSTDEYLDLSAPFEQYSPGGQDTPSSSSSGDDSVFAHDLLPPAPPSSGGSRT

SEQ ID NO: 5347 - protein, 808 aa, Homo Sapiens
MGAPACALALCVAVAIVAGASSESLGTEQRVVGRAAEVPGPEPGQQEQLVFGSGDAVELSCPPPGGGPMGPTVWVKDGTGLVPSERVLVGPQRLQVLNASHEDSGAYSCRQRLTQRVLCHFSVRVTDAPSSGDDEDGEDEAEDTGVDTGAPYWTRPERMDKKLLAVPAANTVRFRCPAAGNPTPSISWLKNGREFRGEHRIGGIKLRHQQWSLVMESVVPSDRGNYTCVVENKFGSIRQTYTLDVLERSPHRPILQAGLPANQTAVLGSDVEFHCKVYSDAQPHIQWLKHVEVNGSKVGPDGTPYVTVLKSWISESVEADVRLRLANVSERDGGEYLCRATNFIGVAEKAFWLSVHGPRAAEEELVEADEAGSVYAGILSYGVGFFLFILVVAAVTLCRLRSPPKKGLGSPTVHKISRFPLKRQVSLESNASMSSNTPLVRIARLSSGEGPTLANVSELELPADPKWELSRARLTLGKPLGEGCFGQVVMAEAIGIDKDRAAKPVTVAVKMLKDDATDKDLSDLVSEMEMMKMIGKHKNIINLLGACTQGGPLYVLVEYAAKGNLREFLRARRPPGLDYSFDTCKPPEEQLTFKDLVSCAYQVARGMEYLASQKCIHRDLAARNVLVTEDNVMKIADFGLARDVHNLDYYKKTTNGRLPVKWMAPEALFDRVYTHQSDVWSFGVLLWEIFTLGGSPYPGIPVEELFKLLKEGHRMDKPANCTHDLYMIMRECWHAAPSQRPTFKQLVEDLDRVLTVTSTDEYLDLSAPFEQYSPGGQDTPSSSSSGDDSVFAHDLLPPAPPSSGGSRT

SEQ ID NO: 5348 - protein, 806 aa, Homo Sapiens
MGAPACALALCVAVAIVAGASSESLGTEQRVVGRAAEVPGPEPGQQEQLVFGSGDAVELSCPPPGGGPMGPTVWVKDGTGLVPSERVLVGPQRLQVLNASHEDSGAYSCRQRLTQRVLCHFSVRVTDAPSSGDDEDGEDEAEDTGVDTGAPYWTRPERMDKKLLAVPAANTVRFRCPAAGNPTPSISWLKNGREFRGEHRIGGIKLRHQQWSLVMESVVPSDRGNYTCVVENKFGSIRQTYTLDVLERSPHRPILQAGLPANQTAVLGSDVEFHCKVYSDAQPHIQWLKHVEVNGSKVGPDGTPYVTVLKTAGANTTDKELEVLSLHNVTFEDAGEYTCLAGNSIGFSHHSAWLVVLPAEEELVEADEAGSVYAGILSYGVGFFLFILVVAAVTLCRLRSPPKKGLGSPTVHKISRFPLKRQVSLESNASMSSNTPLVRIARLSSGEGPTLANVSELELPADPKWELSRARLTLGKPLGEGCFGQVVMAEAIGIDKDRAAKPVTVAVKMLKDDATDKDLSDLVSEMEMMKMIGKHKNIINLLGACTQGGPLYVLVEYAAKGNLREFLRARRPPGLDYSFDTCKPPEEQLTFKDLVSCAYQVARGMEYLASQKCIHRDLAARNVLVTEDNVMKIADFGLARDVHNLDYYKKTTNGRLPVKWMAPEALFDRVYTHQSDVWSFGVLLWEIFTLGGSPYPGIPVEELFKLLKEGHRMDKPANCTHDLYMIMRECWHAAPSQRPTFKQLVEDLDRVLTVTSTDEYLDLSAPFEQYSPGGQDTPSSSSSGDDSVFAHDLLPPAPPSSGGSRT

SEQ ID NO: 5349 - protein, 694 aa, Homo Sapiens; identical to SEQ ID NO: 5346

SEQ ID NO: 5350 - protein, 792 aa, Homo Sapiens
MGAPACALALCVAVAIVAGASSESLGTEQRVVGRAAEVPGPEPGQQEQLVFGSGDAVELSCPPPGGGPMGPTVWVKDGTGLVPSERVLVGPQRLQVLNASHEDSGAYSCRQRLTQRVLCHFSVRVTDAPSSGDDEDGEDEAEDTGVDTGAPYWTRPERMDKKLLAVPAANTVRFRCPAAGNPTPSISWLKNGREFRGEHRIGGIKLRHQQWSLVMESVVPSDRGNYTCVVENKFGSIRQTYTLDVLERSPHRPILQAGLPANQTAVLGSDVEFHCKVYSDAQPHIQWLKHVEVNGSKVGPDGTPYVTVLKTAGANTTDKELEVLSLHNVTFEDAGEYTCLAGNSIGFSHHSAWLVVLPAEEELVEADEAGSVYAGILSYGVGFFLFILVVAAVTLCRLRSPPKKGLGSPTVHKISRFPLKRQQVSLESNASMSSNTPLVRIARLSSGEGPTLANVSELELPADPKWELSRARLTLGKPLGEGCFGQVVMAEAIGIDKDRAAKPVTVAVKMLKDDATDKDLSDLVSEMEMMKMIGKHKNIINLLGACTQGGPLYVLVEYAAKGNLREFLRARRPPGLDYSFDTCKPPEEQLTFKDLVSCAYQVARGMEYLASQKCIHRDLAARNVLVTEDNVMKIADFGLARDVHNLDYYKKTTNLVLWGPALGDLHAGGLPVPRHPCGGALQAAEGGPPHGQARQLHTRPVHDHAGVLACRALPEAHLQAAGGGPGPCPYRDVHRRVPGPVGAFRAVLPGWPGHPQLQLLRGRLRVCPRPAAPGPTQQWGLADVKGHWSPTM

SEQ ID NO: 5351 - protein, 364 aa, Homo Sapiens; identical to SEQ ID NO: 5345

SEQ ID NO: 5352 - protein, 112 aa, Homo Sapiens
NPTPSISWLKNGREFRGEHRIGGIKLRHQQWSLVMESVVPSDRGNYTCVVENKFGSIRQTYTLDVLERSPHRPILQAGLPANQTAVLGSDVEFHCKTAGANTTDKELEVLSL

SEQ ID NO: 5353 - protein, 72 aa, Homo Sapiens
MRLLLALLGVLLSVPGPPVLSLEASEEVELASIHLSLCLRERTGLAGRRALSWAAELVSPAWLPAWSSKSRS

SEQ ID NO: 5354 - protein, 87 aa, Homo Sapiens
MRLLLALLGVLLSVPGPPVLSLEASEEVELEPCLAPSLEQQEQELTVALGQPVRLCCGRAERGGHWYKEGSRLAPAGRVRGWRGRLE

SEQ ID NO: 5355 - protein, 108 aa, Homo Sapiens
MRLLLALLGVLLSVPGPPVLSLEASEEVELEPCLAPSLEQQEQELTVALGQPVRLCCGRAERGGHWYKEGSRLAPAGRVRGWRGRLEIASFLPEDAGRYLCLARGSMI

SEQ ID NO: 5356 - protein, 114 aa, Homo Sapiens
MRLLLALLGVLLSVPGPPVLSLEASEEVELEPCLAPSLEQQEQELTVALGQPVRLCCGRAERGGHWYKEGSRLAPAGRVRGWRGRLEIASFLPEDAGRYLCLARGSMIVLQNLT

SEQ ID NO: 5357 - protein, 201 aa, Homo Sapiens
MRLLLALLGVLLSVPGPPVLSLEASEEVELEPCLAPSLEQQEQELTVALGQPVRLCCGRAERGGHWYKEGSRLAPAGRVRGWRGRLEIASFLPEDAGRYLCLARGSMIVLQNLTLITGDSLTSSNDDEDPKSHRDPSNRHSYPQQAPYWTHPQRMEKKLHAVPAGNTVKFRCPAAGNPTPTIRWLKDGQAFHGENRIGGIR

SEQ ID NO: 5358 - protein, 802 aa, Homo Sapiens
MRLLLALLGVLLSVPGPPVLSLEASEEVELEPCLAPSLEQQEQELTVALGQPVRLCCGRAERGGHWYKEGSRLAPAGRVRGWRGRLEIASFLPEDAGRYLCLARGSMIVLQNLTLITGDSLTSSNDDEDPKSHRDPSNRHSYPQQAPYWTHPQRMEKKLHAVPAGNTVKFRCPAAGNPTPTIRWLKDGQAFHGENRIGGIRLRHQHWSLVMESVVPSDRGTYTCLVENAVGSIRYNYLLDVLERSPHRPILQAGLPANTTAVVGSDVELLCKVYSDAQPHIQWLKHIVINGSSFGADGFPYVQVLKTADINSSEVEVLYLRNVSAEDAGEYTCLAGNSIGLSYQSAWLTVLPEEDPTWTAAAPEARYTDIILYASGSLALAVLLLLAGLYRGQALHGRHPRPPATVQKLSRFPLARQFSLESGSSGKSSSSLVRGVRLSSSGPALLAGLVSLDLPLDPLWEFPRDRLVLGKPLGEGCFGQVVRAEAFGMDPARPDQASTVAVKMLKDNASDKDLADLVSEMEVMKLIGRHKNIINLLGVCTQEGPLYVIVECAAKGNLREFLRARRPPGPDLSPDGPRSSEGPLSFPVLVSCAYQVARGMQYLESRKCIHRDLAARNVLVTEDNVMKIADFGLARGVHHIDYYKKTSNGRLPVKWMAPEALFDRVYTHQSDVWSFGILLWEIFTLGGSPYPGIPVEELFSLLREGHRMDRPPHCPPELYGLMRECWHAAPSQRPTFKQLVEALDKVLLAVSEEYLDLRLTFGPYSPSGGDASSTCSSSDSVFSHDPLPLGSSSFPFGSGVQT

SEQ ID NO: 5359 - protein, 762 aa, Homo Sapiens
MRLLLALLGVLLSVPGPPVLSLEASEEVELEPCLAPSLEQQEQELTVALGQPVRLCCGRAERGGHWYKEGSRLAPAGRVRGWRGRLEIASFLPEDAGRYLCLARGSMIVLQNLTLITGDSLTSSNDDEDPKSHRDPSNRHSYPQQAPYWTHPQRMEKKLHAVPAGNTVKFRCPAAGNPTPTIRWLKDGQAFHGENRIGGIRLRHQHWSLVMESVVPSDRGTYTCLVENAVGSIRYNYLLDVLERSPHRPILQAGLPANTTAVVGSDVELLCKVYSDAQPHIQWLKHIVINGSSFGADGFPYVQVLKTADINSSEVEVLYLRNVSAEDAGEYTCLAGNSIGLSYQSAWLTVLPGTGRIPHLTCDSLTPAGRTKSPTLQFSLESGSSGKSSSSLVRGVRLSSSGPALLAGLVSLDLPLDPLWEFPRDRLVLGKPLGEGCFGQVVRAEAFGMDPARPDQASTVAVKMLKDNASDKDLADLVSEMEVMKLIGRHKNIINLLGVCTQEGPLYVIVECAAKGNLREFLRARRPPGPDLSPDGPRSSEGPLSFPVLVSCAYQVARGMQYLESRKCIHRDLAARNVLVTEDNVMKIADFGLARGVHHIDYYKKTSNGRLPVKWMAPEALFDRVYTHQSDVWSFGILLWEIFTLGGSPYPGIPVEELFSLLREGHRMDRPPHCPPELYGLMRECWHAAPSQRPTFKQLVEALDKVLLAVSEEYLDLRLTFGPYSPSGGDASSTCSSSDSVFSHDPLPLGSSSFPFGSGVQT

SEQ ID NO: 5360 - protein, 734 aa, Homo Sapiens
MRLLLALLGVLLSVPGPPVLSLEASEEVELEPCLAPSLEQQEQELTVALGQPVRLCCGRAERGGHWYKEGSRLAPAGRVRGWRGRLEIASFLPEDAGRYLCLARGSMIVLQNLTLITGDSLTSSNDDEDPKSHRDPSNRHSYPQQAPYWTHPQRMEKKLHAVPAGNTVKFRCPAAGNPTPTIRWLKDGQAFHGENRIGGIRLRHQHWSLVMESVVPSDRGTYTCLVENAVGSIRYNYLLDVLERSPHRPILQAGLPANTTAVVGSDVELLCKVYSDAQPHIQWLKHIVINGSSFGADGFPYVQVLKTADINSSEVEVLYLRNVSAEDAGEYTCLAGNSIGLSYQSAWLTVLPEEDPTWTAAAPEASSPWSQALPASQAHPWYEACVSPPAAPPCSPASLVLGKPLGEGCFGQVVRAEAFGMDPARPDQASTVAVKMLKDNASDKDLADLVSEMEVMKLIGRHKNIINLLGVCTQEGPLYVIVECAAKGNLREFLRARRPPGPDLSPDGPRSSEGPLSFPVLVSCAYQVARGMQYLESRKCIHRDLAARNVLVTEDNVMKIADFGLARGVHHIDYYKKTSNGRLPVKWMAPEALFDRVYTHQSDVWSFGILLWEIFTLGGSPYPGIPVEELFSLLREGHRMDRPPHCPPELYGLMRECWHAAPSQRPTFKQLVEALDKVLLAVSEEYLDLRLTFGPYSPSGGDASSTCSSSDSVFSHDPLPLGSSSFPFGSGVQT

SEQ ID NO: 5361 - protein, 802 aa, Homo Sapiens; identical to SEQ ID NO: 5358

SEQ ID NO: 5362 - protein, 280 aa, Homo Sapiens
  misc_feature (1)..(1): Xaa can be any naturally occurring amino acid
XRYTDIILYASGSLALAVLLLLAGLYRGQALHGRHPRPPATVQKLSRFPLARQSGSSGKSSSSLVRGVRLSSSGPALLAGLVSLDLPLDPLWEFPRDRLVLGKPLGEGCFGQVVRAEAFGMDPARPDQASTVAVKMLKDNASDKDLADLVSEMEVMKLIGRHKNIINLLGVCTQEGPLYVIVECAAKGNLREFLRARRPPGPDLSPDGPRSSEGPLSFPVLVSCAYQVARGMQYLESRKCIHRDLAARNVLVTEDNVMKIADFGLARGVHHIDYYKKTSN

SEQ ID NO: 5363 - protein, 80 aa, Homo Sapiens
MTPSPLLLLLLPPLLLGAFPPAAAARGPPKMADKVVPRQVARLGRTVRLQCPVEGDPPPLTMWTKDGRTIHSGWSRFRVL

SEQ ID NO: 5364 - protein, 152 aa, Homo Sapiens
MTPSPLLLLLLPPLLLGAFPPAAAARGPPKMADKVVPRQVARLGRTVRLQCPVEGDPPPLTMWTKDGRTIHSGWSRFRVLPQGLKVKQVEREDAGVYVCKATNGFGSLSVNYTLVVLDDISPGKESLGPDSSSGGQEDPASQQWARPRFTQP

SEQ ID NO: 5365 - protein, 504 aa, Homo Sapiens
MTPSPLLLLLLPPLLLGAFPPAAAARGPPKMADKVVPRQVARLGRTVRLQCPVEGDPPPLTMWTKDGRTIHSGWSRFRVLPQGLKVKQVEREDAGVYVCKATNGFGSLSVNYTLVVLDDISPGKESLGPDSSSGGQEDPASQQWARPRFTQPSKMRRRVIARPVGSSVRLKCVASGHPRPDITWMKDDQALTRPEAAEPRKKKWTLSLKNLRPEDSGKYTCRVSNRAGAINATYKVDVIQRTRSKPVLTGTHPVNTTVDFGGTTSFQCKVRSDVKPVIQWLKRVEYGAEGRHNSTIDVGGQKFVVLPTGDVWSRPDGSYLNKLLITRARQDDAGMYICLGANTMGYSFRSAFLTVLPDPKPPGPPVASSSSATSLPWPVVIGIPAGAVFILGTLLLWLCQAQKKPCTPAPAPPLPGHRPPGTARDRSGDKDLPSLAALSAGPGVGLCEEHGSPAAPQHLLGPGPVAGPKLYPKLYTDIHTHTHTHSHTHSHVEGKVHQHIHYQC

SEQ ID NO: 5366 - protein, 504 aa, Homo Sapiens; identical to SEQ ID NO: 5365

SEQ ID NO: 5367 - protein, 504 aa, Homo Sapiens; identical to SEQ ID NO: 5365

SEQ ID NO: 5368 - protein, 504 aa, Homo Sapiens; identical to SEQ ID NO: 5365

SEQ ID NO: 5369 - protein, 119 aa, Homo Sapiens
MIDAATLKSRKMLEEIMKYEASILTHDSSIRYLQEIYNSNNQKIVNLKEKVAQLEAQCQEPCKDTVQIHDITGKDCQDIANKGAKQSGLYFIKPLKANQQFLVYCEIDGSGNGWTVFQK

SEQ ID NO: 5370 - protein, 123 aa, Homo Sapiens
MIDAATLKSRKMLEEIMKYEASILTHDSSIRYLQEIYNSNNQKIVNLKEKVAQLEAQCQEPCKDTVQIHDITGKDCQDIANKGAKQSGLYFIKPLKANQQFLVYCEIDGSGNGWTVFQKRLDG

SEQ ID NO: 5371 - protein, 453 aa, Homo Sapiens
MSWSLHPRNLILYFYALLFLSSTCVAYVATRDNCCILDERFGSYCPTTCGIADFLSTYQTKVDKDLQSLEDILHQVENKTSEVKQLIKAIQLTYNPDESSKPNMIDAATLKSRKMLEEIMKYEASILTHDSSIRYLQEIYNSNNQKIVNLKEKVAQLEAQCQEPCKDTVQIHDITGKDCQDIANKGAKQSGLYFIKPLKANQQFLVYCEIDGSGNGWTVFQKRLDGSVDFKKNWIQYKEGFGHLSPTGTTEFWLGNEKIHLISTQSAIPYALRVELEDWNGRTSTADYAMFKVGPEADKYRLTYAYFAGGDAGDAFDGFDFGDDPSDKFFTSHNGMQFSTWDNDNDKFEGNCAEQDGSGWWMNKCHAGHLNGVYYQGGTYSKASTPNGYDNGIIWATWKTRWYSMKKTTMKIIPFNRLTIGEGQQHHLGGAKQVRPEHPAETEYDSLYPEDDL

SEQ ID NO: 5372 - protein, 437 aa, Homo Sapiens
MSWSLHPRNLILYFYALLFLSSTCVAYVATRDNCCILDERFGSYCPTTCGIADFLSTYQTKVDKDLQSLEDILHQVENKTSEVKQLIKAIQLTYNPDESSKPNMIDAATLKSRKMLEEIMKYEASILTHDSSIRYLQEIYNSNNQKIVNLKEKVAQLEAQCQEPCKDTVQIHDITGKDCQDIANKGAKQSGLYFIKPLKANQQFLVYCEIDGSGNGWTVFQKRLDGSVDFKKNWIQYKEGFGHLSPTGTTEFWLGNEKIHLISTQSAIPYALRVELEDWNGRTSTADYAMFKVGPEADKYRLTYAYFAGGDAGDAFDGFDFGDDPSDKFFTSHNGMQFSTWDNDNDKFEGNCAEQDGSGWWMNKCHAGHLNGVYYQGGTYSKASTPNGYDNGIIWATWKTRWYSMKKTTMKIIPFNRLTIGEGQQHHLGGAKQAGDV

SEQ ID NO: 5373 - protein, 461 aa, Homo Sapiens
MSWSLHPRNLILYFYALLFLSSTCVAYVATRDNCCILDERFGSYCPTTCGIADFLSTYQTKVDKDLQSLEDILHQVENKTSEVKQLIKAIQLTYNPDESSKPNMIDAATLKSRKMLEEIMKYEASILTHDSSIRYLQEIYNSNNQKIVNLKEKVAQLEAQCQEPCKDTVQIHDITGKVKVDSPSLDCQDIANKGAKQSGLYFIKPLKANQQFLVYCEIDGSGNGWTVFQKRLDGSVDFKKNWIQYKEGFGHLSPTGTTEFWLGNEKIHLISTQSAIPYALRVELEDWNGRTSTADYAMFKVGPEADKYRLTYAYFAGGDAGDAFDGFDFGDDPSDKFFTSHNGMQFSTWDNDNDKFEGNCAEQDGSGWWMNKCHAGHLNGVYYQGGTYSKASTPNGYDNGIIWATWKTRWYSMKKTTMKIIPFNRLTIGEGQQHHLGGAKQVRPEHPAETEYDSLYPEDDL

SEQ ID NO: 5374 - protein, 445 aa, Homo Sapiens
MSWSLHPRNLILYFYALLFLSSTCVAYVATRDNCCILDERFGSYCPTTCGIADFLSTYQTKVDKDLQSLEDILHQVENKTSEVKQLIKAIQLTYNPDESSKPNMIDAATLKSRKMLEEIMKYEASILTHDSSIRYLQEIYNSNNQKIVNLKEKVAQLEAQCQEPCKDTVQIHDITGKVKVDSPSLDCQDIANKGAKQSGLYFIKPLKANQQFLVYCEIDGSGNGWTVFQKRLDGSVDFKKNWIQYKEGFGHLSPTGTTEFWLGNEKIHLISTQSAIPYALRVELEDWNGRTSTADYAMFKVGPEADKYRLTYAYFAGGDAGDAFDGFDFGDDPSDKFFTSHNGMQFSTWDNDNDKFEGNCAEQDGSGWWMNKCHAGHLNGVYYQGGTYSKASTPNGYDNGIIWATWKTRWYSMKKTTMKIIPFNRLTIGEGQQHHLGGAKQAGDV

SEQ ID NO: 5375 - protein, 312 aa, Homo Sapiens
MAKVFSFILVTTALTMGREISALEDCAQEQMRLRAQVRLLETRVKQQQVKIKQLLQENEVQFLDKGDENTVIDLGSKRQYADCSEIFNDGYKLSGFYKIKPLQSPAEFSVYCDMSDGGGWTVIQRRSDGSENFNRGWKDYENGFGNFVQKHGEYWLGNKNLHFLTTQEDYTLKIDLADFEKNSRYAQYKNFKVGDEKNFYELNIGEYSGTAGDSLAGNFHPEVQWWASHQRMKFSTWDRDHDNYEGNCAEEDQSGWWFNRCHSANLNGVYYSGPYTAKTDNGIVWYTWHGWWYSLKSVVMKIRPNDFIPNVI

SEQ ID NO: 5376 - protein, 312 aa, Homo Sapiens; identical to SEQ ID NO: 5375

SEQ ID NO: 5377 - protein, 312 aa, Homo Sapiens; identical to SEQ ID NO: 5375

SEQ ID NO: 5378 - protein, 312 aa, Homo Sapiens; identical to SEQ ID NO: 5375

SEQ ID NO: 5379 - protein, 312 aa, Homo Sapiens; identical to SEQ ID NO: 5375

SEQ ID NO: 5380 - protein, 312 aa, Homo Sapiens; identical to SEQ ID NO: 5375

SEQ ID NO: 5381 - protein, 312 aa, Homo Sapiens; identical to SEQ ID NO: 5375

SEQ ID NO: 5382 - protein, 225 aa, Homo Sapiens
MKLANWYWLSSAVLATYGFLVVANNETEEIKDERAKDVCPVRLESRGKCEEAGECPYQVSLPPLTIQLPKQFSRIEEVFKEVQNLKEIVNSLKKSCQDCKLQADDNGDPGRNGLLLPSTGAPGEVGDNRVRELESEVNKLSSELKNAKEEINVLHGRLEKLNLVNMNNIENYVDSKVANLTFVVNSLDGKCSKCPSQEQIQSRPGMYNNVFLSYVHKCYTAREYL

SEQ ID NO: 5383 - protein, 439 aa, Homo Sapiens
MKLANWYWLSSAVLATYGFLVVANNETEEIKDERAKDVCPVRLESRGKCEEAGECPYQVSLPPLTIQLPKQFSRIEEVFKEVQNLKEIVNSLKKSCQDCKLQADDNGDPGRNGLLLPSTGAPGEVGDNRVRELESEVNKLSSELKNAKEEINVLHGRLEKLNLVNMNNIENYVDSKVANLTFVVNSLDGKCSKCPSQEQIQSRPVQHLIYKDCSDYYAIGKRSSETYRVTPDPKNSSFEVYCDMETMGGGWTVLQARLDGSTNFTRTWQDYKAGFGNLRREFWLGNDKIHLLTKSKEMILRIDLEDFNGVELYALYDQFYVANEFLKYRLHVGNYNGTAGDALRFNKHYNHDLKFFTTPDKDNDRYPSGNCGLYYSSGWWFDACLSANLNGKYYHQKYRGVRNGIFWGTWPGVSEAHPGGYKSSFKEAKMMIRPKHFKP

SEQ ID NO: 5384 - protein, 18 aa, Homo Sapiens
MAEKFDCHYCRDPLQGKK

SEQ ID NO: 5385 - protein, 66 aa, Homo Sapiens
MAEKFDCHYCRDPLQGKKYVQKDGHHCCLKCFDKFCANTCVECRKPIGADSKEVHYKNRFWHDTCF

SEQ ID NO: 5386 - protein, 78 aa, Homo Sapiens
MAEKFDCHYCRDPLQGKKYVQKDGHHCCLKCFDKFCANTCVECRKPIGADSKEVHYKNRFWHDTCFRCAKCLHPLANE

SEQ ID NO: 5387 - protein, 130 aa, Homo Sapiens
MAEKFDCHYCRDPLQGKKYVQKDGHHCCLKCFDKFCANTCVECRKPIGADSKEVHYKNRFWHDTCFRCAKCLHPLANETFVAKDNKILCNKCTTREDSPKCKGCFKAIVAGDQNVEYKGTVWHKDCFTCS

SEQ ID NO: 5388 - protein, 138 aa, Homo Sapiens
MAEKFDCHYCRDPLQGKKYVQKDGHHCCLKCFDKFCANTCVECRKPIGADSKEVHYKNRFWHDTCFRCAKCLHPLANETFVAKDNKILCNKCTTREDSPKCKGCFKAIVAGDQNVEYKGTVWHKDCFTCSNCKQVIGT

SEQ ID NO: 5389 - protein, 141 aa, Homo Sapiens
MAEKFDCHYCRDPLQGKKYVQKDGHHCCLKCFDKFCANTCVECRKPIGADSKEVHYKNRFWHDTCFRCAKCLHPLANETFVAKDNKILCNKCTTREDSPKCKGCFKAIVAGDQNVEYKGTVWHKDCFTCSNCKQVIGTGSF

SEQ ID NO: 5390 - protein, 147 aa, Homo Sapiens
MAEKFDCHYCRDPLQGKKYVQKDGHHCCLKCFDKFCANTCVECRKPIGADSKEVHYKNRFWHDTCFRCAKCLHPLANETFVAKDNKILCNKCTTREDSPKCKGCFKAIVAGDQNVEYKGTVWHKDCFTCSNCKQVIGTGSFFPKGED

SEQ ID NO: 5391 - protein, 152 aa, Homo Sapiens
MAEKFDCHYCRDPLQGKKYVQKDGHHCCLKCFDKFCANTCVECRKPIGADSKEVHYKNRFWHDTCFRCAKCLHPLANETFVAKDNKILCNKCTTREDSPKCKGCFKAIVAGDQNVEYKGTVWHKDCFTCSNCKQVIGTGSFFPKGEDFYCVT

SEQ ID NO: 5392 - protein, 155 aa, Homo Sapiens
MAEKFDCHYCRDPLQGKKYVQKDGHHCCLKCFDKFCANTCVECRKPIGADSKEVHYKNRFWHDTCFRCAKCLHPLANETFVAKDNKILCNKCTTREDSPKCKGCFKAIVAGDQNVEYKGTVWHKDCFTCSNCKQVIGTGSFFPKGEDFYCVTCHE

SEQ ID NO: 5393 - protein, 175 aa, Homo Sapiens
MAEKFDCHYCRDPLQGKKYVQKDGHHCCLKCFDKFCANTCVECRKPIGADSKEVHYKNRFWHDTCFRCAKCLHPLANETFVAKDNKILCNKCTTREDSPKCKGCFKAIVAGDQNVEYKGTVWHKDCFTCSNCKQVIGTGSFFPKGEDFYCVTCHETKFAKHCVKCNKAITSGGIT

SEQ ID NO: 5394 - protein, 204 aa, Homo Sapiens
MAEKFDCHYCRDPLQGKKYVQKDGHHCCLKCFDKFCANTCVECRKPIGADSKEVHYKNRFWHDTCFRCAKCLHPLANETFVAKDNKILCNKCTTREDSPKCKGCFKAIVAGDQNVEYKGTVWHKDCFTCSNCKQVIGTGSFFPKGEDFYCVTCHETKFAKHCVKCNKAITSGGITYQDQPWHADCFVCVTCSKKLAGQRFTAVE

SEQ ID NO: 5395 - protein, 205 aa, Homo Sapiens
MAEKFDCHYCRDPLQGKKYVQKDGHHCCLKCFDKFCANTCVECRKPIGADSKEVHYKNRFWHDTCFRCAKCLHPLANETFVAKDNKILCNKCTTREDSPKCKGCFKAIVAGDQNVEYKGTVWHKDCFTCSNCKQVIGTGSFFPKGEDFYCVTCHETKFAKHCVKCNKAITSGGITYQDQPWHADCFVCVTCSKKLAGQRFTAVED

SEQ ID NO: 5396 - protein, 207 aa, Homo Sapiens
MAEKFDCHYCRDPLQGKKYVQKDGHHCCLKCFDKFCANTCVECRKPIGADSKEVHYKNRFWHDTCFRCAKCLHPLANETFVAKDNKILCNKCTTREDSPKCKGCFKAIVAGDQNVEYKGTVWHKDCFTCSNCKQVIGTGSFFPKGEDFYCVTCHETKFAKHCVKCNKAITSGGITYQDQPWHADCFVCVTCSKKLAGQRFTAVEDQY

SEQ ID NO: 5397 - protein, 207 aa, Homo Sapiens; identical to SEQ ID NO: 5396

SEQ ID NO: 5398 - protein, 280 aa, Homo Sapiens
MAEKFDCHYCRDPLQGKKYVQKDGHHCCLKCFDKFCANTCVECRKPIGADSKEVHYKNRFWHDTCFRCAKCLHPLANETFVAKDNKILCNKCTTREDSPKCKGCFKAIVAGDQNVEYKGTVWHKDCFTCSNCKQVIGTGSFFPKGEDFYCVTCHETKFAKHCVKCNKAITSGGITYQDQPWHADCFVCVTCSKKLAGQRFTAVEDQYYCVDCYKNFVAKKCAGCKNPITGFGKGSSVVAYEGQSWHDYCFHCKKCSVNLANKRFVFHQEQVYCPDCAKKL

SEQ ID NO: 5399 - protein, 280 aa, Homo Sapiens; identical to SEQ ID NO: 5398

SEQ ID NO: 5400 - protein, 257 aa, Homo Sapiens
MAEKFDCHYCRDPLQGKKYVQKDGHHCCLKCFDKFCANTCVECRKPIGADSKEVHYKNRFWHDTCFRCAKCLHPLANETFVAKDNKILCNKCTTREDSPKCKGCFKAIVAGDQNVEYKGTVWHKDCFTCSNCKQVIGTGSFFPKGEDFYCVTCHETKFAKHCVKCNKAITSGGITYQDQPWHADCFVCVTCSKKLAGQRFTAVEDQYYCVDCYKNFVAKKCAGCKNPITGFGKGSSVVAYEGQSWHDYCFHCKKCSV

SEQ ID NO: 5401 - protein, 280 aa, Homo Sapiens; identical to SEQ ID NO: 5398

SEQ ID NO: 5402 - protein, 280 aa, Homo Sapiens; identical to SEQ ID NO: 5398

SEQ ID NO: 5403 - protein, 280 aa, Homo Sapiens; identical to SEQ ID NO: 5398

SEQ ID NO: 5404 - protein, 280 aa, Homo Sapiens; identical to SEQ ID NO: 5398

SEQ ID NO: 5405 - protein, 280 aa, Homo Sapiens; identical to SEQ ID NO: 5398

SEQ ID NO: 5406 - protein, 323 aa, Homo Sapiens
MAEKFDCHYCRDPLQGKKYVQKDGHHCCLKCFDKFCANTCVECRKPIGADSKEVHYKNRFWHDTCFRCAKCLHPLANETFVAKDNKILCNKCTTREDSPKCKGCFKAIVAGDQNVEYKGTVWHKDCFTCSNCKQVIGTGSFFPKGEDFYCVTCHETKFAKHCVKCNKAITSGGITYQDQPWHADCFVCVTCSKKLAGQRFTAVEDQYYCVDCYKNFVAKKCAGCKNPITGKRTVSRVSHPVSKARKPPVCHGKRLPLTLFPSANLRGRHPGGERTCPSWVVVLYRKNRSLAAPRGPGLVKAPVWWPMKDNPGTTTASTAKNAP

SEQ ID NO: 5407 - protein, 323 aa, Homo Sapiens; identical to SEQ ID NO: 5406

SEQ ID NO: 5408 - protein, 194 aa, Homo Sapiens
MAEKFDCHYCRDPLQGKKYVQKDGHHCCLKCFDKFCANTCVECRKPIGADSKEVHYKNRFWHDTCFRCAKCLHPLANETFVAKDNKILCNKCTTREDSPKCKGCFKAIVAGDQNVEYKGTVWHKDCFTCSNCKQVIGTGSFFPKGEDFYCVTCHETKFAKHCVKCNKGLVKAPVWWPMKDNPGTTTASTAKNAP

SEQ ID NO: 5409 - protein, 296 aa, Homo Sapiens
MASHRHSGPSSYKVGTMAEKFDCHYCRDPLQGKKYVQKDGHHCCLKCFDKFCANTCVECRKPIGADSKEVHYKNRFWHDTCFRCAKCLHPLANETFVAKDNKILCNKCTTREDSPKCKGCFKAIVAGDQNVEYKGTVWHKDCFTCSNCKQVIGTGSFFPKGEDFYCVTCHETKFAKHCVKCNKAITSGGITYQDQPWHADCFVCVTCSKKLAGQRFTAVEDQYYCVDCYKNFVAKKCAGCKNPITGFGKGSSVVAYEGQSWHDYCFHCKKCSVNLANKRFVFHQEQVYCPDCAKKL

SEQ ID NO: 5410 - protein, 210 aa, Homo Sapiens
MASHRHSGPSSYKVGTMAEKFDCHYCRDPLQGKKYVQKDGHHCCLKCFDKFCANTCVECRKPIGADSKEVHYKNRFWHDTCFRCAKCLHPLANETFVAKDNKILCNKCTTREDSPKCKGCFKAIVAGDQNVEYKGTVWHKDCFTCSNCKQVIGTGSFFPKGEDFYCVTCHETKFAKHCVKCNKGLVKAPVWWPMKDNPGTTTASTAKNAP

SEQ ID NO: 5411 - protein, 309 aa, Homo Sapiens
MTFYVASLALELIWMLSSPAGPSSYKVGTMAEKFDCHYCRDPLQGKKYVQKDGHHCCLKCFDKFCANTCVECRKPIGADSKEVHYKNRFWHDTCFRCAKCLHPLANETFVAKDNKILCNKCTTREDSPKCKGCFKAIVAGDQNVEYKGTVWHKDCFTCSNCKQVIGTGSFFPKGEDFYCVTCHETKFAKHCVKCNKAITSGGITYQDQPWHADCFVCVTCSKKLAGQRFTAVEDQYYCVDCYKNFVAKKCAGCKNPITGFGKGSSVVAYEGQSWHDYCFHCKKCSVNLANKRFVFHQEQVYCPDCAKKL

SEQ ID NO: 5412 - protein, 635 aa, Homo Sapiens
MAMRPRSHPPVGAGTGGGPACVPVAEASTGAWTAEGAAGTRCRASRAPCRPPPVPAPSQLPASSPTKCEICVKNTAILAITLITPQDPHLDPVPRGQPTFTKKKKTIRLFWNEVRPFDWPCKNNRRCREFLWSKLEPIKVDTSRLEHLFESKSKELSVSKKTAADGKRQEIIVLDSKRSNAINIGLTVLPPPRTIKIAILNFDEYALNKEGIEKILTMIPTDEEKQKIQEAQLANPEIPLGSAEQFLLTLSSISELSARLHLWAFKMDYETTEKEVAEPLLDLKEGIDQLENNKTLGFILSTLLAIGNFLNGTNAKAFELSYLEKVPEVKDTVHKQSLLHHVCTMVVENFPDSSDLYSEIGAITRSAKVDFDQLQDNLCQMERRCKASWDHLKAIAKHEMKPVLKQRMSEFLKDCAERIIILKIVHRRIINRFHSFLLFMGHPPYAIREVNINKFCRIISEFALEYRTTRERVLQQKQKRANHRERNKTRGKMITDSGKFSGSSPAPPSQPQGLSYAEDAAEHENMKAVLKTSSPSVEDATPALGVRTRSRASRGSTSSWTMGTDDSPNVTDDAADEIMDRIVKSATQVPSQRVVPRERKRSRANRKSLRRTLKSGLTPEEARALGLVGTSELQL

SEQ ID NO: 5413 - protein, 1439 aa, Homo Sapiens
MATLACRVQFLDDTDPFNSTNFPEPSRPPLFTFREDLALGTQLAGVHRLLQAPHKLDDCTLQLSHNGAYLDLEATLAEQRDELEGFQDDAGRGKKHSIILRTQLSVRVHACIEKLYNSSGRDLRRALFSLKQIFQDDKDLVHEFVVAEGLTCLIKVGAEADQNYQNYILRALGQIMLYVDGMNGVINRNETIQWLYTLIGSKFRLVVKTALKLLLVFVEYSESNAPLLIQAVTAVDTKRGVKPWSNIMEILEEKDGVDTELLVYAMTLVNKTLSGLPDQDTFYDVVDCLEELGIAAVSQRHLNKKGTDLDLVEQLNIYEVALRHEDGDETTEPPPSGCRDRRRASVCSSGGGEHRGLDRRRSRRHSVQSIKSTLSAPTSPCSQSAPSFKPNQVRDLREKYSNFGNNSYHSSRPSSGSSVPTTPTSSVSPPQEARLERSSPSGLLTSSFRQHQESLAAERERRRQEREERLQRIEREERNKFSRDYLDKREEQRQAREERYKYLEQLAAEEHEKELRSRSVSRGRADLSLDLTSPAAPACLAPLSHSPSSSDSQEALTVSASSPGTPHHPQASAGDPEPESEAEPEAEAGAGQVADEAGQDIASAHEGAETEVEQALEQEPEERASLSEKERQNEGVNERDNCSASSVSSSSSTLEREEKEDKLSRDRTTGLWPAGVQDAGVNGQCGDILTNKRFMLDMLYAHNRKSPDDEEKGDGEAGRTQQEAEAVASLATRISTLQANSQTQDESVRRVDVGCLDNRGSVKAFAEKFNSGDLGRGSISPDAEPNDKVPETAPVQPKTESDYIWDQLMANPRELRIQDMDFTDLGEEDDIDVLDVDLGHREAPGPPPPPPPTFLGLPPPPPPPLLDSIPPPPVPGNLLVPPPPVFNAPQGLGWSQVPRGQPTFTKKKKTIRLFWNEVRPFDWPCKNNRRCREFLWSKLEPIKVDTSRLEHLFESKSKELSVSKKTAADGKRQEIIVLDSKRSNAINIGLTVLPPPRTIKIAILNFDEYALNKEGIEKILTMIPTDEEKQKIQEAQLANPEIPLGSAEQFLLTLSSISELSARLHLWAFKMDYETTEKEVAEPLLDLKEGIDQLENNKTLGFILSTLLAIGNFLNGTNAKAFELSYLEKVPEVKDTVHKQSLLHHVCTMVVENFPDSSDLYSEIGAITRSAKVDFDQLQDNLCQMERRCKASWDHLKAIAKHEMKPVLKQRMSEFLKDCAERIIILKIVHRRIINRFHSFLLFMGHPPYAIREVNINKFCRIISEFALEYRTTRERVLQQKQKRANHRERNKTRGKMITDSGKFSGSSPAPPSQPQGLSYAEDAAEHENMKAVLKTSSPSVEDATPALGVRTRSRASRGSTSSWTMGTDDSPNVTDDAADEIMDRIVKSATQVPSQRVVPRERKRSRANRKSLRRTLKSGLTPEEARALGLVGTSELQL

SEQ ID NO: 5414 - protein, 1422 aa, Homo Sapiens
MATLACRVQFLDDTDPFNSTNFPEPSRPPLFTFREDLALGTQLAGVHRLLQAPHKLDDCTLQLSHNGAYLDLEATLAEQRDELEGFQDDAGRGKKHSIILRTQLSVRVHACIEKLYNSSGRDLRRALFSLKQIFQDDKDLVHEFVVAEGLTCLIKVGAEADQNYQNYILRALGQIMLYVDGMNGVINRNETIQWLYTLIGSKFRLVVKTALKLLLVFVEYSESNAPLLIQAVTAVDTKRGVKPWSNIMEILEEKDGVDTELLVYAMTLVNKTLSGLPDQDTFYDVVDCLEELGIAAVSQRHLNKKGTDLDLVEQLNIYEVALRHEDGDETTEPPPSGCRDRRRASVCSSGGGEHRGLDRRRSRRHSVQSIKSTLSAPTSPCSQSAPSFKPNQVRDLREKYSNFGNNSYHSSRPSSGSSVPTTPTSSVSPPQEARLERSSPSGLLTSSFRQHQESLAAERERRRQEREERLQRIEREERNKFRYKYLEQLAAEEHEKELRSRSVSRGRADLSLDLTSPAAPACLAPLSHSPSSSDSQEALTVSASSPGTPHHPQASAGDPEPESEAEPEAEAGAGQVADEAGQDIASAHEGAETEVEQALEQEPEERASLSEKERQNEGVNERDNCSASSVSSSSSTLEREEKEDKLSRDRTTGLWPAGVQDAGVNGQCGDILTNKRFMLDMLYAHNRKSPDDEEKGDGEAGRTQQEAEAVASLATRISTLQANSQTQDESVRRVDVGCLDNRGSVKAFAEKFNSGDLGRGSISPDAEPNDKVPETAPVQPKTESDYIWDQLMANPRELRIQDMDFTDLGEEDDIDVLDVDLGHREAPGPPPPPPPTFLGLPPPPPPPLLDSIPPPPVPGNLLVPPPPVFNAPQGLGWSQVPRGQPTFTKKKKTIRLFWNEVRPFDWPCKNNRRCREFLWSKLEPIKVDTSRLEHLFESKSKELSVSKKTAADGKRQEIIVLDSKRSNAINIGLTVLPPPRTIKIAILNFDEYALNKEGIEKILTMIPTDEEKQKIQEAQLANPEIPLGSAEQFLLTLSSISELSARLHLWAFKMDYETTEKEVAEPLLDLKEGIDQLENNKTLGFILSTLLAIGNFLNGTNAKAFELSYLEKVPEVKDTVHKQSLLHHVCTMVVENFPDSSDLYSEIGAITRSAKVDFDQLQDNLCQMERRCKASWDHLKAIAKHEMKPVLKQRMSEFLKDCAERIIILKIVHRRIINRFHSFLLFMGHPPYAIREVNINKFCRIISEFALEYRTTRERVLQQKQKRANHRERNKTRGKMITDSGKFSGSSPAPPSQPQGLSYAEDAAEHENMKAVLKTSSPSVEDATPALGVRTRSRASRGSTSSWTMGTDDSPNVTDDAADEIMDRIVKSATQVPSQRVVPRERKRSRANRKSLRRTLKSGLTPEEARALGLVGTSELQL

SEQ ID NO: 5415 - protein, 1622 aa, Homo Sapiens
MATLACRVQFLDDTDPFNSTNFPEPSRPPLFTFREDLALGTQLAGVHRLLQAPHKLDDCTLQLSHNGAYLDLEATLAEQRDELEGFQDDAGRGKKHSIILRTQLSVRVHACIEKLYNSSGRDLRRALFSLKQIFQDDKDLVHEFVVAEGLTCLIKVGAEADQNYQNYILRALGQIMLYVDGMNGVINRNETIQWLYTLIGSKFRLVVKTALKLLLVFVEYSESNAPLLIQAVTAVDTKRGVKPWSNIMEILEEKDGVDTELLVYAMTLVNKTLSGLPDQDTFYDVVDCLEELGIAAVSQRHLNKKGTDLDLVEQLNIYEVALRHEDGDETTEPPPSGCRDRRRASVCSSGGGEHRGLDRRRSRRHSVQSIKSTLSAPTSPCSQSAPSFKPNQVRDLREKEEEEEEEQPITEPSSEEEREDDASCQGKDSKVGAASGQSPTGRDAAPKSSALPAVSNASSQGKPLLVGTAGGTTWHSGSSGSEATPSALLSPPASAARPSSATPGSLKVSPTIDKLPYVPHSPFHLFSYDFEDSSLSTKEKEAESQKENSSSDSFSLSTYSASEPYHFRSFSSNRYSNFGNNSYHSSRPSSGSSVPTTPTSSVSPPQEARLERSSPSGLLTSSFRQHQESLAAERERRRQEREERLQRIEREERNKFSRDYLDKREEQRQAREERYKYLEQLAAEEHEKELRSRSVSRGRADLSLDLTSPAAPACLAPLSHSPSSSDSQEALTVSASSPGTPHHPQASAGDPEPESEAEPEAEAGAGQVADEAGQDIASAHEGAETEVEQALEQEPEERASLSEKERQNEGVNERDNCSASSVSSSSSTLEREEKEDKLSRDRTTGLWPAGVQDAGVNGQCGDILTNKRFMLDMLYAHNRKSPDDEEKGDGEAGRTQQEAEAVASLATRISTLQANSQTQDESVRRVDVGCLDNRGSVKAFAEKFNSGDLGRGSISPDAEPNDKVPETAPVQPKTESDYIWDQLMANPRELRIQDMDFTDLGEEDDIDVLDVDLGHREAPGPPPPPPPTFLGLPPPPPPPLLDSIPPPPVPGNLLVPPPPVFNAPQGLGWSQVPRGQPTFTKKKKTIRLFWNEVRPFDWPCKNNRRCREFLWSKLEPIKVDTSRLEHLFESKSKELSVSKKTAADGKRQEIIVLDSKRSNAINIGLTVLPPPRTIKIAILNFDEYALNKEGIEKILTMIPTDEEKQKIQEAQLANPEIPLGSAEQFLLTLSSISELSARLHLWAFKMDYETTEKEVAEPLLDLKEGIDQLENNKTLGFILSTLLAIGNFLNGTNAKAFELSYLEKVPEVKDTVHKQSLLHHVCTMVVENFPDSSDLYSEIGAITRSAKVDFDQLQDNLCQMERRCKASWDHLKAIAKHEMKPVLKQRMSEFLKDCAERIIILKIVHRRIINRFHSFLLFMGHPPYAIREVNINKFCRIISEFALEYRTTRERVLQQKQKRANHRERNKTRGKMITDTDEEEEVESGKFSGSSPAPPSQPQGLSYAEDAAEHENMKAVLKTSSPSVEDATPALGVRTRSRASRGSTSSWTMGTDDSPNVTDDAADEIMDRIVKSATQVPSQRVVPRERKRSRANRKSLRRTLKSGLTPEEARALGLVGTSELQL

SEQ ID NO: 5416 - protein, 528 aa, Homo Sapiens
RLFWNEVRPFDWPCKNNRRCREFLWSKLEPIKVDTSRLEHLFESKSKELSVSKKTAADGKRQEIIVLDSKRSNAINIGLTVLPPPRTIKIAILNFDEYALNKEGIEKILTMIPTDEEKQKIQEAQLANPEIPLGSAEQFLLTLSSISELSARLHLWAFKMDYETTEKEVAEPLLDLKEGIDQLENNKTLGFILSTLLAIGNFLNGTNAKAFELSYLEKVPEVKDTVHKQSLLHHVCTMVVENFPDSSDLYSEIGAITRSAKVDFDQLQDNLCQMERRCKASWDHLKAIAKHEMKPVLKQRMSEFLKDCAERIIILKIVHRRIINRFHSFLLFMGHPPYAIREVNINKFCRIISEFALEYRTTRERVLQQKQKRANHRERNKTRGKMITDSGKFSGSSPAPPSQPQGLSYAEDAAEHENMKAVLKTSSPSVEDATPALGVRTRSRASRGSTSSWTMGTDDSPNVTDDAADEIMDRIVKSATQVPSQRVVPRERKRSRANRKSLRRTLKSGLTPEEARALGLVGTSELQL

SEQ ID NO: 5417 - protein, 375 aa, Homo Sapiens
  misc_feature (1)..(1): Xaa can be any naturally occurring amino acid
XAINIGLTVLPPPRTIKIAILNFDEYALNKEGIEKILTMIPTDEEKQKIQEAQLANPEIPLGSAEQFLLTLSSISELSARLHLWAFKMDYETTEKEVAEPLLDLKEGIDQLENNKTLGFILSTLLAIGNFLNGTNAKAFELSYLEKVPEVKDTVHKQSLLHHVCTMVVENFPDSSDLYSEIGAITRSAKVDFDQLQDNLCQMERRCKASWDHLKAIAKHEMKPVLKQRMSEFLKDCAERIIILKIVHRRIINRFHSFLLFMGHPPYAIREVNINKFCRIISEFALEYRTTRERVLQQKQKRANHRERNKTRGKMITDDPLVPGLWELMTRPMSQMMQLMRSWTASSSQPPKCPVSEWCRGRGNDPGPTGNLCEEP

SEQ ID NO: 5418 - protein, 1200 aa, Homo Sapiens
  misc_feature (1)..(1): Xaa can be any naturally occurring amino acid
XFRLVVKTALKLLLVFVEYSESNAPLLIQAVTAVDTKRGVKPWSNIMEILEEKDGVDTELLVYAMTLVNKTLSGLPDQDTFYDVVDCLEELGIAAVSQRHLNKKGTDLDLVEQLNIYEVALRHEDGDETTEPPPSGCRDRRRASVCSSGGGEHRGLDRRRSRRHSVQSIKSTLSAPTSPCSQSAPSFKPNQVRDLREKSSPSGLLTSSFRQHQESLAAERERRRQEREERLQRIEREERNKFSRDYLDKREEQRQAREERYKYLEQLAAEEHEKELRSRSVSRGRADLSLDLTSPAAPACLAPLSHSPSSSDSQEALTVSASSPGTPHHPQASAGDPEPESEAEPEAEAGAGQVADEAGQDIASAHEGAETEVEQALEQEPEERASLSEKERQNEGVNERDNCSASSVSSSSSTLEREEKEDKLSRDRTTGLWPAGVQDAGVNGQCGDILTNKRFMLDMLYAHNRKSPDDEEKGDGEAGRTQQEAEAVASLATRISTLQANSQTQDESVRRVDVGCLDNRGSVKAFAEKFNSGDLGRGSISPDAEPNDKVPETAPVQPKTESDYIWDQLMANPRELRIQDMDFTDLGEEDDIDVLDVDLGHREAPGPPPPPPPTFLGLPPPPPPPLLDSIPPPPVPGNLLVPPPPVFNAPQGLGWSQVPRGQPTFTKKKKTIRLFWNEVRPFDWPCKNNRRCREFLWSKLEPIKVDTSRLEHLFESKSKELSVSKKTAADGKRQEIIVLDSKRSNAINIGLTVLPPPRTIKIAILNFDEYALNKEGIEKILTMIPTDEEKQKIQEAQLANPEIPLGSAEQFLLTLSSISELSARLHLWAFKMDYETTEKEVAEPLLDLKEGIDQLENNKTLGFILSTLLAIGNFLNGTNAKAFELSYLEKVPEVKDTVHKQSLLHHVCTMVVENFPDSSDLYSEIGAITRSAKVDFDQLQDNLCQMERRCKASWDHLKAIAKHEMKPVLKQRMSEFLKDCAERIIILKIVHRRIINRFHSFLLFMGHPPYAIREVNINKFCRIISEFALEYRTTRERVLQQKQKRANHRERNKTRGKMITDSGKFSGSSPAPPSQPQGLSYAEDAAEHENMKAVLKTSSPSVEDATPALGVRTRSRASRGSTSSWTMGTDDSPNVTDDAADEIMDRIVKSATQVPSQRVVPRERKRSRANRKSLRRTLKSGLTPEEARALGLVGTSELQL

SEQ ID NO: 5419 - protein, 211 aa, Homo Sapiens
MVFLKFFCMSFFCHLCQGYFDGPLYPEMSNGTLHHYFVPDGDYEENDDPEKCQLLFRVSDHRRCSQGEGSQVGSLLSLTLREEFTVLGRQVEDAGRVLEGISKSISYDLDGEESYGKYLRRESHQIGDAYSNSDKSLTELESKFKQGQEQDSRQESRLNEDFLGMLVHTRSLLKETLDISVGLRDKYELLALTIRSHGTRLGRLKNDYLKV

SEQ ID NO: 5420 - protein, 458 aa, Homo Sapiens
MMLIPMASVMAVTEPKWVSVWSRFLWVTLLSMVLGSLLALLLPLGAVEEQCLAVLKGLYLLRSKPDRAQHAATKCTSPSTELSITSRGATLLVAKTKASPAGKLEARAALNQALEMKRQGKREKAQKLFMHALKMDPDFVDALTEFGIFSEEDKDIIQADYLYTRALTISPYHEKALVNRDRTLPLVEEIDQRYFSIIDSKVKKVMSIPKGNSALRRVMEETYYHHIYHTVAIEGNTLTLSEIRHILETRYAVPGKSLEEQNEVIGMHAAMKYINTTLVSRIGSVTISDVLEIHRRVLGYVDPVEAGRFRTTQVLVGHHIPPHPQDVEKQMQEFVQWLNSEEAMNLHPVEFAALAHYKLVYIHPFIDGNGRTSRLLMNLILMQAGYPPITIRKEQRSDYYHVLEAANEGDVRPFIRFIAKCTETTLDTLLFATTEYSVALPEAQPNHSGFKETLPVKP

SEQ ID NO: 5421 - protein, 180 aa, Homo Sapiens
MMLIPMASVMAVTEPKWVSVWSRFLWVTLLSMVLGSLLALLLPLGAVEEQCLAVLKGLYLLRSKPDRAQHAATKCTSPSTELSITSRGATLLVAKTKASPESRRLGSQGGASQNTREWLWGHTDSDCIPPHGWGNRVVPGMLSTHDAAATSSSRPGTQAGHHGFLRRPAQGTAPRMSSAP

SEQ ID NO: 5422 - protein, 139 aa, Homo Sapiens
MMLIPMASVMAVTEPKWVSVWSRFLWVTLLSMVLGSLLALLLPLGAVEEQCLAVLKGLYLLRSKPDRAQHAATKCTSPSTELSITSRGATLLVAKTKASPGKTDWPSSSMLVNWIDRHRMCHVLYVGHRGIVNKSALSS

SEQ ID NO: 5423 - protein, 56 aa, Homo Sapiens
  misc_feature (1)..(1): Xaa can be any naturally occurring amino acid
XCLAVLKGLYLLRSKPDRAQHAATKCTSPSTELSITSRGATLLVAKTKASPGKCCT

SEQ ID NO: 5424 - protein, 437 aa, Homo Sapiens
MGRRMRGAAATAGLWLLALGSLLALWGGLLPPRTELPASRPPEDRLPRRPARSGGPAPAPRFPLPPPLAWDARGGSLKTFRALLTLAAGADGPPRQSRSEPRWHVSARQPRPEESAAVHGGVFWSRGLEEQVPPGFSEAQAAAWLEAARGARMVALERGGCGRSSNRLARFADGTRACVRYGINPEQIQGEALSYYLARLLGLQRHVPPLALARVEARGAQWAQVQEELRAAHWTEGSVVSLTRWLPNLTDVVVPAPWRSEDGRLRPLRDAGGELANLSQAELVDLVQWTDLILFDYLTANFDRLVSNLFSLQWDPRVMQRATSNLHRGPGGALVFLDNEAGLVHGYRVAGMWDKYNEPLLQSVCVFRERTARRVLELHRGQDAAARLLRLYRRHEPRFPELAALADPHAQLLQRRLDFLAKHILHCKAKYGRRSGT

SEQ ID NO: 5425 - protein, 147 aa, Homo Sapiens
MFPAGPPSHSLLRLPLLQLLLLVVQAVGRGLGRASPAGGPLEDVVIERYHIPRACPREVQMGDFVRYHYNGTFEDGKKFDSSGAHSTGCHPLLRCGSAGCVEQGRHRAGEHIAAPAPLPPHGPGRRLCPLPLQWHPAGRHLLRHQLQ

SEQ ID NO: 5426 - protein, 171 aa, Homo Sapiens
MFPAGPPSHSLLRLPLLQLLLLVVQAVGRGLGRASPAGGPLEDVVIERYHIPRACPREVQMGDFVRYHYNGTFEDGKKFDSSYDRNTLVAIVVGVGRLITGMDRGLMGMCVNERRRLIVPPHLGYGSIGLAGLIPPDATLYFDVVLLDVWNKEDTVQVSTLLRPPHCPRMV

SEQ ID NO: 5427 - protein, 582 aa, Homo Sapiens
MFPAGPPSHSLLRLPLLQLLLLVVQAVGRGLGRASPAGGPLEDVVIERYHIPRACPREVQMGDFVRYHYNGTFEDGKKFDSSYDRNTLVAIVVGVGRLITGMDRGLMGMCVNERRRLIVPPHLGYGSIGLAGLIPPDATLYFDVVLLDVWNKEDTVQVSTLLRPPHCPRMVQDGDFVRYHYNGTLLDGTSFDTSYSKGGTYDTYVGSGWLIKGMDQGLLGMCPGERRKIIIPPFLAYGEKGYGTVIPPQASLVFHVLLIDVHNPKDAVQLETLELPPGCVRRAGAGDFMRYHYNGSLMDGTLFDSSYSRNHTYNTYIGQGYIIPGMDQGLQGACMGERRRITIPPHLAYGENGTGDKIPGSAVLIFNVHVIDFHNPADVVEIRTLSRPSETCNETTKLGDFVRYHYNCSLLDGTQLFTSHDYGAPQEATLGANKVIEGLDTGLQGMCVGERRQLIVPPHLAHGESGARGVPGSAVLLFEVELVSREDGLPTGYLFVWHKDPPANLFEDMDLNKDGEVPPEEFSTFIKAQVSEGKGRLMPGQDPEKTIGDMFQNQDRNQDGKITVDELKLKSDEDEERVHEEL

SEQ ID NO: 5428 - protein, 81 aa, Homo Sapiens
MGDFVRYHYNGTFEDGKKFDSSYDRNTLVAIVVGVGRLITGMDRGLMGMCVNERRRLIVPPHLGYGSIGLAGLIPPDATLY

SEQ ID NO: 5429 - protein, 172 aa, Homo Sapiens
MGDFVRYHYNGTFEDGKKFDSSYDRNTLVAIVVGVGRLITGMDRGLMGMCVNERRRLIVPPHLGYGSIGLAGLIPPDATLYFDVVLLDVWNKEDTVQVSTLLRPPHCPRMVQDGDFVRYHYNGTLLDGTSFDTSYSKGGTYDTYVGSGWLIKGMDQGLLGMCPGERRKIIIP

SEQ ID NO: 5430 - protein, 386 aa, Homo Sapiens
  misc_feature (1)..(1): Xaa can be any naturally occurring amino acid
XIDVHNPKDAVQLETLELPPGCVRRAGAGDFMRYHYNGSLMDGTLFDSSYSRNHTYNTYIGQGYIIPGMDQGLQGACMGERRRITIPPHLAYGENGTDSIGFLQGSAPLRPFRSGEGQPSLGREGGYGKTEPAYPQDPAVLGASVSSPVKWASHADPQGDKIPGSAVLIFNVHVIDFHNPADVVEIRTLSRPSETCNETTKLGDFVRYHYNCSLLDGTQLFTSHDYGAPQEATLGANKVIEGLDTGLQGMCVGERRQLIVPPHLAHGESGARGVPGSAVLLFEVELVSREDGLPTGYLFVWHKDPPANLFEDMDLNKDGEVPPEEFSTFIKAQVSEGKGRLMPGQDPEKTIGDMFQNQDRNQDGKITVDELKLKSDEDEERVHEEL

SEQ ID NO: 5431 - protein, 99 aa, Homo Sapiens
MCVGEKRRAIIPSHLAYGKRGFPPSVPADAVVQYDVELIALIRANYWLKLVKGILPLVGMAMVPALLGLIGYHLYRKANRPKVSKKKLKEEKRNKSKKK

SEQ ID NO: 5432 - protein, 92 aa, Homo Sapiens
MTLRPSLLPLHLLLLLLLSAAVCRAEAGLETESPVRTLQVETLGRERDLWKSIRDPCSPIVGGAPRTMCRARCFWRHASHTLHGKLGRWTYY

SEQ ID NO: 5433 - protein, 72 aa, Homo Sapiens
MTLRPSLLPLHLLLLLLLSAAVCRAEAGLETESPVRTLQVETLSDRRWSPQNHVPSPLLLETRFTYTTREAW

SEQ ID NO: 5434 - protein, 201 aa, Homo Sapiens
MTLRPSLLPLHLLLLLLLSAAVCRAEAGLETESPVRTLQVETLVEPPEPCAEPAAFGDTLHIHYTGSLVDGRIIDTSLTRDPLVIELGQKQVIPGLEQSLLDMCVGEKRRAIIPSHLAYGKRGFPPSVPADAVVQYDVELIALIRANYWLKLVKGILPLVGMAMVPALLGLIGYHLYRKANRPKVSKKKLKEEKRNKSKKK

SEQ ID NO: 5435 - protein, 182 aa, Homo Sapiens
MTLRPSLLPLHLLLLLLLSAAVCRAEAGLETESPVRTLQVETLVEPPEPCAEPAAFGDTLHIHYTGSLVDGRIIDTSLTRDPLVIELGQKQVIPGLEQSLLDMCVGEKRRAIIPSHLAYGKRGFPPSVPDGVSLLLPRLECNSAIFTHHNLRHPGSSNSPVSASRVAGITGMRHHDRLILYF

SEQ ID NO: 5436 - protein, 146 aa, Homo Sapiens
MTLRPSLLPLHLLLLLLLSAAVCRAEAGLETESPVRTLQVETLVEPPEPCAEPAAFGDTLHIHYTGSLVDGRIIDTSLTRDPLVIELGQKQVIPGLEQSLLDMCVGEKRRAIIPSHLAYGKRGFPPSVPGTKDNLMRPPGMTSSSQ

SEQ ID NO: 5437 - protein, 63 aa, Homo Sapiens
SLTRDPLVIELGQKQVIPGLEQSLLDMCVGWKNSCFGCEDSGGFAEGASAGLRLLAYLSCLWL

SEQ ID NO: 5438 - protein, 66 aa, Homo Sapiens
MRLFLWNAVLTLFVTSLIGALIPEPEVKIEVLQKPFICHRKTKGGDLMLVHYEGYLEKDGSLFHST

SEQ ID NO: 5439 - protein, 211 aa, Homo Sapiens
MRLFLWNAVLTLFVTSLIGALIPEPEVKIEVLQKPFICHRKTKGGDLMLVHYEGYLEKDGSLFHSTHKHNNGQPIWFTLGILEALKGWDQGLKGMCVGEKRKLIIPPALGYGKEGKGKIPPESTLIFNIDLLEIRNGPRSHESFQEMDLNDDWKLSKDEVKAYLKKEFEKHGAVVNESHHDALVEDIFDKEDEDKDGFISAREFTYKHDEL

SEQ ID NO: 5440 - protein, 89 aa, Homo Sapiens
  misc_feature (1)..(1): Xaa can be any naturally occurring amino acid
XVLQKPFICHRKTKGGDLMLVHYEGYLEKDGSLFHSTHKHNNGQPIWFTLGILEALKGWDQGLKGMCVGEKRKLIIPPALGYGKEGKVF

SEQ ID NO: 5441 - protein, 102 aa, Homo Sapiens
MRLSWFRVLTVLSICLSAVATATGAEGKRKLQIGVKKRVDHCPIKSRKGDVLHMHYTGKLEDGTEFDSSLPQNQPFVFSLGTGQVIKGWDQGLLGMCEGEKR

SEQ ID NO: 5442 - protein, 142 aa, Homo Sapiens
MRLSWFRVLTVLSICLSAVATATGAEGKRKLQIGVKKRVDHCPIKSRKGDVLHMHYTGKLEDGTEFDSSLPQNQPFVFSLGTGQVIKGWDQGLLGMCEGEKRKLVIPSELGYGERGAPPKIPGGATLVFEVELLKIERRTEL

SEQ ID NO: 5443 - protein, 142 aa, Homo Sapiens; identical to SEQ ID NO: 5442

SEQ ID NO: 5444 - protein, 142 aa, Homo Sapiens; identical to SEQ ID NO: 5442

SEQ ID NO: 5445 - protein, 74 aa, Homo Sapiens
MPKTMHFLFRFIVFFYLWGLFTAQRQKKEESTEEVKIEVLHRPENCSKTSKKGDLLNAHYDGYLAKDGSKFYCR

SEQ ID NO: 5446 - protein, 86 aa, Homo Sapiens
MPKTMHFLFRFIVFFYLWGLFTAQRQKKEESTEEVKIEVLHRPENCSKTSKKGDLLNAHYDGYLAKDGSKFYCSRRQDSTGCYIDF

SEQ ID NO: 5447 - protein, 222 aa, Homo Sapiens
MPKTMHFLFRFIVFFYLWGLFTAQRQKKEESTEEVKIEVLHRPENCSKTSKKGDLLNAHYDGYLAKDGSKFYCSRTQNEGHPKWFVLGVGQVIKGLDIAMTDMCPGEKRKVVIPPSFAYGKEGYAEGKIPPDATLIFEIELYAVTKGPRSIETFKQIDMDNDRQLSKAEINLYLQREFEKDEKPRDKSYQDAVLEDIFKKNDHDGDGFISPKEYNVYQHDEL

SEQ ID NO: 5448 - protein, 221 aa, Homo Sapiens
MPKTMHFLFRFIVFFYLWGLFTAQRQKKEESTEEVKIEVLHRPENCSKTSKKGDLLNAHYDGYLAKDGSKFYCSRTQNEGHPKWFVLGVGQVIKGLDIAMTDMCPGEKRKVVIPPSFAYGKEGYEGKIPPDATLIFEIELYAVTKGPRSIETFKQIDMDNDRQLSKAEINLYLQREFEKDEKPRDKSYQDAVLEDIFKKNDHDGDGFISPKEYNVYQHDEL

SEQ ID NO: 5449 - protein, 127 aa, Homo Sapiens
MPKTMHFLFRFIVFFYLWGLFTAQRQKKEESTEEVKIEVLHRPENCSKTSKKGDLLNAHYDGYLAKDGSKFYCSRTQNEGHPKWFVLGVGQVIKGLDIAMTDMCPGEKRKVVIPPSFAYGKEGYGST

SEQ ID NO: 5450 - protein, 67 aa, Homo Sapiens
  misc_feature (1)..(1): Xaa can be any naturally occurring amino acid
XGYLAKDGSKFYCSRTQNEGHPKWFVLGVGQVIKGLDIAMTDMCPGEKRKVVIPPSFAYGKEGYGST

SEQ ID NO: 5451 - protein, 623 aa, Homo Sapiens
MAFRGWRPPPPPLLLLLLWVTGQAAPVAGLGSDAELQIERRFVPDECPRTVRSGDFVRYHYVGTFPDGQKFDSRYWDTAEDKADKSPCPQVRVGVNTSPSCRLKQKGVGIYWKDLQFLVRVQNHGLSYDRDSTFNVFVGKGQLITGMDQALVGMCVNERRFVKIPPKLAYGNEGVSGVIPPNSVLHFDVLLMDIWNSEDQVQIHTYFKPPSCPRTIQVSDFVRYHYNGTFLDGTLFDSSHNRMKTYDTYVGIGWLIPGMDKGLLGMCVGEKRIITIPPFLAYGEDGDGKDIPGQASLVFDVALLDLHNPKDSISIENKVVPENCERISQSGDFLRYHYNGTLLDGTLFDSSYSRNRTFDTYIGQGYVIPGMDEGLLGVCIGEKRRIVVPPHLGYGEEGRGNIPGSAVLVFDIHVIDFHNPSDSISITSHYKPPDCSVLSKKGDYLKYHYNASLLDGTLLDSTWNLGKTYNIVLGSGQVVLGMDMGLREMCVGEKRTVIIPPHLGYGEAGVDGEVPGSAVLVFDIELLELVAGLPEGYMFIWNGEVSPNLFEEIDKDGNGEVLLEEFSEYIHAQVASGKGKLAPGFDAELIVKNMFTNQDRNGDGKVTAEEFKLKDQEAKHDEL

SEQ ID NO: 5452 - protein, 570 aa, Homo Sapiens
MAFRGWRPPPPPLLLLLLWVTGQAAPVAGLGSDAELQIERRFVPDECPRTVRSGDFVRYHYVGTFPDGQKFDSSYDRDSTFNVFVGKGQLITGMDQALVGMCVNERRFVKIPPKLAYGNEGVSGVIPPNSVLHFDVLLMDIWNSEDQVQIHTYFKPPSCPRTIQVSDFVRYHYNGTFLDGTLFDSSHNRMKTYDTYVGIGWLIPGMDKGLLGMCVGEKRIITIPPFLAYGEDGDGKDIPGQASLVFDVALLDLHNPKDSISIENKVVPENCERISQSGDFLRYHYNGTLLDGTLFDSSYSRNRTFDTYIGQGYVIPGMDEGLLGVCIGEKRRIVVPPHLGYGEEGRGNIPGSAVLVFDIHVIDFHNPSDSISITSHYKPPDCSVLSKKGDYLKYHYNASLLDGTLLDSTWNLGKTYNIVLGSGQVVLGMDMGLREMCVGEKRTVIIPPHLGYGEAGVDGEVPGSAVLVFDIELLELVAGLPEGYMFIWNGEVSPNLFEEIDKDGNGEVLLEEFSEYIHAQVASGKGKLAPGFDAELIVKNMFTNQDRNGDGKVTAEEFKLKDQEAKHDEL

SEQ ID NO: 5453 - protein, 338 aa, Homo Sapiens
MAGKDIPGQASLVFDVALLDLHNPKDSISIENKVVPENCERISQSGDFLRYHYNGTLLDGTLFDSSYSRNRTFDTYIGQGYVIPGMDEGLLGVCIGEKRRIVVPPHLGYGEEGRGNIPGSAVLVFDIHVIDFHNPSDSISITSHYKPPDCSVLSKKGDYLKYHYNASLLDGTLLDSTWNLGKTYNIVLGSGQVVLGMDMGLREMCVGEKRTVIIPPHLGYGEAGVDGEVPGSAVLVFDIELLELVAGLPEGYMFIWNGEVSPNLFEEIDKDGNGEVLLEEFSEYIHAQVASGKGKLAPGFDAELIVKNMFTNQDRNGDGKVTAEEFKLKDQEAKHDEL

SEQ ID NO: 5454 - protein, 226 aa, Homo Sapiens [sequence omitted]

SEQ ID NO: 5455 - protein, 85 aa, Homo Sapiens
MLKRFTWTDSKPKASLKIDLRVTSKSKESGLSDVSRPSFCHSSCGHVSEGKRRFTYDHAELERKIACCSPPPDYNSVVLYSTPPI

SEQ ID NO: 5456 - protein, 85 aa, Homo Sapiens; identical to SEQ ID NO: 5455

SEQ ID NO: 5457 - protein, 361 aa, Homo Sapiens
MNSDLLVDSDGFYKEPITMEDLISYSFQVARGMEFLSSRKCIHRDLAARNILLSENNVVKICDFGLARDIYKNPDYVRKGDTRLPLKWMAPESIFDKIYSTKSDVWSYGVLLWEIFSLGGSPYPGVQMDEDFCSRLREGMRMRAPEYSTPEIYQIMLDCWHRDPKERPRFAELVEKLGDLLQANVQQDGKDYIPINAILTGNSGFTYSTPAFSEDFFKESISAPKFNSGSSDDVRYVNAFKFMSLERIKTFEELLPNATSMFDDYQGDSSTLLASPMLKRFTWTDSKPKASLKIDLRVTSKSKESGLSDVSRPSFCHSSCGHVSEGKRRFTYDHAELERKIACCSPPPDYNSVVLYSTPPI

SEQ ID NO: 5458 - protein, 433 aa, Homo Sapiens
MVIVEYCKYGNLSNYLKSKRDLFFLNKDAALHMEPKKEKMEPGLEQGKKPRLDSVTSSESFASSGFQEDKSLSDVEEEEDSDGFYKEPITMEDLISYSFQVARGMEFLSSRKCIHRDLAARNILLSENNVVKICDFGLARDIYKNPDYVRKGDTRLPLKWMAPESIFDKIYSTKSDVWSYGVLLWEIFSLGGSPYPGVQMDEDFCSRLREGMRMRAPEYSTPEIYQIMLDCWHRDPKERPRFAELVEKLGDLLQANVQQDGKDYIPINAILTGNSGFTYSTPAFSEDFFKESISAPKFNSGSSDDVRYVNAFKFMSLERIKTFEELLPNATSMFDDYQGDSSTLLASPMLKRFTWTDSKPKASLKIDLRVTSKSKESGLSDVSRPSFCHSSCGHVSEGKRRFTYDHAELERKIACCSPPPDYNSVVLYSTPPI

SEQ ID NO: 5459 - protein, 1338 aa, Homo Sapiens
MVSYWDTGVLLCALLSCLLLTGSSSGSKLKDPELSLKGTQHIMQAGQTLHLQCRGEAAHKWSLPEMVSKESERLSITKSACGRNGKQFCSTLTLNTAQANHTGFYSCKYLAVPTSKKKETESAIYIFISDTGRPFVEMYSEIPEIIHMTEGRELVIPCRVTSPNITVTLKKFPLDTLIPDGKRIIWDSRKGFIISNATYKEIGLLTCEATVNGHLYKTNYLTHRQTNTIIDVQISTPRPVKLLRGHTLVLNCTATTPLNTRVQMTWSYPDEKNKRASVRRRIDQSNSHANIFYSVLTIDKMQNKDKGLYTCRVRSGPSFKSVNTSVHIYDKAFITVKHRKQQVLETVAGKRSYRLSMKVKAFPSPEVVWLKDGLPATEKSARYLTRGYSLIIKDVTEEDAGNYTILLSIKQSNVFKNLTATLIVNVKPQIYEKAVSSFPDPALYPLGSRQILTCTAYGIPQPTIKWFWHPCNHNHSEARCDFCSNNEESFILDADSNMGNRIESITQRMAIIEGKNKMASTLVVADSRISGIYICIASNKVGTVGRNISFYITDVPNGFHVNLEKMPTEGEDLKLSCTVNKFLYRDVTWILLRTVNNRTMHYSISKQKMAITKEHSITLNLTIMNVSLQDSGTYACRARNVYTGEEILQKKEITIRDQEAPYLLRNLSDHTVAISSSTTLDCHANGVPEPQITWFKNNHKIQQEPGIILGPGSSTLFIERVTEEDEGVYHCKATNQKGSVESSAYLTVQGTSDKSNLELITLTCTCVAATLFWLLLTLFIRKMKRSSSEIKTDYLSIIMDPDEVPLDEQCERLPYDASKWEFARERLKLGKSLGRGAFGKVVQASAFGIKKSPTCRTVAVKMLKEGATASEYKALMTELKILTHIGHHLNVVNLLGACTKQGGPLMVIVEYCKYGNLSNYLKSKRDLFFLNKDAALHMEPKKEKMEPGLEQGKKPRLDSVTSSESFASSGFQEDKSLSDVEEEEDSDGFYKEPITMEDLISYSFQVARGMEFLSSRKCIHRDLAARNILLSENNVVKICDFGLARDIYKNPDYVRKGDTRLPLKWMAPESIFDKIYSTKSDVWSYGVLLWEIFSLGGSPYPGVQMDEDFCSRLREGMRMRAPEYSTPEIYQIMLDCWHRDPKERPRFAELVEKLGDLLQANVQQDGKDYIPINAILTGNSGFTYSTPAFSEDFFKESISAPKFNSGSSDDVRYVNAFKFMSLERIKTFEELLPNATSMFDDYQGDSSTLLASPMLKRFTWTDSKPKASLKIDLRVTSKSKESGLSDVSRPSFCHSSCGHVSEGKRRFTYDHAELERKIACCSPPPDYNSVVLYSTPPI

SEQ ID NO: 5460 - protein, 541 aa, Homo Sapiens
MVSYWDTGVLLCALLSCLLLTGSSSGSKLKDPELSLKGTQHIMQAGQTLHLQCRGEAAHKWSLPEMVSKESERLSITKSACGRNGKQFCSTLTLNTAQANHTGFYSCKYLAVPTSKKKETESAIYIFISDTGRPFVEMYSEIPEIIHMTEGRELVIPCRVTSPNITVTLKKFPLDTLIPDGKRIIWDSRKGFIISNATYKEIGLLTCEATVNGHLYKTNYLTHRQTNTIIDVQISTPRPVKLLRGHTLVLNCTATTPLNTRVQMTWSYPDEKNKRASVRRRIDQSNSHANIFYSVLTIDKMQNKDKGLYTCRVRSGPSFKSVNTSVHIYDKAFITVKHRKQQVLETVAGKRSYRLSMKVKAFPSPEVVWLKDGLPATEKSARYLTRGYSLIIKDVTEEDAGNYTILLSIKQSNVFKNLTATLIVNVKPQIYEKAVSSFPDPALYPLGSRQILTCTAYGIPQPTIKWFWHPCNHNHSEARCDFCSNNEESFILDADSNMGNRIESITQRMAIIEGKNKLPPANSSFMLPPTSFSSNYFHFLP

SEQ ID NO: 5461 - protein, 733 aa, Homo Sapiens
MVSYWDTGVLLCALLSCLLLTGSSSGSKLKDPELSLKGTQHIMQAGQTLHLQCRGEAAHKWSLPEMVSKESERLSITKSACGRNGKQFCSTLTLNTAQANHTGFYSCKYLAVPTSKKKETESAIYIFISDTGRPFVEMYSEIPEIIHMTEGRELVIPCRVTSPNITVTLKKFPLDTLIPDGKRIIWDSRKGFIISNATYKEIGLLTCEATVNGHLYKTNYLTHRQTNTIIDVQISTPRPVKLLRGHTLVLNCTATTPLNTRVQMTWSYPDEKNKRASVRRRIDQSNSHANIFYSVLTIDKMQNKDKGLYTCRVRSGPSFKSVNTSVHIYDKAFITVKHRKQQVLETVAGKRSYRLSMKVKAFPSPEVVWLKDGLPATEKSARYLTRGYSLIIKDVTEEDAGNYTILLSIKQSNVFKNLTATLIVNVKPQIYEKAVSSFPDPALYPLGSRQILTCTAYGIPQPTIKWFWHPCNHNHSEARCDFCSNNEESFILDADSNMGNRIESITQRMAIIEGKNKMASTLVVADSRISGIYICIASNKVGTVGRNISFYITDVPNGFHVNLEKMPTEGEDLKLSCTVNKFLYRDVTWILLRTVNNRTMHYSISKQKMAITKEHSITLNLTIMNVSLQDSGTYACRARNVYTGEEILQKKEITIRDQEAPYLLRNLSDHTVAISSSTTLDCHANGVPEPQITWFKNNHKIQQEPELYTSTSPSSSSSSPLSSSSSSSSSSSS

SEQ ID NO: 5462 - protein, 687 aa, Homo Sapiens
MVSYWDTGVLLCALLSCLLLTGSSSGSKLKDPELSLKGTQHIMQAGQTLHLQCRGEAAHKWSLPEMVSKESERLSITKSACGRNGKQFCSTLTLNTAQANHTGFYSCKYLAVPTSKKKETESAIYIFISDTGRPFVEMYSEIPEIIHMTEGRELVIPCRVTSPNITVTLKKFPLDTLIPDGKRIIWDSRKGFIISNATYKEIGLLTCEATVNGHLYKTNYLTHRQTNTIIDVQISTPRPVKLLRGHTLVLNCTATTPLNTRVQMTWSYPDEKNKRASVRRRIDQSNSHANIFYSVLTIDKMQNKDKGLYTCRVRSGPSFKSVNTSVHIYDKAFITVKHRKQQVLETVAGKRSYRLSMKVKAFPSPEVVWLKDGLPATEKSARYLTRGYSLIIKDVTEEDAGNYTILLSIKQSNVFKNLTATLIVNVKPQIYEKAVSSFPDPALYPLGSRQILTCTAYGIPQPTIKWFWHPCNHNHSEARCDFCSNNEESFILDADSNMGNRIESITQRMAIIEGKNKMASTLVVADSRISGIYICIASNKVGTVGRNISFYITDVPNGFHVNLEKMPTEGEDLKLSCTVNKFLYRDVTWILLRTVNNRTMHYSISKQKMAITKEHSITLNLTIMNVSLQDSGTYACRARNVYTGEEILQKKEITIRGEHCNKKAVFSRISKFKSTRNDCTTQSNVKH

SEQ ID NO: 5463 - protein, 665 aa, Homo Sapiens
MVSYWDTGVLLCALLSCLLLTGSSSGSKLKDPELSLKGTQHIMQAGQTLHLQCRGEAAHKWSLPEMVSKESERLSITKSACGRNGKQFCSTLTLNTAQANHTGFYSCKYLAVPTSKKKETESAIYIFISDTGRPFVEMYSEIPEIIHMTEGRELVIPCRVTSPNITVTLKKFPLDTLIPDGKRIIWDSRKGFIISNATYKEIGLLTCEATVNGHLYKTNYLTHRQTNTIIDVQISTPRPVKLLRGHTLVLNCTATTPLNTRVQMTWSYPDEKNKRASVRRRIDQSNSHANIFYSVLTIDKMQNKDKGLYTCRVRSGPSFKSVNTSVHIYDKAFITVKHRKQQVLETVAGKRSYRLSMKVKAFPSPEVVWLKDGLPATEKSARYLTRGYSLIIKDVTEEDAGNYTILLSIKQSNVFKNLTATLIVNVKPQIYEKAVSSFPDPALYPLGSRQILTCTAYGIPQPTIKWFWHPCNHNHSEARCDFCSNNEESFILDADSNMGNRIESITQRMAIIEGKNKMASTLVVADSRISGIYICIASNKVGTVGRNISFYITDVPNGFHVNLEKMPTEGEDLKLSCTVNKFLYRDVTWILLRTVNNRTMHYSISKQKMAITKEHSITLNLTIMNVSLQDSGTYACRARNVYTGEEILQKKEITIRGSEEMLLPK

SEQ ID NO: 5464 - protein, 1363 aa, Homo Sapiens
MQRGAALCLRLWLCLGLLDGLVSGYSMTPPTLNITEESHVIDTGDSLSISCRGQHPLEWAWPGAQEAPATGDKDSEDTGVVRDCEGTDARPYCKVLLLHEVHANDTGSYVCYYKYIKARIEGTTAASSYVFVRDFEQPFINKPDTLLVNRKDAMWVPCLVSIPGLNVTLRSQSSVLWPDGQEVVWDDRRGMLVSTPLLHDALYLQCETTWGDQDFLSNPFLVHITGNELYDIQLLPRKSLELLVGEKLVLNCTVWAEFNSGVTFDWDYPGKQAERGKWVPERRSQQTHTELSSILTIHNVSQHDLGSYVCKANNGIQRFRESTEVIVHENPFISVEWLKGPILEATAGDELVKLPVKLAAYPPPEFQWYKDGKALSGRHSPHALVLKEVTEASTGTYTLALWNSAAGLRRNISLELVVNVPPQIHEKEASSPSIYSRHSRQALTCTAYGVPLPLSIQWHWRPWTPCKMFAQRSLRRRQQQDLMPQCRDWRAVTTQDAVNPIESLDTWTEFVEGKNKTVSKLVIQNANVSAMYKCVVSNKVGQDERLIYFYVTTIPDGFTIESKPSEELLEGQPVLLSCQADSYKYEHLRWYRLNLSTLHDAHGNPLLLDCKNVHLFATPLAASLEEVAPGARHATLSLSIPRVAPEHEGHYVCEVQDRRSHDKHCHKKYLSVQALEAPRLTQNLTDLLVNVSDSLEMQCLVAGAHAPSIVWYKDERLLEEKSGVDLADSNQKLSIQRVREEDAGRYLCSVCNAKGCVNSSASVAVEGSEDKGSMEIVILVGTGVIAVFFWVLLLLIFCNMRRPAHADIKTGYLSIIMDPGEVPLEEQCEYLSYDASQWEFPRERLHLGRVLGYGAFGKVVEASAFGIHKGSSCDTVAVKMLKEGATASEHRALMSELKILIHIGNHLNVVNLLGACTKPQGPLMVIVEFCKYGNLSNFLRAKRDAFSPCAEKSPEQRGRFRAMVELARLDRRRPGSSDRVLFARFSKTEGGARRASPDQEAEDLWLSPLTMEDLVCYSFQVARGMEFLASRKCIHRDLAARNILLSESDVVKICDFGLARDIYKDPDYVRKGSARLPLKWMAPESIFDKVYTTQSDVWSFGVLLWEIFSLGASPYPGVQINEEFCQRLRDGTRMRAPELATPAIRRIMLNCWSGDPKARPAFSELVEILGDLLQGRGLQEEEEVCMAPRSSQSSEEGSFSQVSTMALHIAQADAEDSPPSLQRHSLAARYYNWVSFPGCLARGAETRGSSRMKTFEEFPMTPTTYKGSVDNQTDSGMVLASEEFEQIESRHRQESGFSCKGPGQNVAVTRAHPDSQGRRRRPERGARGGQVFYNSEYGELSEPSEEDHCSPSARVTFFTDNSY

SEQ ID NO: 5465 - protein, 1298 aa, Homo Sapiens
MQRGAALCLRLWLCLGLLDGLVSGYSMTPPTLNITEESHVIDTGDSLSISCRGQHPLEWAWPGAQEAPATGDKDSEDTGVVRDCEGTDARPYCKVLLLHEVHANDTGSYVCYYKYIKARIEGTTAASSYVFVRDFEQPFINKPDTLLVNRKDAMWVPCLVSIPGLNVTLRSQSSVLWPDGQEVVWDDRRGMLVSTPLLHDALYLQCETTWGDQDFLSNPFLVHITGNELYDIQLLPRKSLELLVGEKLVLNCTVWAEFNSGVTFDWDYPGKQAERGKWVPERRSQQTHTELSSILTIHNVSQHDLGSYVCKANNGIQRFRESTEVIVHENPFISVEWLKGPILEATAGDELVKLPVKLAAYPPPEFQWYKDGKALSGRHSPHALVLKEVTEASTGTYTLALWNSAAGLRRNISLELVVNVPPQIHEKEASSPSIYSRHSRQALTCTAYGVPLPLSIQWHWRPWTPCKMFAQRSLRRRQQQDLMPQCRDWRAVTTQDAVNPIESLDTWTEFVEGKNKTVSKLVIQNANVSAMYKCVVSNKVGQDERLIYFYVTTIPDGFTIESKPSEELLEGQPVLLSCQADSYKYEHLRWYRLNLSTLHDAHGNPLLLDCKNVHLFATPLAASLEEVAPGARHATLSLSIPRVAPEHEGHYVCEVQDRRSHDKHCHKKYLSVQALEAPRLTQNLTDLLVNVSDSLEMQCLVAGAHAPSIVWYKDERLLEEKSGVDLADSNQKLSIQRVREEDAGRYLCSVCNAKGCVNSSASVAVEGSEDKGSMEIVILVGTGVIAVFFWVLLLLIFCNMRRPAHADIKTGYLSIIMDPGEVPLEEQCEYLSYDASQWEFPRERLHLGRVLGYGAFGKVVEASAFGIHKGSSCDTVAVKMLKEGATASEHRALMSELKILIHIGNHLNVVNLLGACTKPQGPLMVIVEFCKYGNLSNFLRAKRDAFSPCAEKSPEQRGRFRAMVELARLDRRRPGSSDRVLFARFSKTEGGARRASPDQEAEDLWLSPLTMEDLVCYSFQVARGMEFLASRKCIHRDLAARNILLSESDVVKICDFGLARDIYKDPDYVRKGSARLPLKWMAPESIFDKVYTTQSDVWSFGVLLWEIFSLGASPYPGVQINEEFCQRLRDGTRMRAPELATPAIRRIMLNCWSGDPKARPAFSELVEILGDLLQGRGLQEEEEVCMAPRSSQSSEEGSFSQVSTMALHIAQADAEDSPPSLQRHSLAARYYNWVSFPGCLARGAETRGSSRMKTFEEFPMTPTTYKGSVDNQTDSGMVLASEEFEQIESRHRQESGFR

SEQ ID NO: 5466 - protein, 1306 aa, Homo Sapiens
MQRGAALCLRLWLCLGLLDGLVSGYSMTPPTLNITEESHVIDTGDSLSISCRGQHPLEWAWPGAQEAPATGDKDSEDTGVVRDCEGTDARPYCKVLLLHEVHANDTGSYVCYYKYIKARIEGTTAASSYVFVRDFEQPFINKPDTLLVNRKDAMWVPCLVSIPGLNVTLRSQSSVLWPDGQEVVWDDRRGMLVSTPLLHDALYLQCETTWGDQDFLSNPFLVHITGNELYDIQLLPRKSLELLVGEKLVLNCTVWAEFNSGVTFDWDYPGKQAERGKWVPERRSQQTHTELSSILTIHNVSQHDLGSYVCKANNGIQRFRESTEVIVHENPFISVEWLKGPILEATAGDELVKLPVKLAAYPPPEFQWYKDGKALSGRHSPHALVLKEVTEASTGTYTLALWNSAAGLRRNISLELVVNVPPQIHEKEASSPSIYSRHSRQALTCTAYGVPLPLSIQWHWRPWTPCKMFAQRSLRRRQQQDLMPQCRDWRAVTTQDAVNPIESLDTWTEFVEGKNKTVSKLVIQNANVSAMYKCVVSNKVGQDERLIYFYVTTIPDGFTIESKPSEELLEGQPVLLSCQADSYKYEHLRWYRLNLSTLHDAHGNPLLLDCKNVHLFATPLAASLEEVAPGARHATLSLSIPRVAPEHEGHYVCEVQDRRSHDKHCHKKYLSVQALEAPRLTQNLTDLLVNVSDSLEMQCLVAGAHAPSIVWYKDERLLEEKSGVDLADSNQKLSIQRVREEDAGRYLCSVCNAKGCVNSSASVAVEGSEDKGSMEIVILVGTGVIAVFFWVLLLLIFCNMRRPAHADIKTGYLSIIMDPGEVPLEEQCEYLSYDASQWEFPRERLHLGRVLGYGAFGKVVEASAFGIHKGSSCDTVAVKMLKEGATASEHRALMSELKILIHIGNHLNVVNLLGACTKPQGPLMVIVEFCKYGNLSNFLRAKRDAFSPCAEKSPEQRGRFRAMVELARLDRRRPGSSDRVLFARFSKTEGGARRASPDQEAEDLWLSPLTMEDLVCYSFQVARGMEFLASRKCIHRDLAARNILLSESDVVKICDFGLARDIYKDPDYVRKGSARLPLKWMAPESIFDKVYTTQSDVWSFGVLLWEIFSLGASPYPGVQINEEFCQRLRDGTRMRAPELATPAIRRIMLNCWSGDPKARPAFSELVEILGDLLQGRGLQEEEEVCMAPRSSQSSEEGSFSQVSTMALHIAQADAEDSPPSLQRHSLAARYYNWVSFPGCLARGAETRGSSRMKTFEEFPMTPTTYKGSVDNQTDSGMVLASEEFEQIESRHRQESGFRGTRRTRGA

SEQ ID NO: 5467 - protein, 295 aa, Homo Sapiens
MQRGAALCLRLWLCLGLLDGLVSGYSMTPPTLNITEESHVIDTGDSLSISCRGQHPLEWAWPGAQEAPATGDKDSEDTGVVRDCEGTDARPYCKVLLLHEVHANDTGSYVCYYKYIKARIEGTTAASSYVFVRDFEQPFINKPDTLLVNRKDAMWVPCLVSIPGLNVTLRSQSSVLWPDGQEVVWDDRRGMLVSTPLLHDALYLQCETTWGDQDFLSNPFLVHITGNELYDIQLLPRKSLELLVGEKLVLNCTVWAEFNSGVTFDWDYPGKQKIPSSASSGSKDPSWRPRQETSW

SEQ ID NO: 5468 - protein, 142 aa, Homo Sapiens
MVELARLDRRRPGSSDRVLFARFSKTEGGARRASPDQEAEDLWLSPLTMEDLVCYSFQVARGMEFLASRKCIHRDLAARNILLSESDVVKICDFGLARDIYKDPDYVRKGSARLPLKWMAPESIFDKVYTTQSDVWSFGVLL

SEQ ID NO: 5469 - protein, 126 aa, Homo Sapiens
MAKRVAIVGAGVSGLASIKCCLEEGLEPTCFERSDDLGGLWRFTEHVEEGRASLYKSVVSNSCKEMSCYSDFPFPEDYPNYVPNSQFLEYLKMYANHFDLLKHIQFKSGIQLTEQQLFPISCIRDS

SEQ ID NO: 5470 - protein, 532 aa, Homo Sapiens
MAKRVAIVGAGVSGLASIKCCLEEGLEPTCFERSDDLGGLWRFTEHVEEGRASLYKSVVSNSCKEMSCYSDFPFPEDYPNYVPNSQFLEYLKMYANHFDLLKHIQFKTKVCSVTKCSDSAVSGQWEVVTMHEEKQESAIFDAVMVCTGFLTNPYLPLDSFPGINAFKGQYFHSRQYKHPDIFKDKRVLVIGMGNSGTDIAVEASHLAEKVFLSTTGGGWVISRIFDSGYPWDMVFMTRFQNMLRNSLPTPIVTWLMERKINNWLNHANYGLIPEDRTQLKEFVLNDELPGRIITGKVFIRPSIKEVKENSVIFNNTSKEEPIDIIVFATGYTFAFPFLDESVVKVEDGQASLYKYIFPAHLQKPTLAIIGLIKPLGSMIPTGETQARWAVRVLKGVNKLPPPSVMIEEINARKENKPSWFGLCYCKALQSDYITYIDELLTYINAKPNLFSMLLTDPHLALTVFFGPCSPYQFRLTGPGKWEGARNAIMTQWDRTFKVIKARVVQESPSPFESFLKVFSFLALLVAIFLIFL

SEQ ID NO: 5471 - protein, 532 aa, Homo Sapiens; identical to SEQ ID NO: 5470

SEQ ID NO: 5472 - protein, 532 aa, Homo Sapiens; identical to SEQ ID NO: 5470

SEQ ID NO: 5473 - protein, 469 aa, Homo Sapiens
MAKRVAIVGAGVSGLASIKCCLEEGLEPTCFERSDDLGGLWRFTTKVCSVTKCSDSAVSGQWEVVTMHEEKQESAIFDAVMVCTGFLTNPYLPLDSFPGINAFKGQYFHSRQYKHPDIFKDKRVLVIGMGNSGTDIAVEASHLAEKVFLSTTGGGWVISRIFDSGYPWDMVFMTRFQNMLRNSLPTPIVTWLMERKINNWLNHANYGLIPEDRTQLKEFVLNDELPGRIITGKVFIRPSIKEVKENSVIFNNTSKEEPIDIIVFATGYTFAFPFLDESVVKVEDGQASLYKYIFPAHLQKPTLAIIGLIKPLGSMIPTGETQARWAVRVLKGVNKLPPPSVMIEEINARKENKPSWFGLCYCKALQSDYITYIDELLTYINAKPNLFSMLLTDPHLALTVFFGPCSPYQFRLTGPGKWEGARNAIMTQWDRTFKVIKARVVQESPSPFESFLKVFSFLALLVAIFLIFL

SEQ ID NO: 5474 - protein, 131 aa, Homo Sapiens
MAKKVAVIGAGVSGLISLKCCVDEGLEPTCFERTEDIGGVWRFKENVEDGRASIYQSVVTNTSKEMSCFSDFPMPEDFPNFLHNSKLLEYFRIFAKKFDLLKYIQFQTTVLSVRKCPDFSSSGQWKVVTQS

SEQ ID NO: 5475 - protein, 535 aa, Homo Sapiens [sequence omitted]

SEQ ID NO: 5476 - protein, 153 aa, Homo Sapiens
TQPREKTILSKRRCQKAKTKENVEDGRASIYQSVVTNTSKEMSCFSDFPMPEDFPNFLHNSKLLEYFRIFAKKFDLLKYIQFQTTVLSVRKCPDFSSSGQWKVVTQSNGKEQSAVFDAVMVCSGHHILPHIPLKSFPGFYQHQAWHLGHEPYL

SEQ ID NO: 5477 - protein, 218 aa, Homo Sapiens
MGKKVAIIGAGVSGLASIRSCLEEGLEPTCFEKSNDIGGLWKFSDHAEEGRASIYKSVFSNSSKEMMCFPDFPFPDDFPNFMHNSKIQEYIIAFAKEKNLLKYIQFKTFVSSVNKHPDFATTGQWDVTTERDGKKESAVFDAVMVCSGHHVYPNLPDYKEPGVFNGKRVLVVGLGNSGCDIATELSRTAEQVMISSRSGSWVMSRVWDNGYPWDMLLV

SEQ ID NO: 5478 - protein, 532 aa, Homo Sapiens
MGKKVAIIGAGVSGLASIRSCLEEGLEPTCFEKSNDIGGLWKFSDHAEEGRASIYKSVFSNSSKEMMCFPDFPFPDDFPNFMHNSKIQEYIIAFAKEKNLLKYIQFKTFVSSVNKHPDFATTGQWDVTTERDGKKESAVFDAVMVCSGHHVYPNLPKESFPGLNHFKGKCFHSRDYKEPGVFNGKRVLVVGLGNSGCDIATELSRTAEQVMISSRSGSWVMSRVWDNGYPWDMLLVTRFGTFLKNNLPTAISDWLYVKQMNARFKHENYGLMPLNGVLRKEPVFNDELPASILCGIVSVKPNVKEFTETSAIFEDGTIFEGIDCVIFATGYSFAYPFLDESIIKSRNNEIILFKGVFPPLLEKSTIAVIGFVQSLGAAIPTVDLQSRWAAQVIKGTCTLPSMEDMMNDINEKMEKKRKWFGKSETIQTDYIVYMDELSSFIGAKPNIPWLFLTDPKLAMEVYFGPCSPYQFRLVGPGQWPGARNAILTQWDRSLKPMQTRVVGRLQKPCFFFHWLKLFAIPILLIAVFLVLT

SEQ ID NO: 5479 - protein, 48 aa, Homo Sapiens
MGKKVAIIGAGVSGLASIRSCLEEGLEPTCFEKSNDIGGLWKFSRSHE

SEQ ID NO: 5480 - protein, 145 aa, Homo Sapiens
MTKKRIAVIGGGVSGLSSIKCCVEEGLEPVCFERTDDIGGLWRFQENPEEGRASIYKSVIINTSKEMMCFSDYPIPDHYPNFMHNAQVLEYFRMYAKEFDLLKYIRFKTTVCSVKKQPDFATSGQWEVVTESEGKKEMNVFDGVM

SEQ ID NO: 5481 - protein, 192 aa, Homo Sapiens
MTKKRIAVIGGGVSGLSSIKCCVEEGLEPVCFERTDDIGGLWRFQENPEEGRASIYKSVIINTSKEMMCFSDYPIPDHYPNFMHNAQVLEYFRMYAKEFDLLKYIRFKTTVCSVKKQPDFATSGQWEVVTESEGKKEMNVFDGVMVCTGHHTNAHLPLESFPGIEKFKGQYFHSRDYKNPEGFTGKRVIIIG

SEQ ID NO: 5482 - protein, 533 aa, Homo Sapiens
MTKKRIAVIGGGVSGLSSIKCCVEEGLEPVCFERTDDIGGLWRFQENPEEGRASIYKSVIINTSKEMMCFSDYPIPDHYPNFMHNAQVLEYFRMYAKEFDLLKYIRFKTTVCSVKKQPDFATSGQWEVVTESEGKKEMNVFDGVMVCTGHHTNAHLPLESFPGIEKFKGQYFHSRDYKNPEGFTGKRVIIIGIGNSGGDLAVEISQTAKQVFLSTRRGAWILNRVGDYGYPADVLFSSRLTHFIWKICGQSLANKYLEKKINQRFDHEMFGLKPKHRALSQHPTLNDDLPNRIISGLVKVKGNVKEFTETAAIFEDGSREDDIDAVIFATGYSFDFPFLEDSVKVVKNKISLYKKVFPPNLERPTLAIIGLIQPLGAIMPISELQGRWATQVFKGLKTLPSQSEMMAEISKAQEEIDKRYVESQRHTIQGDYIDTMEELADLVGVRPNLLSLAFTDPKLALHLLLGPCTPIHYRVQGPGKWDGARKAILTTDDRIRKPLMTRVVERSSSMTSTMTIGKFMLALAFFAIIIAYF

SEQ ID NO: 5483 - protein, 285 aa, Homo Sapiens
MTKKRIAVIGGGVSGLSSIKCCVEEGLEPVCFERTDDIGGLWRFQENPEEGRASIYKSVIINTSKEMMCFSDYPIPDHYPNFMHNAQVLEYFRMYAKEFDLLKYIRFKTTVCSVKKQPDFATSGQWEVVTESEGKKEMNVFDGVMVCTGHHTNAHLPLESFPGIEKFKGQYFHSRDYKNPEGFTGKRVIIIGIGNSGGDLAVEISQTAKQVFLSTRRGAWILNRVGDYGYPADVLFSSRLTHFIWKICGQSLANKYLEKKINQRFDHEMFGLKPKHRSKDIALTE

SEQ ID NO: 5484 - protein, 464 aa, Homo Sapiens
MTKKRIAVIGGGVSGLSSIKCCVEEGLEPVCFERTDDIGGLWRFQENPEEGRASIYKSVIINTSKEMMCFSDYPIPDHYPNFMHNAQVLEYFRMYAKEFDLLKYIRFKTTVCSVKKQPDFATSGQWEVVTESEGKKEMNVFDGVMVCTGHHTNAHLPLESFPGIEKFKGQYFHSRDYKNPEGFTGKRVIIIGIGNSGGDLAVEISQTAKQVFLSTRRGAWILNRVGDYGYPADVLFSSRLTHFIWKICGQSLANKYLEKKINQRFDHEMFGLKPKHRALSQHPTLNDDLPNRIISGLVKVKGNVKEFTETAAIFEDGSREDDIDAVIFATGYSFDFPFLEDSVKVVKNKISLYKKVFPPNLERPTLAIIGLIQPLGAIMPISELQGRWATQVFKGLKTLPSQSEMMAEISKAQEEIDKSLTMRKTSDKPKLKNILQIPDYLKTVKIINKESLRNCPGIKGPKET

SEQ ID NO: 5485 - protein, 278 aa, Homo Sapiens
MTKKRIAVIGGGVSGLSSIKCCVEEGLEPVCFERTDDIGGLWRFQENPEEGRASIYKSVIINTSKEMMCFSDYPIPDHYPNFMHNAQVLEYFRMYAKEFDLLKYIRFKTTVCSVKKQPDFATSGQWEVVTESEGKKEMNVFDGVMVCTGHHTNAHLPLESFPGIEKFKGQYFHSRDYKNPEGFTGKRVIIIGIGNSGGDLAVEISQTAKQVFLSTRRGAWILNRVGDYGYPADVLFSSRLTHFIWKICGQSLANKYLEKKINQRFDHEMFGLKPKHRL

SEQ ID NO: 5486 - protein, 464 aa, Homo Sapiens; identical to SEQ ID NO: 5484

SEQ ID NO: 5487 - protein, 376 aa, Homo Sapiens
MQWTSLLLLAGLFSLSQAQYEDDPHWWFHYLRSQQSTYYDPYDPYPYETYEPYPYGVDEGPAYTYGSPSPPDPRDCPQECDCPPNFPTAMYCDNRNLKYLPFVPSRMKYVYFQNNQITSIQEGVFDNATGLLWIALHGNQITSDKVGRKVFSKLRHLERLYLDHNNLTRMPGPLPRSLRELHLDHNQISRVPNNALEGLENLTALYLQHNEIQEVGSSMRGLRSLILLDLSYNHLRKVPDGLPSALEQLYMEHNNVYTVPDSYFRGAPKLLYVRLSHNSLTNNGLASNTFNSSSLLELDLSYNQLQKIPPVNTNLENLYLQGNRINEFSISSFCTVVDVVNFSKLQVLRLDGNEIKRSAMPADAPLCLRLASLIEI

SEQ ID NO: 5488 - protein, 1103 aa, Homo Sapiens
LRWTPLNSSTIIGYRITVVAAGEGIPIFEDFVDSSVGYYTVTGLEPGIDYDISVITLINGGESAPTTLTQQTAVPPPTDLRFTNIGPDTMRVTWAPPPSIDLTNFLVRYSPVKNEEDVAELSISPSDNAVVLTNLLPGTEYVVSVSSVYEQHESTPLRGRQKTGLDSPTGIDFSDITANSFTVHWIAPRATITGYRIRHHPEHFSGRPREDRVPHSRNSITLTNLTPGTEYVVSIVALNGREESPLLIGQQSTVSDVPRDLEVVAATPTSLLISWDAPAVTVRYYRITYGETGGNSPVQEFTVPGSKSTATISGLKPGVDYTITVYAVTGRGDSPASSKPISINYRTEIDKPSQMQVTDVQDNSISVKWLPSSSPVTGYRVTTTPKNGPGPTKTKTAGPDQTEMTIEGLQPTVEYVVSVYAQNPSGESQPLVQTAVTTIPAPTDLKFTQVTPTSLSAQWTPPNVQLTGYRVRVTPKEKTGPMKEINLAPDSSSVVVSGLMVATKYEVSVYALKDTLTSRPAQGVVTTLENVSPPRRARVTDATETTITISWRTKTETITGFQVDAVPANGQTPIQRTIKPDVRSYTITGLQPGTDYKIYLYTLNDNARSSPVVIDASTAIDAPSNLRFLATTPNSLLVSWQPPRARITGYIIKYEKPGSPPREVVPRPRPGVTEATITGLEPGTEYTIYVIALKNNQKSEPLIGRKKTDELPQLVTLPHPNLHGPEILDVPSTVQKTPFVTHPGYDTGNGIQLPGTSGQQPSVGQQMIFEEHGFRRTTPPTTATPIRHRPRPYPPNVGEEIQIGHIPREDVDYHLYPHGPGLNPNASTGQEALSQTTISWAPFQDTSEYIISCHPVGTDEEPLQFRVPGTSTSATLTGLTRGATYNVIVEALKDQQRHKVREEVVTVGNSVNEGLNQPTDDSCFDPYTVSHYAVGDEWERMSESGFKLLCQCLGFGSGHFRCDSSRWCHDNGVNYKIGEKWDRQGENGQMMSCTCLGNGKGEFKCDPHEATCYDDGKTYHVGEQWQKEYLGAICSCTCFGGQRGWRCDNCRRPGGEPSPEGTTGQSYNQYSQRYHQRTNTNVNCPIECFMPLDVQADREDSRE

SEQ ID NO: 5489 - protein, 2355 aa, Homo Sapiens
MLRGPGPGLLLLAVQCLGTAVPSTGASKSKRQAQQMVQPQSPVAVSQSKPGCYDNGKHYQINQQWERTYLGNALVCTCYGGSRGFNCESKPEAEETCFDKYTGNTYRVGDTYERPKDSMIWDCTCIGAGRGRISCTIANRCHEGGQSYKIGDTWRRPHETGGYMLECVCLGNGKGEWTCKPIAEKCFDHAAGTSYVVGETWEKPYQGWMMVDCTCLGEGSGRITCTSRNRCNDQDTRTSYRIGDTWSKKDNRGNLLQCICTGNGRGEWKCERHTSVQTTSSGSGPFTDVRAAVYQPQPHPQPPPYGHCVTDSGVVYSVGMQWLKTQGNKQMLCTCLGNGVSCQETAVTQTYGGNSNGEPCVLPFTYNGRTFYSCTTEGRQDGHLWCSTTSNYEQDQKYSFCTDHTVLVQTRGGNSNGALCHFPFLYNNHNYTDCTSEGRRDNMKWCGTTQNYDADQKFGFCPMAAHEEICTTNEGVMYRIGDQWDKQHDMGHMMRCTCVGNGRGEWTCIAYSQLRDQCIVDDITYNVNDTFHKRHEEGHMLNCTCFGQGRGRWKCDPVDQCQDSETGTFYQIGDSWEKYVHGVRYQCYCYGRGIGEWHCQPLQTYPSSSGPVEVFITETPSQPNSHPIQWNAPQPSHISKYILRWRPKNSVGRWKEATIPGHLNSYTIKGLKPGVVYEGQLISIQQYGHQEVTRFDFTTTSTSTPVTSNTVTGETTPFSPLVATSESVTEITASSFVVSWVSASDTVSGFRVEYELSEEGDEPQYLDLPSTATSVNIPDLLPGRKYIVNVYQISEDGEQSLILSTSQTTAPDAPPDTTVDQVDDTSIVVRWSRPQAPITGYRIVYSPSVEGSSTELNLPETANSVTLSDLQPGVQYNITIYAVEENQESTPVVIQQETTGTPRSDTVPSPRDLQFVEVTDVKVTIMWTPPESAVTGYRVDVIPVNLPGEHGQRLPISRNTFAEVTGLSPGVTYYFKVFAVSHGRESKPLTAQQTTKLDAPTNLQFVNETDSTVLVRWTPPRAQITGYRLTVGLTRRGQPRQYNVGPSVSKYPLRNLQPASEYTVSLVAIKGNQESPKATGVFTTLQPGSSIPPYNTEVTETTIVITWTPAPRIGFKLGVRPSQGGEAPREVTSDSGSIVVSGLTPGVEYVYTIQVLRDGQERDAPIVNKVVTPLSPPTNLHLEANPDTGVLTVSWERSTTPDITGYRITTTPTNGQQGNSLEEVVHADQSSCTFDNLSPGLEYNVSVYTVKDDKESVPISDTIIPAVPPPTDLRFTNIGPDTMRVTWAPPPSIDLTNFLVRYSPVKNEEDVAELSISPSDNAVVLTNLLPGTEYVVSVSSVYEQHESTPLRGRQKTGLDSPTGIDFSDITANSFTVHWIAPRATITGYRIRHHPEHFSGRPREDRVPHSRNSITLTNLTPGTEYVVSIVALNGREESPLLIGQQSTVSDVPRDLEVVAATPTSLLISWDAPAVTVRYYRITYGETGGNSPVQEFTVPGSKSTATISGLKPGVDYTITVYAVTGRGDSPASSKPISINYRTEIDKPSQMQVTDVQDNSISVKWLPSSSPVTGYRVTTTPKNGPGPTKTKTAGPDQTEMTIEGLQPTVEYVVSVYAQNPSGESQPLVQTAVTNIDRPKGLAFTDVDVDSIKIAWESPQGQVSRYRVTYSSPEDGIHELFPAPDGEEDTAELQGLRPGSEYTVSVVALHDDMESQPLIGTQSTAIPAPTDLKFTQVTPTSLSAQWTPPNVQLTGYRVRVTPKEKTGPMKEINLAPDSSSVVVSGLMVATKYEVSVYALKDTLTSRPAQGVVTTLENVSPPRRARVTDATETTITISWRTKTETITGFQVDAVPANGQTPIQRTIKPDVRSYTITGLQPGTDYKIYLYTLNDNARSSPVVIDASTAIDAPSNLRFLATTPNSLLVSWQPPRARITGYIIKYEKPGSPPREVVPRPRPGVTEATITGLEPGTEYTIYVIALKNNQKSEPLIGRKKTDELPQLVTLPHPNLHGPEILDVPSTVQKTPFVTHPGYDTGNGIQLPGTSGQQPSVGQQMIFEEHGFRRTTPPTTATPIRHRPRPYPPNVGQEALSQTTISWAPFQDTSEYIISCHPVGTDEEPLQFRVPGTSTSATLTGLTRGATYNVIVEALKDQQRHKVREEVVTVGNSVNEGLNQPTDDSCFDPYTVSHYAVGDEWERMSESGFKLLCQCLGFGSGHFRCDSSRWCHDNGVNYKIGEKWDRQGENGQMMSCTCLGNGKGEFKCDPHEATCYDDGKTYHVGEQWQKEYLGAICSCTCFGGQRGWRCDNCRRPGGEPSPEGTTGQSYNQYSQRYHQRTNTNVNCPIECFMPLDVQADREDSRE

SEQ ID NO: 5490 - protein, 2477 aa, Homo Sapiens
MLRGPGPGLLLLAVQCLGTAVPSTGASKSKRQAQQMVQPQSPVAVSQSKPGCYDNGKHYQINQQWERTYLGNALVCTCYGGSRGFNCESKPEAEETCFDKYTGNTYRVGDTYERPKDSMIWDCTCIGAGRGRISCTIANRCHEGGQSYKIGDTWRRPHETGGYMLECVCLGNGKGEWTCKPIAEKCFDHAAGTSYVVGETWEKPYQGWMMVDCTCLGEGSGRITCTSRNRCNDQDTRTSYRIGDTWSKKDNRGNLLQCICTGNGRGEWKCERHTSVQTTSSGSGPFTDVRAAVYQPQPHPQPPPYGHCVTDSGVVYSVGMQWLKTQGNKQMLCTCLGNGVSCQETAVTQTYGGNSNGEPCVLPFTYNGRTFYSCTTEGRQDGHLWCSTTSNYEQDQKYSFCTDHTVLVQTRGGNSNGALCHFPFLYNNHNYTDCTSEGRRDNMKWCGTTQNYDADQKFGFCPMAAHEEICTTNEGVMYRIGDQWDKQHDMGHMMRCTCVGNGRGEWTCIAYSQLRDQCIVDDITYNVNDTFHKRHEEGHMLNCTCFGQGRGRWKCDPVDQCQDSETGTFYQIGDSWEKYVHGVRYQCYCYGRGIGEWHCQPLQTYPSSSGPVEVFITETPSQPNSHPIQWNAPQPSHISKYILRWRPKNSVGRWKEATIPGHLNSYTIKGLKPGVVYEGQLISIQQYGHQEVTRFDFTTTSTSTPVTSNTVTGETTPFSPLVATSESVTEITASSFVVSWVSASDTVSGFRVEYELSEEGDEPQYLDLPSTATSVNIPDLLPGRKYIVNVYQISEDGEQSLILSTSQTTAPDAPPDTTVDQVDDTSIVVRWSRPQAPITGYRIVYSPSVEGSSTELNLPETANSVTLSDLQPGVQYNITIYAVEENQESTPVVIQQETTGTPRSDTVPSPRDLQFVEVTDVKVTIMWTPPESAVTGYRVDVIPVNLPGEHGQRLPISRNTFAEVTGLSPGVTYYFKVFAVSHGRESKPLTAQQTTKLDAPTNLQFVNETDSTVLVRWTPPRAQITGYRLTVGLTRRGQPRQYNVGPSVSKYPLRNLQPASEYTVSLVAIKGNQESPKATGVFTTLQPGSSIPPYNTEVTETTIVITWTPAPRIGFKLGVRPSQGGEAPREVTSDSGSIVVSGLTPGVEYVYTIQVLRDGQERDAPIVNKVVTPLSPPTNLHLEANPDTGVLTVSWERSTTPDITGYRITTTPTNGQQGNSLEEVVHADQSSCTFDNLSPGLEYNVSVYTVKDDKESVPISDTIIPEVPQLTDLSFVDITDSSIGLRWTPLNSSTIIGYRITVVAAGEGIPIFEDFVDSSVGYYTVTGLEPGIDYDISVITLINGGESAPTTLTQQTAVPPPTDLRFTNIGPDTMRVTWAPPPSIDLTNFLVRYSPVKNEEDVAELSISPSDNAVVLTNLLPGTEYVVSVSSVYEQHESTPLRGRQKTGLDSPTGIDFSDITANSFTVHWIAPRATITGYRIRHHPEHFSGRPREDRVPHSRNSITLTNLTPGTEYVVSIVALNGREESPLLIGQQSTVSDVPRDLEVVAATPTSLLISWDAPAVTVRYYRITYGETGGNSPVQEFTVPGSKSTATISGLKPGVDYTITVYAVTGRGDSPASSKPISINYRTEIDKPSQMQVTDVQDNSISVKWLPSSSPVTGYRVTTTPKNGPGPTKTKTAGPDQTEMTIEGLQPTVEYVVSVYAQNPSGESQPLVQTAVTNIDRPKGLAFTDVDVDSIKIAWESPQGQVSRYRVTYSSPEDGIHELFPAPDGEEDTAELQGLRPGSEYTVSVVALHDDMESQPLIGTQSTAIPAPTDLKFTQVTPTSLSAQWTPPNVQLTGYRVRVTPKEKTGPMKEINLAPDSSSVVVSGLMVATKYEVSVYALKDTLTSRPAQGVVTTLENVSPPRRARVTDATETTITISWRTKTETITGFQVDAVPANGQTPIQRTIKPDVRSYTITGLQPGTDYKIYLYTLNDNARSSPVVIDASTAIDAPSNLRFLATTPNSLLVSWQPPRARITGYIIKYEKPGSPPREVVPRPRPGVTEATITGLEPGTEYTIYVIALKNNQKSEPLIGRKKTDELPQLVTLPHPNLHGPEILDVPSTVQKTPFVTHPGYDTGNGIQLPGTSGQQPSVGQQMIFEEHGFRRTTPPTTATPIRHRPRPYPPNVGEEIQIGHIPREDVDYHLYPHGPGLNPNASTGQEALSQTTISWAPFQDTSEYIISCHPVGTDEEPLQFRVPGTSTSATLTGLTRGATYNVIVEALKDQQRHKVREEVVTVGNSVNEGLNQPTDDSCFDPYTVSHYAVGDEWERMSESGFKLLCQCLGFGSGHFRCDSSRWCHDNGVNYKIGEKWDRQGENGQMMSCTCLGNGKGEFKCDPHEATCYDDGKTYHVGEQWQKEYLGAICSCTCFGGQRGWRCDNCRRPGGEPSPEGTTGQSYNQYSQRYHQRTNTNVNCPIECFMPLDVQADREDSRE

SEQ ID NO: 5491 - protein, 2176 aa, Homo Sapiens
MLRGPGPGLLLLAVQCLGTAVPSTGASKSKRQAQQMVQPQSPVAVSQSKPGCYDNGKHYQINQQWERTYLGNALVCTCYGGSRGFNCESKPEAEETCFDKYTGNTYRVGDTYERPKDSMIWDCTCIGAGRGRISCTIANRCHEGGQSYKIGDTWRRPHETGGYMLECVCLGNGKGEWTCKPIAEKCFDHAAGTSYVVGETWEKPYQGWMMVDCTCLGEGSGRITCTSRNRCNDQDTRTSYRIGDTWSKKDNRGNLLQCICTGNGRGEWKCERHTSVQTTSSGSGPFTDVRAAVYQPQPHPQPPPYGHCVTDSGVVYSVGMQWLKTQGNKQMLCTCLGNGVSCQETAVTQTYGGNSNGEPCVLPFTYNGRTFYSCTTEGRQDGHLWCSTTSNYEQDQKYSFCTDHTVLVQTRGGNSNGALCHFPFLYNNHNYTDCTSEGRRDNMKWCGTTQNYDADQKFGFCPMAAHEEICTTNEGVMYRIGDQWDKQHDMGHMMRCTCVGNGRGEWTCIAYSQLRDQCIVDDITYNVNDTFHKRHEEGHMLNCTCFGQGRGRWKCDPVDQCQDSETGTFYQIGDSWEKYVHGVRYQCYCYGRGIGEWHCQPLQTYPSSSGPVEVFITETPSQPNSHPIQWNAPQPSHISKYILRWRPKNSVGRWKEATIPGHLNSYTIKGLKPGVVYEGQLISIQQYGHQEVTRFDFTTTSTSTPVTSNTVTGETTPFSPLVATSESVTEITASSFVVSWVSASDTVSGFRVEYELSEEGDEPQYLDLPSTATSVNIPDLLPGRKYIVNVYQISEDGEQSLILSTSQTTAPDAPPDTTVDQVDDTSIVVRWSRPQAPITGYRIVYSPSVEGSSTELNLPETANSVTLSDLQPGVQYNITIYAVEENQESTPVVIQQETTGTPRSDTVPSPRDLQFVEVTDVKVTIMWTPPESAVTGYRVDVIPVNLPGEHGQRLPISRNTFAEVTGLSPGVTYYFKVFAVSHGRESKPLTAQQTTKLDAPTNLQFVNETDSTVLVRWTPPRAQITGYRLTVGLTRRGQPRQYNVGPSVSKYPLRNLQPASEYTVSLVAIKGNQESPKATGVFTTLQPGSSIPPYNTEVTETTIVITWTPAPRIGFKLGVRPSQGGEAPREVTSDSGSIVVSGLTPGVEYVYTIQVLRDGQERDAPIVNKVVTPLSPPTNLHLEANPDTGVLTVSWERSTTPDITGYRITTTPTNGQQGNSLEEVVHADQSSCTFDNLSPGLEYNVSVYTVKDDKESVPISDTIIPAVPPPTDLRFTNIGPDTMRVTWAPPPSIDLTNFLVRYSPVKNEEDVAELSISPSDNAVVLTNLLPGTEYVVSVSSVYEQHESTPLRGRQKTGLDSPTGIDFSDITANSFTVHWIAPRATITGYRIRHHPEHFSGRPREDRVPHSRNSITLTNLTPGTEYVVSIVALNGREESPLLIGQQSTVSDVPRDLEVVAATPTSLLISWDAPAVTVRYYRITYGETGGNSPVQEFTVPGSKSTATISGLKPGVDYTITVYAVTGRGDSPASSKPISINYRTEIDKPSQMQVTDVQDNSISVKWLPSSSPVTGYRVTTTPKNGPGPTKTKTAGPDQTEMTIEGLQPTVEYVVSVYAQNPSGESQPLVQTAVTTIPAPTDLKFTQVTPTSLSAQWTPPNVQLTGYRVRVTPKEKTGPMKEINLAPDSSSVVVSGLMVATKYEVSVYALKDTLTSRPAQGVVTTLENVSPPRRARVTDATETTITISWRTKTETITGFQVDAVPANGQTPIQRTIKPDVRSYTITGLQPGTDYKIYLYTLNDNARSSPVVIDASTAIDAPSNLRFLATTPNSLLVSWQPPRARITGYIIKYEKPGSPPREVVPRPRPGVTEATITGLEPGTEYTIYVIALKNNQKSEPLIGRKKTGQEALSQTTISWAPFQDTSEYIISCHPVGTDEEPLQFRVPGTSTSATLTGLTRGATYNVIVEALKDQQRHKVREEVVTVGNSVNEGLNQPTDDSCFDPYTVSHYAVGDEWERMSESGFKLLCQCLGFGSGHFRCDSSRWCHDNGVNYKIGEKWDRQGENGQMMSCTCLGNGKGEFKCDPHEATCYDDGKTYHVGEQWQKEYLGAICSCTCFGGQRGWRCDNCRRPGGEPSPEGTTGQSYNQYSQRYHQRTNTNVNCPIECFMPLDVQADREDSRE

SEQ ID NO: 5492 - protein, 2386 aa, Homo Sapiens
MLRGPGPGLLLLAVQCLGTAVPSTGASKSKRQAQQMVQPQSPVAVSQSKPGCYDNGKHYQINQQWERTYLGNALVCTCYGGSRGFNCESKPEAEETCFDKYTGNTYRVGDTYERPKDSMIWDCTCIGAGRGRISCTIANRCHEGGQSYKIGDTWRRPHETGGYMLECVCLGNGKGEWTCKPIAEKCFDHAAGTSYVVGETWEKPYQGWMMVDCTCLGEGSGRITCTSRNRCNDQDTRTSYRIGDTWSKKDNRGNLLQCICTGNGRGEWKCERHTSVQTTSSGSGPFTDVRAAVYQPQPHPQPPPYGHCVTDSGVVYSVGMQWLKTQGNKQMLCTCLGNGVSCQETAVTQTYGGNSNGEPCVLPFTYNGRTFYSCTTEGRQDGHLWCSTTSNYEQDQKYSFCTDHTVLVQTRGGNSNGALCHFPFLYNNHNYTDCTSEGRRDNMKWCGTTQNYDADQKFGFCPMAAHEEICTTNEGVMYRIGDQWDKQHDMGHMMRCTCVGNGRGEWTCIAYSQLRDQCIVDDITYNVNDTFHKRHEEGHMLNCTCFGQGRGRWKCDPVDQCQDSETGTFYQIGDSWEKYVHGVRYQCYCYGRGIGEWHCQPLQTYPSSSGPVEVFITETPSQPNSHPIQWNAPQPSHISKYILRWRPKNSVGRWKEATIPGHLNSYTIKGLKPGVVYEGQLISIQQYGHQEVTRFDFTTTSTSTPVTSNTVTGETTPFSPLVATSESVTEITASSFVVSWVSASDTVSGFRVEYELSEEGDEPQYLDLPSTATSVNIPDLLPGRKYIVNVYQISEDGEQSLILSTSQTTAPDAPPDTTVDQVDDTSIVVRWSRPQAPITGYRIVYSPSVEGSSTELNLPETANSVTLSDLQPGVQYNITIYAVEENQESTPVVIQQETTGTPRSDTVPSPRDLQFVEVTDVKVTIMWTPPESAVTGYRVDVIPVNLPGEHGQRLPISRNTFAEVTGLSPGVTYYFKVFAVSHGRESKPLTAQQTTKLDAPTNLQFVNETDSTVLVRWTPPRAQITGYRLTVGLTRRGQPRQYNVGPSVSKYPLRNLQPASEYTVSLVAIKGNQESPKATGVFTTLQPGSSIPPYNTEVTETTIVITWTPAPRIGFKLGVRPSQGGEAPREVTSDSGSIVVSGLTPGVEYVYTIQVLRDGQERDAPIVNKVVTPLSPPTNLHLEANPDTGVLTVSWERSTTPDITGYRITTTPTNGQQGNSLEEVVHADQSSCTFDNLSPGLEYNVSVYTVKDDKESVPISDTIIPAVPPPTDLRFTNIGPDTMRVTWAPPPSIDLTNFLVRYSPVKNEEDVAELSISPSDNAVVLTNLLPGTEYVVSVSSVYEQHESTPLRGRQKTGLDSPTGIDFSDITANSFTVHWIAPRATITGYRIRHHPEHFSGRPREDRVPHSRNSITLTNLTPGTEYVVSIVALNGREESPLLIGQQSTVSDVPRDLEVVAATPTSLLISWDAPAVTVRYYRITYGETGGNSPVQEFTVPGSKSTATISGLKPGVDYTITVYAVTGRGDSPASSKPISINYRTEIDKPSQMQVTDVQDNSISVKWLPSSSPVTGYRVTTTPKNGPGPTKTKTAGPDQTEMTIEGLQPTVEYVVSVYAQNPSGESQPLVQTAVTNIDRPKGLAFTDVDVDSIKIAWESPQGQVSRYRVTYSSPEDGIHELFPAPDGEEDTAELQGLRPGSEYTVSVVALHDDMESQPLIGTQSTAIPAPTDLKFTQVTPTSLSAQWTPPNVQLTGYRVRVTPKEKTGPMKEINLAPDSSSVVVSGLMVATKYEVSVYALKDTLTSRPAQGVVTTLENVSPPRRARVTDATETTITISWRTKTETITGFQVDAVPANGQTPIQRTIKPDVRSYTITGLQPGTDYKIYLYTLNDNARSSPVVIDASTAIDAPSNLRFLATTPNSLLVSWQPPRARITGYIIKYEKPGSPPREVVPRPRPGVTEATITGLEPGTEYTIYVIALKNNQKSEPLIGRKKTDELPQLVTLPHPNLHGPEILDVPSTVQKTPFVTHPGYDTGNGIQLPGTSGQQPSVGQQMIFEEHGFRRTTPPTTATPIRHRPRPYPPNVGEEIQIGHIPREDVDYHLYPHGPGLNPNASTGQEALSQTTISWAPFQDTSEYIISCHPVGTDEEPLQFRVPGTSTSATLTGLTRGATYNVIVEALKDQQRHKVREEVVTVGNSVNEGLNQPTDDSCFDPYTVSHYAVGDEWERMSESGFKLLCQCLGFGSGHFRCDSSRWCHDNGVNYKIGEKWDRQGENGQMMSCTCLGNGKGEFKCDPHEATCYDDGKTYHVGEQWQKEYLGAICSCTCFGGQRGWRCDNCRRPGGEPSPEGTTGQSYNQYSQRYHQRTNTNVNCPIECFMPLDVQADREDSRE

SEQ ID NO: 5493 - protein, 2296 aa, Homo Sapiens
MLRGPGPGLLLLAVQCLGTAVPSTGASKSKRQAQQMVQPQSPVAVSQSKPGCYDNGKHYQINQQWERTYLGNALVCTCYGGSRGFNCESKPEAEETCFDKYTGNTYRVGDTYERPKDSMIWDCTCIGAGRGRISCTIANRCHEGGQSYKIGDTWRRPHETGGYMLECVCLGNGKGEWTCKPIAEKCFDHAAGTSYVVGETWEKPYQGWMMVDCTCLGEGSGRITCTSRNRCNDQDTRTSYRIGDTWSKKDNRGNLLQCICTGNGRGEWKCERHTSVQTTSSGSGPFTDVRAAVYQPQPHPQPPPYGHCVTDSGVVYSVGMQWLKTQGNKQMLCTCLGNGVSCQETAVTQTYGGNSNGEPCVLPFTYNGRTFYSCTTEGRQDGHLWCSTTSNYEQDQKYSFCTDHTVLVQTRGGNSNGALCHFPFLYNNHNYTDCTSEGRRDNMKWCGTTQNYDADQKFGFCPMAAHEEICTTNEGVMYRIGDQWDKQHDMGHMMRCTCVGNGRGEWTCIAYSQLRDQCIVDDITYNVNDTFHKRHEEGHMLNCTCFGQGRGRWKCDPVDQCQDSETGTFYQIGDSWEKYVHGVRYQCYCYGRGIGEWHCQPLQTYPSSSGPVEVFITETPSQPNSHPIQWNAPQPSHISKYILRWRPKNSVGRWKEATIPGHLNSYTIKGLKPGVVYEGQLISIQQYGHQEVTRFDFTTTSTSTPVTSNTVTGETTPFSPLVATSESVTEITASSFVVSWVSASDTVSGFRVEYELSEEGDEPQYLDLPSTATSVNIPDLLPGRKYIVNVYQISEDGEQSLILSTSQTTAPDAPPDTTVDQVDDTSIVVRWSRPQAPITGYRIVYSPSVEGSSTELNLPETANSVTLSDLQPGVQYNITIYAVEENQESTPVVIQQETTGTPRSDTVPSPRDLQFVEVTDVKVTIMWTPPESAVTGYRVDVIPVNLPGEHGQRLPISRNTFAEVTGLSPGVTYYFKVFAVSHGRESKPLTAQQTTKLDAPTNLQFVNETDSTVLVRWTPPRAQITGYRLTVGLTRRGQPRQYNVGPSVSKYPLRNLQPASEYTVSLVAIKGNQESPKATGVFTTLQPGSSIPPYNTEVTETTIVITWTPAPRIGFKLGVRPSQGGEAPREVTSDSGSIVVSGLTPGVEYVYTIQVLRDGQERDAPIVNKVVTPLSPPTNLHLEANPDTGVLTVSWERSTTPDITGYRITTTPTNGQQGNSLEEVVHADQSSCTFDNLSPGLEYNVSVYTVKDDKESVPISDTIIPAVPPPTDLRFTNIGPDTMRVTWAPPPSIDLTNFLVRYSPVKNEEDVAELSISPSDNAVVLTNLLPGTEYVVSVSSVYEQHESTPLRGRQKTGLDSPTGIDFSDITANSFTVHWIAPRATITGYRIRHHPEHFSGRPREDRVPHSRNSITLTNLTPGTEYVVSIVALNGREESPLLIGQQSTVSDVPRDLEVVAATPTSLLISWDAPAVTVRYYRITYGETGGNSPVQEFTVPGSKSTATISGLKPGVDYTITVYAVTGRGDSPASSKPISINYRTEIDKPSQMQVTDVQDNSISVKWLPSSSPVTGYRVTTTPKNGPGPTKTKTAGPDQTEMTIEGLQPTVEYVVSVYAQNPSGESQPLVQTAVTTIPAPTDLKFTQVTPTSLSAQWTPPNVQLTGYRVRVTPKEKTGPMKEINLAPDSSSVVVSGLMVATKYEVSVYALKDTLTSRPAQGVVTTLENVSPPRRARVTDATETTITISWRTKTETITGFQVDAVPANGQTPIQRTIKPDVRSYTITGLQPGTDYKIYLYTLNDNARSSPVVIDASTAIDAPSNLRFLATTPNSLLVSWQPPRARITGYIIKYEKPGSPPREVVPRPRPGVTEATITGLEPGTEYTIYVIALKNNQKSEPLIGRKKTDELPQLVTLPHPNLHGPEILDVPSTVQKTPFVTHPGYDTGNGIQLPGTSGQQPSVGQQMIFEEHGFRRTTPPTTATPIRHRPRPYPPNVGEEIQIGHIPREDVDYHLYPHGPGLNPNASTGQEALSQTTISWAPFQDTSEYIISCHPVGTDEEPLQFRVPGTSTSATLTGLTRGATYNVIVEALKDQQRHKVREEVVTVGNSVNEGLNQPTDDSCFDPYTVSHYAVGDEWERMSESGFKLLCQCLGFGSGHFRCDSSRWCHDNGVNYKIGEKWDRQGENGQMMSCTCLGNGKGEFKCDPHEATCYDDGKTYHVGEQWQKEYLGAICSCTCFGGQRGWRCDNCRRPGGEPSPEGTTGQSYNQYSQRYHQRTNTNVNCPIECFMPLDVQADREDSRE

SEQ ID NO: 5494 - protein, 2446 aa, Homo Sapiens
MLRGPGPGLLLLAVQCLGTAVPSTGASKSKRQAQQMVQPQSPVAVSQSKPGCYDNGKHYQINQQWERTYLGNALVCTCYGGSRGFNCESKPEAEETCFDKYTGNTYRVGDTYERPKDSMIWDCTCIGAGRGRISCTIANRCHEGGQSYKIGDTWRRPHETGGYMLECVCLGNGKGEWTCKPIAEKCFDHAAGTSYVVGETWEKPYQGWMMVDCTCLGEGSGRITCTSRNRCNDQDTRTSYRIGDTWSKKDNRGNLLQCICTGNGRGEWKCERHTSVQTTSSGSGPFTDVRAAVYQPQPHPQPPPYGHCVTDSGVVYSVGMQWLKTQGNKQMLCTCLGNGVSCQETAVTQTYGGNSNGEPCVLPFTYNGRTFYSCTTEGRQDGHLWCSTTSNYEQDQKYSFCTDHTVLVQTRGGNSNGALCHFPFLYNNHNYTDCTSEGRRDNMKWCGTTQNYDADQKFGFCPMAAHEEICTTNEGVMYRIGDQWDKQHDMGHMMRCTCVGNGRGEWTCIAYSQLRDQCIVDDITYNVNDTFHKRHEEGHMLNCTCFGQGRGRWKCDPVDQCQDSETGTFYQIGDSWEKYVHGVRYQCYCYGRGIGEWHCQPLQTYPSSSGPVEVFITETPSQPNSHPIQWNAPQPSHISKYILRWRPKNSVGRWKEATIPGHLNSYTIKGLKPGVVYEGQLISIQQYGHQEVTRFDFTTTSTSTPVTSNTVTGETTPFSPLVATSESVTEITASSFVVSWVSASDTVSGFRVEYELSEEGDEPQYLDLPSTATSVNIPDLLPGRKYIVNVYQISEDGEQSLILSTSQTTAPDAPPDTTVDQVDDTSIVVRWSRPQAPITGYRIVYSPSVEGSSTELNLPETANSVTLSDLQPGVQYNITIYAVEENQESTPVVIQQETTGTPRSDTVPSPRDLQFVEVTDVKVTIMWTPPESAVTGYRVDVIPVNLPGEHGQRLPISRNTFAEVTGLSPGVTYYFKVFAVSHGRESKPLTAQQTTKLDAPTNLQFVNETDSTVLVRWTPPRAQITGYRLTVGLTRRGQPRQYNVGPSVSKYPLRNLQPASEYTVSLVAIKGNQESPKATGVFTTLQPGSSIPPYNTEVTETTIVITWTPAPRIGFKLGVRPSQGGEAPREVTSDSGSIVVSGLTPGVEYVYTIQVLRDGQERDAPIVNKVVTPLSPPTNLHLEANPDTGVLTVSWERSTTPDITGYRITTTPTNGQQGNSLEEVVHADQSSCTFDNLSPGLEYNVSVYTVKDDKESVPISDTIIPEVPQLTDLSFVDITDSSIGLRWTPLNSSTIIGYRITVVAAGEGIPIFEDFVDSSVGYYTVTGLEPGIDYDISVITLINGGESAPTTLTQQTAVPPPTDLRFTNIGPDTMRVTWAPPPSIDLTNFLVRYSPVKNEEDVAELSISPSDNAVVLTNLLPGTEYVVSVSSVYEQHESTPLRGRQKTGLDSPTGIDFSDITANSFTVHWIAPRATITGYRIRHHPEHFSGRPREDRVPHSRNSITLTNLTPGTEYVVSIVALNGREESPLLIGQQSTVSDVPRDLEVVAATPTSLLISWDAPAVTVRYYRITYGETGGNSPVQEFTVPGSKSTATISGLKPGVDYTITVYAVTGRGDSPASSKPISINYRTEIDKPSQMQVTDVQDNSISVKWLPSSSPVTGYRVTTTPKNGPGPTKTKTAGPDQTEMTIEGLQPTVEYVVSVYAQNPSGESQPLVQTAVTNIDRPKGLAFTDVDVDSIKIAWESPQGQVSRYRVTYSSPEDGIHELFPAPDGEEDTAELQGLRPGSEYTVSVVALHDDMESQPLIGTQSTAIPAPTDLKFTQVTPTSLSAQWTPPNVQLTGYRVRVTPKEKTGPMKEINLAPDSSSVVVSGLMVATKYEVSVYALKDTLTSRPAQGVVTTLENVSPPRRARVTDATETTITISWRTKTETITGFQVDAVPANGQTPIQRTIKPDVRSYTITGLQPGTDYKIYLYTLNDNARSSPVVIDASTAIDAPSNLRFLATTPNSLLVSWQPPRARITGYIIKYEKPGSPPREVVPRPRPGVTEATITGLEPGTEYTIYVIALKNNQKSEPLIGRKKTDELPQLVTLPHPNLHGPEILDVPSTVQKTPFVTHPGYDTGNGIQLPGTSGQQPSVGQQMIFEEHGFRRTTPPTTATPIRHRPRPYPPNVGQEALSQTTISWAPFQDTSEYIISCHPVGTDEEPLQFRVPGTSTSATLTGLTRGATYNVIVEALKDQQRHKVREEVVTVGNSVNEGLNQPTDDSCFDPYTVSHYAVGDEWERMSESGFKLLCQCLGFGSGHFRCDSSRWCHDNGVNYKIGEKWDRQGENGQMMSCTCLGNGKGEFKCDPHEATCYDDGKTYHVGEQWQKEYLGAICSCTCFGGQRGWRCDNCRRPGGEPSPEGTTGQSYNQYSQRYHQRTNTNVNCPIECFMPLDVQADREDSRE

SEQ ID NO: 5495 - protein, 2330 aa, Homo Sapiens
MLRGPGPGLLLLAVQCLGTAVPSTGASKSKRQAQQMVQPQSPVAVSQSKPGCYDNGKHYQINQQWERTYLGNALVCTCYGGSRGFNCESKPEAEETCFDKYTGNTYRVGDTYERPKDSMIWDCTCIGAGRGRISCTIANRCHEGGQSYKIGDTWRRPHETGGYMLECVCLGNGKGEWTCKPIAEKCFDHAAGTSYVVGETWEKPYQGWMMVDCTCLGEGSGRITCTSRNRCNDQDTRTSYRIGDTWSKKDNRGNLLQCICTGNGRGEWKCERHTSVQTTSSGSGPFTDVRAAVYQPQPHPQPPPYGHCVTDSGVVYSVGMQWLKTQGNKQMLCTCLGNGVSCQETAVTQTYGGNSNGEPCVLPFTYNGRTFYSCTTEGRQDGHLWCSTTSNYEQDQKYSFCTDHTVLVQTRGGNSNGALCHFPFLYNNHNYTDCTSEGRRDNMKWCGTTQNYDADQKFGFCPMAAHEEICTTNEGVMYRIGDQWDKQHDMGHMMRCTCVGNGRGEWTCIAYSQLRDQCIVDDITYNVNDTFHKRHEEGHMLNCTCFGQGRGRWKCDPVDQCQDSETGTFYQIGDSWEKYVHGVRYQCYCYGRGIGEWHCQPLQTYPSSSGPVEVFITETPSQPNSHPIQWNAPQPSHISKYILRWRPKNSVGRWKEATIPGHLNSYTIKGLKPGVVYEGQLISIQQYGHQEVTRFDFTTTSTSTPVTSNTVTGETTPFSPLVATSESVTEITASSFVVSWVSASDTVSGFRVEYELSEEGDEPQYLDLPSTATSVNIPDLLPGRKYIVNVYQISEDGEQSLILSTSQTTAPDAPPDTTVDQVDDTSIVVRWSRPQAPITGYRIVYSPSVEGSSTELNLPETANSVTLSDLQPGVQYNITIYAVEENQESTPVVIQQETTGTPRSDTVPSPRDLQFVEVTDVKVTIMWTPPESAVTGYRVDVIPVNLPGEHGQRLPISRNTFAEVTGLSPGVTYYFKVFAVSHGRESKPLTAQQTTKLDAPTNLQFVNETDSTVLVRWTPPRAQITGYRLTVGLTRRGQPRQYNVGPSVSKYPLRNLQPASEYTVSLVAIKGNQESPKATGVFTTLQPGSSIPPYNTEVTETTIVITWTPAPRIGFKLGVRPSQGGEAPREVTSDSGSIVVSGLTPGVEYVYTIQVLRDGQERDAPIVNKVVTPLSPPTNLHLEANPDTGVLTVSWERSTTPDITGYRITTTPTNGQQGNSLEEVVHADQSSCTFDNLSPGLEYNVSVYTVKDDKESVPISDTIIPAVPPPTDLRFTNIGPDTMRVTWAPPPSIDLTNFLVRYSPVKNEEDVAELSISPSDNAVVLTNLLPGTEYVVSVSSVYEQHESTPLRGRQKTGLDSPTGIDFSDITANSFTVHWIAPRATITGYRIRHHPEHFSGRPREDRVPHSRNSITLTNLTPGTEYVVSIVALNGREESPLLIGQQSTVSDVPRDLEVVAATPTSLLISWDAPAVTVRYYRITYGETGGNSPVQEFTVPGSKSTATISGLKPGVDYTITVYAVTGRGDSPASSKPISINYRTEIDKPSQMQVTDVQDNSISVKWLPSSSPVTGYRVTTTPKNGPGPTKTKTAGPDQTEMTIEGLQPTVEYVVSVYAQNPSGESQPLVQTAVTNIDRPKGLAFTDVDVDSIKIAWESPQGQVSRYRVTYSSPEDGIHELFPAPDGEEDTAELQGLRPGSEYTVSVVALHDDMESQPLIGTQSTAIPAPTDLKFTQVTPTSLSAQWTPPNVQLTGYRVRVTPKEKTGPMKEINLAPDSSSVVVSGLMVATKYEVSVYALKDTLTSRPAQGVVTTLENVSPPRRARVTDATETTITISWRTKTETITGFQVDAVPANGQTPIQRTIKPDVRSYTITGLQPGTDYKIYLYTLNDNARSSPVVIDASTAIDAPSNLRFLATTPNSLLVSWQPPRARITGYIIKYEKPGSPPREVVPRPRPGVTEATITGLEPGTEYTIYVIALKNNQKSEPLIGRKKTVQKTPFVTHPGYDTGNGIQLPGTSGQQPSVGQQMIFEEHGFRRTTPPTTATPIRHRPRPYPPNVGQEALSQTTISWAPFQDTSEYIISCHPVGTDEEPLQFRVPGTSTSATLTGLTRGATYNVIVEALKDQQRHKVREEVVTVGNSVNEGLNQPTDDSCFDPYTVSHYAVGDEWERMSESGFKLLCQCLGFGSGHFRCDSSRWCHDNGVNYKIGEKWDRQGENGQMMSCTCLGNGKGEFKCDPHEATCYDDGKTYHVGEQWQKEYLGAICSCTCFGGQRGWRCDNCRRPGGEPSPEGTTGQSYNQYSQRYHQRTNTNVNCPIECFMPLDVQADREDSRE

SEQ ID NO: 5496 - protein, 2240 aa, Homo Sapiens
MLRGPGPGLLLLAVQCLGTAVPSTGASKSKRQAQQMVQPQSPVAVSQSKPGCYDNGKHYQINQQWERTYLGNALVCTCYGGSRGFNCESKPEAEETCFDKYTGNTYRVGDTYERPKDSMIWDCTCIGAGRGRISCTIANRCHEGGQSYKIGDTWRRPHETGGYMLECVCLGNGKGEWTCKPIAEKCFDHAAGTSYVVGETWEKPYQGWMMVDCTCLGEGSGRITCTSRNRCNDQDTRTSYRIGDTWSKKDNRGNLLQCICTGNGRGEWKCERHTSVQTTSSGSGPFTDVRAAVYQPQPHPQPPPYGHCVTDSGVVYSVGMQWLKTQGNKQMLCTCLGNGVSCQETAVTQTYGGNSNGEPCVLPFTYNGRTFYSCTTEGRQDGHLWCSTTSNYEQDQKYSFCTDHTVLVQTRGGNSNGALCHFPFLYNNHNYTDCTSEGRRDNMKWCGTTQNYDADQKFGFCPMAAHEEICTTNEGVMYRIGDQWDKQHDMGHMMRCTCVGNGRGEWTCIAYSQLRDQCIVDDITYNVNDTFHKRHEEGHMLNCTCFGQGRGRWKCDPVDQCQDSETGTFYQIGDSWEKYVHGVRYQCYCYGRGIGEWHCQPLQTYPSSSGPVEVFITETPSQPNSHPIQWNAPQPSHISKYILRWRPKNSVGRWKEATIPGHLNSYTIKGLKPGVVYEGQLISIQQYGHQEVTRFDFTTTSTSTPVTSNTVTGETTPFSPLVATSESVTEITASSFVVSWVSASDTVSGFRVEYELSEEGDEPQYLDLPSTATSVNIPDLLPGRKYIVNVYQISEDGEQSLILSTSQTTAPDAPPDTTVDQVDDTSIVVRWSRPQAPITGYRIVYSPSVEGSSTELNLPETANSVTLSDLQPGVQYNITIYAVEENQESTPVVIQQETTGTPRSDTVPSPRDLQFVEVTDVKVTIMWTPPESAVTGYRVDVIPVNLPGEHGQRLPISRNTFAEVTGLSPGVTYYFKVFAVSHGRESKPLTAQQTTKLDAPTNLQFVNETDSTVLVRWTPPRAQITGYRLTVGLTRRGQPRQYNVGPSVSKYPLRNLQPASEYTVSLVAIKGNQESPKATGVFTTLQPGSSIPPYNTEVTETTIVITWTPAPRIGFKLGVRPSQGGEAPREVTSDSGSIVVSGLTPGVEYVYTIQVLRDGQERDAPIVNKVVTPLSPPTNLHLEANPDTGVLTVSWERSTTPDITGYRITTTPTNGQQGNSLEEVVHADQSSCTFDNLSPGLEYNVSVYTVKDDKESVPISDTIIPAVPPPTDLRFTNIGPDTMRVTWAPPPSIDLTNFLVRYSPVKNEEDVAELSISPSDNAVVLTNLLPGTEYVVSVSSVYEQHESTPLRGRQKTGLDSPTGIDFSDITANSFTVHWIAPRATITGYRIRHHPEHFSGRPREDRVPHSRNSITLTNLTPGTEYVVSIVALNGREESPLLIGQQSTVSDVPRDLEVVAATPTSLLISWDAPAVTVRYYRITYGETGGNSPVQEFTVPGSKSTATISGLKPGVDYTITVYAVTGRGDSPASSKPISINYRTEIDKPSQMQVTDVQDNSISVKWLPSSSPVTGYRVTTTPKNGPGPTKTKTAGPDQTEMTIEGLQPTVEYVVSVYAQNPSGESQPLVQTAVTTIPAPTDLKFTQVTPTSLSAQWTPPNVQLTGYRVRVTPKEKTGPMKEINLAPDSSSVVVSGLMVATKYEVSVYALKDTLTSRPAQGVVTTLENVSPPRRARVTDATETTITISWRTKTETITGFQVDAVPANGQTPIQRTIKPDVRSYTITGLQPGTDYKIYLYTLNDNARSSPVVIDASTAIDAPSNLRFLATTPNSLLVSWQPPRARITGYIIKYEKPGSPPREVVPRPRPGVTEATITGLEPGTEYTIYVIALKNNQKSEPLIGRKKTVQKTPFVTHPGYDTGNGIQLPGTSGQQPSVGQQMIFEEHGFRRTTPPTTATPIRHRPRPYPPNVGQEALSQTTISWAPFQDTSEYIISCHPVGTDEEPLQFRVPGTSTSATLTGLTRGATYNVIVEALKDQQRHKVREEVVTVGNSVNEGLNQPTDDSCFDPYTVSHYAVGDEWERMSESGFKLLCQCLGFGSGHFRCDSSRWCHDNGVNYKIGEKWDRQGENGQMMSCTCLGNGKGEFKCDPHEATCYDDGKTYHVGEQWQKEYLGAICSCTCFGGQRGWRCDNCRRPGGEPSPEGTTGQSYNQYSQRYHQRTNTNVNCPIECFMPLDVQADREDSRE

SEQ ID NO: 5497 - protein, 657 aa, Homo Sapiens
MLRGPGPGLLLLAVQCLGTAVPSTGASKSKRQAQQMVQPQSPVAVSQSKPGCYDNGKHYQINQQWERTYLGNALVCTCYGGSRGFNCESKPEAEETCFDKYTGNTYRVGDTYERPKDSMIWDCTCIGAGRGRISCTIANRCHEGGQSYKIGDTWRRPHETGGYMLECVCLGNGKGEWTCKPIAEKCFDHAAGTSYVVGETWEKPYQGWMMVDCTCLGEGSGRITCTSRNRCNDQDTRTSYRIGDTWSKKDNRGNLLQCICTGNGRGEWKCERHTSVQTTSSGSGPFTDVRAAVYQPQPHPQPPPYGHCVTDSGVVYSVGMQWLKTQGNKQMLCTCLGNGVSCQETAVTQTYGGNSNGEPCVLPFTYNGRTFYSCTTEGRQDGHLWCSTTSNYEQDQKYSFCTDHTVLVQTRGGNSNGALCHFPFLYNNHNYTDCTSEGRRDNMKWCGTTQNYDADQKFGFCPMAAHEEICTTNEGVMYRIGDQWDKQHDMGHMMRCTCVGNGRGEWTCIAYSQLRDQCIVDDITYNVNDTFHKRHEEGHMLNCTCFGQGRGRWKCDPVDQCQDSETGTFYQIGDSWEKYVHGVRYQCYCYGRGIGEWHCQPLQTYPSSSGPVEVFITETPSQPNSHPIQWNAPQPSHISKYILRWRPVSIPPRNLGY

SEQ ID NO: 5498 - protein, 2267 aa, Homo Sapiens
MLRGPGPGLLLLAVQCLGTAVPSTGASKSKRQAQQMVQPQSPVAVSQSKPGCYDNGKHYQINQQWERTYLGNALVCTCYGGSRGFNCESKPEAEETCFDKYTGNTYRVGDTYERPKDSMIWDCTCIGAGRGRISCTIANRCHEGGQSYKIGDTWRRPHETGGYMLECVCLGNGKGEWTCKPIAEKCFDHAAGTSYVVGETWEKPYQGWMMVDCTCLGEGSGRITCTSRNRCNDQDTRTSYRIGDTWSKKDNRGNLLQCICTGNGRGEWKCERHTSVQTTSSGSGPFTDVRAAVYQPQPHPQPPPYGHCVTDSGVVYSVGMQWLKTQGNKQMLCTCLGNGVSCQETAVTQTYGGNSNGEPCVLPFTYNGRTFYSCTTEGRQDGHLWCSTTSNYEQDQKYSFCTDHTVLVQTRGGNSNGALCHFPFLYNNHNYTDCTSEGRRDNMKWCGTTQNYDADQKFGFCPMAAHEEICTTNEGVMYRIGDQWDKQHDMGHMMRCTCVGNGRGEWTCIAYSQLRDQCIVDDITYNVNDTFHKRHEEGHMLNCTCFGQGRGRWKCDPVDQCQDSETGTFYQIGDSWEKYVHGVRYQCYCYGRGIGEWHCQPLQTYPSSSGPVEVFITETPSQPNSHPIQWNAPQPSHISKYILRWRPKNSVGRWKEATIPGHLNSYTIKGLKPGVVYEGQLISIQQYGHQEVTRFDFTTTSTSTPVTSNTVTGETTPFSPLVATSESVTEITASSFVVSWVSASDTVSGFRVEYELSEEGDEPQYLDLPSTATSVNIPDLLPGRKYIVNVYQISEDGEQSLILSTSQTTAPDAPPDTTVDQVDDTSIVVRWSRPQAPITGYRIVYSPSVEGSSTELNLPETANSVTLSDLQPGVQYNITIYAVEENQESTPVVIQQETTGTPRSDTVPSPRDLQFVEVTDVKVTIMWTPPESAVTGYRVDVIPVNLPGEHGQRLPISRNTFAEVTGLSPGVTYYFKVFAVSHGRESKPLTAQQTTKLDAPTNLQFVNETDSTVLVRWTPPRAQITGYRLTVGLTRRGQPRQYNVGPSVSKYPLRNLQPASEYTVSLVAIKGNQESPKATGVFTTLQPGSSIPPYNTEVTETTIVITWTPAPRIGFKLGVRPSQGGEAPREVTSDSGSIVVSGLTPGVEYVYTIQVLRDGQERDAPIVNKVVTPLSPPTNLHLEANPDTGVLTVSWERSTTPDITGYRITTTPTNGQQGNSLEEVVHADQSSCTFDNLSPGLEYNVSVYTVKDDKESVPISDTIIPEVPQLTDLSFVDITDSSIGLRWTPLNSSTIIGYRITVVAAGEGIPIFEDFVDSSVGYYTVTGLEPGIDYDISVITLINGGESAPTTLTQQTAVPPPTDLRFTNIGPDTMRVTWAPPPSIDLTNFLVRYSPVKNEEDVAELSISPSDNAVVLTNLLPGTEYVVSVSSVYEQHESTPLRGRQKTGLDSPTGIDFSDITANSFTVHWIAPRATITGYRIRHHPEHFSGRPREDRVPHSRNSITLTNLTPGTEYVVSIVALNGREESPLLIGQQSTVSDVPRDLEVVAATPTSLLISWDAPAVTVRYYRITYGETGGNSPVQEFTVPGSKSTATISGLKPGVDYTITVYAVTGRGDSPASSKPISINYRTEIDKPSQMQVTDVQDNSISVKWLPSSSPVTGYRVTTTPKNGPGPTKTKTAGPDQTEMTIEGLQPTVEYVVSVYAQNPSGESQPLVQTAVTTIPAPTDLKFTQVTPTSLSAQWTPPNVQLTGYRVRVTPKEKTGPMKEINLAPDSSSVVVSGLMVATKYEVSVYALKDTLTSRPAQGVVTTLENVSPPRRARVTDATETTITISWRTKTETITGFQVDAVPANGQTPIQRTIKPDVRSYTITGLQPGTDYKIYLYTLNDNARSSPVVIDASTAIDAPSNLRFLATTPNSLLVSWQPPRARITGYIIKYEKPGSPPREVVPRPRPGVTEATITGLEPGTEYTIYVIALKNNQKSEPLIGRKKTGQEALSQTTISWAPFQDTSEYIISCHPVGTDEEPLQFRVPGTSTSATLTGLTRGATYNVIVEALKDQQRHKVREEVVTVGNSVNEGLNQPTDDSCFDPYTVSHYAVGDEWERMSESGFKLLCQCLGFGSGHFRCDSSRWCHDNGVNYKIGEKWDRQGENGQMMSCTCLGNGKGEFKCDPHEATCYDDGKTYHVGEQWQKEYLGAICSCTCFGGQRGWRCDNCRRPGGEPSPEGTTGQSYNQYSQRYHQRTNTNVNCPIECFMPLDVQADREDSRE

SEQ ID NO: 5499 - protein, 2265 aa, Homo Sapiens
MLRGPGPGLLLLAVQCLGTAVPSTGASKSKRQAQQMVQPQSPVAVSQSKPGCYDNGKHYQINQQWERTYLGNALVCTCYGGSRGFNCESKPEAEETCFDKYTGNTYRVGDTYERPKDSMIWDCTCIGAGRGRISCTIANRCHEGGQSYKIGDTWRRPHETGGYMLECVCLGNGKGEWTCKPIAEKCFDHAAGTSYVVGETWEKPYQGWMMVDCTCLGEGSGRITCTSRNRCNDQDTRTSYRIGDTWSKKDNRGNLLQCICTGNGRGEWKCERHTSVQTTSSGSGPFTDVRAAVYQPQPHPQPPPYGHCVTDSGVVYSVGMQWLKTQGNKQMLCTCLGNGVSCQETAVTQTYGGNSNGEPCVLPFTYNGRTFYSCTTEGRQDGHLWCSTTSNYEQDQKYSFCTDHTVLVQTRGGNSNGALCHFPFLYNNHNYTDCTSEGRRDNMKWCGTTQNYDADQKFGFCPMAAHEEICTTNEGVMYRIGDQWDKQHDMGHMMRCTCVGNGRGEWTCIAYSQLRDQCIVDDITYNVNDTFHKRHEEGHMLNCTCFGQGRGRWKCDPVDQCQDSETGTFYQIGDSWEKYVHGVRYQCYCYGRGIGEWHCQPLQTYPSSSGPVEVFITETPSQPNSHPIQWNAPQPSHISKYILRWRPKNSVGRWKEATIPGHLNSYTIKGLKPGVVYEGQLISIQQYGHQEVTRFDFTTTSTSTPVTSNTVTGETTPFSPLVATSESVTEITASSFVVSWVSASDTVSGFRVEYELSEEGDEPQYLDLPSTATSVNIPDLLPGRKYIVNVYQISEDGEQSLILSTSQTTAPDAPPDTTVDQVDDTSIVVRWSRPQAPITGYRIVYSPSVEGSSTELNLPETANSVTLSDLQPGVQYNITIYAVEENQESTPVVIQQETTGTPRSDTVPSPRDLQFVEVTDVKVTIMWTPPESAVTGYRVDVIPVNLPGEHGQRLPISRNTFAEVTGLSPGVTYYFKVFAVSHGRESKPLTAQQTTKLDAPTNLQFVNETDSTVLVRWTPPRAQITGYRLTVGLTRRGQPRQYNVGPSVSKYPLRNLQPASEYTVSLVAIKGNQESPKATGVFTTLQPGSSIPPYNTEVTETTIVITWTPAPRIGFKLGVRPSQGGEAPREVTSDSGSIVVSGLTPGVEYVYTIQVLRDGQERDAPIVNKVVTPLSPPTNLHLEANPDTGVLTVSWERSTTPDITGYRITTTPTNGQQGNSLEEVVHADQSSCTFDNLSPGLEYNVSVYTVKDDKESVPISDTIIPAVPPPTDLRFTNIGPDTMRVTWAPPPSIDLTNFLVRYSPVKNEEDVAELSISPSDNAVVLTNLLPGTEYVVSVSSVYEQHESTPLRGRQKTGLDSPTGIDFSDITANSFTVHWIAPRATITGYRIRHHPEHFSGRPREDRVPHSRNSITLTNLTPGTEYVVSIVALNGREESPLLIGQQSTVSDVPRDLEVVAATPTSLLISWDAPAVTVRYYRITYGETGGNSPVQEFTVPGSKSTATISGLKPGVDYTITVYAVTGRGDSPASSKPISINYRTEIDKPSQMQVTDVQDNSISVKWLPSSSPVTGYRVTTTPKNGPGPTKTKTAGPDQTEMTIEGLQPTVEYVVSVYAQNPSGESQPLVQTAVTTIPAPTDLKFTQVTPTSLSAQWTPPNVQLTGYRVRVTPKEKTGPMKEINLAPDSSSVVVSGLMVATKYEVSVYALKDTLTSRPAQGVVTTLENVSPPRRARVTDATETTITISWRTKTETITGFQVDAVPANGQTPIQRTIKPDVRSYTITGLQPGTDYKIYLYTLNDNARSSPVVIDASTAIDAPSNLRFLATTPNSLLVSWQPPRARITGYIIKYEKPGSPPREVVPRPRPGVTEATITGLEPGTEYTIYVIALKNNQKSEPLIGRKKTDELPQLVTLPHPNLHGPEILDVPSTVQKTPFVTHPGYDTGNGIQLPGTSGQQPSVGQQMIFEEHGFRRTTPPTTATPIRHRPRPYPPNVGQEALSQTTISWAPFQDTSEYIISCHPVGTDEEPLQFRVPGTSTSATLTGLTRGATYNVIVEALKDQQRHKVREEVVTVGNSVNEGLNQPTDDSCFDPYTVSHYAVGDEWERMSESGFKLLCQCLGFGSGHFRCDSSRWCHDNGVNYKIGEKWDRQGENGQMMSCTCLGNGKGEFKCDPHEATCYDDGKTYHVGEQWQKEYLGAICSCTCFGGQRGWRCDNCRRPGGEPSPEGTTGQSYNQYSQRYHQRTNTNVNCPIECFMPLDVQADREDSRE

SEQ ID NO: 5500 - protein, 241 aa, Homo Sapiens
YLYTLNDNARSSPVVIDASTAIDAPSNLRFLATTPNSLLVSWQPPRARITGYIIKYEKPGSPPREVVPRPRPGVTEATITGLEPGTEYTIYVIALKNNQKSEPLIGRKKTVQKTPFVTHPGYDTGNGIQLPGTSGQQPSVGQQMIFEEHGFRRTTPPTTATPIRHRPRPYPPNVGEEIQIGHIPREDVDYHLYPHGPGLNPNASTGQEALSQTTISWAPFQDTSEYIISCHPVGTDEEPLQ

SEQ ID NO: 5501 - protein, 1894 aa, Homo Sapiens
MAPEAGATLRAPRRLSWAALLLLAALLPVASSAAASVDHPLKPRHVKLLSTKMGLKVTWDPPKDATSRPVEHYNIAYGKSLKSLKYIKVNAETYSFLIEDVEPGVVYFVLLTAENHSGVSRPVYRAESPPGGEWIEIDGFPIKGPGPFNETVTEKEVPNKPLRVRVRSSDDRLSVAWKAPRLSGAKSPRRSRGFLLGYGESGRKMNYVPLTRDERTHEIKKLASESVYVVSLQSMNSQGRSQPVYRAALTKRKISEEDELDVPDDISVRVMSSQSVLVSWVDPVLEKQKKVVASRQYTVRYREKGELARWDYKQIANRRVLIENLIPDTVYEFAVRISQGERDGKWSTSVFQRTPESAPTTAPENLNVWPVNGKPTVVAASWDALPETEGKVKEYILSYAPALKPFGAKSLTYPGDTTSALVDGLQPGERYLFKIRATNRRGLGPHSKAFIVAMPTTSKADVEQNTEDNGKPEKPEPSSPSPRAPASSQHPSVPASPQGRNAKDLLLDLKNKILANGGAPRKPQLRAKKAEELDLQSTEITGEEELGSREDSPMSPSDTQDQKRTLRPPSRHGHSVVAPGRTAVRARMPALPRREGVDKPGFSLATQPRPGAPPSASASPAHHASTQGTSHRPSLPASLNDNDLVDSDEDERAVGSLHPKGAFAQPRPALSPSRQSPSSVLRDRSSVHPGAKPASPARRTPHSGAAEEDSSASAPPSRLSPPHGGSSRLLPTQPHLSSPLSKGGKDGEDAPATNSNAPSRSTMSSSVSSHLSSRTQVSEGAEASDGESHGDGDREDGGRQAEATAQTLRARPASGHFHLLRHKPFAANGRSPSRFSIGRGPRLQPSSSPQSTVPSRAHPRVPSHSDSHPKLSSGIHGDEEDEKPLPATVVNDHVPSSSRQPISRGWEDLRRSPQRGASLHRKEPIPENPKSTGADTHPQGKYSSLASKAQDVQQSTDADTEGHSPKAQPGSTDRHASPARPPAARSQQHPSVPRRMTPGRAPQQQPPPPVATSQHHPGPQSRDAGRSPSQPRLSLTQAGRPRPTSQGRSHSSSDPYTASSRGMLPTALQNQDEDAQGSYDDDSTEVEAQDVRAPAHAARAKEAAASLPKHQQVESPTGAGAGGDHRSQRGHAASPARPSRPGGPQSRARVPSRAAPGKSEPPSKRPLSSKSQQSVSAEDDEEEDAGFFKGGKEDLLSSSVPKWPSSSTPRGGKDADGSLAKEEREPAIALAPRGGSLAPVKRPLPPPPGSSPRASHVPSRLPPRSAATVSPVAGTHPWPQYTTRAPPGHFSTTPMLSLRQRMMHARFRNPLSRQPARPSYRQGYNGRPNVEGKVLPGSNGKPNGQRIINGPQGTKWVVDLDRGLVLNAEGRYLQDSHGNPLRIKLGGDGRTIVDLEGTPVVSPDGLPLFGQGRHGTPLANAQDKPILSLGGKPLVGLEVIKKTTHPPTTTMQPTTTTTPLPTTTTPRPTTATTRRTTTTRRTTTRRPTTTVRTTTRTTTTTTPTPTTPIPTCPPGTLERHDDDGNLIMSSNGIPECYAEEDEFSGLETDTAVPTEEAYVIYDEDYEFETSRPPTTTEPSTTATTPRVIPEEGAISSFPEEEFDLAGRKRFVAPYVTYLNKDPSAPCSLTDALDHFQVDSLDEIIPNDLKKSDLPPQHAPRNITVVAVEGCHSFVIVDWDKATPGDVVTGYLVYSASYEDFIRNKWSTQASSVTHLPIENLKPNTRYYFKVQAQNPHGYGPISPSVSFVTESDNPLLVVRPPGGEPIWIPFAFKHDPSYTDCHGRQYVKRTWYRKFVGVVLCNSLRYKIYLSDNLKDTFYSIGDSWGRGEDHCQFVDSHLDGRTGPQSYVEALPTIQGYYRQYRQEPVRFGNIGFGTPYYYVGWYECGVSIPGKW

SEQ ID NO: 5502 - protein, 1790 aa, Homo Sapiens
  misc_feature (1)..(1): Xaa can be any naturally occurring amino acid
XPRHVKLLSTKMGLKVTWDPPKDATSRPVEHYNIAYGKSLKSLKYIKVNAETYSFLIEDVEPGVVYFVLLTAENHSGVSRPVYRAESPPGGEWIEIDGFPIKGPGPFNETVTEKEVPNKPLRVRVRSSDDRLSVAWKAPRLSGAKSPRRSRGFLLGYGESGRKMNYVPLTRDERTHEIKKLASESVYVVSLQSMNSQGRSQPVYRAALTKRKISEEDELDVPDDISVRVMSSQSVLVSWVDPVLEKQKKVVASRQYTVRYREKGELARWDYKQIANRRVLIENLIPDTVYEFAVRISQGERDGKWSTSVFQRTPESAPTTAPENLNVWPVNGKPTVVAASWDALPETEGKVKASKADVEQNTEDNGKPEKPEPSSPSPRAPASSQHPSVPASPQGRNAKDLLLDLKNKILANGGAPRKPQLRAKKAEELDLQSTEITGEEELGSREDSPMSPSDTQDQKRTLRPPSRHGHSVVAPGRTAVRARMPALPRREGVDKPGFSLATQPRPGAPPSASASPAHHASTQGTSHRPSLPASLNDNDLVDSDEDERAVGSLHPKGAFAQPRPALSPSRQSPSSVLRDRSSVHPGAKPASPARRTPHSGAAEEDSSASAPPSRLSPPHGGSSRLLPTQPHLSSPLSKGGKDGEDAPATNSNAPSRSTMSSSVSSHLSSRTQVSEGAEASDGESHGDGDREDGGRQAEATAQTLRARPASGHFHLLRHKPFAANGRSPSRFSIGRGPRLQPSSSPQSTVPSRAHPRVPSHSDSHPKLSSGIHGDEEDEKPLPATVVNDHVPSSSRQPISRGWEDLRRSPQRGASLHRKEPIPENPKSTGADTHPQGKYSSLASKAQDVQQSTDADTEGHSPKAQPGSTDRHASPARPPAARSQQHPSVPRRMTPGRAPQQQPPPPVATSQHHPGPQSRDAGRSPSQPRLSLTQAGRPRPTSQGRSHSSSDPYTASSRGMLPTALQNQDEDAQGSYDDDSTEVEAQDVRAPAHAARAKEAAASLPKHQQVESPTGAGAGGDHRSQRGHAASPARPSRPGGPQSRARVPSRAAPGKSEPPSKRPLSSKSQQSVSAEDDEEEDAGFFKGGKEDLLSSSVPKWPSSSTPRGGKDADGSLAKEEREPAIALAPRGGSLAPVKRPLPPPPGSSPRASHVPSRLPPRSAATVSPVAGTHPWPQYTTRAPPGHFSTTPMLSLRQRMMHARFRNPLSRQPARPSYRQGYNGRPNVEGKVLPGSNGKPNGQRIINGPQGTKWVVDLDRGLVLNAEGRYLQDSHGNPLRIKLGGDGRTIVDLEGTPVVSPDGLPLFGQGRHGTPLANAQDKPILSLGGKPLVGLEVIKKTTHPPTTTMQPTTTTTPLPTTTTPRPTTATTRRTTTTRRTTTRRPTTTVRTTTRTTTTTTPTPTTPIPTCPPGTLERHDDDGNLIMSSNGIPECYAEEDEFSGLETDTAVPTEEAYVIYDEDYEFETSRPPTTTEPSTTATTPRVIPEEGAISSFPEEEFDLAGRKRFVAPYVTYLNKDPSAPCSLTDALDHFQVDSLDEIIPNDLKKSDLPPQHAPRNITVVAVEGCHSFVIVDWDKATPGDVVTGYLVYSASYEDFIRNKWSTQASSVTHLPIENLKPNTRYYFKVQAQNPHGYGPISPSVSFVTESDNPLLVVRPPGGEPIWIPFAFKHDPSYTDCHGRQYVKRTWYRKFVGVVLCNSLRYKIYLSDNLKDTFYSIGDSWGRGEDHCQFVDSHLDGRTGPQSYVEALPTIQGYYRQYRQEPVRFGNIGFGTPYYYVGWYECGVSIPGKW

SEQ ID NO: 5503 - protein, 733 aa, Homo Sapiens
MAGGRETCLPLIGFILICLKMVASAKSAPEIPTIDQAYSKLSNSITVEWATVPGATSYLLTAEDGDTVIETTVANSPGTVTGLKAATWYEITIRSISAAGRSQASPPKQAKTVLAAPILEVSSPSSDSILVQWEAVYMAIAFSVSIMRANGLGSIWKENTTNTSLTFTSLEAGTLYTIKAYAWNANRIPGDDSTCNQRTSPRAPANIQVSFDSGALKASFSWARAEGAFNYTVMALSDSSELTCSTTFSSCTISSLQCGTEYLISVLASNDAGSSKSSSAMTLKTVACAPGRVTIQEDPPGHLSVAWSSVDLGDYYVVFVKSDDGLEVHCNTSLTQCNFLSECGFTYFISVFVYNKAGQSPLGDIFNYTTAPCCPSDINPVLVSSDRVEIVWSPVRGAELYETKAVDGYNMVECNDTTPACTLSALECDTKYNITVYSFNEVRGSNMSCTPQFITTAPCSPEIKNVSRDAFSMINVHWRSTNDDATYTVTAQGEKGLYQCSSTGESCTMRGLPCGSVFSVTAVAETQAGRSLPSYSVPLETVPCCPTGLTVTQITQSVINVSWTIGRVAQTHVAVLESHTGQSKCHTHQNHCLLGCITCGINYTVTLKAISATGLTADCSYQSYFSGACCPLGVKLYRLGPNGIRIYWQASRGSANYSTDLYGSKGIFTCTPSAGLSFCDVTEIPCGDVYTVMVSPVAKTGLKLTFCPKKIYSVTCSGSTLGMVIYRGKRNEE

SEQ ID NO: 5504 - protein, 499 aa, Homo Sapiens
  misc_feature (1)..(1): Xaa can be any naturally occurring amino acid
XEGAFNYTVMALSDSSELTCSTTFSSCTISSLQCGTEYLISVLASNDAGSSKSSSAMTLKTVACAPGRVTIQEDPPGHLSVAWSSVDLGDYYVVFVKSDDGLEVHCNTSLTQCNFLSECGFTYFISVFVYNKAGQSPLGDIFNYTTAPCCPSDINPVLVSSDRVEIVWSPVRGAELYETKAVDGYNMVECNDTTPACTLSALECDTKYNITVYSFNEVRGSNMSCTPQFITTAPCSPEIKNVSRDAFSMINVHWRSTNDDATYTVTAQGEKGLYQCSSTGESCTMRGLPCGSVFSVTAVAETQAGRSLPSYSVPLETVPCCPTGLTVTQITQSVINVSWTIGRVAQTHVAVLESHTGQSKCHTHQNHCLLGCITCGINYTVTLKAISATGLTADCSYQSYFSGACCPLGVKLYRLGPNGIRIYWQASRGSANYSTDLYGSKGIFTCTPSAGLSFCDVTEIPCGDVYTVMVSPVAKTGLKLTFCPKKIYSVIYRGKRNEE

SEQ ID NO: 5505 - protein, 46 aa, Homo Sapiens
MAVSDVPSLSVGKEVQWEKLIAKAASIRDICHINMVQICWQLFLKC

SEQ ID NO: 5506 - protein, 1237 aa, Homo Sapiens
MAVSDVPSLSVGKEVQWEKLIAKAASIRDICKQRPYQHGADMLAAISQVLNECTKPDQATPAALVLQGLHALCQAEVVCIRSTWNALSPKLSCDTRPLILKTLSELFSLVPSLTVNTTEYENFKVQVLSFLWTHTQNKDPIVANAAYRSLANFSAGEHTILHLPEKIRPEIPIPEELDDDEDVEDVDLSVPGSCYLKLLSLTPPLVLPALEEFFTSLVKQEMVNMPRGIYHSALKGGARSDQGKTVAGIPNFILKMYETNKQPGLKPGLAGGMLFCYDVSMYQSKDGKPLNRLMASRGRSFKQTSLALVHEVHIQLSEWHRAIFLPQAWLAYMNRAYHAILQGRLGELELQLKHGKEEPEEVQYKKSTAWLWVRDMLTDEITKAAAKESPVVKGNALLALSSLAVVVSRHEASLSSDSDGLLEVQPNFLSMKEWVSMVLDTLLVIVDSHYQPRGQLLSWFYYKSYSGENTASAIARSAAATALSLLVPVFIISCKEKVEEILNMLTARLPGKPSADESQAVQIHMGLALGMFLSRLCEEKLSDISGQEMNLLLMKSLDALENCCFDTSLEYNTGCILGVGLVLSLMSHSSQMQSRVHVAALLRKLSAHVDDSGSQSRTFQEVLAYTLSCVCTSAFSAGIIEATEAEDVMNKLRLLVENSQQTSGFALALGNIVHGLSVCGHGKAEDLGSKLLPAWIRIVLTEGTPTMLCLAALHGMVALVGSEGDVMQLKSEAIQTSHFQGRLNEVIRTLTQVISVSGVIGLQSNAVWLLGHLHLSTLSSSQSRASVPTDYSYLPESSFIGAAIGFFITGGKKGPESVPPSLLKVVMKPIATVGESYQYPPVNWAALLSPLMRLNFGEEIQQLCLEIMVTQAQSSQNAAALLGLWVTPPLIHSLSLNTKRYLLISAPLWIKHISDEQILGFVENLMVAVFKAASPLGSPELCPSALHGLSQAMKLPSPAHHLWSLLSEATGKIFDLLPNKIRRKDLELYISIAKCLLEMTDDDANRIAQVTKSNIEKAAFVKLYLVSQGRFPLVNLTDMLSVAVQHREKEVLAWMILHSLYQARIVSHANTGVLKRMEWLLELMGYIRNVAYQSTSFHNTALDKALDFFLLIFATAVVAWADHTAPLLLGLSASWLPWHQENGPAGPVPSFLGRSPMHRVTLQEVLTLLPNSMALLLQKEPWKEQTQKFIDWLFSIMESPKEALSAQSRDLLKATLLSLRVLPEFKKKAVWTRAYGW

SEQ ID NO: 5507 - protein, 99 aa, Homo Sapiens
MLTARLPGKPSADESQAVQIHMGLALGMFLSRLCEEKLSDISGQEMNLLLMKSLDALENCCFDTSLEYNTGCILGVGLVLSLMSHSSQMQSRVHVAALL

SEQ ID NO: 5508 - protein, 128 aa, Homo Sapiens
MLTARLPGKPSADESQAVQIHMGLALGMFLSRLCEEKLSDISGQEMNLLLMKSLDALENCCFDTSLEYNTGCILGVGLVLSLMSHSSQMQSRVHVAALLRKLSAHVDDSGSQSRTFQEVLAYTLSCVC

SEQ ID NO: 5509 - protein, 180 aa, Homo Sapiens
MPKVFSVYFVCLCPALGKICDISGQEMNLLLMKSLDALENCCFDTSLEYNTGCILGVGLVLSLMSHSSQMQSRVHVAALLRKLSAHVDDSGSQSRTFQEVLAYTLSCVCTSAFSAGIIEATEAEDVMNKLRLLVENSQQTSGFALALGNIVHGLSVCGHGKAEDLGSKLLPAWIRIVLTE

SEQ ID NO: 5510 - protein, 1801 aa, Homo Sapiens
MSDDIRKRFEFPNSLIQSQAVGHLIAAVLKENGFSEKIHQSTNQTPALNLLWEKCCSDNVVVRTACCEGLVALVAQDHAEFSYVLNGILNLIPSTRNTHGLIKAIMHLLQMQALKEGQGGEKNIQSIYTIRNHPHPLITVLEHRPDCWPVFLQQLTAFFQQCPERLEVSCIQIMAPFLWYLYCEPSQLQEYAKLRLALLKVLLQPQVLCDKDQPSILEQQILQLCCDIVPCLQVKDLIQTTEAMMFIEEVCLSLLRHPVFWKIQLTQMSLQLLCVSEVSLKITGECSSSIHLLEHSVELLKEDFPVELVIIGIALLLLQTPASQQKPILNLALKLLSVTEDQKIPKSSLLLVMPILQILSSTALEDCISVDEEGPSRQQLALNLLEMIQQECYRDDHQKLSYKLVCPVTSMYGTIFTAWRILEVMTDSSAASDWLASVESLLPITAVIPAPAFLLLAHLLVEDKGQNLHQILKVTTELAQADSSQVPNLIPVLMFKLGRPLEPILYNDILYTLPKLGVHKVCIGQILRIIQLLGTTPRLRAVTLRLLTSLWEKQDRVYPELQRFMAVSDVPSLSVGKEVQWEKLIAKAASIRDICKQRPYQHGADMLAAISQVLNECTKPDQATPAALVLQGLHALCQAEVVCIRSTWNALSPKLSCDTRPLILKTLSELFSLVPSLTVNTTEYENFKVQVLSFLWTHTQNKDPIVANAAYRSLANFSAGEHTILHLPEKIRPEIPIPEELDDDEDVEDVDLSVPGSCYLKLLSLTPPLVLPALEEFFTSLVKQEMVNMPRGIYHSALKGGARSDQGKTVAGIPNFILKMYETNKQPGLKPGLAGGMLFCYDVSMYQSKDGKPLNRLMASRGRSFKQTSLALVHEVHIQLSEWHRAIFLPQAWLAYMNRAYHAILQGRLGELELQLKHGKEEPEEVQYKKSTAWLWVRDMLTDEITKAAAKESPVVKGNALLALSSLAVVVSRHEASLSSDSDGLLEVQPNFLSMKEWVSMVLDTLLVIVDSHYQPRGQLLSWFYYKSYSGENTASAIARSAAATALSLLVPVFIISCKEKVEEILNMLTARLPGKPSADESQAVQIHMGLALGMFLSRLCEEKLSDISGQEMNLLLMKSLDALENCCFDTSLEYNTGCILGVGLVLSLMSHSSQMQSRVHVAALLRKLSAHVDDSGSQSRTFQEVLAYTLSCVCTSAFSAGIIEATEAEDVMNKLRLLVENSQQTSGFALALGNIVHGLSVCGHGKAEDLGSKLLPAWIRIVLTEGTPTMLCLAALHGMVALVGSEGDVMQLKSEAIQTSHFQGRLNEVIRTLTQVISVSGVIGLQSNAVWLLGHLHLSTLSSSQSRASVPTDYSYLPESSFIGAAIGFFITGGKKGPESVPPSLLKVVMKPIATVGESYQYPPVNWAALLSPLMRLNFGEEIQQLCLEIMVTQAQSSQNAAALLGLWVTPPLIHSLSLNTKRYLLISAPLWIKHISDEQILGFVENLMVAVFKAASPLGSPELCPSALHGLSQAMKLPSPAHHLWSLLSEATGKIFDLLPNKIRRKDLELYISIAKCLLEMTDDDANRIAQVTKSNIEKAAFVKLYLVSQGRFPLVNLTDMLSVAVQHREKEVLAWMILHSLYQARIVSHANTGVLKRMEWLLELMGYIRNVAYQSTSFHNTALDKALDFFLLIFATAVVAWADHTAPLLLGLSASWLPWHQENGPAGPVPSFLGRSPMHRVTLQEVLTLLPNSMALLLQKEPWKEQTQKFIDWLFSIMESPKEALSAQSRDLLKATLLSLRVLPEFKKKAVWTRAYGW

SEQ ID NO: 5511 - protein, 1801 aa, Homo Sapiens; identical to SEQ ID NO: 5510

SEQ ID NO: 5512 - protein, 181 aa, Homo Sapiens
MLPAATEGQKDMVWKWMPLLLLLVCVATMCSAQDRTDLLNVCMDAKHHKTKPGPEDKLHDQCSPWKKNACCTASTSQELHKDTSRLYNFNWDHCGKMEPACKRHFIQDTCLYECSPNLGPWIQQVNQSWRKERFLDVPLCKEDCQRWWEDCHTSHTCKSNWHRGWDWTSGVNKCPAGALCR

SEQ ID NO: 5513 - protein, 198 aa, Homo Sapiens
MLPAATELRLQGQKDMVWKWMPLLLLLVCVATMCSAQDRTDLLNVCMDAKHHKTKPGPEDKLHDQCSPWKKNACCTASTSQELHKDTSRLYNFNWDHCGKMEPACKRHFIQDTCLYECSPNLGPWIQQVNQSWRKERFLDVPLCKEDCQRWWEDCHTSHTCKSNWHRGWDWTSGVNKCPAGALCRTFESYFPTPAALC

SEQ ID NO: 5514 - protein, 214 aa, Homo Sapiens
MLPAATEVQCSPWKKNACCTASTSQELHKDTSRLYNFNWDHCGKMEPACKRHFIQDTCLYECSPNLGPWIQQVNQSWRKERFLDVPLCKEDCQRWWEDCHTSHTCKSNWHRGWDWTSGVNKCPAGALCRTFESYFPTPAALCEGLWSHSYKVSNYSRGSGRCIQMWFDSAQGNPNEEVARFYAAAMHVNAGEMLHGTGGLLLSLALMLQLWLLG

SEQ ID NO: 5515 - protein, 210 aa, Homo Sapiens
MLPAATEVQGQKDMVWKWMPLLLLLVCVATMCSAQDRTDLLNVCMDAKHHKTKPGPEDKLHDQCSPWKKNACCTASTSQELHKDTSRLYNFNWDHCGKMEPACKRHFIQDTCLYECSPNLGPWIQQVNQSWRKERFLDVPLCKEDCQRWWEDCHTSHTCKSNWHRGWDWTSGVNKCPAGALCRTFESYFPTPAALCEGLWSHSYKVSNYS

SEQ ID NO: 5516 - protein, 148 aa, Homo Sapiens
MLPAATEVQKDHAGSCGEGNLKGKKLEEGRLDTKHRAMLRLQGQKDMVWKWMPLLLLLVCVATMCSAQDRTDLLNVCMDAKHHKTKPGPEDKLHDQCSPWKKNACCTASTSQELHKDTSRLYNFNWDHCGKMEPACKRHFIQDTCLYE

SEQ ID NO: 5517 - protein, 251 aa, Homo Sapiens
MLPAATEVQLRLQGQKDMVWKWMPLLLLLVCVATMCSAQDRTDLLNVCMDAKHHKTKPGPEDKLHDQCSPWKKNACCTASTSQELHKDTSRLYNFNWDHCGKMEPACKRHFIQDTCLYECSPNLGPWIQQVNQSWRKERFLDVPLCKEDCQRWWEDCHTSHTCKSNWHRGWDWTSAALCEGLWSHSYKVSNYSRGSGRCIQMWFDSAQGNPNEEVARFYAAAMHVNAGEMLHGTGGLLLSLALMLQLWLLG

SEQ ID NO: 5518 - protein, 244 aa, Homo Sapiens
MLPAATEVQLRLQGQKDMVWKWMPLLLLLVCVATMCSAQDRTDLLNVCMDAKHHKTKPGPEDKLHDQCSPWKKNACCTASTSQELHKDTSRLYNFNWDHCGKMEPACSATSSRTPVSMSAHQPGALDPAGIRAGAKNASWMCPYAKRTVSAGGRIVTPPTRARATGTEDGTGPQELTSAQLGLSAAPLSPTSPLQLPFVKASGVTHTRSATTAEGAAAASRCGLIQPRATPTRKWRGSMLQPCM

SEQ ID NO: 5519 - protein, 169 aa, Homo Sapiens
MVWKWMPLLLLLVCVATMCSAQDRTDLLNVCMDAKHHKTKPGPEDKLHDQCSPWKKNACCTASTSQELHKDTSRLYNFNWDHCGKMEPACKRHFIQDTCLYECSPNLGPWIQQVNQSWRKERFLDVPLCKEDCQRWWEDCHTSHTCKSNWHRGWDWTSAALCEGLWSHS

SEQ ID NO: 5520 - protein, 171 aa, Homo Sapiens
MVWKWMPLLLLLVCVATMCSAQDRTDLLNVCMDAKHHKTKPGPEDKLHDQCSPWKKNACCTASTSQELHKDTSRLYNFNWDHCGKMEPACKRHFIQDTCLYECSPNLGPWIQQVNQSWRKERFLDVPLCKEDCQRWWEDCHTSHTCKSNWHRGWDWTSGVNKCPAGALCRT

SEQ ID NO: 5521 - protein, 255 aa, Homo Sapiens
MVWKWMPLLLLLVCVATMCSAQDRTDLLNVCMDAKHHKTKPGPEDKLHDQCSPWKKNACCTASTSQELHKDTSRLYNFNWDHCGKMEPACKRHFIQDTCLYECSPNLGPWIQQVNQSWRKERFLDVPLCKEDCQRWWEDCHTSHTCKSNWHRGWDWTSGVNKCPAGALCRTFESYFPTPAALCEGLWSHSYKVSNYSRGSGRCIQMWFDSAQGNPNEEVARFYAAAMHVNAGEMLHGTGGLLLSLALMLQLWLLG

SEQ ID NO: 5522 - protein, 74 aa, Homo Sapiens
MAWQMMQLLLLALVTAAGSAQPRSARARTDLLNVCMNAKHHKTQPSPEDELYGQCSPWKKNACCTASTSQELHK

SEQ ID NO: 5523 - protein, 104 aa, Homo Sapiens
MAWQMMQLLLLALVTAAGSAQPRSARARTDLLNVCMNAKHHKTQPSPEDELYGQCSPWKKNACCTASTSQELHKDTSRLYNFNWDHCGKMEPTCKRHFIQDSCL

SEQ ID NO: 5524 - protein, 178 aa, Homo Sapiens
MDMAWQMMQLLLLALVTAAGSAQPRSARARTDLLNVCMNAKHHKTQPSPEDELYGQCSPWKKNACCTASTSQELHKDTSRLYNFNWDHCGKMEPTCKRHFIQDSCLYECSPNLGPWIRQVNQSWRKERILNVPLCKEDCERWWEDCRTSYTCKSNWHKGWNWTSGINECPAGALCSTF

SEQ ID NO: 5525 - protein, 245 aa, Homo Sapiens
MDMAWQMMQLLLLALVTAAGSAQPRSARARTDLLNVCMNAKHHKTQPSPEDELYGQCSPWKKNACCTASTSQELHKDTSRLYNFNWDHCGKMEPTCKRHFIQDSCLYECSPNLGPWIRQVNQSWRKERILNVPLCKEDCERWWEDCRTSYTCKSNWHKGWNWTSGINECPAGALCSTFESYFPTPAALCEGLWSHSFKVSNYSRGSGRCIQMWFDSAQGNPNEEVAKFYAAAMNAGAPSRGIIDS

SEQ ID NO: 5526 - protein, 172 aa, Homo Sapiens
MDMAWQMMQLLLLALVTAAGSAQPRSARARTDLLNVCMNAKHHKTQPSPEDELYGQVGAPQGPSPGSVPLDDLPGAEEPEYGGDGCGGERLSPVSSPPSAVPGRRMPAARPAPARSCTRTPPACTTLTGITVVRWNPPASATLSRTAVSMSAHPTWGPGSGRSTRAGAKSAF

SEQ ID NO: 5527 - protein, 86 aa, Homo Sapiens
MGLSAAAPLWGPPGLLLAIALHPALSVPPRRDYCVLGAGPAGLQMAYFLQRAGRDYAVFERAPRPGSFFTRYPRHRKLISINKRYT

SEQ ID NO: 5528 - protein, 684 aa, Homo Sapiens
MGLSAAAPLWGPPGLLLAIALHPALSVPPRRDYCVLGAGPAGLQMAYFLQRAGRDYAVFERAPRPGSFFTRYPRHRKLISINKRYTGKANAEFNLRHDWNSLLSHDPRLLFRHYSRAYFPDARDMVRYLGDFADTLGLRVQYNTTIAHVTLDKDRQAWNGHYFILTDQKGQVHQCSVLFVATGLSVPNQVDFPGSEYAEGYESVSVDPEDFVGQNVLILGRGNSAFETAENILGVTNFIHMLSRSRVRLSWATHYVGDLRAINNGLLDTYQLKSLDGLLESDLTDLAILKDSKGKFHVTPKFFLEEANTNQSADSITLPQDDNDNFAMRVPYDRVIRCLGWNFDFSIFNKSLRLNSGNAFGKKYPLIRASYESKGSRGLFILGTASHSVDYRKSAGGFIHGFRYTVRAVHRLLEHRHHSVTWPATELPITQLTSSIVRRVNEASGLYQMFGVLADVILLKENSTAFEYLEEFPIQMLAQLETLTGRKAKHGLFVINMEYGRNFSGPDKDVFFDDRSVGHTEDAWQSNFLHPVIYYYRYLPTEQEVRFRPAHWPLPRPTAIHHIVEDFLTDWTAPIGHILPLRRFLENCLDTDLRSFYAESCFLFALTRQKLPPFCQQGYLRMQGLVSTESLWQHRVESRLLRDYAPTGRRLEDSSQQLGDQEPLGSPLAPGPLAQSVDSNKEEL

SEQ ID NO: 5529 - protein, 684 aa, Homo Sapiens; identical to SEQ ID NO: 5528

SEQ ID NO: 5530 - protein, 684 aa, Homo Sapiens; identical to SEQ ID NO: 5528

SEQ ID NO: 5531 - protein, 157 aa, Homo Sapiens
MLPEQGPQPSTMPLWCLLAACTSLPRQAATMLEEAASPNEAVHASTSGSGALTDQTFTDLSAAEASSEEVPDFMEVPHSVHHKINCFFYLEKQLCQLPSPLCLSSLLTLKLKTTVPAPGRWWSFQPHKAFPLLVGTPGSWQSTIDPAWAAPSQPSPG

SEQ ID NO: 5532 - protein, 57 aa, Homo Sapiens
MAAVRALVASRLAAASAFTSLSPGGRTPSQRAALHLSVPRPAARVALDPGAPEPWRG

SEQ ID NO: 5533 - protein, 237 aa, Homo Sapiens
MAAVRALVASRLAAASAFTSLSPGGRTPSQRAALHLSVPRPAARVALVLSGCGVYDGTEIHEASAILVHLSRGGAEVQIFAPDVPQMHVIDHTKGQPSEGESRNVLTESARIARGKITDLANLSAANHDAAIFPGGFGAAKNLLCCIAPVLAAKVLRGVEVTVGHEQEEGGKWPYAGTAEAIKALGAKHCVKEVVEAHVDQKNKVVTTPAFMCETALHYIHDGIGAMVRKVLELTGK

SEQ ID NO: 5534 - protein, 268 aa, Homo Sapiens
MAAVRALVASRLAAASAFTSLSPGGRTPSQRAALHLSVPRPAARVALVLSGCGVYDGTEIHEASAILVHLSRGGAEVQIFAPDVPQMHVIDHTKGQPSEGESRNVLTESARIARGKITDLANLSAANHDAAIFPGGFGAAKNLSTFAVDGKDCKVNKEVERVLKEFHQAGKPIGLCCIAPVLAAKVLRGVEVTVGHEQEEGGKWPYAGTAEAIKALGAKHCVKEVVEAHVDQKNKVVTTPAFMCETALHYIHDGIGAMVRKVLELTGK

SEQ ID NO: 5535 - protein, 182 aa, Homo Sapiens
MHVIDHTKGQPSEGESRNVLTESARIARGKITDLANLSAANHDAAIFPGGFGAAKNLSTFAVDGKDCKVNKEVERVLKEFHQAGKPIGLCCIAPVLAAKVLRGVEVTVGHEQEEGGKWPYAGTAEAIKALGAKHCVKEVVEAHVDQKNKVVTTPAFMCETALHYIHDGIGAMVRKVLELTGK

SEQ ID NO: 5536 - protein, 224 aa, Homo Sapiens; identical to SEQ ID NO: 1864

SEQ ID NO: 5537 - protein, 106 aa, Homo Sapiens
  misc_feature (1)..(1): Xaa can be any naturally occurring amino acid
XDGTEIHEASAILVHLSRGGAEVQIFAPDVPQMHVIDHTKGQPSEGESRNVLTESARIARGKITDLANLSAANHDAAIFPGGFGAAKNLGSPYSDPAKHRSLGLQL

SEQ ID NO: 5538 - protein, 137 aa, Homo Sapiens
  misc_feature (1)..(1): Xaa can be any naturally occurring amino acid
XDGTEIHEASAILVHLSRGGAEVQIFAPDVPQMHVIDHTKGQPSEGESRNVLTESARIARGKITDLANLSAANHDAAIFPGGFGAAKNLSTFAVDGKDCKVNKEVERVLKEFHQAGKPIGGSPYSDPAKHRSLGLQL

SEQ ID NO: 5539 - protein, 537 aa, Homo Sapiens
MLNTLQTNAGYLEQVKRQRGDPQTQLEAMELYLARSGLQVEDLDRLNIIHVTGTKGKGSTCAFTECILRSYGLKTGFFSSPHLVQVRERIRINGQPISPELFTKYFWRLYHRLEETKDGSCVSMPPYFRFLTLMAFHVFLQEKVDLAVVEVGIGGAYDCTNIIRKPVVCGVSSLGIDHTSLLGDTVEKIAWQKGGIFKQGVPAFTVLQPEGPLAVLRDRAQQISCPLYLCPMLEALEEGGPPLTLGLEGEHQRSNAALALQLAHCWLQRQDRHGAGEPKASRPGLLWQLPLAPVFQPTSHMRLGLRNTEWPGRTQVLRRGPLTWYLDGAHTASSAQACVRWFRQALQGRERPSGGPEVRVLLFNATGDRDPAALLKLLQPCQFDYAVFCPNLTEVSSTGNADQQNFTVTLDQVLLRCLEHQQHWNHLDEEQASPDLWSAPSPEPGGSASLLLAPHPPHTCSASSLVFSCISHALQWISQGRDPIFQPPSPPKGLLTHPVAHSGASILREAAAIHVLVTGSLHLVGGVLKLLEPALSQ

SEQ ID NO: 5540 - protein, 265 aa, Homo Sapiens
MLNTLQTNAGYLEQVKRQRGDPQTQLEAMELYLARSGLQVEDLDRLNIIHVTGTKGKGSTCAFTECILRSYGLKTGFFSSPHLVQVRERIRINGQPISPELFTKYFWRLYHRLEETKDGSCVSMPPYFRFLTLMAFHVFLQEKVDLAVVEVGIGGAYDCTNIIRKPVVCGVSSLGIDHTSLLGDTVEKIAWQKGGIFKQGVPAFTVLQPEGPLAVLRDRAQQISVLGSQRHPGQGSCGSCPWHLCSSPHPTCGSGFGTRSGRAGR

SEQ ID NO: 5541 - protein, 194 aa, Homo Sapiens
MLNTLQTNAGYLEQVKRQRGDPQTQLEAMELYLARSGLQVEDLDRLNIIHVTGTKGKGSTCAFTECILRSYGLKTGFFSSPHLVQVRERIRINGQPISPELFTKYFWRLYHRLEETKVDLAVVEVGIGGAYDCTNIIRKPVVCGVSSLGIDHTSLLGDTVEKIAWQKGGIFKQGVPAFTVLQPEGPLAVLRDRA

SEQ ID NO: 5542 - protein, 375 aa, Homo Sapiens
MSRARSHLRAALFLAAASARGITTQVAARRGLSAWPVPQEPSMEYQDAVRMLNTLQTNAGYLEQVKRQRGDPQTQLEAMELYLARSGLQVEDLDRLNIIHVTGTKGKGSTCAFTECILRSYGLKTGFFSSPHLVQVRERIRINGQPISPELFTKYFWRLYHRLEETKDGSCVSMPPYFRFLTLMAFHVFLQEKVDLAVVEVGIGGAYDCTNIIRKPVVCGVSSLGIDHTSLLGDTVEKIAWQKGGIFKQGVPAFTVLQPEGPLAVLRDRAQQISVLGSQRHPGQGSCGSCPWHLCSSPHPTCGSGFGTRSGRAGRRCCGAGPSPGTWTVRTPPAARRPACAGSARRCRAARGRAVAPRFESCSSMLPGTGTRRPC

SEQ ID NO: 5543 - protein, 587 aa, Homo Sapiens
MSRARSHLRAALFLAAASARGITTQVAARRGLSAWPVPQEPSMEYQDAVRMLNTLQTNAGYLEQVKRQRGDPQTQLEAMELYLARSGLQVEDLDRLNIIHVTGTKGKGSTCAFTECILRSYGLKTGFFSSPHLVQVRERIRINGQPISPELFTKYFWRLYHRLEETKDGSCVSMPPYFRFLTLMAFHVFLQEKVDLAVVEVGIGGAYDCTNIIRKPVVCGVSSLGIDHTSLLGDTVEKIAWQKGGIFKQGVPAFTVLQPEGPLAVLRDRAQQISCPLYLCPMLEALEEGGPPLTLGLEGEHQRSNAALALQLAHCWLQRQDRHGAGEPKASRPGLLWQLPLAPVFQPTSHMRLGLRNTEWPGRTQVLRRGPLTWYLDGAHTASSAQACVRWFRQALQGRERPSGGPEVRVLLFNATGDRDPAALLKLLQPCQFDYAVFCPNLTEVSSTGNADQQNFTVTLDQVLLRCLEHQQHWNHLDEEQASPDLWSAPSPEPGGSASLLLAPHPPHTCSASSLVFSCISHALQWISQGRDPIFQPPSPPKGLLTHPVAHSGASILREAAAIHVLVTGSLHLVGGVLKLLEPALSQ

SEQ ID NO: 5544 - protein, 375 aa, Homo Sapiens; identical to SEQ ID NO: 5542

SEQ ID NO: 5545 - protein, 561 aa, Homo Sapiens
MSRARSHLRAALFLAAASARGITTQVAARRGLSAWPVPQEPSMEYQDAVRMLNTLQTNAGYLEQVKRQRGDPQTQLEAMELYLARSGLQVEDLDRLNIIHVTGTKGKGSTCAFTECILRSYGLKTGFFSSPHLVQVRERIRINGQPISPELFTKYFWRLYHRLEETKVDLAVVEVGIGGAYDCTNIIRKPVVCGVSSLGIDHTSLLGDTVEKIAWQKGGIFKQGVPAFTVLQPEGPLAVLRDRAQQISCPLYLCPMLEALEEGGPPLTLGLEGEHQRSNAALALQLAHCWLQRQDRHGAGEPKASRPGLLWQLPLAPVFQPTSHMRLGLRNTEWPGRTQVLRRGPLTWYLDGAHTASSAQACVRWFRQALQGRERPSGGPEVRVLLFNATGDRDPAALLKLLQPCQFDYAVFCPNLTEVSSTGNADQQNFTVTLDQVLLRCLEHQQHWNHLDEEQASPDLWSAPSPEPGGSASLLLAPHPPHTCSASSLVFSCISHALQWISQGRDPIFQPPSPPKGLLTHPVAHSGASILREAAAIHVLVTGSLHLVGGVLKLLEPALSQ

SEQ ID NO: 5546 - protein, 1976 aa, Homo Sapiens
MGVLKVWLGLALALAEFAVLPHHSEGACVYQDSLLADATIWKPDSCQSCRCHGDIVICKPAVCRNPQCAFEKGEVLQIAANQCCPECVLRTPGSCHHEKKIHEHGTEWASSPCSVCSCNHGEVRCTPQPCPPLSCGHQELAFIPEGSCCPVCVGLGKPCSYEGHVFQDGEDWRLSRCAKCLCRNGVAQCFTAQCQPLFCNQDETVVRVPGKCCPQCSARSCSAAGQVYEHGEQWSENACTTCICDRGEVRCHKQACLPLRCGKGQSRARRHGQCCEECVSPAGSCSYDGVVRYQDEMWKGSACEFCMCDHGQVTCQTGECAKVECARDEELIHLDGKCCPECISRNGYCVYEETGEFMSSNASEVKRIPEGEKWEDGPCKVCECRGAQVTCYEPSCPPCPVGTLALEVKGQCCPDCTSVHCHPDCLTCSQSPDHCDLCQDPTKLLQNGWCVHSCGLGFYQAGSLCLACQPQCSTCTSGLECSSCQPPLLMRHGQCVPTCGDGFYQDRHSCAVCHESCAGCWGPTEKHCLACRDPLHVLRDGGCESSCGKGFYNRQGTCSACDQSCDSCGPSSPRCLTCTEKTVLHDGKCMSECPGGYYADATGRCKVCHNSCASCSGPTPSHCTACSPPKALRQGHCLPRCGEGFYSDHGVCKACHSSCLACMGPAPSHCTGCKKPEEGLQVEQLSDVGIPSGECLAQCRAHFYLESTGICEACHQSCFRCAGKSPHNCTDCGPSHVLLDGQCLSQCPDGYFHQEGSCTECHPTCRQCHGPLESDCISCYPHISLTNGNCRTSCREEQFLNLVGYCADCHHLCQHCAADLHNTGSICLRCQNAHYLLLGDHCVPDCPSGYYAERGACKKCHSSCRTCQGRGPFSCSSCDTNLVLSHTGTCSTTCFPGHYLDDNHVCQPCNTHCGSCDSQASCTSCRDPNKVLLFGECQYESCAPQYYLDFSTNTCKECDWSCSACSGPLKTDCLQCMDGYVLQDGACVEQCLSSFYQDSGLCKNCDSYCLQCQGPHECTRCKGPFLLLEAQCVQECGKGYFADHAKHKCTACPQGCLQCSHRDRCHLCDHGFFLKSGLCVYNCVPGFSVHTSNETCSGKIHTPSLHVNGSLILPIGSIKPLDFSLLNVQDQEGRVEDLLFHVVSTPTNGQLVLSRNGKEVQLDKAGRFSWKDVNEKKVRFVHSKEKLRKGYLFLKISDQQFFSEPQLINIQAFSTQAPYVLRNEVLHISRGERATITTQMLDIRDDDNPQDVVIEIIDPPLHGQLLQTLQSPATPIYQFQLDELSRGLLHYAHDGSDSTSDVAVLQANDGHSFHNILFQVKTVPQNDRGLQLVANSMVWVPEGGMLQITNRILQAEAPGASAEEIIYKITQDYPQFGEVVLLVNMPADSPADEGQHLPDGRTATPTSTFTQQDINEGIVWYRHSGAPAQSDSFRFEVSSASNAQTRLESHMFNIAILPQTPEAPKVSLEASLHMTAREDGLTVIQPHSLSFINSEKPSGKIVYNITLPLHPNQGIIEHRDHPHSPIRYFTQEDINQGKVMYRPPPAAPHLQELMAFSFAGLPESVKFHFTVSDGEHTSPEMVLTIHLLPSDQQLPVFQVTAPRLAVSPGGSTSVGLQVVVRDAETAPKELFFELRRPPQHGVLLKHTAEFRRPMATGDTFTYEDVEKNALQYIHDGSSTREDSMEISVTDGLTVTMLEVRVEVSLSEDRGPRLAAGSSLSITVASKSTAIITRSHLAYVDDSSPDPEIWIQLNYLPSYGTLLRISGSEVEELSEVSNFTMEDINNKKIRYSAVFETDGHLVTDSFYFSVSDMDHNHLDNQIFTIMITPAENPPPVIAFADLITVDEGGRAPLSFHHFFATDDDDNLQRDAIIKLSALPKYGCIENTGTGDRFGPETASDLEASFPIQDVLENYIYYFQSVHESIEPTHDIFSFYVSDGTSRSEIHSINITIEVKTLEVGKVEPLTTIFHTIRELSL

SEQ ID NO: 5547 - protein, 4012 aa, Homo Sapiens
MGVLKVWLGLALALAEFAVLPHHSEGACVYQDSLLADATIWKPDSCQSCRCHGDIVICKPAVCRNPQCAFEKGEVLQIAANQCCPECVLRTPGSCHHEKKIHEHGTEWASSPCSVCSCNHGEVRCTPQPCPPLSCGHQELAFIPEGSCCPVCVGLGKPCSYEGHVFQDGEDWRLSRCAKCLCRNGVAQCFTAQCQPLFCNQDETVVRVPGKCCPQCSARSCSAAGQVYEHGEQWSENACTTCICDRGEVRCHKQACLPLRCGKGQSRARRHGQCCEECVSPAGSCSYDGVVRYQDEMWKGSACEFCMCDHGQVTCQTGECAKVECARDEELIHLDGKCCPECISRNGYCVYEETGEFMSSNASEVKRIPEGEKWEDGPCKVCECRGAQVTCYEPSCPPCPVGTLALEVKGQCCPDCTSVHCHPDCLTCSQSPDHCDLCQDPTKLLQNGWCVHSCGLGFYQAGSLCLACQPQCSTCTSGLECSSCQPPLLMRHGQCVPTCGDGFYQDRHSCAVCHESCAGCWGPTEKHCLACRDPLHVLRDGGCESSCGKGFYNRQGTCSACDQSCDSCGPSSPRCLTCTEKTVLHDGKCMSECPGGYYADATGRCKVCHNSCASCSGPTPSHCTACSPPKALRQGHCLPRCGEGFYSDHGVCKACHSSCLACMGPAPSHCTGCKKPEEGLQVEQLSDVGIPSGECLAQCRAHFYLESTGICEACHQSCFRCAGKSPHNCTDCGPSHVLLDGQCLSQCPDGYFHQEGSCTECHPTCRQCHGPLESDCISCYPHISLTNGNCRTSCREEQFLNLVGYCADCHHLCQHCAADLHNTGSICLRCQNAHYLLLGDHCVPDCPSGYYAERGACKKCHSSCRTCQGRGPFSCSSCDTNLVLSHTGTCSTTCFPGHYLDDNHVCQPCNTHCGSCDSQASCTSCRDPNKVLLFGECQYESCAPQYYLDFSTNTCKECDWSCSACSGPLKTDCLQCMDGYVLQDGACVEQCLSSFYQDSGLCKNCDSYCLQCQGPHECTRCKGPFLLLEAQCVQECGKGYFADHAKHKCTACPQGCLQCSHRDRCHLCDHGFFLKSGLCVYNCVPGFSVHTSNETCSGKIHTPSLHVNGSLILPIGSIKPLDFSLLNVQDQEGRVEDLLFHVVSTPTNGQLVLSRNGKEVQLDKAGRFSWKDVNEKKVRFVHSKEKLRKGYLFLKISDQQFFSEPQLINIQAFSTQAPYVLRNEVLHISRGERATITTQMLDIRDDDNPQDVVIEIIDPPLHGQLLQTLQSPATPIYQFQLDELSRGLLHYAHDGSDSTSDVAVLQANDGHSFHNILFQVKTVPQNDRGLQLVANSMVWVPEGGMLQITNRILQAEAPGASAEEIIYKITQDYPQFGEVVLLVNMPADSPADEGQHLPDGRTATPTSTFTQQDINEGIVWYRHSGAPAQSDSFRFEVSSASNAQTRLESHMFNIAILPQTPEAPKVSLEASLHMTAREDGLTVIQPHSLSFINSEKPSGKIVYNITLPLHPNQGIIEHRDHPHSPIRYFTQEDINQGKVMYRPPPAAPHLQELMAFSFAGLPESVKFHFTVSDGEHTSPEMVLTIHLLPSDQQLPVFQVTAPRLAVSPGGSTSVGLQVVVRDAETAPKELFFELRRPPQHGVLLKHTAEFRRPMATGDTFTYEDVEKNALQYIHDGSSTREDSMEISVTDGLTVTMLEVRVEVSLSEDRGPRLAAGSSLSITVASKSTAIITRSHLAYVDDSSPDPEIWIQLNYLPSYGTLLRISGSEVEELSEVSNFTMEDINNKKIRYSAVFETDGHLVTDSFYFSVSDMDHNHLDNQIFTIMITPAENPPPVIAFADLITVDEGGRAPLSFHHFFATDDDDNLQRDAIIKLSALPKYGCIENTGTGDRFGPETASDLEASFPIQDVLENYIYYFQSVHESIEPTHDIFSFYVSDGTSRSEIHSINITIERKNDEPPRMTLQPLRVQLSSGVVISNSSLSLQDLDTPDNELIFVLTKKPDHGHVLWRQTASEPLENGRVLVQGSTFTYQDILAGLVGYVPSVPGMVVDEFQFSLTDGLHVDTGRMKIYTELPASDTPHLAINQGLQLSAGSVARITEQHLKVTDIDSDDHQVMYIMKEDPGAGRLQMMKHGNLEQISIKGPIRSFTQADISQGHVEYSHGTGEPGGSFAFKFDVVDGEGNRLIDKSFSISILEDKSPPVITTNKGLVLDENSVKKITTLQLSATDQDSGPTELIYRITRQPQLGHLEHAASPGIQISSFTQADLTSRNVQYVHSSEAEKHSDAFSFTLSDGVSEVTQTFHITLHPVDDSLPVVQNLGMRVQEGMRKTITEFELKAVDADTEAESVTFTIVQPPRHGTIERTSNGQHFHLTSTFTMKDIYQNRVSYSHDGSNSLKDRFTFTVSDGTNPFFIIEEGGKEIMTAAPQPFRVDILPVDDGTPRIVTNLGLQWLEYMDGKATNLITKKELLTMDPDTEDAQLVYEITTGPKHGFVENKLQPGRAAATFTQEDVNLGLIRYVLHKEKIREMMDSFQFLVKDSKPNVVSDNVFHIQWSLISFKYTSYNVSEKAGSVSVTVQRTGNLNQYAIVLCRTEQGTASSSSRVSSQPGQQDYVEYAGQVQFDEREDTKSCTIVINDDDVFENVESFTVELSMPAYALLGEFTQAKVIINDTEDEPTLEFDKKIYWVNESAGFLFAPIERKGDASSIVSAICYTVPKSAMGSSLYALESGSDFKSRGMSAASRVIFGPGVTMSTCDVMLIDDSEYEEEEEFEIALADASDNARIGRVATAKVLISGPNDASTVSLGNTAFTVSEDAGTVKIPVIRHGTDLSTFASVWCATRPSDPASATPGVDYVPSSRKVEFGPGVIEQYCTLTILDDTQYPVIEGLETFVVFLSSAQGAELTKPFQAVIAINDTFQDVPSMQFAKDLLLVKEKEGVLHVPITRSGDLSYESSVRCYTQSHSAQVMEDFEERQNADSSRITFLKGDKVKNCTVYIHDDSMFEPEEQFRVYLGLPLGNHWSGARIGKNNMATITISNDEDAPTIEFEEAAYQVREPAGPDAIAILNIKVIRRGDQNRTSKVRCSTRDGSAQSGVDYYPKSRVLKFSPGVDHIFFKVEILSNEDREWHESFSLVLGPDDPVEAVLGDVTTATVTILDQEAAGSLILPAPPIVVTLADYDHVEEVTKEGVKKSPSPGYPLVCVTPCDPHFPRYAVMKERCSEAGINQTSVQFSWEVAAPTDGNGARSPFETITDNTPFTSVNHMVLDSIYFSRRFHVRCVAKAVDKVGHVGTPLRSNIVTIGTDSAICHTPVVAGTSRGFQAQSFIATLKYLDVKHKEHPNRIHISVQIPHQDGMLPLISTMPLHNLHFLLSESIYRHQHVCSNLVTTYDLRGISEAGFLDDVVYDSTALGPGYDRPFQFDPSVREPKTIQLYKHLNLKSCVWTFDAYYDMTELIDVCGGSVTADFQVRDSAQSFLTVHVPLYVSYIYVTAPRGWASLEHHTEMEFSFFYDTVLWRTGIQTDSVLSARLQIIRIYIREDGRLVIEFKTHAKFRGQFVMEHHTLPEVKSFVLTPDHLGGIEFDLQLLWSAQTFDSPHQLWRATSSYNRKDYSGEYTIYLIPCTVQPTQPWVDPGEKPLACTAHAPERFLIPIAFQQTNRPVPVVYSLNTEFQLCNNEKVFLMDPNTSDMSLAEMDYKGAFSKGQILYGRVLWNPEQNLNSAYKLQLEKVYLCTGKDGYVPFFDPTGTIYNEGPQYGCIQPNKHLKHRFLLLDRNQPEVTDKYFHDVPFEAHFASELPDFHVVSNMPGVDGFTLKVDALYKVEAGHQWYLQVIYIIGPDTISGPRVQRSLTAPLRRNRRDLVEPDGQLILDDSLIYDNEGDQVKNGTNMKSLNLEMQELAVAASLSQTGASIGSALAAIMLLLLVFLVACFINRKCQKQRKKKPAEDILEEYPLNTKVEVPKRHPDRVEKNVNRHYCTVRNVNILSEPEAAYTFKGAKVKRLNLEVRVHNNLQDGTEV

SEQ ID NO: 5548 - protein, 39 aa, Homo Sapiens
MGVLKVWLGLALALAEFAVLPHHSEGACVYQDSLLAEGG

SEQ ID NO: 5549 - protein, 652 aa, Homo Sapiens
  misc_feature (1)..(1): Xaa can be any naturally occurring amino acid
XCSYEGHVFQDGEDWRLSRCAKCLCRNGVAQCFTAQCQPLFCNQDETVVRVPGKCCPQCSARSCSAAGQVYEHGEQWSENACTTCICDRGEVRCHKQACLPLRCGKGQSRARRHGQCCEECVSPAGSCSYDGVVRYQDEMWKGSACEFCMCDHGQVTCQTGECAKVECARDEELIHLDGKCCPECISRNGYCVYEETGEFMSSNASEVKRIPEGEKWEDGPCKVCECRGAQVTCYEPSCPPCPVGTLALEVKGQCCPDCTSVHCHPDCLTCSQSPDHCDLCQDPTKLLQNGWCVHSCGLGFYQAGSLCLACQPQCSTCTSGLECSSCQPPLLMRHGQCVPTCGDGFYQDRHSCAVCHESCAGCWGPTEKHCLACRDPLHVLRDGGCESSCGKGFYNRQGTCSACDQSCDSCGPSSPRCLTCTEKTVLHDGKCMSECPGGYYADATGRCKVCHNSCASCSGPTPSHCTACSPPKALRQGHCLPRCGEGFYSDHGVCKACHSSCLACMGPAPSHCTGCKKPEEGLQVEQLSDVGIPSGECLAQCRAHFYLESTGICEACHQSCFRCAGKSPHNCTDCGPSHVLLDGQCLSQCPDGYFHQEGSCTECHPTCRQCHGPLESDCISCYPHISLTNGNCRTSCREEQFLNLVGYCAGE

SEQ ID NO: 5550 - protein, 666 aa, Homo Sapiens
  misc_feature (1)..(1): Xaa can be any naturally occurring amino acid
XGEVLQIAANQCCPECVLRTPGSCHHEKKIHEHGTEWASSPCSVCSCNHGEVRCTPQPCPPLSCGHQELAFIPEGSCCPVCVGLGKPCSYEGHVFQDGEDWRLSRCAKCLCRNGVAQCFTAQCQPLFCNQDETVVRVPGKCCPQCSARSCSAAGQVYEHGEQWSENACTTCICDRGEVRCHKQACLPLRCGKGQSRARRHGQCCEECVSPAGSCSYDGVVRYQDEMWKGSACEFCMCDHGQVTCQTGECAKVECARDEELIHLDGKCCPECISRNGYCVYEETGEFMSSNASEVKRIPEGEKWEDGPCKVCECRGAQVTCYEPSCPPCPVGTLALEVKGQCCPDCTSVHCHPDCLTCSQSPDHCDLCQDPTKLLQNGWCVHSCGLGFYQAGSLCLACQPQCSTCTSGLECSSCQPPLLMRHGQCVPTCGDGFYQDRHSCAVCHESCAGCWGPTEKHCLACRDPLHVLRDGGCESSCGKGFYNRQGTCSACDQSCDSCGPSSPRCLTCTEKTVLHDGKCMSECPGGYYADATGRCKVCHNSCASCSGPTPSHCTACSPPKALRQGHCLPRCGEGFYSDHGVCKACHSSCLACMGPAPSHCTGCKKPEEGLQVEQLSDVGIPSGECLAQCRAHFYLESTGICEGQNLDFCQNLEVISAVCLGISSTEN

SEQ ID NO: 5551 - protein, 426 aa, Homo Sapiens
  misc_feature (1)..(1): Xaa can be any naturally occurring amino acid
XTLPLHPNQGLPESVKFHFTVSDGEHTSPEMVLTIHLLPSDQQLPVFQVTAPRLAVSPGGSTSVGLQVVVRDAETAPKELFFELRRPPQHGVLLKHTAEFRRPMATGDTFTYEDVEKNALQYIHDGSSTREDSMEISVTDGLTVTMLEVRVEVSLSEDRGPRLAAGSSLSITVASKSTAIITRSHLAYVDDSSPDPEIWIQLNYLPSYGTLLRISGSEVEELSEVSNFTMEDINNKKIRYSAVFETDGHLVTDSFYFSVSDMDHNHLDNQIFTIMITPAENPPPVIAFADLITVDEGGRAPLSFHHFFATDDDDNLQRDAIIKLSALPKYGCIENTGTGDRFGPETASDLEASFPIQDVLENYIYYFQSVHESIEPTHDIFSFYVSDGTSRSEIHSINITIEVKTLEVGKVEPLTTIFHTIRELSL

SEQ ID NO: 5552 - protein, 222 aa, Homo Sapiens
MLDESLAVRRSKKCKEMIMHWEKKEDIDIVNTVDQLDKTAPRITLLHSPSQVGLLKNGCYGIYITSRVLKASDPDTEDDQIIFKILQGPKHGHLENTTTGEFIHEKFSQKDLNSKTILYIINPSLEVNSDTVEFQIMDPTGNSATPQILELKWSHIEWSQTEYEVCENVGLLPLEIIRRGYSMDSAFVGIKVNQVSAAVGKDFTVIPSKLIQFDPGSSILCL

SEQ ID NO: 5553 - protein, 2179 aa, Homo Sapiens
MNSLSWGAANAVLLLLLLAWASPTFISINRGVRVMKGHSAFLSGDDLKFAIPKEKDACKVEVVMNEPITQRVGKLTPQVFDCHFLPNEVKYVHNGCPILDEDTVKLRLYRFTERDTFIETFILWVYLLEPDCNIIHMSNNVLEVPEFNGLSQAIDKNLLRFDYDRMASLECTVSLDTARTRLPAHGQMVLGEPRPEEPRGDQPHSFFPESQLRAKLKCPGGSCTPGLKKIGSLKVSCEEFLLMGLRYQHLDPPSPNIDYISIQLDLTDTRSKIVYKSESAWLPVYIRAGIPNQIPKAAFMAVFILEVDQFILTSLTTSVLDCEEDETPKPLLVFNITKAPLQGYVTHLLDHTRPISSFTWKDLSDMQIAYQPPNSSHSERRHDEVELEVYDFFFERSAPMTVHISIRTADTNAPRVSWNTGLSLLEGQSRAITWEQFQVVDNDDIGAVRLVTVGGLQHGWLTLRGGKGFLFTVADLQAGVVRYHHDDSDSTKDFVVFRIFDGHHSIRHKFPINVLPKDDSPPFLITNVVIELEEGQTILIQGSMLRASDVDASDDYIFFNITKPPQAGEIMKKPGPGLIGYPVHGFLQRDLFNGIIYYRHFGGEIFEDSFQFVLWDSHEPPNLSVPQVATIHITPVDDQLPKEAPGVSRHLVVKETEVAYITKKQLHFIDSESYDRELVYTITTPPFFSFSHRHLDAGKLFMVDSIPKVVKNPTALELRSFTQHAVNYMKVAYMPPMQDIGPHCRDVQFTFSVSNQHGGTLHGICFNITILPVDNQVPEAFTNPLKVTEGGQSIISTEHILISDADTKLDNIDLSLRELPLHGRVELNGFPLNSGGTFSWGDLHTLKVRYQHDGTEVLQDDLLLEVTDGTNSAEFVLHVEVFPVNDEPPVLKADLMPVMNCSEGGEVVITSEYIFATDVDSDNLKLMFVIAREPQHGVVRRAGVTVDQFSQRDVISEAVTYKHTGGEIGLMPCFDTITLVVSDGEAGPFVNGCCYNGPNPSVPLHASFPVYDLNITVYPVDNQPPSIAIGPVFVVDEGCSTALTVNHLSATDPDTAADDLEFVLVSPPQFGYLENILPSVGFEKSNIGISIDSFQWKDMNAFHINYVQSRHLRIEPTADQFTVYVTDGKHHSLEIPFSIIINPTNDEAPDFVVQNITVCEGQMKELDSSIISAVDLDIPQDALLFSITQKPRHGLLIDRGFSKDFSENKQPANPHQKHAPVHSFSMELLKTGMRLTYMHDDSESLADDFTIQLSDGKHKILKTISVEVIPVNDEKPMLSKKAEIAMNMGETRIISSAILSAIDEDSPREKIYYVFERLPQNGQLQLKIGRDWVPLSPGMKCTQEEVDLNLLRYTHTGAMDSQNQDSFTFYLWDGNNRSPALDCQITIKDMEKGDIVILTKPLVVSKGDRGFLTTTTLLAVDGTDKPEELLYVITSPPRYGQIEYVHYPGVPITNFSQMDVVGQTVCYVHKSKVTVSSDRFRFIISNGLRTEHGVFEITLETVDRALPVVTRNKGLRLAQGAVGLLSPDLLQLTDPDTPAENLTFLLVQLPQHGQLYLWGTGLLQHNFTQQDVDSKNVAYRHSGGDSQTDCFTFMATDGTNQGFIVNGRVWEEPVLFTIQVDQLDKTAPRITLLHSPSQVGLLKNGCYGIYITSRVLKASDPDTEDDQIIFKILQGPKHGHLENTTTGEFIHEKFSQKDLNSKTILYIINPSLEVNSDTVEFQIMDPTGNSATPQILELKWSHIEWSQTEYEVCENVGLLPLEIIRRGYSMDSAFVGIKVNQVSAAVGKDFTVIPSKLIQFDPGMSTKMWNIAITYDGLEEDDEVFEVILNSPVNAVLGTKTKAAVKILDSKGGQCHPSYSSNQSKHSTWEKGIWHLLPPGSSSSTTSGSFHLERRPLPSSMQLAVIRGDTLRGFDSTDLSQRKLRTRGNGKTVRPSSVYRNGTDIIYNYHGIVSLKLEDDSFPTHKRKAKVSIISQPQKTIKVAELPQADKVESTTDSHFPRQDQLPSFPKNCTLELKGLFHFEEGIQKLYQCNGIAWKAWSPQTKDVEDKSCPAGWHQHSGYCHILITEQKGTWNAAAQACREQYLGNLVTVFSRQHMRWLWDIGGRKSFWIGLNDQVHAGHWEWIGGEPVAFTNGRRGPSQRSKLGKSCVLVQRQGKWQTKDCRRAKPHNYVCSRKL

SEQ ID NO: 5554 - protein, 2179 aa, Homo Sapiens; identical to SEQ ID NO: 5553

SEQ ID NO: 5555 - protein, 1335 aa, Homo Sapiens
MNSLSWGAANAVLLLLLLAWASPTFISINRGVRVMKGHSAFLSGDDLKFAIPKEKDACKVEVVMNEPITQRVGKLTPQVFDCHFLPNEVKYVHNGCPILDEDTVKLRLYRFTERDTFIETFILWVYLLEPDCNIIHMSNNVLEVPEFNGLSQAIDKNLLRFDYDRMASLECTVSLDTARTRLPAHGQMVLGEPRPEEPRGDQPHSFFPESQLRAKLKCPGGSCTPGLKKIGSLKVSCEEFLLMGLRYQHLDPPSPNIDYISIQLDLTDTRSKIVYKSESAWLPVYIRAGIPNQIPKAAFMAVFILEVDQFILTSLTTSVLDCEEDETPKPLLVFNITKAPLQGYVTHLLDHTRPISSFTWKDLSDMQIAYQPPNSSHSERRHDEVELEVYDFFFERSAPMTVHISIRTADTNAPRVSWNTGLSLLEGQSRAITWEQFQVVDNDDIGAVRLVTVGGLQHGWLTLRGGKGFLFTVADLQAGVVRYHHDDSDSTKDFVVFRIFDGHHSIRHKFPINVLPKDDSPPFLITNVVIELEEGQTILIQGSMLRASDVDASDDYIFFNITKPPQAGEIMKKPGPGLIGYPVHGFLQRDLFNGIIYYRHFGGEIFEDSFQFVLWDSHEPPNLSVPQVATIHITPVDDQLPKEAPGVSRHLVVKETEVAYITKKQLHFIDSESYDRELVYTITTPPFFSFSHRHLDAGKLFMVDSIPKVVKNPTALELRSFTQHAVNYMKVAYMPPMQDIGPHCRDVQFTFSVSNQHGGTLHGICFNITILPVDNQVPEAFTNPLKVTEGGQSIISTEHILISDADTKLDNIDLSLRELPLHGRVELNGFPLNSGGTFSWGDLHTLKVRYQHDGTEVLQDDLLLEVTDGTNSAEFVLHVEVFPVNDEPPVLKADLMPVMNCSEGGEVVITSEYIFATDVDSDNLKLMFVIAREPQHGVVRRAGVTVDQFSQRDVISEAVTYKHTGGEIGLMPCFDTITLVVSDGEAGPFVNGCCYNGPNPSVPLHASFPVYDLNITVYPVDNQPPSIAIGPVFVVDEGCSTALTVNHLSATDPDTAADDLEFVLVSPPQFGYLENILPSVGFEKSNIGISIDSFQWKDMNAFHINYVQSRHLRIEPTADQFTVYVTDGKHHSLEIPFSIIINPTNDEAPDFVVQNITVCEGQMKELDSSIISAVDLDIPQDALLFSITQKPRHGLLIDRGFSKDFSENKQPANPHQKHAPVHSFSMELLKTGMRLTYMHDDSESLADDFTIQLSDGKHKILKTISVEVIPVNDEKPMLSKKAEIAMNMGETRIISSAILSAIDEDSPREKIYYVFERLPQNGQLQLKECQLRCGI

SEQ ID NO: 5556 - protein, 715 aa, Homo Sapiens
MVTQESMLKAALPLFTRFIISNGLRTEHGVFEITLETVDRALPVVTRNKGLRLAQGAVGLLSPDLLQLTDPDTPAENLTFLLVQLPQHGQLYLWGTGLLQHNFTQQDVDSKNVAYRHSGGDSQTDCFTFMATDGTNQGFIVNGRVWEEPVLFTIQVDQLDKTAPRITLLHSPSQVGLLKNGCYGIYITSRVLKASDPDTEDDQIIFKILQGPKHGHLENTTTGEFIHEKFSQKDLNSKTILYIINPSLEVNSDTVEFQIMDPTGNSATPQILELKWSHIEWSQTEYEVCENVGLLPLEIIRRGYSMDSAFVGIKVNQVSAAVGKDFTVIPSKLIQFDPGMSTKMWNIAITYDGLEEDDEVFEVILNSPVNAVLGTKTKAAVKILDSKGGQCHPSYSSNQSKHSTWEKGIWHLLPPGSSSSTTSGSFHLERRPLPSSMQLAVIRGDTLRGFDSTDLSQRKLRTRGNGKTVRPSSVYRNGTDIIYNYHGIVSLKLEDDSFPTHKRKAKVSIISQPQKTIKVAELPQADKVESTTDSHFPRQDQLPSFPKNCTLELKGLFHFEEGIQKLYQCNGIAWKAWSPQTKDVEDKSCPAGWHQHSGYCHILITEQKGTWNAAAQACREQYLGNLVTVFSRQHMRWLWDIGGRKSFWIGLNDQVHAGHWEWIGGEPVAFTNGRRGPSQRSKLGKSCVLVQRQGKWQTKDCRRAKPHNYVCSRKL

SEQ ID NO: 5557 - protein, 2139 aa, Homo Sapiens
MAGASRHPTGTPRQLLVALACLLLSRPALQGRASSLGTEPDPALYLPARGALDGTRPDGPSVLIANPGLRVPLGRSLWLDPLRDLVIGVQPGDRCEVTVLDALPRLKGALSPRRFPCTFGPRQVQYTHFGSHSPGRARVLLQLRYDAPTHTLVLPFTLAVDLVFSQLELVTRNRPLVVEKLRSWSRAIDRRVLDFASLKSGATATRRCRLTPLPHEDGPLPKYGRLVDAVGAPLPRGKGVDCEAFLRAGVRYQHTATSSPNRDYVPMMVELLGPEGQDAGSAGVLVREHFQLLVRIRGGAENTPPRPSFMATMMMEVDPLVLTALTPDALAAEDVESDPGDLVFNILNAPTHPPGHPGQQGYVVSTDDPLGLPVSFFTQQELRELKIAYQPPAENSHGERLFQLELEVVDGDGAASDPFAFMVTVKSMNTLVPVASHNRGLVLFEGQSRPLSSTHSIPISDKDNLEEVKMAAVRGLRHGQLVVFGAPAGCKYFTPADLAAGRVVYQHDGSNTYSDNIIFRMEDGHHQVDFLFPLTILPVDDEPPMVNTNTGLSLTEGQVVQISPFVLSATDIDSEDSTIHFVLENQPLKGNEEEPQWELAPGSSHSGHYLGDLLLQQAELPLSTEDEDWHYMEKEGLYEKVVTEWLQRDIMEGRLFYRHLGPHSPQSVMVQLAFHVQDDHDPPNLSKQHIFTIKVQPVDILSPQLYPGTTLEMTVQEYQLTHFQKNFLRYIDQDSDDQNLWYTLLTLPTDTDGNHQVRAGEIVLTDSPDTLIMHFTQAQVNQHKVAYQPPQKLGIAPRVVQFTYQVEDAAGNSVPGTFTLFLQPVDNQPPEVTNRGFAILEGGSFNLSSNELHVTDPDTDIDQIVFILVRGPQHGHLQYFKRCMVPGESFMQADVINGSVSYQHGRDQTTTSDTFHLEVSDGVHHIPITIPISVHPNVANRSPRISLRSSSLLDVSIDVLENKATEITMGVIHGKRKDVGDLMLSFIVKDSPKLGTILVNGLPTERFTQEDLINGRVAYAHTAGEVGFQKQHDAFSLILSKDSYQWVVGNSIIEKVQVQVTVLPVDNVGPKVFVGESFIVYEGEKNSLTLQHLHVEDVDTHQDELLCTVTSQPASGYLEKIASAPGSKMSQSGSPISAFSLRDIQVRHINYVQSIHKGVEPQEDQFTFYCSDGINFSPNVFFPIIILPTNDEQPKLFAHEFKVLEGMSLVIDTQLLNGADADLPPNELHFQLTALPRHGRIIQQLATGSQPIHSFTLKEIQEASTIVYEHDDSETKEDSFEVWLSDGKHTTHRKVPIVVTLVDDETPHLTVNNGLKVEKGHSEIITNRILKATDLDSDDKSLSFVLHSGPQQGLLQRLRKPRGEVRNNLTLGMNFTQDEINRGLICYIHTGQEGIVDIIKFDVTDGVNTLTDHYFYVTIGNLDSVFPEVISKRITLIEGARVTLTNNLLTNSDINSSDEHHFSITRAPSLGHLESSDYAGEPIASFTQLQLASNKISYVHTSNDEKKMDSFEFQVIGELYPVFRTFRIFITDVDNKKPILTIHRLTLQKEDSQLITLLELTVEDSDTPDDLILFTITQVPMHGKILYNGSRPVTTFTKQDLNKNLISYKHDGSETTEDSFSLTVTDGTHTDFYVLPDTALATHKPQVMRVQIRSLDNRLPQITTNRGAPALKRLHTGHMGFLITSKSLKAEDQDSPHRLLKYKVTRGPEHGFIIKTGLGNQSTRVFTQADIDEMKISYVLNEGSNASKDIFYFSVEDNGGNKLTNQPFHLNWAWICLEKEYYIVDEDSTFLEVTLTRRGYLGETSFISIGTKDETAKKDKDFKWKTNKQIQFNPGQTTATWRVRIIPDNEYETSETFQIILSEPLMAVLEFPEMATVEIVDPGDESTVYIPEAEYKIEEDIGELLIPVRRSGDASQELIVICSTRQGSATGTISSTVLFSDYISRPEDHTSILHFDKNETQKTCQVLIIDDSLYEEEESFSVSLRLPVGGQLGARFPTTKVTILADRYDEPVLHFGDAEYHVNESARYVEVCVWRRGTDLSQPSSIAVRSRKSEQESAEAGTDYVGISRNLDFAPGVRMQTFQVTILDDLGQPTLEGPEKFELLLQMPMGAVLGEPNKTTIFIEDTITDCKQSACSSFD

SEQ ID NO: 5558 - protein, 1284 aa, Homo Sapiens
MHVFIVGMSLSSVTLASALQVRGEALSEEEIWSLLFLAAEQLLEDLRNDSSDYVVCPWSALLSAAGSLSFQGRVSHIEAAPFKAPELLQGQSEDEQPDASQPLQLCEPLHSILLTMCEDQPHRRCTLQSVLEACRVHEKEVSVYPAPAGLHIRRLVGLVLGTISEVEKRVVEESSSVQQNRSYLLRKRLRGTSSESPAAQAPECLHPCRVSERSTETQSSPEPHWSTLTHSHCSLLVNRALPGADPQDQQAGRRLSSGSVHSAADSSWPTTPSQRGFLQRRSKFSRPEFILLAGEAPMTLHLPGSVVTKKGKSYLALRDLCVVLLNGQHLEVKCDVESTVGAVFNAVTSFANLEELTYFGLAYMKSKEFFFLDSETRLCKIAPEGWREQPQKTSMNTFTLFLRIKFFVSHYGLLQHSLTRHQFYLQLRKDILEERLYCNEEILLQLGVLALQAEFGNYPKEVESKPYFHVEDYIPASLIERMTALRVQVEVSEMHRLSSALWGEDAELKFLRVTQQLPEYGVLVHQVFSEKRRPEEEMALGICAKGVIVYEVKNNSRIAMLRFQWRETGKISTYQKKFTITSSVTGKKHTFVTDSAKTSKYLLDLCSAQHGFNAQMGSGQPSHVLFDHDKFVQMANLSPAHQARSKPLIWIQRLSCSENELFVSRLQGAAGGLLSTSMDNFNVDGSKEAGAEGIGRSPCTGREQLKSACVIQKPMTWDSLSGPPVQSMHAGSKNNRRKSFIAEPGREIVRVTLKRDPHRGFGFVINEGEYSGQADPGIFISSIIPGGPAEKAKTIKPGGQILALNHISLEGFTFNMAVRMIQNSPDNIELIISQSKGVGGNNPDEEKNSTANSGVSSTDILSFGYQGSLLSHTQDQDRNTEELDMAGVQSLVPRLRHQLSFLPLKGAGSSCPPSPPEISAGEIYFVELVKEDGTLGFSVTGGINTSVPYGGIYVKSIVPGGPAAKEGQILQGDRLLQVDGVILCGLTHKQAVQCLTGPGQVARLVLERRVPRSTQQCPSANDSMGDERTAVSLVTALPGRPSSCVSVTDGPKFEVKLKKNANGLGFSFVQMEKESCSHLKSDLVRIKRLFPGQPAEENGAIAAGDIILAVNGRSTEGLIFQEVLHLLRGAPQEVTLLLCRPPPGALPELEQEWQTPELSADKEFTRATCTDSCTSPILDQEDSWRDSASPDAGEGLGLRPESSQKAIREAQWGQNRERPWASSLTHSPESHPHLCKLHQERDESTLATSLEKDVRQNCYSVCDIMRLGRYSFSSPLTRLSTDIF

SEQ ID NO: 5559 - protein, 66 aa, Homo Sapiens
MQPLTKDAGMSLSSVTLASALQVRGEALSEEEIWSLLFLAAEQLLEDLRNAPAALRAPALHPADHV

SEQ ID NO: 5560 - protein, 1309 aa, Homo Sapiens
MQPLTKDAGMSLSSVTLASALQVRGEALSEEEIWSLLFLAAEQLLEDLRNDSSDYVVCPWSALLSAAGSLSFQGRVSHIEAAPFKAPELLQGQSEDEQPDASQMHVYSLGMTLYWSAGFHVPPHQPLQLCEPLHSILLTMCEDQPHRRCTLQSVLEACRVHEKEVSVYPAPAGLHIRRLVGLVLGTISEVEKRVVEESSSVQQNRSYLLRKRLRGTSSESPAAQAPECLHPCRVSERSTETQSSPEPHWSTLTHSHCSLLVNRALPGADPQDQQAGRRLSSGSVHSAADSSWPTTPSQRGFLQRRSKFSRPEFILLAGEAPMTLHLPGSVVTKKGKSYLALRDLCVVLLNGQHLEVKCDVESTVGAVFNAVTSFANLEELTYFGLAYMKSKEFFFLDSETRLCKIAPEGWREQPQKTSMNTFTLFLRIKFFVSHYGLLQHSLTRHQFYLQLRKDILEERLYCNEEILLQLGVLALQAEFGNYPKEQVESKPYFHVEDYIPASLIERMTALRVQVEVSEMHRLSSALWGEDAELKFLRVTQQLPEYGVLVHQVFSEKRRPEEEMALGICAKGVIVYEVKNNSRIAMLRFQWRETGKISTYQKKFTITSSVTGKKHTFVTDSAKTSKYLLDLCSAQHGFNAQMGSGQPSHVLFDHDKFVQMANLSPAHQARSKPLIWIQRLSCSENELFVSRLQGAAGGLLSTSMDNFNVDGSKEAGAEGIGRSPCTGREQLKSACVIQKPMTWDSLSGPPVQSMHAGSKNNRRKSFIAEPGREIVRVTLKRDPHRGFGFVINEGEYSGQADPGIFISSIIPGGPAEKAKTIKPGGQILALNHISLEGFTFNMAVRMIQNSPDNIELIISQSKGVGGNNPDEEKNSTANSGVSSTDILSFGYQGSLLSHTQDQDRNTEELDMAGVQSLVPRLRHQLSFLPLKGAGSSCPPSPPEISAGEIYFVELVKEDGTLGFSVTGGINTSVPYGGIYVKSIVPGGPAAKEGQILQGDRLLQVDGVILCGLTHKQAVQCLTGPGQVARLVLERRVPRSTQQCPSANDSMGDERTAVSLVTALPGRPSSCVSVTDGPKFEVKLKKNANGLGFSFVQMEKESCSHLKSDLVRIKRLFPGQPAEENGAIAAGDIILAVNGRSTEGLIFQEVLHLLRGAPQEVTLLLCRPPPGALPELEQEWQTPELSADKEFTRATCTDSCTSPILDQEDSWRDSASPDAGEGLGLRPESSQKAIREAQWGQNRERPWASSLTHSPESHPHLCKLHQERDESTLATSLEKDVRQNCYSVCDIMRLGRYSFSSPLTRLSTDIF

SEQ ID NO: 5561 - protein, 1397 aa, Homo Sapiens
MQPLTKDAGMSLSSVTLASALQVRGEALSEEEIWSLLFLAAEQLLEDLRNDSSDYVVCPWSALLSAAGSLSFQGRVSHIEAAPFKAPELLQGQSEDEQPDASQMHVYSLGMTLYWSAGFHVPPHQPLQLCEPLHSILLTMCEDQPHRRCTLQSVLEACRVHEKEVSVYPAPAGLHIRRLVGLVLGTISEVEKRVVEESSSVQQNRSYLLRKRLRGTSSESPAAQAPECLHPCRVSERSTETQSSPEPHWSTLTHSHCSLLVNRALPGADPQDQQAGRRLSSGSVHSAADSSWPTTPSQRGFLQRRSKFSRPEFILLAGEAPMTLHLPGSVVTKKGKSYLALRDLCVVLLNGQHLEVKCDVESTVGAVFNAVTSFANLEELTYFGLAYMKSKEFFFLDSETRLCKIAPEGWREQPQKTSMNTFTLFLRIKFFVSHYGLLQHSLTRHQFYLQLRKDILEERLYCNEEILLQLGVLALQAEFGNYPKEQVESKPYFHVEDYIPASLIERMTALRVQVEVSEMHRLSSALWGEDAELKFLRVTQQLPEYGVLVHQVFSEKRRPEEEMALGICAKGVIVYEVKNNSRIAMLRFQWRETGKISTYQKKFTITSSVTGKKHTFVTDSAKTSKYLLDLCSAQHGFNAQMGSGQPSHVLFDHDKFVQMANLSPAHQARSKPLIWIQRLSCSENELFVSRLQGAAGGLLSTSMDNFNVDGSKEAGAEGIGRSPCTGREQLKSACVIQKPMTWDSLSGPPVQSMHAGSKNNRRKSFIAEPGREIVRVTLKRDPHRGFGFVINEGEYSGQADPGIFISSIIPGGPAEKAKTIKPGGQILALNHISLEGFTFNMAVRMIQNSPDNIELIISQSKGVGGNNPDEEKNSTANSGVSSTDILSFGYQGSLLSHTQDQDRNTEELDMAGVQSLVPRLRHQLSFLPLKGAGSSCPPSPPEISAGEIYFVELVKEDGTLGFSVTGGINTSVPYGGIYVKSIVPGGPAAKEGQILQGDRLLQVDGVILCGLTHKQAVQCLTGPGQVARLVLERRVPRSTQQCPSANDSMGDERTAVSLVTALPGRPSSCVSVTDGPKFEVKLKKNANGLGFSFVQMEKESCSHLKSDLVRIKRLFPGQPAEENGAIAAGDIILAVNGRSTEGLIFQEVLHLLRGAPQEVTLLLCRPPPGALPELEQEWQTPELSADKEFTRATCTDSCTSPILDQEDSWRDSASPDAGEGLGLRPESSQKAIREAQWGQNRERPWASSLTHSPESHPHLCKLHQERDESTLATSLEKDVRQNCYSVCDIMRLGSPELDGEDGEGDMYHPCGAPSPTSEDEEYLTINSTCQGQLPCEECLEADSGTIPLPQFCSWGTVPESLPPEESPESGSEWEDLEEPVALEYGALRSLSFGGLNV

SEQ ID NO: 5562 - protein, 325 aa, Homo Sapiens
MVCGSPGGMLLLRAGLLALAALCLLRVPGARAAACEPVRIPLCKSLPWNMTKMPNHLHHSTQANAILAIEQFEGLLGTHCSPDLLFFLCAMYAPICTIDFQHEPIKPCKSVCERARQGCEPILIKYRHSWPENLACEELPVYDRGVCISPEAIVTADGADFPMDSSNGNCRGASSERCKCKPIRATQKTYFRNNYNYVIRAKVKEIKTKCHDVTAVVEVKEILKSSLVNIPRDTVNLYTSSGCLCPPLNVNEEYIIMGYEDEERSRLLLVEGSIAEKWKDRLGKKVKRWDMKLRHLGLSKSDSSNSDSTQSQKSGRNSNPRQARN

SEQ ID NO: 5563 - protein, 129 aa, Homo Sapiens
MKTLQFFFLFCCWKAICCNSCELTNITIAIEKEECRFCISINTTWCAGYCYTRDLVYKDPARPKIQKTCTFKELVYETVRVPGCAHHADSLYTYPVATQCHCGKCDSDSTDCTVRGLGPSYCSFGEMKE

SEQ ID NO: 5564 - protein, 129 aa, Homo Sapiens; identical to SEQ ID NO: 5563

SEQ ID NO: 5565 - protein, 129 aa, Homo Sapiens; identical to SEQ ID NO: 5563

SEQ ID NO: 5566 - protein, 695 aa, Homo Sapiens
MALLLVSLLAFLSLGSGCHHRICHCSNRVFLCQESKVTEIPSDLPRNAIELRFVLTKLRVIQKGAFSGFGDLEKIEISQNDVLEVIEADVFSNLPKLHEIRIEKANNLLYINPEAFQNLPNLQYLLISNTGIKHLPDVHKIHSLQKVLLDIQDNINIHTIERNSFVGLSFESVILWLNKNGIQEIHNCAFNGTQLDELNLSDNNNLEELPNDVFHGASGPVILDISRTRIHSLPSYGLENLKKLRARSTYNLKKLPTLEKLVALMEASLTYPSHCCAFANWRRQISELHPICNKSILRQEVDYMTQARGQRSSLAEDNESSYSRGFDMTYTEFDYDLCNEVVDVTCSPKPDAFNPCEDIMGYNILRVLIWFISILAITGNIIVLVILTTSQYKLTVPRFLMCNLAFADLCIGIYLLLIASVDIHTKSQYHNYAIDWQTGAGCDAAGFFTVFASELSVYTLTAITLERWHTITHAMQLDCKVQLRHAASVMVMGWIFAFAAALFPIFGISSYMKVSICLPMDIDSPLSQLYVMSLLVLNVLAFVVICGCYIHIYLTVRNPNIVSSSSDTRIAKRMAMLIFTDFLCMAPISFFAISASLKVPLITVSKAKILLVLFHPINSCANPFLYAIFTKNFRRDFFILLSKCGCYEMQAQIYRTETSSTVHNTHPRNGHCSSAPRVTSGSTYILVPLSHLAQN

SEQ ID NO: 5567 - protein, 278 aa, Homo Sapiens
MALLLVSLLAFLSLGSGCHHRICHCSNRVFLCQESKVTEIPSDLPRNAIELRFVLTKLRVIQKGAFSGFGDLEKIEISQNDVLEVIEADVFSNLPKLHEIRIEKANNLLYINPEAFQNLPNLQYLLISNTGIKHLPDVHKIHSLQKVLLDIQDNINIHTIERNSFVGLSFESVILWLNKNGIQEIHNCAFNGTQLDELNLSDNNNLEELPNDVFHGASGPVILSELHPICNKSILRQEVDYMTQARGQRSSLAEDNESSYSRGFDMTYTEFDYDLCNE

SEQ ID NO: 5568 - protein, 669 aa, Homo Sapiens
MALLLVSLLAFLSLGSGCHHRICHCSNRVFLCQESKVTEIPSDLPRNAIELRFVLTKLRVIQKGAFSGFGDLEKIEISQNDVLEVIEADVFSNLPKLHEIRIEKANNLLYINPEAFQNLPNLQYLLISNTGIKHLPDVHKIHSLQKVLLWLNKNGIQEIHNCAFNGTQLDELNLSDNNNLEELPNDVFHGASGPVILDISRTRIHSLPSYGLENLKKLRARSTYNLKKLPTLEKLVALMEASLTYPSHCCAFANWRRQISELHPICNKSILRQEVDYMTQARGQRSSLAEDNESSYSRGFDMTYTEFDYDLCNEVVDVTCSPKPDAFNPCEDIMGYNILRVLIWFISILAITGNIIVLVILTTSQYKLTVPRFLMCNLAFADLCIGIYLLLIASVDIHTKSQYHNYAIDWQTGAGCDAAGFFTVFASELSVYTLTAITLERWHTITHAMQLDCKVQLRHAASVMVMGWIFAFAAALFPIFGISSYMKVSICLPMDIDSPLSQLYVMSLLVLNVLAFVVICGCYIHIYLTVRNPNIVSSSSDTRIAKRMAMLIFTDFLCMAPISFFAISASLKVPLITVSKAKILLVLFHPINSCANPFLYAIFTKNFRRDFFILLSKCGCYEMQAQIYRTETSSTVHNTHPRNGHCSSAPRVTSGSTYILVPLSHLAQN

SEQ ID NO: 5569 - protein, 152 aa, Homo Sapiens
MALLLVSLLAFLSLGSGCHHRICHCSNRVFLCQESKVTEIPSDLPRNAIELRFVLTKLRVIQKGAFSGFGDLEKIEISQNDVLEVIEADVFSNLPKLHEIRIEKANNLLYINPEAFQNLPNLQYLSFSSFVLENAKVENGDHRAFSDRTNAL

SEQ ID NO: 5570 - protein, 215 aa, Homo Sapiens
GPVCGLDGKTYRNECALLKARCKEQPELEVQYQGRCKKTCRDVFCPGSSTCVVDQTNNAYCVTCNRICPEPASSEQYLCGNDGVTYSSACHLRKATCLLGRSIGLAYEGKCITKSCEDIQCTGGKKCLWDFKVGRGRCSLCDELCPDSKSDEPVCASDNATYASECAMKEAACSSGVLLEVKHSGSCNSISEDTEEEEEDEDQDYSFPISSILEW

SEQ ID NO: 5571 - protein, 344 aa, Homo Sapiens
MVRARHQPGGLCLLLLLLCQFMEDRSAQAGNCWLRQAKNGRCQVLYKTELSKEECCSTGRLSTSWTEEDVNDNTLFKWMIFNGGAPNCIPCKETCENVDCGPGKKCRMNKKNKPRCVCAPDCSNITWKGPVCGLDGKTYRNECALLKARCKEQPELEVQYQGRCKKTCRDVFCPGSSTCVVDQTNNAYCVTCNRICPEPASSEQYLCGNDGVTYSSACHLRKATCLLGRSIGLAYEGKCIKAKSCEDIQCTGGKKCLWDFKVGRGRCSLCDELCPDSKSDEPVCASDNATYASECAMKEAACSSGVLLEVKHSGSCNSISEDTEEEEEDEDQDYSFPISSILEW

SEQ ID NO: 5572 - protein, 317 aa, Homo Sapiens
MVRARHQPGGLCLLLLLLCQFMEDRSAQAGNCWLRQAKNGRCQVLYKTELSKEECCSTGRLSTSWTEEDVNDNTLFKWMIFNGGAPNCIPCKETCENVDCGPGKKCRMNKKNKPRCVCAPDCSNITWKGPVCGLDGKTYRNECALLKARCKEQPELEVQYQGRCKKTCRDVFCPGSSTCVVDQTNNAYCVTCNRICPEPASSEQYLCGNDGVTYSSACHLRKATCLLGRSIGLAYEGKCIKAKSCEDIQCTGGKKCLWDFKVGRGRCSLCDELCPDSKSDEPVCASDNATYASECAMKEAACSSGVLLEVKHSGSCN

SEQ ID NO: 5573 - protein, 102 aa, Homo Sapiens
  misc_feature (1)..(1): Xaa can be any naturally occurring amino acid
XSACHLRKATCLLGRSIGLAYEGKCITKSCEDIQCTGGKKCLWDFKVGRGRCSLCDELCPDSKSDEPVCASDNATYASECAMKEAACSSGVLLEVKHSGSCN

SEQ ID NO: 5574 - protein, 140 aa, Homo Sapiens
MWKRWLALALALVAVAWVRAEEELRSKSKICANVFCGAGRECAVTEKGEPTCLCIEQCKPHKRPVCGSNGKTYLNHCELHRDACLTGSKIQVDYDGHCKEKKSVSPSASPVVCYQSNRDELRRRIIQWLEAEIIPDGWFS

SEQ ID NO: 5575 - protein, 308 aa, Homo Sapiens
MWKRWLALALALVAVAWVRAEEELRSKSKICANVFCGAGRECAVTEKGEPTCLCIEQCKPHKRPVCGSNGKTYLNHCELHRDACLTGSKIQVDYDGHCKEKKSVSPSASPVVCYQSNRDELRRRIIQWLEAEIIPDGWFSKGSNYSEILDKYFKNFDNGDSRLDSSEFLKFVEQNETAINITTYPDQENNKLLRGLCVDALIELSDENADWKLSFQEFLKCLNPSFNPPEKKCALEDETYADGAETEVDCNRCVCACGNWVCTAMTCDGKNQKGAQTQTEEEMTRYVQELQKHQETAEKTKRVSTKEI

SEQ ID NO: 5576 - protein, 273 aa, Homo Sapiens
MWKRWLALALALVAVAWVRAEQCKPHKRPVCGSNGKTYLNHCELHRDACLTGSKIQVDYDGHCKEKKSVSPSASPVVCYQSNRDELRRRIIQWLEAEIIPDGWFSKGSNYSEILDKYFKNFDNGDSRLDSSEFLKFVEQNETAINITTYPDQENNKLLRGLCVDALIELSDENADWKLSFQEFLKCLNPSFNPPEKKCALEDETYADGAETEVDCNRCVCACGNWVCTAMTCDGKNQKGAQTQTEEEMTRYVQELQKHQETAEKTKRVSTKEI

SEQ ID NO: 5577 - protein, 20 aa, Homo Sapiens
  misc_feature (1)..(1): Xaa can be any naturally occurring amino acid
XSFQEFLKCLNPSFNPPEKK

SEQ ID NO: 5578 - protein, 84 aa, Homo Sapiens
MLGGRPRCECAPDCSGLPARLQVCGSDGATYRDECELRAARCRGHPDLSVMYRGRCRKSCEHVVCPRPQSCVVDQTGSAHCVVC

SEQ ID NO: 5579 - protein, 263 aa, Homo Sapiens
MRPGAPGPLWPLPWGALAWAVGFVSSMGSGNPAPGGVCWLQQGQEATCSLVLQTDVTRAECCASGNIDTAWSNLTHPGNKINLLGFLGLVHCLPCKDSCDGVECGPGKACRMLGGRPRCECAPDCSGLPARLQVCGSDGATYRDECELRAARCRGHPDLSVMYRGRCRKSCEHVVCPRPQSCVVDQTGSAHCVVCRAAPCPVPSSPGQELCGNNNVTYISSCHMRQATCFLGRSIGVRHAGSCAGTPEEPPGGESAEEEENFV

SEQ ID NO: 5580 - protein, 92 aa, Homo Sapiens
MRQATCFLGRSIGVRHAGSCAGADAGRGHRPVLGAGEPPALRPQCSYRPLQAPLRSRQVVSLQKRKRTSCEPAGQAWAWCPRPPIIPCYLLP

SEQ ID NO: 5581 - protein, 40 aa, Homo Sapiens
MRQATCFLGRSIGVRHAGSCAGTPEEPPGGESAEEEENFV

SEQ ID NO: 5582 - protein, 40 aa, Homo Sapiens; identical to SEQ ID NO: 5581

SEQ ID NO: 5583 - protein, 40 aa, Homo Sapiens; identical to SEQ ID NO: 5581

SEQ ID NO: 5584 - protein, 673 aa, Homo Sapiens
MKPGGFWLHLTLLGASLPAALGWMDPGTSRGPDVGVGESQAEEPRSFEVTRREGLSSHNELLASCGKKFCSRGSRCVLSLAPEDRVSVTTVTVGLSTVLTCAVHGDLRPPIIWKRNGLTLNFLDLEDINDFGEDDSLYITKVTTIHMGNYTCHASGHEQLFQTHVLQVNVPPVIRVYPESQAQEPGVAASLRCHAEGIPMPRITWLKNGVDVSTQMSKQLSLLANGSELHISSVRYEDTGAYTCIAKNEVGVDEDISSLFIEDSARKTLANILWREEGLSVGNMFYVFSDDGIIVIHPVDCEIQRHLKPTEKIFMSYEEICPQREKNATQPCQWVSAVNVRNRYIYVAQPALSRVLVVDIQAQKVLQSIGVDPLPAKLSYDKSHDQVWVLSWGDVHKSRPSLQVITEASTGQSQHLIRTPFAGVDDFFIPPTNLIINHIRFGFIFNKSDPAVHKVDLETMMPLKTIGLHHHGCVPQAMAHTHLGGYFFIQCRQDSPASAARQLLVDSVTDSVLGPNGDVTGTPHTSPDGRFIVSAAADSPWLHVQEITVRGEIQTLYDLQINSGISDLAFQRSFTESNQYNIYAALHTEPDLLFLELSTGKVGMLKNLKEPPAGPAQPWGGTHRIMRDSGLFGQYLLTPARESLFLINGRQNTLRCEVSGIKGGTTVVWVGEV

SEQ ID NO: 5585 - protein, 842 aa, Homo Sapiens
MKPGGFWLHLTLLGASLPAALGWMDPGTSRGPDVGVGESQAEEPRSFEVTRREGLSSHNELLASCGKKFCSRGSRCVLSRKTGEPECQCLEACRPSYVPVCGSDGRFYENHCKLHRAACLLGKRITVIHSKDCFLKGDTCTMAGYARLKNVLLALQTRLQPLQEGDSRQDPASQKRLLVESLFRDLDADGNGHLSSSELAQHVLKKQDLDEDLLGCSPGDLLRFDDYNSDSSLTLREFYMAFQVVQLSLAPEDRVSVTTVTVGLSTVLTCAVHGDLRPPIIWKRNGLTLNFLDLEDINDFGEDDSLYITKVTTIHMGNYTCHASGHEQLFQTHVLQVNVPPVIRVYPESQAQEPGVAASLRCHAEGIPMPRITWLKNGVDVSTQMSKQLSLLANGSELHISSVRYEDTGAYTCIAKNEVGVDEDISSLFIEDSARKTLANILWREEGLSVGNMFYVFSDDGIIVIHPVDCEIQRHLKPTEKIFMSYEEICPQREKNATQPCQWVSAVNVRNRYIYVAQPALSRVLVVDIQAQKVLQSIGVDPLPAKLSYDKSHDQVWVLSWGDVHKSRPSLQVITEASTGQSQHLIRTPFAGVDDFFIPPTNLIINHIRFGFIFNKSDPAVHKVDLETMMPLKTIGLHHHGCVPQAMAHTHLGGYFFIQCRQDSPASAARQLLVDSVTDSVLGPNGDVTGTPHTSPDGRFIVSAAADSPWLHVQEITVRGEIQTLYDLQINSGISDLAFQRSFTESNQYNIYAALHTEPDLLFLELSTGKVGMLKNLKEPPAGPAQPWGGTHRIMRDSGLFGQYLLTPARESLFLINGRQNTLRCEVSGIKGGTTVVWVGEV

SEQ ID NO: 5586 - protein, 157 aa, Homo Sapiens
MNPVPQMEMQKSPVFCVAHAGSCRPELFLFGHLGSSWGLDLKEEEPRSFEVTRREGLSSHNELLASCGKKFCSRGSRCVLSRKTGEPECQCLEACRPSYVPVCGSDGRFYENHCKLHRAACLLGKRITVIHSKDCFLKGDTCTMAGYARLKNVLLAL

SEQ ID NO: 5587 - protein, 846 aa, Homo Sapiens
MFKCWSVVLVLGFIFLESEGRPTKEGGYGLKSYQPLMRLRHKEKNQESSRVKGFMIQDGPFGSCENKYCGLGRHCVTSRETGQAECACMDLCKRHYKPVCGSDGEFYENHCEVHRAACLKKQKITIVHNEDCFFKGDKCKTTEYSKMKNMLLDLQNQKYIMQENENPNGDDISRKKLLVDQMFKYFDADSNGLVDINELTQVIKQEELGKDLFDCTLYVLLKYDDFNADKHLALEEFYRAFQVIQLSLPEDQKLSITAATVGQSAVLSCAIQGTLRPPIIWKRNNIILNNLDLEDINDFGDDGSLYITKVTTTHVGNYTCYADGYEQVYQTHIFQVNVPPVIRVYPESQAREPGVTASLRCHAEGIPKPQLGWLKNGIDITPKLSKQLTLQANGSEVHISNVRYEDTGAYTCIAKNEAGVDEDISSLFVEDSARKTLANILWREEGLGIGNMFYVFYEDGIKVIQPIECEFQRHIKPSEKLLGFQDEVCPKAEGDEVQRCVWASAVNVKDKFIYVAQPTLDRVLIVDVQSQKVVQAVSTDPVPVKLHYDKSHDQVWVLSWGTLEKTSPTLQVITLASGNVPHHTIHTQPVGKQFDRVDDFFIPTTTLIITHMRFGFILHKDEAALQKIDLETMSYIKTINLKDYKCVPQSLAYTHLGGYYFIGCKPDSTGAVSPQVMVDGVTDSVIGFNSDVTGTPYVSPDGHYLVSINDVKGLVRVQYITIRGEIQEAFDIYTNLHISDLAFQPSFTEAHQYNIYGSSSTQTDVLFVELSSGKVKMIKSLKEPLKAEEWPWNRKNRQIQDSGLFGQYLMTPSKDSLFILDGRLNKLNCEITEVEKGNTVIWVGDA

SEQ ID NO: 5588 - protein, 837 aa, Homo Sapiens
MFKCWSVVLVLGFIFLESEGRPTKEGGYGLKSYQPLMRLRHKEKNQESSRVKGFMIQDGPFGSCENKYCGLGRHCVTSRETGQAECACMDLCKRHYKPVCGSDGEFYENHCEVHRAACLKKQKITIVHNEDCFFKGDKCKTTEYSKMKNMLLDLQNQKYIMQENENPNGDDISRKKLLVDQMFKYFDADSNGLVDINELTQVIKQEELGKDLFDCTLYVLLKYDDFNADKHLALEEFYRAFQVIQLSLPEDQKLSITAATVGQSAVLSCAIQGTLRPPIIWKRNNIILNNLDLEDINDFGDDGSLYITKVTTTHVGNYTCYADGYEQVYQTHIFQVNVPPVIRVYPESQAREPGVTASLRCHAEGIPKPQLGWLKNGIDITPKLSKQLTLQANGSEVHISNVRYEDTGAYTCIAKNEAGVDEDISSLFVEDSARKTRLGIGNMFYVFYEDGIKVIQPIECEFQRHIKPSEKLLGFQDEVCPKAEGDEVQRCVWASAVNVKDKFIYVAQPTLDRVLIVDVQSQKVVQAVSTDPVPVKLHYDKSHDQVWVLSWGTLEKTSPTLQVITLASGNVPHHTIHTQPVGKQFDRVDDFFIPTTTLIITHMRFGFILHKDEAALQKIDLETMSYIKTINLKDYKCVPQSLAYTHLGGYYFIGCKPDSTGAVSPQVMVDGVTDSVIGFNSDVTGTPYVSPDGHYLVSINDVKGLVRVQYITIRGEIQEAFDIYTNLHISDLAFQPSFTEAHQYNIYGSSSTQTDVLFVELSSGKVKMIKSLKEPLKAEEWPWNRKNRQIQDSGLFGQYLMTPSKDSLFILDGRLNKLNCEITEVEKGNTVIWVGDA

SEQ ID NO: 5589 - protein, 847 aa, Homo Sapiens
MFKCWSVVLVLGFIFLESEGRPTKEGGYGLKSYQPLMRLRHKQEKNQESSRVKGFMIQDGPFGSCENKYCGLGRHCVTSRETGQAECACMDLCKRHYKPVCGSDGEFYENHCEVHRAACLKKQKITIVHNEDCFFKGDKCKTTEYSKMKNMLLDLQNQKYIMQENENPNGDDISRKKLLVDQMFKYFDADSNGLVDINELTQVIKQEELGKDLFDCTLYVLLKYDDFNADKHLALEEFYRAFQVIQLSLPEDQKLSITAATVGQSAVLSCAIQGTLRPPIIWKRNNIILNNLDLEDINDFGDDGSLYITKVTTTHVGNYTCYADGYEQVYQTHIFQVNVPPVIRVYPESQAREPGVTASLRCHAEGIPKPQLGWLKNGIDITPKLSKQLTLQANGSEVHISNVRYEDTGAYTCIAKNEAGVDEDISSLFVEDSARKTLANILWREEGLGIGNMFYVFYEDGIKVIQPIECEFQRHIKPSEKLLGFQDEVCPKAEGDEVQRCVWASAVNVKDKFIYVAQPTLDRVLIVDVQSQKVVQAVSTDPVPVKLHYDKSHDQVWVLSWGTLEKTSPTLQVITLASGNVPHHTIHTQPVGKQFDRVDDFFIPTTTLIITHMRFGFILHKDEAALQKIDLETMSYIKTINLKDYKCVPQSLAYTHLGGYYFIGCKPDSTGAVSPQVMVDGVTDSVIGFNSDVTGTPYVSPDGHYLVSINDVKGLVRVQYITIRGEIQEAFDIYTNLHISDLAFQPSFTEAHQYNIYGSSSTQTDVLFVELSSGKVKMIKSLKEPLKAEEWPWNRKNRQIQDSGLFGQYLMTPSKDSLFILDGRLNKLNCEITEVEKGNTVIWVGDA

SEQ ID NO: 5590 - protein, 138 aa, Homo Sapiens
MSSSRVGLRLAACLLNVSEAGRKYIVENIAKAALLDKNGKKHPQVSVLNIFSDQDYKRSVITIATSVDKLGLAEDLVLHVPGCSVFLFGEADLPEKRSLVQRRKQLGWFTRRDFSALQPDLGAAPSQRCGLTACFRAL

SEQ ID NO: 5591 - protein, 147 aa, Homo Sapiens
MSSSRVGLRLAACLLNVSEAGRKYIVENIAKAALLDKNGKKHPQVSVLNIFSDQDYKRSVITIATSVDKLGLAEDLVLHVPGCSVFLFGEADLPEKRSLVQRRKQLGWFTRRDFSALQPDLGAAPSQRCGLTGSEHGFCFALFFFFF

SEQ ID NO: 5592 - protein, 114 aa, Homo Sapiens
MSSSRVGLRLAACLLNVSEAGRKYIVENIAKAALLDKNGKKHPQVSVLNIFSDQDYKRSVITIATSVDKLGSSVLAACLEAFQAIDMEVQEGIHPCLGAVDLIPIYPLSGVTVE

SEQ ID NO: 5593 - protein, 77 aa, Homo Sapiens
MSSSRVGLRLAACLLNVSEAGRKYIVENIAKAALLDKNGKKHPQVSVLNIFSDQDYKRSVITIATSVDKLVDKRNQA

SEQ ID NO: 5594 - protein, 466 aa, Homo Sapiens
MRAPGMRSRPAGPALLLLLLFLGAAESVRRAQPPRRYTPDWPSLDSRPLPAWFDEAKFGVFIHWGVFSVPAWGSEWFWWHWQGEGRPQYQRFMRDNYPPGFSYADFGPQFTARFFHPEEWADLFQAAGAKYVVLTTKHHEGFTNWPSPVSWNWNSKDVGPHRDLVGELGTALRKRNIRYGLYHSLLEWFHPLYLLDKKNGFKTQHFVSAKTMPELYDLVNSYKPDLIWSDGEWECPDTYWNSTNFLSWLYNDSPVKDEVVVNDRWGQNCSCHHGGYYNCEDKFKPQSLPDHKWEMCTSIDKFSWGYRRDMALSDVTEESEIISELVQTVSLGGNYLLNIGPTKDGLIVPIFQERLLAVGKWLSINGEAIYASKPWRVQWEKNTTSVWYTSKGSAVYAIFLHWPENGVLNLESPITTSTTKITMLGIQGDLKWSTDPDKGLFISLPQLPPSAVPAEFAWTIKLTGVK

SEQ ID NO: 5595 - protein, 467 aa, Homo Sapiens
MRPQELPRLAFPLLLLLLLLLPPPPCPAHSATRFDPTWESLDARQLPAWFDQAKFGIFIHWGVFSVPSFGSEWFWWYWQKEKIPKYVEFMKDNYPPSFKYEDFGPLFTAKFFNANQWADIFQASGAKYIVLTSKHHEGFTLWGSEYSWNWNAIDEGPKRDIVKELEVAIRNRTDLRFGLYYSLFEWFHPLFLEDESSSFHKRQFPVSKTLPELYELVNNYQPEVLWSDGDGGAPDQYWNSTGFLAWLYNESPVRGTVVTNDRWGAGSICKHGGFYTCSDRYNPGHLLPHKWENCMTIDKLSWGYRREAGISDYLTIEELVKQLVETVSCGGNLLMNIGPTLDGTISVVFEERLRQMGSWLKVNGEAIYETHTWRSQNDTVTPDVWYTSKPKEKLVYAIFLKWPTSGQLFLGHPKAILGATEVKLLGHGQPLNWISLEQNGIMVELPQLTIHQMPCKWGWALALTNVI

SEQ ID NO: 5596 - protein, 109 aa, Homo Sapiens
QLVETVSCGGNLLMNIGPTLDGTISVVFEERLRQMGSWLKVNGEAIYETHTWRSQNDTVTPDVWYTSKPKEKLVYAIFLKWPTSGQLFLGHPKAILGATEVRGNFTLFL

SEQ ID NO: 5597 - protein, 69 aa, Homo Sapiens
KPAHLNANDWATNGVGRKVSHSYGYGLWTQAPWWPWPRIGPQWPPSGSASSTSSPSPKTSGNGSRCGRP

SEQ ID NO: 5598 - protein, 69 aa, Homo Sapiens
MELRPWLLWVVAATGTLVLLAADAQGQKVFTNTWAVRIPGGPAVANSVARKHGFLNLGQIFGDYYHFWH

SEQ ID NO: 5599 - protein, 794 aa, Homo Sapiens
MELRPWLLWVVAATGTLVLLAADAQGQKVFTNTWAVRIPGGPAVANSVARKHGFLNLGQIFGDYYHFWHRGVTKRSLSPHRPRHSRLQREPQVQWLEQQVAKRRTKRDVYQEPTDPKFPQQWYLSGVTQRDLNVKAAWAQGYTGHGIVVSILDDGIEKNHPDLAGNYDPGASFDVNDQDPDPQPRYTQMNDNRHGTRCAGEVAAVANNGVCGVGVAYNARIGGVRMLDGEVTDAVEARSLGLNPNHIHIYSASWGPEDDGKTVDGPARLAEEAFFRGVSQGRGGLGSIFVWASGNGGREHDSCNCDGYTNSIYTLSISSATQFGNVPWYSEACSSTLATTYSSGNQNEKQIVTTDLRQKCTESHTGTSASAPLAAGIIALTLEANKNLTWRDMQHLVVQTSKPAHLNANDWATNGVGRKVSHSYGYGLLDAGAMVALAQNWTTVAPQRKCIIDILTEPKDIGKRLEVRKTVTACLGEPNHITRLEHAQARLTLSYNRRGDLAIHLVSPMGTRSTLLAARPHDYSADGFNDWAFMTTHSWDEDPSGEWVLEIENTSEANNYGTLTKFTLVLYGTAPEGLPVPPESSGCKTLTSSQACVVCEEGFSLHQKSCVQHCPPGFAPQVLDTHYSTENDVETIRASVCAPCHASCATCQGPALTDCLSCPSHASLDPVEQTCSRQSQSSRESPPQQQPPRLPPEVEAGQRLRAGLLPSHLPEVVAGLSCAFIVLVFVTVFLVLQLRSGFSFRGVKVYTMDRGLISYKGLPPEAWQEECPSDSEEDEGRGERTAFIKDQSAL

SEQ ID NO: 5600 - protein, 794 aa, Homo Sapiens; identical to SEQ ID NO: 5599

SEQ ID NO: 5601 - protein, 794 aa, Homo Sapiens; identical to SEQ ID NO: 5599

SEQ ID NO: 5602 - protein, 175 aa, Homo Sapiens
MELRPWLLWVVAATGTLVLLAADAQGQKVFTNTWAVRIPGGPAVANSVARKHGFLNLGQIFGDYYHFWHRGVTKRSLSPHRPRHSRLQREPQWLEQQVAKRRTKRDVYQEPTDPKFPQQWYLSGVTQRDLNVKAAWAQGYTGHGIVVSILDDGIEKNHPDLAGNYDPGASFDVND

SEQ ID NO: 5603 - protein, 216 aa, Homo Sapiens
PNHIHIYSASWGPEDDGKTVDGPARLAEEAFFRGVSQGRGGLGSIFVWASGNGGREHDSCNCDGYTNSIYTLSISSATQFGNVPWYSEACSSTLATTYSSGNQNEKQIVTTDLRQKCTESHTGTSASAPLAAGIIALTLEANKNLTWRDMQHLVVQTSKPAHLNANDWATNGVGRKVSHSYGYGLLDAGAMVALAQNWTTVAPQRKCIIDILTEPK

SEQ ID NO: 5604 - protein, 451 aa, Homo Sapiens
MVELGKFERKEFKSSSLQDGHTKMEEAPTHLNSFLKKEGLTFNRKRKWELDSYPIMLWWSPLTGETGRLGQCGADACFFTINRTYLHHHMTKAFLFYGTDFNIDSLPLPRKAHHDWAVFHEESPKNNYKLFHKPVITLFNYTATFSRHSHLPLTTQYLESIEVLKSLRYLVPLQSKNKLRKRLAPLVYVQSDCDPPSDRDSYVRELMTYIEVDSYGECLRNKDLPQQLKNPASMDADGFYRIIAQYKFILAFENAVCDDYITEKFWRPLKLGVVPVYYGSPSITDWLPSNKSAILVSEFSHPRELASYIRRLDSDDRLYEAYVEWKLKGEISNQRLLTALRERKWGVQDVNQDNYIDAFECMVCTKVWANIRLQEKGLPPKRWEAEDTHLSCPEPTVFAFSPLRTPPLSSLREMWISSFEQSKKEAQALRWLVDRNQNFSSQEFWGLVFKD

SEQ ID NO: 5605 - protein, 451 aa, Homo Sapiens; identical to SEQ ID NO: 5604

SEQ ID NO: 5606 - protein, 479 aa, Homo Sapiens
MVRIQRRKLLASCLCVTATVFLLVTLQVMVELGKFERKEFKSSSLQDGHTKMEEAPTHLNSFLKKEGLTFNRKRKWELDSYPIMLWWSPLTGETGRLGQCGADACFFTINRTYLHHHMTKAFLFYGTDFNIDSLPLPRKAHHDWAVFHEESPKNNYKLFHKPVITLFNYTATFSRHSHLPLTTQYLESIEVLKSLRYLVPLQSKNKLRKRLAPLVYVQSDCDPPSDRDSYVRELMTYIEVDSYGECLRNKDLPQQLKNPASMDADGFYRIIAQYKFILAFENAVCDDYITEKFWRPLKLGVVPVYYGSPSITDWLPSNKSAILVSEFSHPRELASYIRRLDSDDRLYEAYVEWKLKGEISNQRLLTALRERKWGVQDVNQDNYIDAFECMVCTKVWANIRLQEKGLPPKRWEAEDTHLSCPEPTVFAFSPLRTPPLSSLREMWISSFEQSKKEAQALRWLVDRNQNFSSQEFWGLVFKD

SEQ ID NO: 5607 - protein, 492 aa, Homo Sapiens
MAAGPIRVVLVLLGVLSVCAASGHGSVAEREAGGEAEWAEPWDGAVFRPPSALGAVGVTRSSGTPRPGREEAGDLPVLLWWSPGLFPHFPGDSERIECARGACVASRNRRALRDSRTRALLFYGTDFRASAAPLPRLAHQSWALLHEESPLNNFLLSHGPGIRLFNLTSTFSRHSDYPLSLQWLPGTAYLRRPVPPPMERAEWRRRGYAPLLYLQSHCDVPADRDRYVRELMRHIPVDSYGKCLQNRELPTARLQDTATATTEDPELLAFLSRYKFHLALENAICNDYMTEKLWRPMHLGAVPVYRGSPSVRDWMPNNHSVILIDDFESPQKLAEFIDFLDKNDEEYMKYLAYKQPGGITNQFLLDSLKHREWGVNDPLLPNYLNGFECFVCDYELARLDAEKAHAASPGDSPVFEPHIAQPSHMDCPVPTPGFGNVEEIPENDSWKEMWLQDYWQGLDQGEALTAMIHNNETEQTKFWDYLHEIFMKRQHL

SEQ ID NO: 5608 - protein, 476 aa, Homo Sapiens
MAAGPIRVVLVLLGVLSVCAASGHGSVAEREAGGEAEWAEPWDGAVFRPPSALGAVGVTRSSGTPRPGREEAGDLPVLLWWSPGLFPHFPGDSERIECARGACVASRNRRALRDSRTRALLFYGTDFRASAAPLPRLAHQSWALLHEESPLNNFLLSHGPGIRLFNLTSTFSRHSDYPLSLQWLPGTAYLRRPVPPPMERAEWRRRGYAPLLYLQSHCDVPADRDRYVRELMRHIPVDSYGKCLQNRELPTARLQDTATATTEDPELLAFLSRYKFHLALENAICNDYMTEKLWRPMHLGAVPVYRGSPSVRDWMPNNHSVILIDDFESPQKLAEFIDFLDKNDEEYMKYLAYKQPGGITNQFLLDSLKHREWGVNDPLLPNYLNGFECFVCDYELARLDAEKAHAASPGDSPVFEPHIAQPSHMDCPVPTPGFGNVEEIPENDSSLVQVRDHCICLRFLWPHSEKGRTHNYAAVP

SEQ ID NO: 5609 - protein, 135 aa, Homo Sapiens
MNLRKSGTLGHPGSLDETTYERLAEETLDSLAEFFEDLADKPYTFEDYDVSFGSGVLTVKLGGDLGTYVINKQTPNKQIWLSSPSSGPKRYDWTGKNWVYSHDGVSLHELLAAELTKALKTKLDLSSLAYSGKDA

SEQ ID NO: 5610 - protein, 135 aa, Homo Sapiens; identical to SEQ ID NO: 5609

SEQ ID NO: 5611 - protein, 171 aa, Homo Sapiens
MWTLGRRAVAGLLASPSPAQAQTLTRVPRPAELAPLCGRRGLRTDIDATCTPRRASSNQRGLNQIWNVKKQSVYLMNLRKSGTLGHPGSLDETTYERLAEETLDSLAEFFEDLADKPYTFEDYDVSFGSGVLTVKLGGDLGTYVINKQTPNKQIWLSSPSRLTWLLWLFHP

SEQ ID NO: 5612 - protein, 196 aa, Homo Sapiens
MWTLGRRAVAGLLASPSPAQAQTLTRVPRPAELAPLCGRRGLRTDIDATCTPRRASSNQRGLNQIWNVKKQSVYLMNLRKSGTLGHPGSLDETTYERLAEETLDSLAEFFEDLADKPYTFEDYDVSFGSGVLTVKLGGDLGTYVINKQTPNKQIWLSSPSRYVVDLSVMTGLGKTGCTPTTACPSMSCWPQSSLKP

SEQ ID NO: 5613 - protein, 210 aa, Homo Sapiens
MWTLGRRAVAGLLASPSPAQAQTLTRVPRPAELAPLCGRRGLRTDIDATCTPRRASSNQRGLNQIWNVKKQSVYLMNLRKSGTLGHPGSLDETTYERLAEETLDSLAEFFEDLADKPYTFEDYDVSFGSGVLTVKLGGDLGTYVINKQTPNKQIWLSSPSSGPKRYDWTGKNWVYSHDGVSLHELLAAELTKALKTKLDLSSLAYSGKDA

SEQ ID NO: 5614 - protein, 210 aa, Homo Sapiens; identical to SEQ ID NO: 5613

SEQ ID NO: 5615 - protein, 196 aa, Homo Sapiens
MWTLGRRAVAGLLASPSPAQAQTLTRVPRPAELAPLCGRRGLRTDIDATCTPRRASSNQRGLNQIWNVKKQSVYLMNLRKSGTLGHPGSLDETTYERLAEETLDSLAEFFEDLADKPYTFEDYDVSFGVNVAPVAVPSLRKSEDHALQTGHVLDYLCFCLLGFQSASEQRSNPDSVVHRMAGDGVWLCRPGWSAMA

SEQ ID NO: 5616 - protein, 91 aa, Homo Sapiens
MWTLGRRAVAGLLASPSPAQAQTLTRVPRPAELAPLCGRRGLRTDIDATCTPRRASSNQRGLNQIWNVKKQSVYLMNLRKSGTLGHPGVVS

SEQ ID NO: 5617 - protein, 19 aa, Homo Sapiens
MAELTVEVRGSNGAFYKAI

SEQ ID NO: 5618 - protein, 621 aa, Homo Sapiens
MAELTVEVRGSNGAFYKGFIKDVHEDSLTVVFENNWQPERQVPFNEVRLPPPPDIKKEISEGDEVEVYSRANDQEPCGWWLAKVRMMKGEFYVIEYAACDATYNEIVTFERLRPVNQNKTVKKNTFFKCTVDVPEDLREACANENAHKDFKKAVGACRIFYHPETTQLMILSASEATVKRVNILSDMHLRSIRTKLMLMSRNEEATKHLECTKQLAAAFHEEFVVREDLMGLAIGTHGSNIQQARKVPGVTAIELDEDTGTFRIYGESADAVKKARGFLEFVEDFIQVPRNLVGKVIGKNGKVIQEIVDKSGVVRVRIEGDNENKLPREDGMVPFVFVGTKESIGNVQVLLEYHIAYLKEVEQLRMERLQIDEQLRQIGSRSYSGRGRGRRGPNYTSGYGTNSELSNPSETESERKDELSDWSLAGEDDRDSRHQRDSRRRPGGRGRSVSGGRGRGGPRGGKSSISSVLKDPDSNPYSLLDNTESDQTADTDASESHHSTNRRRRSRRRRTDEDAVLMDGMTESDTASVNENGLVTVADYISRAESQSRQRNLPRETLAKNKKEMAKDVIEEHGPSEKAINGPTSASGDDISKLQRTPGEEKINTLKEENTQEAAVLNGVS

SEQ ID NO: 5619 - protein, 539 aa, Homo Sapiens
MAELTVEVRGSNGAFYKGFIKDVHEDSLTVVFENNWQPERQVPFNEVRLPPPPDIKKEISEGDEVEVYSRANDQEPCGWWLAKVRMMKGEFYVIEYAACDATYNEIVTFERLRPVNQNKTVKKNTFFKCTVDVPEDLREACANENAHKDFKKAVGACRIFYHPETTQLMILSASEATVKRVNILSDMHLRSIRTKLMLMSRNEEATKHLECTKQLAAAFHEEFVVREDLMGLAIGTHGSNIQQARKVPGVTAIELDEDTGTFRIYGESADAVKKARGFLEFVEDFIQVPRNLVGKVIGKNGKVIQEIVDKSGVVRVRIEGDNENKLPREDGMVPFVFVGTKESIGNVQVLLEYHIAYLKEVEQLRMERLQIDEQLRQIGSRSYSGRGRGRRGPNYTSGYGTNSELSNPSETESERKDELSDWSLAGEDDRDSRHQRDSRRRPGGRGRSVSGGRGRGGPRGGKSSISSVLKDPDSNPYSLLDNTESDQTADTDASESHHSTNRRRRSRRRRTDEDAVLMDGMTESDTASVNENGLGKRCD

SEQ ID NO: 5620 - protein, 490 aa, Homo Sapiens
MAELTVEVRGSNGAFYKVYSRANDQEPCGWWLAKVRMMKGEFYVIEYAACDATYNEIVTFERLRPVNQNKTVKKNTFFKCTVDVPEDLREACANENAHKDFKKAVGACRIFYHPETTQLMILSASEATVKRVNILSDMHLRSIRTKLMLMSRNEEATKHLECTKQLAAAFHEEFVVREDLMGLAIGTHGSNIQQARKVPGVTAIELDEDTGTFRIYGESADAVKKARGFLEFVEDFIQVPRNLVGKVIGKNGKVIQEIVDKSGVVRVRIEGDNENKLPREDGMVPFVFVGTKESIGNVQVLLEYHIAYLKEVEQLRMERLQIDEQLRQIGSRSYSGRGRGRRGPNYTSGYGTNSELSNPSETESERKDELSDWSLAGEDDRDSRHQRDSRRRPGGRGRSVSGGRGRGGPRGGKSSISSVLKDPDSNPYSLLDNTESDQTADTDASESHHSTNRRRRSRRRRTDEDAVLMDGMTESDTASVNENGLGKRCD

SEQ ID NO: 5621 - protein, 75 aa, Homo Sapiens
MMKGEFYVIEYAACDATYNEIVTFERLRPVNQNKTVKKNTFFKCTVDVPEDLREACANENAHKDFKKAVGACRIF

SEQ ID NO: 5622 - protein, 94 aa, Homo Sapiens
MMKGEFYVIEYAACDATYNEIVTFERLRPVNQNKTVKKNTFFKCTVDVPEDLREACANENAHKDFKKAVGACRIFYHPETTQLMILSASEATVK

SEQ ID NO: 5623 - protein, 119 aa, Homo Sapiens
MMKGEFYVIEYAACDATYNEIVTFERLRPVNQNKTVKKNTFFKCTVDVPEDLREACANENAHKDFKKAVGACRIFYHPETTQLMILSASEATVKRVNILSDMHLRSIRTKLMLMSRNEE

SEQ ID NO: 5624 - protein, 123 aa, Homo Sapiens
MMKGEFYVIEYAACDATYNEIVTFERLRPVNQNKTVKKNTFFKCTVDVPEDLREACANENAHKDFKKAVGACRIFYHPETTQLMILSASEATVKRVNILSDMHLRSIRTKLMLMSRNEEATKH

SEQ ID NO: 5625 - protein, 536 aa, Homo Sapiens
MMKGEFYVIEYAACDATYNEIVTFERLRPVNQNKTVKKNTFFKCTVDVPEDLREACANENAHKDFKKAVGACRIFYHPETTQLMILSASEATVKRVNILSDMHLRSIRTKLMLMSRNEEATKHLECTKQLAAAFHEEFVVREDLMGLAIGTHGSNIQQARKVPGVTAIELDEDTGTFRIYGESADAVKKARGFLEFVEDFIQVPRNLVGKVIGKNGKVIQEIVDKSGVVRVRIEGDNENKLPREDGMVPFVFVGTKESIGNVQVLLEYHIAYLKEVEQLRMERLQIDEQLRQIGSRSYSGRGRGRRGPNYTSGYGTNSELSNPSETESERKDELSDWSLAGEDDRDSRHQRDSRRRPGGRGRSVSGGRGRGGPRGGKSSISSVLKDPDSNPYSLLDNTESDQTADTDASESHHSTNRRRRSRRRRTDEDAVLMDGMTESDTASVNENGLVTVADYISRAESQSRQRNLPRETLAKNKKEMAKDVIEEHGPSEKAINGPTSASGDDISKLQRTPGEEKINTLKEENTQEAAVLNGVS

SEQ ID NO: 5626 - protein, 454 aa, Homo Sapiens
MMKGEFYVIEYAACDATYNEIVTFERLRPVNQNKTVKKNTFFKCTVDVPEDLREACANENAHKDFKKAVGACRIFYHPETTQLMILSASEATVKRVNILSDMHLRSIRTKLMLMSRNEEATKHLECTKQLAAAFHEEFVVREDLMGLAIGTHGSNIQQARKVPGVTAIELDEDTGTFRIYGESADAVKKARGFLEFVEDFIQVPRNLVGKVIGKNGKVIQEIVDKSGVVRVRIEGDNENKLPREDGMVPFVFVGTKESIGNVQVLLEYHIAYLKEVEQLRMERLQIDEQLRQIGSRSYSGRGRGRRGPNYTSGYGTNSELSNPSETESERKDELSDWSLAGEDDRDSRHQRDSRRRPGGRGRSVSGGRGRGGPRGGKSSISSVLKDPDSNPYSLLDNTESDQTADTDASESHHSTNRRRRSRRRRTDEDAVLMDGMTESDTASVNENGLGKRCD

SEQ ID NO: 5627 - protein, 151 aa, Homo Sapiens
MRAVNILVYFFGFFWWFFNVQGFIKDVHEDSLTVVFENNWQPERQVPFNEVRLPPPPDIKKEISEGDEVEVYSRANDQEPCGWWLAKVRMMKGEFYVIEYAACDATYNEIVTFERLRPVNQNKTVKKNTFFKCTVDVPEDLREACANENAH

SEQ ID NO: 5628 - protein, 608 aa, Homo Sapiens
MVTEGFIKDVHEDSLTVVFENNWQPERQVPFNEVRLPPPPDIKKEISEGDEVEVYSRANDQEPCGWWLAKVRMMKGEFYVIEYAACDATYNEIVTFERLRPVNQNKTVKKNTFFKCTVDVPEDLREACANENAHKDFKKAVGACRIFYHPETTQLMILSASEATVKRVNILSDMHLRSIRTKLMLMSRNEEATKHLECTKQLAAAFHEEFVVREDLMGLAIGTHGSNIQQARKVPGVTAIELDEDTGTFRIYGESADAVKKARGFLEFVEDFIQVPRNLVGKVIGKNGKVIQEIVDKSGVVRVRIEGDNENKLPREDGMVPFVFVGTKESIGNVQVLLEYHIAYLKEVEQLRMERLQIDEQLRQIGSRSYSGRGRGRRGPNYTSGYGTNSELSNPSETESERKDELSDWSLAGEDDRDSRHQRDSRRRPGGRGRSVSGGRGRGGPRGGKSSISSVLKDPDSNPYSLLDNTESDQTADTDASESHHSTNRRRRSRRRRTDEDAVLMDGMTESDTASVNENGLVTVADYISRAESQSRQRNLPRETLAKNKKEMAKDVIEEHGPSEKAINGPTSASGDDISKLQRTPGEEKINTLKEENTQEAAVLNGVS

SEQ ID NO: 5629 - protein, 247 aa, Homo Sapiens
  misc_feature (1)..(1): Xaa can be any naturally occurring amino acid
XTNSELSNPSETESERKDELSDWSLAGEDDRDSRHQRDSRRRPGGRGRSVSGGRGRGGPRGGKSSISSVLKDPDSNPYSLLDNTESDQTADTDASESHHSTNRRRRSRRRRTDEDAVLMDGMTESDTASVNENGLDDSEKKPQRRNRSRRRRFRGQAEDRQPVTVADYISRAESQSRQRNLPRETLAKNKKEMAKDVIEEHGPSEKAINGPTSASGDDISKLQRTPGEEKINTLKEENTQEAAVLNG

SEQ ID NO: 5630 - protein, 144 aa, Homo Sapiens
MGRGYSGALQARGGLEEPLERGLRGPSFTQSPLHGAAAAYLSAQRDASLPVPGQRSDMQKVTLGLLVFLAGFPVLDANDLEDKNSPFYYDWHSLQVGGLICAGVLCAMGIIIVMSAKCKCKFGQKSGHHPGETPPLITPGSAQS

SEQ ID NO: 5631 - protein, 70 aa, Homo Sapiens
MQKVTLGLLVFLAGFPVLDANDLEDKNSPFYYDWHSLQVGGLICAGVLCAMGIIIVMSAKCKCKFGQKSG

SEQ ID NO: 5632 - protein, 87 aa, Homo Sapiens
MQKVTLGLLVFLAGFPVLDANDLEDKNSPFYYDWHSLQVGGLICAGVLCAMGIIIVMSAKCKCKFGQKSGHHPGETPPLITPGSAQS

SEQ ID NO: 5633 - protein, 87 aa, Homo Sapiens; identical to SEQ ID NO: 5632

SEQ ID NO: 5634 - protein, 87 aa, Homo Sapiens; identical to SEQ ID NO: 5632

SEQ ID NO: 5635 - protein, 96 aa, Homo Sapiens
MQKVTLGLLVFLAGFPVLDANDLEDKNSPFYYDWHSLQVGGLICAGVLCAMGIIIVMSEWRSSGEQAGRGWGSPPLTTQLSPTGAKCKCKFGQKSG

SEQ ID NO: 5636 - protein, 113 aa, Homo Sapiens
MQKVTLGLLVFLAGFPVLDANDLEDKNSPFYYDWHSLQVGGLICAGVLCAMGIIIVMSEWRSSGEQAGRGWGSPPLTTQLSPTGAKCKCKFGQKSGHHPGETPPLITPGSAQS

SEQ ID NO: 5637 - protein, 113 aa, Homo Sapiens; identical to SEQ ID NO: 5636

SEQ ID NO: 5638 - protein, 113 aa, Homo Sapiens; identical to SEQ ID NO: 5636

SEQ ID NO: 5639 - protein, 116 aa, Homo Sapiens
MQKVTLGLLVFLAGFPVLDANDLEDKNSPFYYGAPYIFVKRMGGQMERTQAGTEVPSTFLLDWHSLQVGGLICAGVLCAMGIIIVMSAKCKCKFGQKSGHHPGETPPLITPGSAQS

SEQ ID NO: 5640 - protein, 116 aa, Homo Sapiens; identical to SEQ ID NO: 5639

SEQ ID NO: 5641 - protein, 61 aa, Homo Sapiens
MQKVTLGLLVFLAGFPVLDANDLEDKNSPFYYGESPCPLSPPHNPTYCLVPRVPIQGWGLT

SEQ ID NO: 5642 - protein, 61 aa, Homo Sapiens; identical to SEQ ID NO: 5641

SEQ ID NO: 5643 - protein, 844 aa, Homo Sapiens
MGPGAPFARVGWPLPLLVVMAAGVAPVWASHSPHLPRPHSRVPPHPSSERRAVYIGALFPMSGGWPGGQACQPAVEMALEDVNSRRDILPDYELKLIHHDSKCDPGQATKYLYELLYNDPIKIILMPGCSSVSTLVAEAARMWNLIVLSYGSSSPALSNRQRFPTFFRTHPSATLHNPTRVKLFEKWGWKKIATIQQTTEVFTSTLDDLEERVKEAGIEITFRQSFFSDPAVPVKNLKRQDARIIVGLFYETEARKVFCEVYKERLFGKKYVWFLIGWYADNWFKIYDPSINCTVDEMTEAVEGHITTEIVMLNPANTRSISNMTSQEFVEKLTKRLKRHPEETGGFQEAPLAYDAIWALALALNKTSGGGGRSGVRLEDFNYNNQTITDQIYRAMNSSSFEGVSGHVVFDASGSRMAWTLIEQLQGGSYKKIGYYDSTKDDLSWSKTDKWIGGSPPADQTLVIKTFRFLSQKLFISVSVLSSLGIVLAVVCLSFNIYNSHVRYIQNSQPNLNNLTAVGCSLALAAVFPLGLDGYHIGRNQFPFVCQARLWLLGLGFSLGYGSMFTKIWWVHTVFTKKEEKKEWRKTLEPWKLYATVGLLVGMDVLTLAIWQIVDPLHRTIETFAKEEPKEDIDVSILPQLEHCSSRKMNTWLGIFYGYKGLLLLLGIFLAYETKSVSTEKINDHRAVGMAIYNVAVLCLITAPVTMILSSQQDAAFAFASLAIVFSSYITLVVLFVPKMRRLITRGEWQSEAQDTMKTGSSTNNNEEEKSRLLEKENRELEKIIAEKEERVSELRHQLQSRQQLRSRRHPPTPPEPSGGLPRGPPEPPDRLSCDGSRVHLLYK

SEQ ID NO: 5644 - protein, 844 aa, Homo Sapiens; identical to SEQ ID NO: 5643

SEQ ID NO: 5645 - protein, 131 aa, Homo Sapiens
MLLLLLLAPLFLRPPGAGGAQTPNATSEGCQIIHPPWEGGIRYRGLTRDQVKAINFLPVDYEIEYVCRGEREVVGPKVRKCLANGSWTDMDTPSRCGTLPSETQASALPGLQHGQVWEGAGDQAREAGRQW

SEQ ID NO: 5646 - protein, 97 aa, Homo Sapiens
MLLLLLLAPLFLRPPGAGGAQTPNATSEGCQIIHPPWEGGIRYRGLTRDQVKAINFLPVDYEIEYVCRGEREVVGPKVRKCLANGSWTDMDTPSRCV

SEQ ID NO: 5647 - protein, 899 aa, Homo Sapiens
MLLLLLLAPLFLRPPGAGGAQTPNATSEGCQIIHPPWEGGIRYRGLTRDQVKAINFLPVDYEIEYVCRGEREVVGPKVRKCLANGSWTDMDTPSRCVNRTPHSERRAVYIGALFPMSGGWPGGQACQPAVEMALEDVNSRRDILPDYELKLIHHDSKCDPGQATKYLYELLYNDPIKIILMPGCSSVSTLVAEAARMWNLIVLSYGSSSPALSNRQRFPTFFRTHPSATLHNPTRVKLFEKWGWKKIATIQQTTEVFTSTLDDLEERVKEAGIEITFRQSFFSDPAVPVKNLKRQDARIIVGLFYETEARKVFCEVYKERLFGKKYVWFLIGWYADNWFKIYDPSINCTVDEMTEAVEGHITTEIVMLNPANTRSISNMTSQEFVEKLTKRLKRHPEETGGFQEAPLAYDAIWALALALNKTSGGGGRSGVRLEDFNYNNQTITDQIYRAMNSSSFEGVSGHVVFDASGSRMAWTLIEQLQGGSYKKIGYYDSTKDDLSWSKTDKWIGGSPPADQTLVIKTFRFLSQKLFISVSVLSSLGIVLAVVCLSFNIYNSHVRYIQNSQPNLNNLTAVGCSLALAAVFPLGLDGYHIGRNQFPFVCQARLWLLGLGFSLGYGSMFTKIWWVHTVFTKKEEKKEWRKTLEPWKLYATVGLLVGMDVLTLAIWQIVDPLHRTIETFAKEEPKEDIDVSILPQLEHCSSRKMNTWLGIFYGYKGLLLLLGIFLAYETKSVSTEKINDHRAVGMAIYNVAVLCLITAPVTMILSSQQDAAFAFASLAIVFSSYITLVVLFVPKMRRLITRGEWQSEAQDTMKTGSSTNNNEEEKSRLLEKENRELEKIIAEKEERVSELRHQLQSRQQLRSRRHPPTPPEPSGGLPRGPPEPPDRLSCDGSRVHLLYK

SEQ ID NO: 5648 - protein, 137 aa, Homo Sapiens
MLLLLLLAPLFLRPPGAGGAQTPNATSEGCQIIHPPWEGGIRYRGLTRDQVKAINFLPVDYEIEYVCRGEREVVGPKVRKCLANGSWTDMDTPSRCVRICSKSYLTLENGKVFLTGGDLPALDGARVDFRCDPDFHL

SEQ ID NO: 5649 - protein, 156 aa, Homo Sapiens
MLLLLLLAPLFLRPPGAGGAQTPNATSEGCQIIHPPWEGGIRYRGLTRDQVKAINFLPVDYEIEYVCRGEREVVGPKVRKCLANGSWTDMDTPSRCVRICSKSYLTLENGKVFLTGGDLPALDGARVDFRCDPDFHLVGSSRSICSQGQWSTPKPH

SEQ ID NO: 5650 - protein, 193 aa, Homo Sapiens
MLLLLLLAPLFLRPPGAGGAQTPNATSEGCQIIHPPWEGGIRYRGLTRDQVKAINFLPVDYEIEYVCRGEREVVGPKVRKCLANGSWTDMDTPSRCVRICSKSYLTLENGKVFLTGGDLPALDGARVDFRCDPDFHLVGSSRSICSQGQWSTPKPHCQGTLPSETQASALPGLQHGQVWEGAGDQAREAGRQW

SEQ ID NO: 5651 - protein, 961 aa, Homo Sapiens
MLLLLLLAPLFLRPPGAGGAQTPNATSEGCQIIHPPWEGGIRYRGLTRDQVKAINFLPVDYEIEYVCRGEREVVGPKVRKCLANGSWTDMDTPSRCVRICSKSYLTLENGKVFLTGGDLPALDGARVDFRCDPDFHLVGSSRSICSQGQWSTPKPHCQVNRTPHSERRAVYIGALFPMSGGWPGGQACQPAVEMALEDVNSRRDILPDYELKLIHHDSKCDPGQATKYLYELLYNDPIKIILMPGCSSVSTLVAEAARMWNLIVLSYGSSSPALSNRQRFPTFFRTHPSATLHNPTRVKLFEKWGWKKIATIQQTTEVFTSTLDDLEERVKEAGIEITFRQSFFSDPAVPVKNLKRQDARIIVGLFYETEARKVFCEVYKERLFGKKYVWFLIGWYADNWFKIYDPSINCTVDEMTEAVEGHITTEIVMLNPANTRSISNMTSQEFVEKLTKRLKRHPEETGGFQEAPLAYDAIWALALALNKTSGGGGRSGVRLEDFNYNNQTITDQIYRAMNSSSFEGVSGHVVFDASGSRMAWTLIEQLQGGSYKKIGYYDSTKDDLSWSKTDKWIGGSPPADQTLVIKTFRFLSQKLFISVSVLSSLGIVLAVVCLSFNIYNSHVRYIQNSQPNLNNLTAVGCSLALAAVFPLGLDGYHIGRNQFPFVCQARLWLLGLGFSLGYGSMFTKIWWVHTVFTKKEEKKEWRKTLEPWKLYATVGLLVGMDVLTLAIWQIVDPLHRTIETFAKEEPKEDIDVSILPQLEHCSSRKMNTWLGIFYGYKGLLLLLGIFLAYETKSVSTEKINDHRAVGMAIYNVAVLCLITAPVTMILSSQQDAAFAFASLAIVFSSYITLVVLFVPKMRRLITRGEWQSEAQDTMKTGSSTNNNEEEKSRLLEKENRELEKIIAEKEERVSELRHQLQSRQQLRSRRHPPTPPEPSGGLPRGPPEPPDRLSCDGSRVHLLYK

SEQ ID NO: 5652 - protein, 578 aa, Homo Sapiens
MLLLLLLAPLFLRPPGAGGAQTPNATSEGCQIIHPPWEGGIRYRGLTRDQVKAINFLPVDYEIEYVCRGEREVVGPKVRKCLANGSWTDMDTPSRCVRICSKSYLTLENGKVFLTGGDLPALDGARVDFRCDPDFHLVGSSRSICSQGQWSTPKPHCQVNRTPHSERRAVYIGALFPMSGGWPGGQACQPAVEMALEDVNSRRDILPDYELKLIHHDSKCDPGQATKYLYELLYNDPIKIILMPGCSSVSTLVAEAARMWNLIVLSYGSSSPALSNRQRFPTFFRTHPSATLHNPTRVKLFEKWGWKKIATIQQTTEVFTSTLDDLEERVKEAGIEITFRQSFFSDPAVPVKNLKRQDARIIVGLFYETEARKVFCEVYKERLFGKKYVWFLIGWYADNWFKIYDPSINCTVDEMTEAVEGHITTEIVMLNPANTRSISNMTSQEFVEKLTKRLKRHPEETGGFQEAPLAYDAIWALALALNKTSGGGGRSGVRLEDFNYNNQTITDQIYRAMNSSSFEGVSGHVVFDASGSRMAWTLIEQLQGGSYKKIGYYDSTKDDLSWSKTDKWIVISRTHSPT

SEQ ID NO: 5653 - protein, 578 aa, Homo Sapiens; identical to SEQ ID NO: 5652

SEQ ID NO: 5654 - protein, 133 aa, Homo Sapiens
MPGAWMLLLLLLAPLFLRPPGAGGAQTPNATSEGCQIIHPPWEGGIRYRGLTRDQVKAINFLPVDYEIEYVCRGEREVVGPKVRKCLANGSWTDMDTPSRCVRICSKSYLTLENGKVFLTGGDLPALDGARVD

SEQ ID NO: 5655 - protein, 70 aa, Homo Sapiens
MRKSPGLSDCLWAWILLLSTLTGRRTSRKSHQNTDLYEVNEGKDVAMDSRHYKMNLKTIPLSSPGFWTDS

SEQ ID NO: 5656 - protein, 35 aa, Homo Sapiens
MRKSPGLSDCLWAWILLLSTLTGRSYGQPSLQDEL

SEQ ID NO: 5657 - protein, 85 aa, Homo Sapiens
MRKSPGLSDCLWAWILLLSTLTGRSYGQPSLQDELKDNTTVFTRILDRLLDGYDNRLRPGLGERVTEVKTDIFVTSFGPVSDHDM

SEQ ID NO: 5658 - protein, 168 aa, Homo Sapiens
MRKSPGLSDCLWAWILLLSTLTGRSYGQPSLQDELKDNTTVFTRILDRLLDGYDNRLRPGLGERVTEVKTDIFVTSFGPVSDHDMEYTIDVFFRQSWKDERLKFKGPMTVLRLNNLMASKIWTPDTFFHNGKKSVAHNMTMPNKLLRITEDGTLLYTMRLTVRAECPM

SEQ ID NO: 5659 - protein, 456 aa, Homo Sapiens
MRKSPGLSDCLWAWILLLSTLTGRSYGQPSLQDELKDNTTVFTRILDRLLDGYDNRLRPGLGERVTEVKTDIFVTSFGPVSDHDMEYTIDVFFRQSWKDERLKFKGPMTVLRLNNLMASKIWTPDTFFHNGKKSVAHNMTMPNKLLRITEDGTLLYTMRLTVRAECPMHLEDFPMDAHACPLKFGSYAYTRAEVVYEWTREPARSVVVAEDGSRLNQYDLLGQTVDSGIVQSSTGEYVVMTTHFHLKRKIGYFVIQTYLPCIMTVILSQVSFWLNRESVPARTVFGVTTVLTMTTLSISARNSLPKVAYATAMDWFIAVCYAFVFSALIEFATVNYFTKRGYAWDGKSVVPEKPKKVKDPLIKKNNTYAPTATSYTPNLARGDPGLATIAKSATIEPKEVKPETKPPEPKKTFNSVSKIDRLSRIAFPLLFGIFNLVYWATYLNREPQLKAPTPHQ

SEQ ID NO: 5660 - protein, 456 aa, Homo Sapiens; identical to SEQ ID NO: 5659

SEQ ID NO: 5661 - protein, 456 aa, Homo Sapiens; identical to SEQ ID NO: 5659

SEQ ID NO: 5662 - protein, 456 aa, Homo Sapiens; identical to SEQ ID NO: 5659

SEQ ID NO: 5663 - protein, 456 aa, Homo Sapiens; identical to SEQ ID NO: 5659

SEQ ID NO: 5664 - protein, 456 aa, Homo Sapiens; identical to SEQ ID NO: 5659

SEQ ID NO: 5665 - protein, 285 aa, Homo Sapiens
MRKSPGLSDCLWAWILLLSTLTGRSYGQPSLQDELKDNTTVFTRILDRLLDGYDNRLRPGLGERVTEVKTDIFVTSFGPVSDHDMEYTIDVFFRQSWKDERLKFKGPMTVLRLNNLMASKIWTPDTFFHNGKKSVAHNMTMPNKLLRITEDGTLLYTMRLTVRAECPMHLEDFPMDAHACPLKFGSYAYTRAEVVYEWTREPARSVVVAEDGSRLNQYDLLGQTVDSGIVQSSTGEYVVMTTHFHLKRKIGYFVIQTYLPCIMTVILSQVSFWLNRESVPARTVF

SEQ ID NO: 5666 - protein, 456 aa, Homo Sapiens; identical to SEQ ID NO: 5659

SEQ ID NO: 5667 - protein, 456 aa, Homo Sapiens; identical to SEQ ID NO: 5659

SEQ ID NO: 5668 - protein, 94 aa, Homo Sapiens
MRKSPGLSDCLWAWILLLSTLTGRSYGQPSLQDELKDNTTVFTRILDRLLDGYDNRLRPGLGERVTEVKTDIFVTSFGPVSDHDMIFALQNTAQ

SEQ ID NO: 5669 - protein, 471 aa, Homo Sapiens
MVQVSIASNELLQPAMRKSPGLSDCLWAWILLLSTLTGRSYGQPSLQDELKDNTTVFTRILDRLLDGYDNRLRPGLGERVTEVKTDIFVTSFGPVSDHDMEYTIDVFFRQSWKDERLKFKGPMTVLRLNNLMASKIWTPDTFFHNGKKSVAHNMTMPNKLLRITEDGTLLYTMRLTVRAECPMHLEDFPMDAHACPLKFGSYAYTRAEVVYEWTREPARSVVVAEDGSRLNQYDLLGQTVDSGIVQSSTGEYVVMTTHFHLKRKIGYFVIQTYLPCIMTVILSQVSFWLNRESVPARTVFGVTTVLTMTTLSISARNSLPKVAYATAMDWFIAVCYAFVFSALIEFATVNYFTKRGYAWDGKSVVPEKPKKVKDPLIKKNNTYAPTATSYTPNLARGDPGLATIAKSATIEPKEVKPETKPPEPKKTFNSVSKIDRLSRIAFPLLFGIFNLVYWATYLNREPQLKAPTPHQ

SEQ ID NO: 5670 - protein, 113 aa, Homo Sapiens
MVQVSIASNEVSYPSELLQPAMRKSPGLSDCLWAWILLLSTLTGRSYGQPSLQDELKDNTTVFTRILDRLLDGYDNRLRPGLGERVTEVKTDIFVTSFGPVSDHDMEYTIDVF

SEQ ID NO: 5671 - protein, 427 aa, Homo Sapiens
MEYTIDVFFRQKWKDERLKFKGPMNILRLNNLMASKIWTPDTFFHNGKKSVAHNMTMPNKLLRIQDDGTLLYTMRLTVQAECPMHLEDFPMDAHSCPLKFGSYAYTTSEVTYIWTYNASDSVQVAPDGSRLNQYDLLGQSIGKETIKSSTGEYTVMTAHFHLKRKIGYFVIQTYLPCIMTVILSQVSFWLNRESVPARTVFGVTTVLTMTTLSISARNSLPKVAYATAMDWFIAVCYAFVFSALIEFATVNYFTKRGWAWDGKSVVNDKSPSIKAEGITLTYNSVKAILQGAKLIWSKYIAFSWPSLFQEKTLEYLEKWMDCLTFKQSSKKEKASVMIQNNAYAVAVANYAPNLSKDPVLSTISKSATTPEPNKKPENKPAEAKKTFNSVSKIDRMSRIVFPVLFGTFNLVYWATYLNREPVLGVSP

SEQ ID NO: 5672 - protein, 137 aa, Homo Sapiens
MKTKLNIYNMQFLLFVFLVWDPARLVLANIQEDEAKNNITIFTRILDRLLDGYDNRLRPGLGDSITEVFTNIYVTSFGPVSDTDMEYTIDVFFRQKWKDERLKFKGPMNILRLNNLMASKIWTPDTFFHNGKKSVAH

SEQ ID NO: 5673 - protein, 152 aa, Homo Sapiens
MKTKLNIYNMQFLLFVFLVWDPARLVLANIQEDEAKNNITIFTRILDRLLDGYDNRLRPGLGDSITEVFTNIYVTSFGPVSDTDMEYTIDVFFRQKWKDERLKFKGPMNILRLNNLMASKIWTPDTFFHNGKKSVAHNMTMPNKLLRIQDDG

SEQ ID NO: 5674 - protein, 159 aa, Homo Sapiens
MKTKLNIYNMQFLLFVFLVWDPARLVLANIQEDEAKNNITIFTRILDRLLDGYDNRLRPGLGDSITEVFTNIYVTSFGPVSDTDMEYTIDVFFRQKWKDERLKFKGPMNILRLNNLMASKIWTPDTFFHNGKKSVAHNMTMPNKLLRIQDDGTLLYTMR

SEQ ID NO: 5675 - protein, 451 aa, Homo Sapiens
MKTKLNIYNMQFLLFVFLVWDPARLVLANIQEDEAKNNITIFTRILDRLLDGYDNRLRPGLGDSITEVFTNIYVTSFGPVSDTDMEYTIDVFFRQKWKDERLKFKGPMNILRLNNLMASKIWTPDTFFHNGKKSVAHNMTMPNKLLRIQDDGTLLYTMRLTVQAECPMHLEDFPMDAHSCPLKFGSYAYTTSEVTYIWTYNASDSVQVAPDGSRLNQYDLLGQSIGKETIKSSTGEYTVMTAHFHLKRKIGYFVIQTYLPCIMTVILSQVSFWLNRESVPARTVFGVTTVLTMTTLSISARNSLPKVAYATAMDWFIAVCYAFVFSALIEFATVNYFTKRGWAWDGKSVVNDKKKEKASVMIQNNAYAVAVANYAPNLSKDPVLSTISKSATTPEPNKKPENKPAEAKKTFNSVSKIDRMSRIVFPVLFGTFNLVYWATYLNREPVLGVSP

SEQ ID NO: 5676 - protein, 451 aa, Homo Sapiens; identical to SEQ ID NO: 5675

SEQ ID NO: 5677 - protein, 511 aa, Homo Sapiens
MKTKLNIYNMQFLLFVFLVWDPARLVLANIQEDEAKNNITIFTRILDRLLDGYDNRLRPGLGDSITEVFTNIYVTSFGPVSDTDMEYTIDVFFRQKWKDERLKFKGPMNILRLNNLMASKIWTPDTFFHNGKKSVAHNMTMPNKLLRIQDDGTLLYTMRLTVQAECPMHLEDFPMDAHSCPLKFGSYAYTTSEVTYIWTYNASDSVQVAPDGSRLNQYDLLGQSIGKETIKSSTGEYTVMTAHFHLKRKIGYFVIQTYLPCIMTVILSQVSFWLNRESVPARTVFGVTTVLTMTTLSISARNSLPKVAYATAMDWFIAVCYAFVFSALIEFATVNYFTKRGWAWDGKSVVNDKSPSIKAEGITLTYNSVKAILQGAKLIWSKYIAFSWPSLFQEKTLEYLEKWMDCLTFKQSSKKEKASVMIQNNAYAVAVANYAPNLSKDPVLSTISKSATTPEPNKKPENKPAEAKKTFNSVSKIDRMSRIVFPVLFGTFNLVYWATYLNREPVLGVSP

SEQ ID NO: 5678 - protein, 451 aa, Homo Sapiens; identical to SEQ ID NO: 5675

SEQ ID NO: 5679 - protein, 367 aa, Homo Sapiens
MKTKLNIYNMQFLLFVFLVWDPARLVLANIQEDEAKNNITIFTRILDRLLDGYDNRLRPGLGDSITEVFTNIYVTSFGPVSDTDMEYTIDVFFRQKWKDERLKFKGPMNILRLNNLMASKIWTPDTFFHNGKKSVAHNMTMPNKLLRIQDDGTLLYTMRLTVQAECPMHLEDFPMDAHSCPLKFGSYAYTTSEVTYIWTYNASDSVQVAPDGSRLNQYDLLGQSIGKETIKSSTGEYTVMTAHFHLKRKIGYFVIQTYLPCIMTVILSQVSFWLNRESVPARTVFGVTTVLTMTTLSISARNSLPKVAYATAMDWFIAVCYAFVFSALIEFATVNYFTKRGWAWDGKSVVNDKVSESFRVIIIKKIP

SEQ ID NO: 5680 - protein, 451 aa, Homo Sapiens; identical to SEQ ID NO: 5675

SEQ ID NO: 5681 - protein, 66 aa, Homo Sapiens
MKTKLNIYNMQFLLFVFLVWDPARLVLANIQEDEAKNNITIFTRILDRLLDGYDNRLRPGLGGIYN

SEQ ID NO: 5682 - protein, 66 aa, Homo Sapiens; identical to SEQ ID NO: 5681

SEQ ID NO: 5683 - protein, 66 aa, Homo Sapiens; identical to SEQ ID NO: 5681

SEQ ID NO: 5684 - protein, 73 aa, Homo Sapiens
MKTKLNIYNMQFLLFVFLVWDPARLVLANIQEDEAKNNITIFTRILDRLLDGYDNRLRPGLGVSRVESPVCVT

SEQ ID NO: 5685 - protein, 56 aa, Homo Sapiens
SSTGEYTVMTAHFHLKRKIGYFVIQTYLPCIMTVILSQVSFWLNRESVPARTVFGE

SEQ ID NO: 5686 - protein, 16 aa, Homo Sapiens
MDNGMFSGFIMIKNLL

SEQ ID NO: 5687 - protein, 86 aa, Homo Sapiens
MDNGMFSGFIMIKNLLLFCISMNLSSHFGFSQMPTSSVKDETNDNITIFTRILDGLLDGYDNRLRPGLGERITQVRTDIYVTSFGP

SEQ ID NO: 5688 - protein, 149 aa, Homo Sapiens
MDNGMFSGFIMIKNLLLFCISMNLSSHFGFSQMPTSSVKDETNDNITIFTRILDGLLDGYDNRLRPGLGERITQVRTDIYVTSFGPVSDTEMEYTIDVFFRQSWKDERLRFKGPMQRLPLNNLLASKIWTPDTFFHNGKKSIAHNMTTP

SEQ ID NO: 5689 - protein, 166 aa, Homo Sapiens
MDNGMFSGFIMIKNLLLFCISMNLSSHFGFSQMPTSSVKDETNDNITIFTRILDGLLDGYDNRLRPGLGERITQVRTDIYVTSFGPVSDTEMEYTIDVFFRQSWKDERLRFKGPMQRLPLNNLLASKIWTPDTFFHNGKKSIAHNMTTPNKLLRLEDDGTLLYTMR

SEQ ID NO: 5690 - protein, 462 aa, Homo Sapiens
MDNGMFSGFIMIKNLLLFCISMNLSSHFGFSQMPTSSVKDETNDNITIFTRILDGLLDGYDNRLRPGLGERITQVRTDIYVTSFGPVSDTEMEYTIDVFFRQSWKDERLRFKGPMQRLPLNNLLASKIWTPDTFFHNGKKSIAHNMTTPNKLLRLEDDGTLLYTMRLTISAECPMQLEDFPMDAHACPLKFGSYAYPNSEVVYVWTNGSTKSVVVAEDGSRLNQYHLMGQTVGTENISTSTGEYTIMTAHFHLKRKIGYFVIQTYLPCIMTVILSQVSFWLNRESVPARTVFGVTTVLTMTTLSISARNSLPKVAYATAMDWFIAVCYAFVFSALIEFATVNYFTKRGWAWDGKKALEAAKIKKKREVILNKSTNAFTTGKMSHPPNIPKEQTPAGTSNTTSVSVKPSEEKTSESKKTYNSISKIDKMSRIVFPVLFGTFNLVYWATYLNREPVIKGAASPK

SEQ ID NO: 5691 - protein, 462 aa, Homo Sapiens; identical to SEQ ID NO: 5690

SEQ ID NO: 5692 - protein, 462 aa, Homo Sapiens; identical to SEQ ID NO: 5690

SEQ ID NO: 5693 - protein, 86 aa, Homo Sapiens
MPTSSVKDETNDNITIFTRILDGLLDGYDNRLRPGLGERITQVRTDIYVTSFGPVSDTEMEYTIDVFFRQSWKDERLRFKGPMQRL

SEQ ID NO: 5694 - protein, 166 aa, Homo Sapiens
MPTSSVKDETNDNITIFTRILDGLLDGYDNRLRPGLGERITQVRTDIYVTSFGPVSDTEMEYTIDVFFRQSWKDERLRFKGPMQRLPLNNLLASKIWTPDTFFHNGKKSIAHNMTTPNKLLRLEDDGTLLYTMRLTISAECPMQLEDFPMDAHACPLKFGSYAYPN

SEQ ID NO: 5695 - protein, 258 aa, Homo Sapiens
EAGVRGTEEDGCWVCNLESVSQSQTWQENKLSEYQIDIFFAQTWTDSRLRFNSTMKILTLNSNMVGLIWIPDTIFRNSKTAEAHWITTPNQLLRIWNDGKILYTLRLTINAECQLQLHNFPMDEHSCPLIFSSYGYPKEEMIYRWRKNSVEAADQKSWRLYQFDFMGLRNTTEIVTTSAGDYVVMTIYFELSRRMGYFTIQTYIPCILTVVLSWVSFWIKKDATPARTALGITTVLTMTTLSTIARKSLPRVSYVTAM

SEQ ID NO: 5696 - protein, 467 aa, Homo Sapiens
MAPKLLLLLCLFSGLHARSRKVEEDEYEDSSSNQKWVLAPKSQDTDVTLILNKLLREYDKKLRPDIGIKPTVIDVDIYVNSIGPVSSINMEYQIDIFFAQTWTDSRLRFNSTMKILTLNSNMVGLIWIPDTIFRNSKTAEAHWITTPNQLLRIWNDGKILYTLRLTINAECQLQLHNFPMDEHSCPLIFSSYGYPKEEMIYRWRKNSVEAADQKSWRLYQFDFMGLRNTTEIVTTSAGDYVVMTIYFELSRRMGYFTIQTYIPCILTVVLSWVSFWIKKDATPARTALGITTVLTMTTLSTIARKSLPRVSYVTAMDLFVTVCFLFVFAALMEYATLNYYSSCRKPTTTKKTTSLLHPDSSRWIPERISLQAPSNYSLLDMRPPPTAMITLNNSVYWQEFEDTCVYECLDGKDCQSFFCCYEECKSGSWRKGRIHIDILELDSYSRVFFPTSFLLFNLVYWVGYLYL

SEQ ID NO: 5697 - protein, 253 aa, Homo Sapiens
MAPKLLLLLCLFSGLHARSRKVEEDEYEDSSSNQKWVLAPKSQDTDVTLILNKLLREYDKKLRPDIGIKPTVIDVDIYVNSIGPVSSINMEYQIDIFFAQTWTDSRLRFNSTMKILTLNSNMVGLIWIPDTIFRNSKTAEAHWITTPNQLLRIWNDGKILYTLRLTINAECQLQLHNFPMDEHSCPLIFSSYGYPKEEMIYRWRKNSVEAADQKSWRLYQFDFMGLRNTTEIVTTSAGRNLLKEAQLSKAREA

SEQ ID NO: 5698 - protein, 288 aa, Homo Sapiens
MDEHSCPLIFSSYGYPKEEMIYRWRKNSVEAADQKSWRLYQFDFMGLRNTTEIVTTSAGDYVVMTIYFELSRRMGYFTIQTYIPCILTVVLSWVSFWIKKDATPARTALGITTVLTMTTLSTIARKSLPRVSYVTAMDLFVTVCFLFVFAALMEYATLNYYSSCRKPTTTKKTTSLLHPDSSRWIPERISLQAPSNYSLLDMRPPPTAMITLNNSVYWQEFEDTCVYECLDGKDCQSFFCCYEECKSGSWRKGRIHIDILELDSYSRVFFPTSFLLFNLVYWVGYLYL

SEQ ID NO: 5699 - protein, 38 aa, Homo Sapiens
  misc_feature (1)..(1): Xaa can be any naturally occurring amino acid
XAECQLQLHNFPMDEHSCPLIFSSSTILAFRLSLHAYR

SEQ ID NO: 5700 - protein, 169 aa, Homo Sapiens
  misc_feature (1)..(1): Xaa can be any naturally occurring amino acid
XDYVVMTIYFELSRRMGYFTIQTYIPCILTVVLSWVSFWIKKDATPARTALGITTVLTMTTLSTIARKSLPRVSYVTAMDLFVTVCFLFVFAALMEYATLNYYSSCRKPTTTKKTTSLLHPDSSRWIPERISLQAPSKPSCCPACGLQGLPFRSLVSHPRISRAFCLPV

SEQ ID NO: 5701 - protein, 52 aa, Homo Sapiens
MNYSLHLAFVCLSLFTERMCIQGSQFNVEVGRSDKLSLPGFENLTAGYNKFL

SEQ ID NO: 5702 - protein, 59 aa, Homo Sapiens
MNYSLHLAFVCLSLFTERMCIQGSQFNVEVGRSDKLSLPGFENLTAGYNKFLRPNFGGE

SEQ ID NO: 5703 - protein, 92 aa, Homo Sapiens
MNYSLHLAFVCLSLFTERMCIQGSQFNVEVGRSDKLSLPGFENLTAGYNKFLRPNFGGEPVQIALTLDIASISSISESNMDYTATIYLRQRW

SEQ ID NO: 5704 - protein, 171 aa, Homo Sapiens
MNYSLHLAFVCLSLFTERMCIQGSQFNVEVGRSDKLSLPGFENLTAGYNKFLRPNFGGEPVQIALTLDIASISSISESNMDYTATIYLRQRWMDQRLVFEGNKSFTLDARLVEFLWVPDTYIVESKKSFLHEVTVGNRLIRLFSNGTVLYALRITTTVACNMDLSKYPMDT

SEQ ID NO: 5705 - protein, 189 aa, Homo Sapiens
MNYSLHLAFVCLSLFTERMCIQGSQFNVEVGRSDKLSLPGFENLTAGYNKFLRPNFGGEPVQIALTLDIASISSISESNMDYTATIYLRQRWMDQRLVFEGNKSFTLDARLVEFLWVPDTYIVESKKSFLHEVTVGNRLIRLFSNGTVLYALRITTTVACNMDLSKYPMDTQTCKLQLESWGYDGNDVE

SEQ ID NO: 5706 - protein, 440 aa, Homo Sapiens
MNYSLHLAFVCLSLFTERMCIQGSQFNVEVGRSDKLSLPGFENLTAGYNKFLRPNFGGEPVQIALTLDIASISSISESNMDYTATIYLRQRWMDQRLVFEGNKSFTLDARLVEFLWVPDTYIVESKKSFLHEVTVGNRLIRLFSNGTVLYALRITTTVACNMDLSKYPMDTQTCKLQLESWGYDGNDVEFTWLRGNDSVRGLEHLRLAQYTIERYFTLVTRSQQETGNYTRLVLQFELRRNVLYFILETYVPSTFLVVLSWVSFWISLDSVPARTCIGVTTVLSMTTLMIGSRTSLPNTNCFIKAIDVYLGICFSFVFGALLEYAVAHYSSLQQMAAKDRGTTKEVEEVSITNIINSSISSFKRKISFASIEISSDNVDYSDLTMKTSDKFKFVFREKMGRIVDYFTIQNPSNVDHYSKLLFPLIFMLANVFYWAYYMYF

SEQ ID NO: 5707 - protein, 440 aa, Homo Sapiens; identical to SEQ ID NO: 5706

SEQ ID NO: 5708 - protein, 349 aa, Homo Sapiens
MNYSLHLAFVCLSLFTERMCIQGSQFNVEVGRSDKLSLPGFENLTAGYNKFLRPNFGGEPVQIALTLDIASISSISESNMDYTATIYLRQRWMDQRLVFEGNKSFTLDARLVEFLWVPDTYIVESKKSFLHEVTVGNRLIRLFSNGTVLYALRITTTVACNMDLSKYPMDTQTCKLQLESWGYDGNDVEFTWLRGNDSVRGLEHLRLAQYTIERYFTLVTRSQQETGNYTRLVLQFELRRNVLYFILETYVPSTFLVVLSWVSFWISLDSVPARTCIGVTTVLSMTTLMIGSRTSLPNTNCFIKAIDVYLGICFSFVFGALLEYAVAHYSSLQQMAAKDRQKICYLYAA

SEQ ID NO: 5709 - protein, 289 aa, Homo Sapiens
MNYSLHLAFVCLSLFTERMCIQGSQFNVEVGRSDKLSLPGFENLTAGYNKFLRPNFGGEPVQIALTLDIASISSISESNMDYTATIYLRQRWMDQRLVFEGNKSFTLDARLVEFLWVPDTYIVESKKSFLHEVTVGNRLIRLFSNGTVLYALRITTTVACNMDLSKYPMDTQTCKLQLESWGYDGNDVEFTWLRGNDSVRGLEHLRLAQYTIERYFTLVTRSQQETGNYTRLVLQFELRRNVLYFILETYVPSTFLVVLSWVSFWISLDSVPARTCIGDNKGSRRSQYY

SEQ ID NO: 5710 - protein, 123 aa, Homo Sapiens
MARGSALLLASLLLAAALSASAGLWSPAKEKRGWTLNSAGYLLGPHAVGNHRSFSDKNGLTSKRELRPEDDMKPGSFDRSIPENNIMRTIIEFLSFLHLKEAGALDRLLDLPAAASSEDIERS

SEQ ID NO: 5711 - protein, 113 aa, Homo Sapiens
MLPPQKKPWESMAKGLVLGALFTSFLLLVYSYAVPPLHAGLASTRTPEAAASCSPPALEPEAVIRANGSAGECQPRRNIVFLKTHKTASSTLLNILFRFGQKHRLKFAFPNGR

SEQ ID NO: 5712 - protein, 164 aa, Homo Sapiens
MLPPQKKPWESMAKGLVLGALFTSFLLLVYSYAVPPLHAGLASTRTPEAAASCSPPALEPEAVIRANGSAGECQPRRNIVFLKTHKTASSTLLNILFRFGQKHRLKFAFPNGRNDFDYPTFFARSLVQDYRPGACFNIICNHMRFHYDEVRGLVPTNAIFITVL

SEQ ID NO: 5713 - protein, 265 aa, Homo Sapiens
MLPPQKKPWESMAKGLVLGALFTSFLLLVYSYAVPPLHAGLASTRTPEAAASCSPPALEPEAVIRANGSAGECQPRRNIVFLKTHKTASSTLLNILFRFGQKHRLKFAFPNGRNDFDYPTFFARSLVQDYRPGACFNIICNHMRFHYDEVRGLVPTNAIFITVLRDPARLFESSFHYFGPVVPLTWKLSAGDKLTEFLQDPDRYYDPNGFNAHYLRNLLFFDLGYDNSLDPSSPQVQEHILEVERRFHLVLLQEYFDESLVLLKD

SEQ ID NO: 5714 - protein, 71 aa, Homo Sapiens
MLPPQKKPWESMAKGLVLGALFTSFLLLVYSYAVPPLHAGLASTTPEAAASCSPPALEPEAVIRANGSAGE

SEQ ID NO: 5715 - protein, 76 aa, Homo Sapiens
MLPPQKKPWESMAKGLVLGALFTSFLLLVYSYAVPPLHAGLASTTPEAAASCSPPALEPEAVIRANGSAGECQPRR

SEQ ID NO: 5716 - protein, 85 aa, Homo Sapiens
MLPPQKKPWESMAKGLVLGALFTSFLLLVYSYAVPPLHAGLASTTPEAAASCSPPALEPEAVIRANGSAGECQPRRNIVFLKTHK

SEQ ID NO: 5717 - protein, 95 aa, Homo Sapiens
MLPPQKKPWESMAKGLVLGALFTSFLLLVYSYAVPPLHAGLASTTPEAAASCSPPALEPEAVIRANGSAGECQPRRNIVFLKTHKTASSTLLNIL

SEQ ID NO: 5718 - protein, 99 aa, Homo Sapiens
MLPPQKKPWESMAKGLVLGALFTSFLLLVYSYAVPPLHAGLASTTPEAAASCSPPALEPEAVIRANGSAGECQPRRNIVFLKTHKTASSTLLNILFRFG

SEQ ID NO: 5719 - protein, 100 aa, Homo Sapiens
MLPPQKKPWESMAKGLVLGALFTSFLLLVYSYAVPPLHAGLASTTPEAAASCSPPALEPEAVIRANGSAGECQPRRNIVFLKTHKTASSTLLNILFRFGQ

SEQ ID NO: 5720 - protein, 103 aa, Homo Sapiens
MLPPQKKPWESMAKGLVLGALFTSFLLLVYSYAVPPLHAGLASTTPEAAASCSPPALEPEAVIRANGSAGECQPRRNIVFLKTHKTASSTLLNILFRFGQKHR

SEQ ID NO: 5721 - protein, 143 aa, Homo Sapiens
MLPPQKKPWESMAKGLVLGALFTSFLLLVYSYAVPPLHAGLASTTPEAAASCSPPALEPEAVIRANGSAGECQPRRNIVFLKTHKTASSTLLNILFRFGQKHRLKFAFPNGRNDFDYPTFFARSLVQDYRPGACFNIICNHMR

SEQ ID NO: 5722 - protein, 149 aa, Homo Sapiens
MLPPQKKPWESMAKGLVLGALFTSFLLLVYSYAVPPLHAGLASTTPEAAASCSPPALEPEAVIRANGSAGECQPRRNIVFLKTHKTASSTLLNILFRFGQKHRLKFAFPNGRNDFDYPTFFARSLVQDYRPGACFNIICNHMRFHYDEV

SEQ ID NO: 5723 - protein, 170 aa, Homo Sapiens
MLPPQKKPWESMAKGLVLGALFTSFLLLVYSYAVPPLHAGLASTTPEAAASCSPPALEPEAVIRANGSAGECQPRRNIVFLKTHKTASSTLLNILFRFGQKHRLKFAFPNGRNDFDYPTFFARSLVQDYRPGACFNIICNHMRFHYDEVRGLVPTNAIFITVLRDPARLF

SEQ ID NO: 5724 - protein, 199 aa, Homo Sapiens
MLPPQKKPWESMAKGLVLGALFTSFLLLVYSYAVPPLHAGLASTTPEAAASCSPPALEPEAVIRANGSAGECQPRRNIVFLKTHKTASSTLLNILFRFGQKHRLKFAFPNGRNDFDYPTFFARSLVQDYRPGACFNIICNHMRFHYDEVRGLVPTNAIFITVLRDPARLFESSFHYFGPVVPLTWKLSAGDKLTEFLQD

SEQ ID NO: 5725 - protein, 242 aa, Homo Sapiens
MLPPQKKPWESMAKGLVLGALFTSFLLLVYSYAVPPLHAGLASTTPEAAASCSPPALEPEAVIRANGSAGECQPRRNIVFLKTHKTASSTLLNILFRFGQKHRLKFAFPNGRNDFDYPTFFARSLVQDYRPGACFNIICNHMRFHYDEVRGLVPTNAIFITVLRDPARLFESSFHYFGPVVPLTWKLSAGDKLTEFLQDPDRYYDPNGFNAHYLRNLLFFDLGYDNSLDPSSPQVQEHILEV

SEQ ID NO: 5726 - protein, 423 aa, Homo Sapiens
MLPPQKKPWESMAKGLVLGALFTSFLLLVYSYAVPPLHAGLASTTPEAAASCSPPALEPEAVIRANGSAGECQPRRNIVFLKTHKTASSTLLNILFRFGQKHRLKFAFPNGRNDFDYPTFFARSLVQDYRPGACFNIICNHMRFHYDEVRGLVPTNAIFITVLRDPARLFESSFHYFGPVVPLTWKLSAGDKLTEFLQDPDRYYDPNGFNAHYLRNLLFFDLGYDNSLDPSSPQVQEHILEVERRFHLVLLQEYFDESLVLLKDLLCWELEDVLYFKLNARRDSPVPRLSGELYGRATAWNMLDSHLYRHFNASFWRKVEAFGRERMAREVAALRHANERMRTICIDGGHAVDAAAIQDEAMQPWQPLGTKSILGYNLKKSIGQRHAQLCRRMLTPEIQYLMDLGANLWVTKLWKFIRDFLRW

SEQ ID NO: 5727 - protein, 279 aa, Homo Sapiens
MLPPQKKPWESMAKGLVLGALFTSFLLLVYSYAVPPLHAGLASTTPEAAASCSPPALEPEAVIRANGSAGECQPRRNIVFLKTHKTASSTLLNILFRFGQKHRLKFAFPNGRNDFDYPTFFARSLVQDYRPGACFNIICNHMRFHYDEVRGLVPTNAIFITVLRDPARLFESSFHYFGPVVPLTWKLSAGDKLTEFLQDPDRYYDPNGFNAHYLRNLLFFDLGYDNSLDPSSPQVQEHILEVERRFHLVLLQEYFDESLVLLKDLLCWELEDVLYFKLN

SEQ ID NO: 5728 - protein, 423 aa, Homo Sapiens; identical to SEQ ID NO: 5726

SEQ ID NO: 5729 - protein, 423 aa, Homo Sapiens; identical to SEQ ID NO: 5726

SEQ ID NO: 5730 - protein, 423 aa, Homo Sapiens; identical to SEQ ID NO: 5726

SEQ ID NO: 5731 - protein, 423 aa, Homo Sapiens; identical to SEQ ID NO: 5726

SEQ ID NO: 5732 - protein, 423 aa, Homo Sapiens; identical to SEQ ID NO: 5726

SEQ ID NO: 5733 - protein, 398 aa, Homo Sapiens
MMSMLGGLQRYFRVILLLLLALTLLLLAGFLHSDLELDTPLFGGQAEGPPVTNIMFLKTHKTASSTVLNILYRFAETHNLSVALPAGSRVHLGYPWLFLARYVEGVGSQQRFNIMCNHLRFNLPQVQKVMPNDTFYFSILRNPVFQLESSFIYYKTYAPAFRGAPSLDAFLASPRTFYNDSRHLRNVYAKNNMWFDFGFDPNAQCEEGYVRARIAEVERRFRLVLIAEHLDESLVLLRRRLRWALDDVVAFRLNSRSARSVARLSPETRERARSWCALDWRLYEHFNRTLWAQLRAELGPRRLRGEVERLRARRRELASLCLQDGGALKNHTQIRDPRLRPYQSGKADILGYNLRPGLDNQTLGVCQRLVMPELQYMARLYALQFPEKPLKNIPFLGA

SEQ ID NO: 5734 - protein, 431 aa, Homo Sapiens
MPPILQRLQQATKMMSRRKILLLVLGCSTVSLLIHQGAQLSWYPKLFPLSCPPLRNSPPRPKHMTVAFLKTHKTAGTTVQNILFRFAERHNLTVALPHPSCEHQFCYPRNFSAHFVHPATRPPHVLASHLRFDRAELERLMPPSTVYVTILREPAAMFESLFSYYNQYCPAFRRVPNASLEAFLRAPEAYYRAGEHFAMFAHNTLAYDLGGDNERSPRDDAAYLAGLIRQVEEVFSLVMIAEYFDESLVLLRRLLAWDLDDVLYAKLNARAASSRLAAIPAALARAARTWNALDAGLYDHFNATFWRHVARAGRACVEREARELREARQRLLRRCFGDEPLLRPAAQIRTKQLQPWQPSRKVDIMGYDLPGGGAGPATEACLKLAMPEVQYSNYLLRKQKRRGGARARPEPVLDNPPPRPIRVLPRGPQGP

SEQ ID NO: 5735 - protein, 431 aa, Homo Sapiens; identical to SEQ ID NO: 5734

SEQ ID NO: 5736 - protein, 62 aa, Homo Sapiens
KAMTAAAGSAGRAAVPLLLCALLAPGGAYVLDDSDGLGREFDGIGAVSGGGDWCLKVSLKGR

SEQ ID NO: 5737 - protein, 685 aa, Homo Sapiens
MAEWLLSASWQRRAKAMTAAAGSAGRAAVPLLLCALLAPGGAYVLDDSDGLGREFDGIGAVSGGGATSRLLVNYPEPYRSQILDYLFKPNFGASLHILKVEIGGDGQTTDGTEPSHMHYALDENYFRGYEWWLMKEAKKRNPNITLIGLPWSFPGWLGKGFDWPYVNLQLTAYYVVTWIVGAKRYHDLDIDYIGIWNERSYNANYIKILRKMLNYQGLQRVKIIASDNLWESISASMLLDAELFKVVDVIGAHYPGTHSAKDAKLTGKKLWSSEDFSTLNSDMGAGCWGRILNQNYINGYMTSTIAWNLVASYYEQLPYGRCGLMTAQEPWSGHYVVESPVWVSAHTTQFTQPGWYYLKTVGHLEKGGSYVALTDGLGNLTIIIETMSHKHSKCIRPFLPYFNVSQQFATFVLKGSFSEIPELQVWYTKLGKTSERFLFKQLDSLWLLDSDGSFTLSLHEDELFTLTTLTTGRKGSYPLPPKSQPFPSTYKDDFNVDYPFFSEAPNFADQTGVFEYFTNIEDPGEHHFTLRQVLNQRPITWAADASNTISIIGDYNWTNLTIKCDVYIETPDTGGVFIAGRVNKGGILIRSARGIFFWIFANGSYRVTGDLAGWIIYALGRVEVTAKKWYTLTLTIKGHFTSGMLNDKSLWTDIPVNFPKNGWAAIGTHSFEFAQFDNFLVEATR

SEQ ID NO: 5738 - protein, 211 aa, Homo Sapiens
MAEWLLSASWQRRAKAMTAAAGSAGRAAVPLLLCALLAPGGAYVLDDSDGLGREFDGIGAVSGGGATSRLLVNYPEPYRSQILDYLFKPNFGASLHILKVEIGGDGQTTDGTEPSHMHYALDENYFRGYEWWLMKEAKKRNPNITLIGLPWSFPGWLGKGFDWPYVNLQLTAYYVVTWIVGAKRYHDLDIDYIGIWNERSYNANYIKVFGE

SEQ ID NO: 5739 - protein, 112 aa, Homo Sapiens
MAEWLLSASWQRRAKAMTAAAGSAGRAAVPLLLCALLAPGGAYVLDDSDGLGREFDGIGAVSGGGATSRLLVNYPEPYRSQILDYLFKPNFGASLHILKVEIGGDGQTTDIL

SEQ ID NO: 5740 - protein, 662 aa, Homo Sapiens
MAEWLLSASWQRRAKAMTAAAGSAGRAAVPLLLCALLAPGGAYVLDDSDGLGREFDGIGAVSGGGPNFGASLHILKVEIGGDGQTTDGTEPSHMHYALDENYFRGYEWWLMKEAKKRNPNITLIGLPWSFPGWLGKGFDWPYVNLQLTAYYVVTWIVGAKRYHDLDIDYIGIWNERSYNANYIKILRKMLNYQGLQRVKIIASDNLWESISASMLLDAELFKVVDVIGAHYPGTHSAKDAKLTGKKLWSSEDFSTLNSDMGAGCWGRILNQNYINGYMTSTIAWNLVASYYEQLPYGRCGLMTAQEPWSGHYVVESPVWVSAHTTQFTQPGWYYLKTVGHLEKGGSYVALTDGLGNLTIIIETMSHKHSKCIRPFLPYFNVSQQFATFVLKGSFSEIPELQVWYTKLGKTSERFLFKQLDSLWLLDSDGSFTLSLHEDELFTLTTLTTGRKGSYPLPPKSQPFPSTYKDDFNVDYPFFSEAPNFADQTGVFEYFTNIEDPGEHHFTLRQVLNQRPITWAADASNTISIIGDYNWTNLTIKCDVYIETPDTGGVFIAGRVNKGGILIRSARGIFFWIFANGSYRVTGDLAGWIIYALGRVEVTAKKWYTLTLTIKGHFTSGMLNDKSLWTDIPVNFPKNGWAAIGTHSFEFAQFDNFLVEATR

SEQ ID NO: 5741 - protein, 589 aa, Homo Sapiens
MGFMVADLWATSRLLVNYPEPYRSQILDYLFKPNFGASLHILKVEIGGDGQTTDGTEPSHMHYALDENYFRGYEWWLMKEAKKRNPNITLIGLPWSFPGWLGKGFDWPYVNLQLTAYYVVTWIVGAKRYHDLDIDYIGIWNERSYNANYIKILRKMLNYQGLQRVKIIASDNLWESISASMLLDAELFKVVDVIGAHYPGTHSAKDAKLTGKKLWSSEDFSTLNSDMGAGCWGRILNQNYINGYMTSTIAWNLVASYYEQLPYGRCGLMTAQEPWSGHYVVESPVWVSAHTTQFTQPGWYYLKTVGHLEKGGSYVALTDGLGNLTIIIETMSHKHSKCIRPFLPYFNVSQQFATFVLKGSFSEIPELQVWYTKLGKTSERFLFKQLDSLWLLDSDGSFTLSLHEDELFTLTTLTTGRKGSYPLPPKSQPFPSTYKDDFNVDYPFFSEAPNFADQTGVFEYFTNIEDPGEHHFTLRQVLNQRPITWAADASNTISIIGDYNWTNLTIKCDVYIETPDTGGVFIAGRVNKGGILIRSARGIFFWIFANGSYRVTGDLAGWIIYALGRVEVTAKKWYTLTLTIKVAGRRKKT

SEQ ID NO: 5742 - protein, 659 aa, Homo Sapiens
MLGKSHGRATHGPLPLADLGIHLPCVKVLHQVTPEEKPAATSRLLVNYPEPYRSQILDYLFKPNFGASLHILKVEIGGDGQTTDGTEPSHMHYALDENYFRGYEWWLMKEAKKRNPNITLIGLPWSFPGWLGKGFDWPYVNLQLTAYYVVTWIVGAKRYHDLDIDYIGIWNERSYNANYIKILRKMLNYQGLQRVKIIASDNLWESISASMLLDAELFKVVDVIGAHYPGTHSAKDAKLTGKKLWSSEDFSTLNSDMGAGCWGRILNQNYINGYMTSTIAWNLVASYYEQLPYGRCGLMTAQEPWSGHYVVESPVWVSAHTTQFTQPGWYYLKTVGHLEKGGSYVALTDGLGNLTIIIETMSHKHSKCIRPFLPYFNVSQQFATFVLKGSFSEIPELQVWYTKLGKTSERFLFKQLDSLWLLDSDGSFTLSLHEDELFTLTTLTTGRKGSYPLPPKSQPFPSTYKDDFNVDYPFFSEAPNFADQTGVFEYFTNIEDPGEHHFTLRQVLNQRPITWAADASNTISIIGDYNWTNLTIKCDVYIETPDTGGVFIAGRVNKGGILIRSARGIFFWIFANGSYRVTGDLAGWIIYALGRVEVTAKKWYTLTLTIKGHFTSGMLNDKSLWTDIPVNFPKNGWAAIGTHSFEFAQFDNFLVEATR

SEQ ID NO: 5743 - protein, 434 aa, Homo Sapiens
MLNYQGLQRVKIIASDNLWESISASMLLDAELFKVVDVIGAHYPGTHSAKDAKLTGKKLWSSEDFSTLNSDMGAGCWGRILNQNYINGYMTSTIAWNLVASYYEQLPYGRCGLMTAQEPWSGHYVVESPVWVSAHTTQFTQPGWYYLKTVGHLEKGGSYVALTDGLGNLTIIIETMSHKHSKCIRPFLPYFNVSQQFATFVLKGSFSEIPELQVWYTKLGKTSERFLFKQLDSLWLLDSDGSFTLSLHEDELFTLTTLTTGRKGSYPLPPKSQPFPSTYKDDFNVDYPFFSEAPNFADQTGVFEYFTNIEDPGEHHFTLRQVLNQRPITWAADASNTISIIGDYNWTNLTIKCDVYIETPDTGGVFIAGRVNKGGILIRSARGIFFWIFANGSYRVTGDLAGWIIYALGRVEVTAKKWYTLTLTIKVAGRRKKT

SEQ ID NO: 5744 - protein, 72 aa, Homo Sapiens
  misc_feature (1)..(1): Xaa can be any naturally occurring amino acid
XKLGKTSERFLFKQLDSLWLLDSDGSFTLSLHEDELFTLTTLTTGRKGSYPLPPKSQPFPSTYKDDFNVGPI

SEQ ID NO: 5745 - protein, 404 aa, Homo Sapiens
  misc_feature (1)..(1): Xaa can be any naturally occurring amino acid
XLLSASWQRRAKAMTAAAGSAGRAAVPLLLCALLAPGGAYVLDDSDGLGREFDGIGAVSGGGATSRLLVNYPEPYRSQILDYLFKPNFGASLHILKVEIGGDGQTTDGTEPSHMHYALDENYFRGYEWWLMKEAKKRNPNITLIGLPWSFPGWLGKGFDWPYVNLQLTAYYVVTWIVGAKRYHDLDIDYIGIWNERSYNANYIKILRKMLNYQGLQRVKIIASDNLWESISASMLLDAELFKVVDVIGAHYPGTHSAKDAKLTGKKLWSSEDFSTLNSDMGAGCWGRILNQNYINGYMTSTIAWNLVASYYEQLPYGRCGLMTAQEPWSGHYVVESPVWVSAHTTQFTQPGWYYLKTVGHLEKGGSYVALTDGLGNLTIIIETMVNFCCCYWINSLLYYWKNKI

SEQ ID NO: 5746 - protein, 78 aa, Homo Sapiens
MAAVVAATRWWQLLLVLSAAGMGASGAPQPPNILLLLMDDESLPPPRAAGSPRWAPVLPDGCLCPLENAERRSGVPKV

SEQ ID NO: 5747 - protein, 116 aa, Homo Sapiens
MAAVVAATRWWQLLLVLSAAGMGASGAPQPPNILLLLMDDESLPPPRAAGSPRWAPVLPDGCLCPLENAERSDCFPEHALQRPGVRVLTAVAGPFSALSGISLLKILCFRISSFHF

SEQ ID NO: 5748 - protein, 522 aa, Homo Sapiens
MAAVVAATRWWQLLLVLSAAGMGASGAPQPPNILLLLMDDMGWGDLGVYGEPSRETPNLDRMAAEGLLFPNFYSANPLCSPSRAALLTGRLPIRNGFYTTNAHARNAYTPQEIVGGIPDSEQLLPELLKKAGYVSKIVGKWHLGHRPQFHPLKHGFDEWFGSPNCHFGPYDNKARPNIPVYRDWEMVGRYYEEFPINLKTGEANLTQIYLQEALDFIKRQARHHPFFLYWAVDATHAPVYASKPFLGTSQRGRYGDAVREIDDSIGKILELLQDLHVADNTFVFFTSDNGAALISAPEQGGSNGPFLCGKQTTFEGGMREPALAWWPGHVTAGQVSHQLGSIMDLFTTSLALAGLTPPSDRAIDGLNLLPTLLQGRLMDRPIFYYRGDTLMAATLGQHKAHFWTWTNSWENFRQGIDFCPGQNVSGVTTHNLEDHTKLPLIFHLGRDPGERFPLSFASAEYQEALSRITSVVQQHQEALVPAQPQLNVCNWAVMNWAPPGCEKLGKCLTPPESIPKKCLWSH

SEQ ID NO: 5749 - protein, 170 aa, Homo Sapiens
MTGTASSLAARAALLTGRLPIRNGFYTTNAHARNAYTPQEIVGGIPDSEQLLPELLKKAGYVSKIVGKWHLGHRPQFHPLKHGFDEWFGSPNCHFGPYDNKARPNIPVYRDWEMVGRYYEEFPINLKTGEANLTQIYLQEALDFIKRQARHHPFFLYWAVDATHAPVYAS

SEQ ID NO: 5750 - protein, 51 aa, Homo Sapiens
SAAGMGASGAPQPPNILLLLMDDMHVFRGQLLRACRCWCQAGRRQTDTFPT

SEQ ID NO: 5751 - protein, 69 aa, Homo Sapiens
SAAGMGASGAPQPPNILLLLMDDRGRHCSQDGYPSAMASTPPTPMPETPTHRRRLWAASQTRSSSCRSF

SEQ ID NO: 5752 - protein, 202 aa, Homo Sapiens
MRRKEKRLLQAVALVLAALVLLPNVGLWALYRERQPDGTPGGSGAAVAPAAGQGSHSRQKKTFFLGDGQKLKDWHDKEAIRRDAQRVGNGEQGRPYPMTDAERVDQAYRENGFNIYVSDKISLNRSLPDIRHPNCNSKRYLETLPNTSIIIPFHNEGWSSLLRTVHSVLNRSPPELVAEIVLVDDFSDRDLPTASTPSPFVC

SEQ ID NO: 5753 - protein, 541 aa, Homo Sapiens
MRRKEKRLLQAVALVLAALVLLPNVGLWALYRERQPDGTPGGSGAAVAPAAGQGSHSRQKKTFFLGDGQKLKDWHDKEAIRRDAQRVGNGEQGRPYPMTDAERVDQAYRENGFNIYVSDKISLNRSLPDIRHPNCNSKRYLETLPNTSIIIPFHNEGWSSLLRTVHSVLNRSPPELVAEIVLVDDFSDRDRIARNRKTIVCPMIDVIDHDDFRYETQAGDAMRGAFDWEMYYKRIPIPPELQKADPSDPFESPVMAGGLFAVDRKWFWELGGYDPGLEIWGGEQYEISFKVWMCGGRMEDIPCSRVGHIYRKYVPYKVPAGVSLARNLKRVAEVWMDEYAEYIYQRRPEYRHLSAGDVAVQKKLRSSLNCKSFKWFMTKIAWDLPKFYPPVEPPAAAWGEIRNVGTGLCADTKHGALGSPLRLEGCVRGRGEAAWNNMQVFTFTWREDIRPGDPQHTKKFCFDAISHTSPVTLYDCHSMKGNQLWKYRKDKTLYHPVSGSCMDCSESDHRIFMNTCNPSSLTQQWLFEHTNSTVLEKFNRN

SEQ ID NO: 5754 - protein, 603 aa, Homo Sapiens
MRRKEKRLLQAVALVLAALVLLPNVGLWALYRERQPDGTPGGSGAAVAPAAGQGSHSRQKKTFFLGDGQKLKDWHDKEAIRRDAQRVGNGEQGRPYPMTDAERVDQAYRENGFNIYVSDKISLNRSLPDIRHPNCNSKRYLETLPNTSIIIPFHNEGWSSLLRTVHSVLNRSPPELVAEIVLVDDFSDREHLKKPLEDYMALFPSVRILRTKKREGLIRTRMLGASVATGDVITFLDSHCEANVNWLPPLLDRIARNRKTIVCPMIDVIDHDDFRYETQAGDAMRGAFDWEMYYKRIPIPPELQKADPSDPFESPVMAGGLFAVDRKWFWELGGYDPGLEIWGGEQYEISFKVWMCGGRMEDIPCSRVGHIYRKYVPYKVPAGVSLARNLKRVAEVWMDEYAEYIYQRRPEYRHLSAGDVAVQKKLRSSLNCKSFKWFMTKIAWDLPKFYPPVEPPAAAWGEIRNVGTGLCADTKHGALGSPLRLEGCVRGRGEAAWNNMQVFTFTWREDIRPGDPQHTKKFCFDAISHTSPVTLYDCHSMKGNQLWKYRKDKTLYHPVSGSCMDCSESDHRIFMNTCNPSSLTQQWLFEHTNSTVLEKFNRN

SEQ ID NO: 5755 - protein, 366 aa, Homo Sapiens
MRRKEKRLLQAVALVLAALVLLPNVGLWALYRERQPDGTPGGSGAAVAPAAGQGSHSRQKKTFFLGDGQKLKDWHDKEAIRRDAQRVGNGEQGRPYPMTDAERVDQAYRENGFNIYVSDKISLNRSLPDIRHPNCNSKRYLETLPNTSIIIPFHNEGWSSLLRTVHSVLNRSPPELVAEIVLVDDFSDREHLKKPLEDYMALFPSVRILRTKKREGLIRTRMLGASVATGDVITFLDSHCEANVNWLPPLLDRIARNRKTIVCPMIDVIDHDDFRYETQAGDAMRGAFDWEMYYKRIPIPPELQKADPSDPFESPVMAGGLFAVDRKWFWELGGYDPGLEIWGGEQYEISFKVSQLSRRPVLGTAS

SEQ ID NO: 5756 - protein, 581 aa, Homo Sapiens [sequence omitted]

SEQ ID NO: 5757 - protein, 31 aa, Homo Sapiens
  misc_feature (1)..(1): Xaa can be any naturally occurring amino acid
XINIYLSDRISLHRRLPERWNPLAPEGALGQ

SEQ ID NO: 5758 - protein, 141 aa, Homo Sapiens
ALPEVRHPLCLQQHPQDSLPTASVILCFHDEAWSTLLRTVHSILDTVPRAFLKEIILVDDLSQQGSHGFPPGSSGTTQVCSQRICGQAGGGEVTQEQQEAGCHQGPDAGGHQSHRGCARLHGCPLRVPPRLAGAPPQQNSW

SEQ ID NO: 5759 - protein, 196 aa, Homo Sapiens
MERLQLQRRLGCRTFHWFLANVYPELYPSEPRPSFSGKLHNTGLGLCADCQAEGDILGCPMVLAPCSDSRQQQYLQHTSRKEIHFGSPQHLCFAVRQEQVILQNCTEEGLAIHQQHWDFQENGMIVHILSGKCMEAVVQENNKDLYLRPCDEKPASSGVLTRSMLWMNDECQCQKEKRILAIKIQLQVNLKSLYIS

SEQ ID NO: 5760 - protein, 639 aa, Homo Sapiens
MLLRKRYRHRPCRLQFLLLLLMLGCVLMMVAMLHPPHHTLHQTVTAQASKHSPEARYRLDFGESQDWVLEAEDEGEEYSPLEGLPPFISLREDQLLVAVALPQARRNQSQGRRGGSYRLIKQPRRQDKEAPKRDWGADEDGEVSEEEELTPFSLDPRGLQEALSARIPLQRALPEVRHPLCLQQHPQDSLPTASVILCFHDEAWSTLLRTVHSILDTVPRAFLKEIILVDDLSQQGQLKSALSEYVARLEGVKLLRSNKRLGAIRARMLGATRATGDVLVFMDAHCECHPGWLEPLLSRIAGDRSRVVSPVIDVIDWKTFQYYPSKDLQRGVLDWKLDFHWEPLPEHVRKALQSPISPIRSPVVPGEVVAMDRHYFQNTGAYDSLMSLRGGENLELSFKAWLCGGSVEILPCSRVGHIYQNQDSHSPLDQEATLRNRVRIAETWLGSFKETFYKHSPEAFSLSKAEKPDCMERLQLQRRLGCRTFHWFLANVYPELYPSEPRPSFSGKLHNTGLGLCADCQAEGDILGCPMVLAPCSDSRQQQYLQHTSRKEIHFGSPQHLCFAVRQEQVILQNCTEEGLAIHQQHWDFQENGMIVHILSGKCMEAVVQENNKDLYLRPCDGKARQQWRFDQINAVDER

SEQ ID NO: 5761 - protein, 617 aa, Homo Sapiens
MLLRKRYRHRPCRLQFLLLLLMLGCVLMMVAMLHPPHHTLHQTVTAQASKHSPEARYRLDFGESQDWVLEAEDEGEEYSPLEGLPPFISLREDQLLVAVALPQARRNQSQGRRGGSYRLIKQPRRQDKEAPKRDWGADEDGEVSEEEELTPFSLDPRGLQEALSARIPLQRALPEVRHPLCLQQHPQDSLPTASVILCFHDEAWSTLLRTVHSILDTVPRAFLKEIILVDDLSQQGQLKSALSEYVARLEGVKLLRSNKRLGAIRARMLGATRATGDVLVFMDAHCECHPGWLEPLLSRIAGDRSRVVSPVIDVIDWKTFQYYPSKDLQRGVLDWKLDFHWEPLPEHVRKALQSPISPIRSPVVPGEVVAMDRHYFQNTGAYDSLMSLRGGENLELSFKAWLCGGSVEILPCSRVGHIYQNQDSHSPLDQEATLRNRVRIAETWLGSFKETFYKHSPEAFSLSKAEKPDCMERLQLQRRLGCRTFHWFLANVYPELYPSEPRPSFSGKLHNTGLGLCADCQAEGDILGCPMVLAPCSDSRQQQYLQHTSRKEIHFGSPQHLCFAVRQEQVILQNCTEEGLAIHQQHWDFQEDENRANSAAAEAYQRPLTFQQIVNNG

SEQ ID NO: 5762 - protein, 571 aa, Homo Sapiens
MRRRSRMLLCFAFLWVLGIAYYMYSGGGSALAGGAGGGAGRKEDWNEIDPIKKKDLHHSNGEEKAQSMETLPPGKVRWPDFNQEAYVGGTMVRSGQDPYARNKFNQVESDKLRMDRAIPDTRHDQCQRKQWRVDLPATSVVITFHNEARSALLRTVVSVLKKSPPHLIKEIILVDDYSNDPEDGALLGKIEKVRVLRNDRREGLMRSRVRGADAAQAKVLTFLDSHCECNEHWLEPLLERVAEDRTRVVSPIIDVINMDNFQYVGASADLKGGFDWNLVFKWDYMTPEQRRSRQGNPVAPIKTPMIAGGLFVMDKFYFEELGKYDMMMDVWGGENLEISFRVWQCGGSLEIIPCSRVGHVFRKQHPYTFPGGSGTVFARNTRRAAEVWMDEYKNFYYAAVPSARNVPYGNIQSRLELRKKLSCKPFKWYLENVYPELRVPDHQDIAFGALQQGTNCLDTLGHFADGVVGVYECHNAGGNQEWALTKEKSVKHMDLCLTVVDRAPGSLIKLQGCRENDSRQKWEQIEGNSKLRHVGSNLCLDSRTAKSGGLSVEVCGPALSQQWKFTLNLQQ

SEQ ID NO: 5763 - protein, 23 aa, Homo Sapiens
MRLLRRRHMPLRLAMVGCAFVLF

SEQ ID NO: 5764 - protein, 23 aa, Homo Sapiens
MRLLRRRHMPLRLAMVGCAFVLF

SEQ ID NO: 5765 - protein, 39 aa, Homo Sapiens
MRLLRRRHMPLRLAMVGCAFVLFLFLLHRDVSSREEATE

SEQ ID NO: 5766 - protein, 55 aa, Homo Sapiens
MRLLRRRHMPLRLAMVGCAFVLFLFLLHRDVSSREEATEKPWLKSLVSRKDHVLD

SEQ ID NO: 5767 - protein, 62 aa, Homo Sapiens
MRLLRRRHMPLRLAMVGCAFVLFLFLLHRDVSSREEATEKPWLKSLVSRKDHVLDLMLEAMN

SEQ ID NO: 5768 - protein, 69 aa, Homo Sapiens
MRLLRRRHMPLRLAMVGCAFVLFLFLLHRDVSSREEATEKPWLKSLVSRKDHVLDLMLEAMNNLRDSMP

SEQ ID NO: 5769 - protein, 78 aa, Homo Sapiens
MRLLRRRHMPLRLAMVGCAFVLFLFLLHRDVSSREEATEKPWLKSLVSRKDHVLDLMLEAMNNLRDSMPKLQIRAPEA

SEQ ID NO: 5770 - protein, 123 aa, Homo Sapiens
MRLLRRRHMPLRLAMVGCAFVLFLFLLHRDVSSREEATEKPWLKSLVSRKDHVLDLMLEAMNNLRDSMPKLQIRAPEAQQTLFSINQSCLPGFYTPAELKPFWERPPQDPNAPGADGKAFQKS

SEQ ID NO: 5771 - protein, 137 aa, Homo Sapiens
MRLLRRRHMPLRLAMVGCAFVLFLFLLHRDVSSREEATEKPWLKSLVSRKDHVLDLMLEAMNNLRDSMPKLQIRAPEAQQTLFSINQSCLPGFYTPAELKPFWERPPQDPNAPGADGKAFQKSKWTPLETQEKEEGY

SEQ ID NO: 5772 - protein, 622 aa, Homo Sapiens
MRLLRRRHMPLRLAMVGCAFVLFLFLLHRDVSSREEATEKPWLKSLVSRKDHVLDLMLEAMNNLRDSMPKLQIRAPEAQQTLFSINQSCLPGFYTPAELKPFWERPPQDPNAPGADGKAFQKSKWTPLETQEKEEGYKKHCFNAFASDRISLQRSLGPDTRPPECVDQKFRRCPPLATTSVIIVFHNEAWSTLLRTVYSVLHTTPAILLKEIILVDDASTEEHLKEKLEQYVKQLQVVRVVRQEERKGLITARLLGASVAQAEVLTFLDAHCECFHGWLEPLLARIAEDKTVVVSPDIVTIDLNTFEFAKPVQRGRVHSRGNFDWSLTFGWETLPPHEKQRRKDETYPIKSPTFAGGLFSISKSYFEHIGTYDNQMEIWGGENVEMSFRVWQCGGQLEIIPCSVVGHVFRTKSPHTFPKGTSVIARNQVRLAEVWMDSYKKIFYRRNLQAAKMAQEKSFGDISERLQLREQLHCHNFSWYLHNVYPEMFVPDLTPTFYGAIKNLGTNQCLDVGENNRGGKPLIMYSCHGLGGNQYFEYTTQRDLRHNIAKQLCLHVSKGALGLGSCHFTGKNSQVPKDEEWELAQDQLIRNSGSGTCLTSQDKKPAMAPCNPSDPHQLWLFV

SEQ ID NO: 5773 - protein, 365 aa, Homo Sapiens
MRLLRRRHMPLRLAMVGCAFVLFLFLLHRDVSSREEATEKPWLKSLVSRKDHVLDLMLEAMNNLRDSMPKLQIRAPEAQQTLFSINQSCLPGFYTPAELKPFWERPPQDPNAPGADGKAFQKSKWTPLETQEKEEGYKKHCFNAFASDRISLQRSLGPDTRPPECVDQKFRRCPPLATTSVIIVFHNEAWSTLLRTVYSVLHTTPAILLKEIILVDDASTEEHLKEKLEQYVKQLQVVRVVRQEERKGLITARLLGASVAQAEVLTFLDAHCECFHGWLEPLLARIAEDKTVVVSPDIVTIDLNTFEFAKPVQRGRVHSRGNFDWSLTFGWETLPPHEKQRRKDETYPIKCGSVGASWRSSPALS

SEQ ID NO: 5774 - protein, 622 aa, Homo Sapiens; identical to SEQ ID NO: 5772

SEQ ID NO: 5775 - protein, 637 aa, Homo Sapiens
MMFWRKLPKALFIGLTLAIAVNLLLVFSSKGTLQNLFTGGLHRELPLHLNKRYGAVIKRLSHLEVELQDLKESMKLALRQQENVNSTLKRAKDEVRPLLKAMETKVNETKKHKTQMKLFPHSQLFRQWGEDLSEAQQKAAQDLFRKFGYNAYLSNQLPLNRTIPDTRDYRCLRKTYPSQLPSLSVILIFVNEALSIIQRAITSIINRTPSRLLKEIILVDDFSSNGELKVHLDEKIKLYNQKYPGLLKIIRHPERKGLAQARNTGWEAATADVVAILDAHIEVNVGWAEPILARIQEDRTVIVSPVFDNIRFDTFKLDKYELAVDGFNWELWCRYDALPQAWIDLHDVTAPVKSPSIMGILAANRHFLGEIGSLDGGMLIYGGENVELSLRVWQCGGKVEILPCSRIAHLERHHKPYALDLTAALKRNALRVAEIWMDEHKHMVYLAWNIPLQNSGIDFGDVSSRMALREKLKCKTFDWYLKNVYPLLKPLHTIVGYGRMKNLLDENVCLDQGPVPGNTPIMYYCHEFSSQNVYYHLTGELYVGQLIAEASASDRCLTDPGKAEKPTLEPCSKAAKNRLHIYWDFKPGGAVINRDTKRCLEMKKDLLGSHVLVLQTCSTQVWEIQHTVRDWGQTNSQ

SEQ ID NO: 5776 - protein, 529 aa, Homo Sapiens
MRSEKSLTLAAPGEVRGPEGEQQDAGDFPEAGGGGGCCSSERLVINISGLRFETQLRTLSLFPDTLLGDPGRRVRFFDPLRNEYFFDRNRPSFDAILYYYQSGGRLRRPVNVPLDIFLEEIRFYQLGDEALAAFREDEGCLPEGGEDEKPLPSQPFQRQVWLLFEYPESSGPARGIAIVSVLVILISIVIFCLETLPQFRVDGRGGNNGGVSRVSPVSRGSQEEEEDEDDSYTFHHGITPGEMGTGGSSSLSTLGGSFFTDPFFLVETLCIVWFTFELLVRFSACPSKPAFFRNIMNIIDLVAIFPYFITLGTELVQQQEQQPASGGGGQNGQQAMSLAILRVIRLVRVFRIFKLSRHSKGLQILGKTLQASMRELGLLIFFLFIGVILFSSAVYFAEADDDDSLFPSIPDAFWWAVVTMTTVGYGDMYPMTVGGKIVGSLCAIAGVLTIALPVPVIVSNFNYFYHRETEQEEQGQYTHVTCGQPAPDLRATDNGLGKPDFPEANRERRPSYLPTPHRAYAEKRMLTEV

SEQ ID NO: 5777 - protein, 88 aa, Homo Sapiens
  misc_feature (1)..(1): Xaa can be any naturally occurring amino acid
XENVCLDQGPVPGNTPIMYYCHEFSSQNVYYHLTGELYVGQLIAEASASDRCLTDPGKAEKPTLEPCSKAAKNRLHIYWDFKPPTITK

SEQ ID NO: 5778 - protein, 161 aa, Homo Sapiens
  misc_feature (1)..(1): Xaa can be any naturally occurring amino acid
XYPLLKPLHTIVGYGRMKNLLDENVCLDQGPVPGNTPIMYYCHEFSSQNVYYHLTGELYVGQLIAEASASDRCLTDPGKAEKPTLEPCSKAAKNRLHIYWDFKPEKCWQVVQARTSMHRILTAAGPSTSSEDENPAWHRWQASGLTPLWRPPTSSNQARKS

SEQ ID NO: 5779 - protein, 417 aa, Homo Sapiens
EHLKDKLEEYMARFSKVRIVRTKKREGLIRTRLLGASMARGEVLTFLDSHCEVNVNWLPPLLNQIALNHKTIVCPMIDVIDHNHFGYEAQAGDAMRGAFDWEMYYKRIPIPPELQRADPSDPFESPVMAGGLFAVDRKWFWELGGYDPGLEIWGGEQYEISFKVWMCGGEMFDVPCSRVGHIYRKYVPYKVPSGTSLARNLKRVAETWMDEFAEYIYQRRPEYRHLSTGDISAQKELRKQLKCKDFKWFMAAVAWDVPKYYPPVEPPPAAWGEIRNVAANLCVDSKHGATGTELRLDICVKDGSERTWSHEQLFTFGWREDIRPGEPLHTRKFCFDAISHNSPVTLYDCHGMKGNQLWGYRKDRTLFHPVSNSCMDCNPAEKKIFMARCDPLSETQQWIFEHINMTVLEKFNHHANS

SEQ ID NO: 5780 - protein, 601 aa, Homo Sapiens
MKRKQKRFLQMTLLFTVALIFLPNVGLWSLYKDKHLVKSAEPGEQQTFPLGLGDGQFYSWTDGLRRKDWHDYESIQKEAMRSGKGEHGKPYPLTEEDHDDSAYRENGFNIFVSNNIALERSLPDIRHANCKHKMYLERLPNTSIIIPFHNEGWTSLLRTIHSIINRTPGSLIAEIILVDDFSEREHLKDKLEEYMARFSKVRIVRTKKREGLIRTRLLGASMARGEVLTFLDSHCEVNVNWLPPLLNQIALNHKTIVCPMIDVIDHNHFGYEAQAGDAMRGAFDWEMYYKRIPIPPELQRADPSDPFESPVMAGGLFAVDRKWFWELGGYDPGLEIWGGEQYEISFKVWMCGGEMFDVPCSRVGHIYRKYVPYKVPSGTSLARNLKRVAETWMDEFAEYIYQRRPEYRHLSTGDISAQKELRKQLKCKDFKWFMAAVAWDVPKYYPPVEPPPAAWGEIRNVAANLCVDSKHGATGTELRLDICVKDGSERTWSHEQLFTFGWREDIRPGEPLHTRKFCFDAISHNSPVTLYDCHGMKGNQLWGYRKDRTLFHPVSNSCMDCNPAEKKIFMARCDPLSETQQWIFEHINMTVLEKFNHHANS

SEQ ID NO: 5781 - protein, 61 aa, Homo Sapiens
MKRKQKRFLQMTLLFTVALIFLPNVGLWSLYKDKHLVKSAEPGEQQVSATQRKITQGLVRQ

SEQ ID NO: 5782 - protein, 584 aa, Homo Sapiens
MRAKFRAGAGHQRNPSISADHGVHELVYQTFPLGLGDGQFYSWTDGLRRKDWHDYESIQKEAMRSGKGEHGKPYPLTEEDHDDSAYRENGFNIFVSNNIALERSLPDIRHANCKHKMYLERLPNTSIIIPFHNEGWTSLLRTIHSIINRTPGSLIAEIILVDDFSEREHLKDKLEEYMARFSKVRIVRTKKREGLIRTRLLGASMARGEVLTFLDSHCEVNVNWLPPLLNQIALNHKTIVCPMIDVIDHNHFGYEAQAGDAMRGAFDWEMYYKRIPIPPELQRADPSDPFESPVMAGGLFAVDRKWFWELGGYDPGLEIWGGEQYEISFKVWMCGGEMFDVPCSRVGHIYRKYVPYKVPSGTSLARNLKRVAETWMDEFAEYIYQRRPEYRHLSTGDISAQKELRKQLKCKDFKWFMAAVAWDVPKYYPPVEPPPAAWGEIRNVAANLCVDSKHGATGTELRLDICVKDGSERTWSHEQLFTFGWREDIRPGEPLHTRKFCFDAISHNSPVTLYDCHGMKGNQLWGYRKDRTLFHPVSNSCMDCNPAEKKIFMARCDPLSETQQWIFEHINMTVLEKFNHHANS

SEQ ID NO: 5783 - protein, 116 aa, Homo Sapiens
MAPPSVPLVLLLVLLLSLAETPASAPAHRGRGGWTLNSAGYLLGPVLHLPQMGDQDGKRETALEILDLWKAIDGLPYSHPPQPSKRNVMETFAKPEIGDLGMLSMKIPKEEDVLKS

SEQ ID NO: 5784 - protein, 49 aa, Homo Sapiens
MAPPSVPLVLLLVLLLSLAETPASAPAHRSSTFPKWVTKTERGRQPLRS

SEQ ID NO: 5785 - protein, 49 aa, Homo Sapiens; identical to SEQ ID NO: 5784

SEQ ID NO: 5786 - protein, 119 aa, Homo Sapiens
MAAVAAVAARRRRLSVSGRDENSVELTMAEGPYKIILTARPFRLDLLEDRSLLLSVNARGLLEFEHQRAPRVSFSDKVNLTLGSIWDKIKNLFSRQGSKDPAEGDGAQPEETPRDGDKA

SEQ ID NO: 5787 - protein, 852 aa, Homo Sapiens
MAAVAAVAARRRRLSVSGRDENSVELTMAEGPYKIILTARPFRLDLLEDRSLLLSVNARGLLEFEHQRAPRVSFSDKVNLTLGSIWDKIKNLFSRQGSKDPAEGDGAQPEETPRDGDKPEETQGKAEKDEPGAWEETFKTHSDSKPYGPMSVGLDFSLPGMEHVYGIPEHADNLRLKVTEGGEPYRLYNLDVFQYELYNPMALYGSVPVLLAHNPHRDLGIFWLNAAETWVDISSNTAGKTLFGKMMDYLQGSGETPQTDVRWMSETGIIDVFLLLGPSISDVFRQYASLTGTQALPPLFSLGYHQSRWNYRDEADVLEVDQGFDDHNLPCDVIWLDIEHADGKRYFTWDPSRFPQPRTMLERLASKRRKLVAIVDPHIKVDSGYRVHEELRNLGLYVKTRDGSDYEGWCWPGSAGYPDFTNPTMRAWWANMFSYDNYEGSAPNLFVWNDMNEPSVFNGPEVTMLKDAQHYGGWEHRDVHNIYGLYVHMATADGLRQRSGGMERPFVLARAFFAGSQRFGAVWTGDNTAEWDHLKISIPMCLSLGLVGLSFCGADVGGFFKNPEPELLVRWYQMGAYQPFFRAHAHLDTGRREPWLLPSQHNDIIRDALGQRYSLLPFWYTLLYQAHREGIPVMRPLWVQYPQDVTTFNIDDQYLLGDALLVHPVSDSGAHGVQVYLPGQGEVWYDIQSYQKHHGPQTLYLPVTLSSIPVFQRGGTIVPRWMRVRRSSECMKDDPITLFVALSPQGTAQGELFLDDGHTFNYQTRQEFLLRRFSFSGNTLVSSSADPEGHFETPIWIERVVIIGAGKPAAVVLQTKGSPESRLSFQHDPETSVLVLRKPGINVASDWSIHLR

SEQ ID NO: 5788 - protein, 76 aa, Homo Sapiens
MAAVAAVAARRRRSWASLVLAFLGVCLGITLAVDRSNFKTCEESSFCDREAYGQASLHTEPCWTLYSLVLIPSRSI

SEQ ID NO: 5789 - protein, 52 aa, Homo Sapiens
MAAVAAVAARRRRSWASLVLAFLGVCLGITLAVDRSNFKTCEESSFCKCCWC

SEQ ID NO: 5790 - protein, 52 aa, Homo Sapiens; identical to SEQ ID NO: 5789

SEQ ID NO: 5791 - protein, 52 aa, Homo Sapiens; identical to SEQ ID NO: 5789

SEQ ID NO: 5792 - protein, 966 aa, Homo Sapiens
MAAVAAVAARRRRSWASLVLAFLGVCLGITLAVDRSNFKTCEESSFCKRQRSIRPGLSPYRALLDSLQLGPDSLTVHLIHEVTKVLLVLELQGLQKNMTRFRIDELEPRRPRYRVPDVLVADPPIARLSVSGRDENSVELTMAEGPYKIILTARPFRLDLLEDRSLLLSVNARGLLEFEHQRAPRVSFSDKVNLTLGSIWDKIKNLFSRQGSKDPAEGDGAQPEETPRDGDKPEETQGKAEKDEPGAWEETFKTHSDSKPYGPMSVGLDFSLPGMEHVYGIPEHADNLRLKVTEGGEPYRLYNLDVFQYELYNPMALYGSVPVLLAHNPHRDLGIFWLNAAETWVDISSNTAGKTLFGKMMDYLQGSGETPQTDVRWMSETGIIDVFLLLGPSISDVFRQYASLTGTQALPPLFSLGYHQSRWNYRDEADVLEVDQGFDDHNLPCDVIWLDIEHADGKRYFTWDPSRFPQPRTMLERLASKRRKLVAIVDPHIKVDSGYRVHEELRNLGLYVKTRDGSDYEGWCWPGSAGYPDFTNPTMRAWWANMFSYDNYEGSAPNLFVWNDMNEPSVFNGPEVTMLKDAQHYGGWEHRDVHNIYGLYVHMATADGLRQRSGGMERPFVLARAFFAGSQRFGAVWTGDNTAEWDHLKISIPMCLSLGLVGLSFCGADVGGFFKNPEPELLVRWYQMGAYQPFFRAHAHLDTGRREPWLLPSQHNDIIRDALGQRYSLLPFWYTLLYQAHREGIPVMRPLWVQYPQDVTTFNIDDQYLLGDALLVHPVSDSGAHGVQVYLPGQGEVWYDIQSYQKHHGPQTLYLPVTLSSIPVFQRGGTIVPRWMRVRRSSECMKDDPITLFVALSPQGTAQGELFLDDGHTFNYQTRQEFLLRRFSFSGNTLVSSSADPEGHFETPIWIERVVIIGAGKPAAVVLQTKGSPESRLSFQHDPETSVLVLRKPGINVASDWSIHLR

SEQ ID NO: 5793 - protein, 944 aa, Homo Sapiens
MAAVAAVAARRRRSWASLVLAFLGVCLGITLAVDRSNFKTCEESSFCKRQRSIRPGLSPYRALLDSLQLGPDSLTVHLIHEVTKVLLVLELQGLQKNMTRFRIDELEPRRPRYRVPDVLVADPPIARLSVSGRDENSVELTMAEGPYKIILTARPFRLDLLEDRSLLLSVNARGLLEFEHQRAPRVSQGSKDPAEGDGAQPEETPRDGDKPEETQGKAEKDEPGAWEETFKTHSDSKPYGPMSVGLDFSLPGMEHVYGIPEHADNLRLKVTEGGEPYRLYNLDVFQYELYNPMALYGSVPVLLAHNPHRDLGIFWLNAAETWVDISSNTAGKTLFGKMMDYLQGSGETPQTDVRWMSETGIIDVFLLLGPSISDVFRQYASLTGTQALPPLFSLGYHQSRWNYRDEADVLEVDQGFDDHNLPCDVIWLDIEHADGKRYFTWDPSRFPQPRTMLERLASKRRKLVAIVDPHIKVDSGYRVHEELRNLGLYVKTRDGSDYEGWCWPGSAGYPDFTNPTMRAWWANMFSYDNYEGSAPNLFVWNDMNEPSVFNGPEVTMLKDAQHYGGWEHRDVHNIYGLYVHMATADGLRQRSGGMERPFVLARAFFAGSQRFGAVWTGDNTAEWDHLKISIPMCLSLGLVGLSFCGADVGGFFKNPEPELLVRWYQMGAYQPFFRAHAHLDTGRREPWLLPSQHNDIIRDALGQRYSLLPFWYTLLYQAHREGIPVMRPLWVQYPQDVTTFNIDDQYLLGDALLVHPVSDSGAHGVQVYLPGQGEVWYDIQSYQKHHGPQTLYLPVTLSSIPVFQRGGTIVPRWMRVRRSSECMKDDPITLFVALSPQGTAQGELFLDDGHTFNYQTRQEFLLRRFSFSGNTLVSSSADPEGHFETPIWIERVVIIGAGKPAAVVLQTKGSPESRLSFQHDPETSVLVLRKPGINVASDWSIHLR

SEQ ID NO: 5794 - protein, 847 aa, Homo Sapiens
MTRFRIDELEPRRPRYRVPDVLVADPPIARLSVSGRDENSVELTMAEGPYKIILTARPFRLDLLEDRSLLLSVNARGLLEFEHQRAPRVSQGSKDPAEGDGAQPEETPRDGDKPEETQGKAEKDEPGAWEETFKTHSDSKPYGPMSVGLDFSLPGMEHVYGIPEHADNLRLKVTEGGEPYRLYNLDVFQYELYNPMALYGSVPVLLAHNPHRDLGIFWLNAAETWVDISSNTAGKTLFGKMMDYLQGSGETPQTDVRWMSETGIIDVFLLLGPSISDVFRQYASLTGTQALPPLFSLGYHQSRWNYRDEADVLEVDQGFDDHNLPCDVIWLDIEHADGKRYFTWDPSRFPQPRTMLERLASKRRKLVAIVDPHIKVDSGYRVHEELRNLGLYVKTRDGSDYEGWCWPGSAGYPDFTNPTMRAWWANMFSYDNYEGSAPNLFVWNDMNEPSVFNGPEVTMLKDAQHYGGWEHRDVHNIYGLYVHMATADGLRQRSGGMERPFVLARAFFAGSQRFGAVWTGDNTAEWDHLKISIPMCLSLGLVGLSFCGADVGGFFKNPEPELLVRWYQMGAYQPFFRAHAHLDTGRREPWLLPSQHNDIIRDALGQRYSLLPFWYTLLYQAHREGIPVMRPLWVQYPQDVTTFNIDDQYLLGDALLVHPVSDSGAHGVQVYLPGQGEVWYDIQSYQKHHGPQTLYLPVTLSSIPVFQRGGTIVPRWMRVRRSSECMKDDPITLFVALSPQGTAQGELFLDDGHTFNYQTRQEFLLRRFSFSGNTLVSSSADPEGHFETPIWIERVVIIGAGKPAAVVLQTKGSPESRLSFQHDPETSVLVLRKPGINVASDWSIHLR

SEQ ID NO: 5795 - protein, 79 aa, Homo Sapiens
MPSPRPVLLRGARAALLLLLPPRLLARPSLLLRRSLSAASCPPISLPAAASRSSMDGAGAEEVLAPLRLAVRQQAVWNQ

SEQ ID NO: 5796 - protein, 79 aa, Homo Sapiens; identical to SEQ ID NO: 5795

SEQ ID NO: 5797 - protein, 739 aa, Homo Sapiens
MPSPRPVLLRGARAALLLLLPPRLLARPSLLLRRSLSAASCPPISLPAAASRSSMDGAGAEEVLAPLRLAVRQQGDLVRKLKEDKAPQVDVDKAVAELKARKRVLEAKELALQPKDDIVDRAKMEDTLKRRFFYDQAFAIYGGVSGLYDFGPVGCALKNNIIQTWRQHFIQEEQILEIDCTMLTPEPVLKTSGHVDKFADFMVKDVKNGECFRADHLLKAHLQKLMSDKKCSVEKKSEMESVLAQLDNYGQQELADLFVNYNVKSPITGNDLSPPVSFNLMFKTFIGPGGNMPGYLRPETAQGIFLNFKRLLEFNQGKLPFAAAQIGNSFRNEISPRSGLIRVREFTMAEIEHFVDPSEKDHPKFQNVADLHLYLYSAKAQVSGQSARKMRLGDAVEQGVINNTVLGYFIGRIYLYLTKVGISPDKLRFRQHMENEMAHYACDCWDAESKTSYGWIEIVGCADRSCYDLSCHARATKVPLVAEKPLKEPKTVNVVQFEPSKGAIGKAYKKDAKLVMEYLAICDECYITEMEMLLNEKGEFTIETEGKTFQLTKDMINVKRFQKTLYVEEVVPNVIEPSFGLGRIMYTVFEHTFHVREGDEQRTFFSFPAVVAPFKCSVLPLSQNQEFMPFVKELSEALTRHGVSHKVDDSSGSIGRRYARTDEIGVAFGVTIDFDTVNKTPHTATLRDRDSMRQIRAEISELPSIVQDLANGNITWADVEARYPLFEGQETGKKETIEE

SEQ ID NO: 5798 - protein, 77 aa, Homo Sapiens
VVQFEPSKGAIGKAYKKDAKLVMEYLAICDECYITEMEMLLNEKGEFTIETEGKTFQLTKDMINVKRFQKTLYEQIL

SEQ ID NO: 5799 - protein, 345 aa, Homo Sapiens
MVAALLGGGGEARGGTVPGAWLCLMALLQLLGSAPRGSGLAHGRRLICWQALLQCQGEPECSYAYNQYAEACAPVLAQHGGGDAPGAAAAAFPASAASFSSRWRCPSHCISALIQLNHTRRGPALEDCDCAQDENCKSTKRAIEPCLPRTSGGGAGGPGAGGVMGCTEARRRCDRDSRCNLALSRYLTYCGKVFNGLRCTDECRTVIEDMLAMPKAALLNDCVCDGLERPICESVKENMARLCFGAELGNGPGSSGSDGGLDDYYDEDYDDEQRTGGAGGEQPLDDDDGVPHPPRPGSGAAASGGRGDLPYGPGRRSSGGGGRLAPRGAWTPLASILLLLLGPLF

SEQ ID NO: 5800 - protein, 678 aa, Homo Sapiens
MAPSLSPGPAALRRAPQLLLLLLAAECALAALLPAREATQFLRPRQRRAFQVFEEAKQGHLERECVEELCSREEAREVFENDPETDYFYPRYLDCINKYGSPYTKNSGFATCVQNLPDQCTPNPCDRKGTQACQDLMGNFFCLCKAGWGGRLCDKDVNECSQENGGCLQICHNKPGSFHCSCHSGFELSSDGRTCQDIDECADSEACGEARCKNLPGSYSCLCDEGFAYSSQEKACRDVDECLQGRCEQVCVNSPGSYTCHCDGRGGLKLSQDMDTCEDILPCVPFSVAKSVKSLYLGRMFSGTPVIRLRFKRLQPTRLVAEFDFRTFDPEGILLFAGGHQDSTWIVLALRAGRLELQLRYNGVGRVTSSGPVINHGMWQTISVEELARNLVIKVNRDAVMKIAVAGDLFQPERGLYHLNLTVGGIPFHEKDLVQPINPRLDGCMRSWNWLNGEDTTIQETVKVNTRMQCFSVTERGSFYPGSGFAFYSLDYMRTPLDVGTESTWEVEVVAHIRPAADTGVLFALWAPDLRAVPLSVALVDYHSTKKLKKQLVVLAVEHTALALMEIKVCDGQEHVVTVSLRDGEATLEVDGTRGQSEVSAAQLQERLAVLERHLRSPVLTFAGGLPDVPVTSAPVTAFYRGCMTLEVNRRLLDLDEAAYKHSDITAHSCPPVEPAAA

SEQ ID NO: 5801 - protein, 101 aa, Homo Sapiens
MQRLCVYVLIFALALAAFSEASWKPRSQQPDAPLGTGANRDLELPWLEQQGPASHHRRQLGPQGPPHLVADPSKKQGPWLEEEEEAYGWMDFGRRSAEDEN

SEQ ID NO: 5802 - protein, 144 aa, Homo Sapiens
KLESIDGARYHALLIPSCPGALTDLASSGSLARILQHFHSESKPICAVGHGVAALCCATNEDRSWVFDSYSLTGPSVCELVRAPGFARLPLVVEDFVKDSGACFSGLGAAPGWGRGGKQEDRPPEEQRRAGEDFPIYQCVFIYP

SEQ ID NO: 5803 - protein, 184 aa, Homo Sapiens
MASERLPNRPACLLVASGAAEGVSAQSFLHCFTMASTAFNLQVATPGGKAMEFVDVTESNARWVQDFRLKAYASPAKLESIDEPICAVGHGVAALCCATNEDRSWVFDSYSLTGPSVCELVRAPGFARLPLVVEDFVKDSGACFSASEPDAVHVVLDRHLVTGQNASSTVPAVQNLLFLCGSRK

SEQ ID NO: 5804 - protein, 184 aa, Homo Sapiens; identical to SEQ ID NO: 5803

SEQ ID NO: 5805 - protein, 186 aa, Homo Sapiens
MASERLPNRPACLLVASGAAEGVSAQSFLHCFTMASTAFNLQVATPGGKAMEFVDVTESNARWVQDFRLKAYASPAKLESIDGARYHALLIPSCPGALTDLASSGSLARILQHFHSESKPICAVGHGVAALCCATNEDRSWVFDSYSLTGGLGLSQEPPPRSRSPLCVSSSGPPASPACRSWWRTS

SEQ ID NO: 5806 - protein, 220 aa, Homo Sapiens
MASERLPNRPACLLVASGAAEGVSAQSFLHCFTMASTAFNLQVATPGGKAMEFVDVTESNARWVQDFRLKAYASPAKLESIDGARYHALLIPSCPGALTDLASSGSLARILQHFHSESKPICAVGHGVAALCCATNEDRSWVFDSYSLTGPSVCELVRAPGFARLPLVVEDFVKDSGACFSASEPDAVHVVLDRHLVTGQNASSTVPAVQNLLFLCGSRK

SEQ ID NO: 5807 - protein, 250 aa, Homo Sapiens
MASERLPNRPACLLVASGAAEGVSAQSFLHCFTMASTAFNLQVATPGGKAMEFVDVTESNARWVQDFRLKAYASPAKLESIDGARYHALLIPSCPGALTDLASSGSLARILQHFHSESKPICAVGHGVAALCCATNEDRSWVFDSYSLTGPSVCELVRAPGFARLPLVVEDFVKDSGACFSGAAASCPKADRHWQHFPVEEIFLACGFKVAGLGAAPGWGRGGKQEDRPPEEQRRAGEDFPIYQCVFIYP

SEQ ID NO: 5808 - protein, 120 aa, Homo Sapiens
MASERLPNRPACLLVASGAAEGVSAQSFLHCFTMASTAFNLQVATPGGKAMEFVDVTESNARWVQDFRLKAYASPAKLESIDGARYHALLIPSCPGALTDLASSGSLARILQHFHSESSR

SEQ ID NO: 5809 - protein, 162 aa, Homo Sapiens
WVQDFRLKAYASPAKLESIDGARYHALLIPSCPGALTDLASSGSLARILQHFHSESKPICAVGHGVAALCCATNEDRSWVFDSYSLTGPSVCELVRAPGFARLPLVVEDFVKDSGACFSGQGLGQHQAGAEEESKRTDLQKSSGGRVRISPYTSVCSSTHEE

SEQ ID NO: 5810 - protein, 87 aa, Homo Sapiens
  misc_feature (1)..(1): Xaa can be any naturally occurring amino acid
XPSVCELVRAPGFARLPLVVEDFVKDSGACFSASEPDAVHVVLDRHLVTGQNASSTVPAVQNLLFLCGSRSSSLLPQGRPALAALSC

SEQ ID NO: 5811 - protein, 487 aa, Homo Sapiens
MEFSSPSREECPKPLSRVSIMAGSLTGLLLLQAVSWASGARPCIPKSFGYSSVVCVCNATYCDSFDPPTFPALGTFSRYESTRSGRRMELSMGPIQANHTGTGIGYNIIRVPMASCDFSIRTYTYADTPDDFQLHNFSLPEEDTKLKIPLIHRALQLAQRPVSLLASPWTSPTWLKTNGAVNGKGSLKGQPGDIYHQTWARYFVKFLDAYAEHKLQFWAVTAENEPSAGLLSGYPFQCLGFTPEHQRDFIARDLGPTLANSTHHNVRLLMLDDQRLLLPHWAKVVLTDPEAAKYVHGIAVHWYLDFLAPAKATLGETHRLFPNTMLFASEACVGSKFWEQSVRLGSWDRGMQYSHSIITNLLYHVVGWTDWNLALNPEGGPNWVRNFVDSPIIVDITKDTFYKQPMFYHLGHFSKFIPEGSQRVGLVASQKNDLDAVALMHPDGSAVVVVLNRSSKDVPLTIKDPAVGFLETISPGYSIHTYLWRRQ

SEQ ID NO: 5812 - protein, 536 aa, Homo Sapiens
MEFSSPSREECPKPLSRVSIMAGSLTGLLLLQAVSWASGARPCIPKSFGYSSVVCVCNATYCDSFDPPTFPALGTFSRYESTRSGRRMELSMGPIQANHTGTGLLLTLQPEQKFQKVKGFGGAMTDAAALNILALSPPAQNLLLKSYFSEEGIGYNIIRVPMASCDFSIRTYTYADTPDDFQLHNFSLPEEDTKLKIPLIHRALQLAQRPVSLLASPWTSPTWLKTNGAVNGKGSLKGQPGDIYHQTWARYFVKFLDAYAEHKLQFWAVTAENEPSAGLLSGYPFQCLGFTPEHQRDFIARDLGPTLANSTHHNVRLLMLDDQRLLLPHWAKVVLTDPEAAKYVHGIAVHWYLDFLAPAKATLGETHRLFPNTMLFASEACVGSKFWEQSVRLGSWDRGMQYSHSIITNLLYHVVGWTDWNLALNPEGGPNWVRNFVDSPIIVDITKDTFYKQPMFYHLGHFSKFIPEGSQRVGLVASQKNDLDAVALMHPDGSAVVVVLNRSSKDVPLTIKDPAVGFLETISPGYSIHTYLWRRQ

SEQ ID NO: 5813 - protein, 536 aa, Homo Sapiens; identical to SEQ ID NO: 5812

SEQ ID NO: 5814 - protein, 449 aa, Homo Sapiens
MELSMGPIQANHTGTGLLLTLQPEQKFQKVKGFGGAMTDAAALNILALSPPAQNLLLKSYFSEEGIGYNIIRVPMASCDFSIRTYTYADTPDDFQLHNFSLPEEDTKLKIPLIHRALQLAQRPVSLLASPWTSPTWLKTNGAVNGKGSLKGQPGDIYHQTWARYFVKFLDAYAEHKLQFWAVTAENEPSAGLLSGYPFQCLGFTPEHQRDFIARDLGPTLANSTHHNVRLLMLDDQRLLLPHWAKVVLTDPEAAKYVHGIAVHWYLDFLAPAKATLGETHRLFPNTMLFASEACVGSKFWEQSVRLGSWDRGMQYSHSIITNLLYHVVGWTDWNLALNPEGGPNWVRNFVDSPIIVDITKDTFYKQPMFYHLGHFSKFIPEGSQRVGLVASQKNDLDAVALMHPDGSAVVVVLNRSSKDVPLTIKDPAVGFLETISPGYSIHTYLWRRQ

SEQ ID NO: 5815 - protein, 54 aa, Homo Sapiens
MHRRRLALGLGFCLLAGTSLSVLWVYLENWLPVSYVPYYLPCPEIFILAAPCMV

SEQ ID NO: 5816 - protein, 160 aa, Homo Sapiens
MHRRRLALGLGFCLLAGTSLSVLWVYLENWLPVSYVPYYLPCPEIFNMKLHYKREKPLQPVVWSQYPQPKLLEHRGGSQCPRPPCCQAHTAADTHTLVGAHRLRGNLQPRASAAHLPATEPDHWGHGVCRGEVHSFHPVLPGVSRGVLHAWVPGALLHLH

SEQ ID NO: 5817 - protein, 120 aa, Homo Sapiens
MHRRRLALGLGFCLLAGTSLSVLWVYLENWLPVSYVPYYLPCPEIFNMKLHYKREKPLQPVVWSQYPQPKLLEHRPTQLLTLTPWLAPIVSEGTFNPELLQHIYQPLNLTIGVTVFAVGK

SEQ ID NO: 5818 - protein, 347 aa, Homo Sapiens
MHRRRLALGLGFCLLAGTSLSVLWVYLENWLPVSYVPYYLPCPEIFNMKLHYKREKPLQPVVWSQYPQPKLLEHRPTQLLTLTPWLAPIVSEGTFNPELLQHIYQPLNLTIGVTVFAVGKYTHFIQSFLESAEEFFMRGYRVHYYIFTDNPAAVPGVPLGPHRLLSSIPIQGHSHWEETSMRRMETISQHIAKRAHREVDYLFCLDVDMVFRNPWGPETLGDLVAAIHPSYYAVPRQQFPYERRRVSTAFVADSEGDFYYGGAVFGGQVARVYEFTRGCHMAILADKANGIMAAWREESHLNRHFISNKPSKVLSPEYLWDDRKPQPPSLKLIRFSTLDKDISCLRS

SEQ ID NO: 5819 - protein, 294 aa, Homo Sapiens
MHRRRLALGLGFCLLAGTSLSVLWVYLENWLPVSYVPYYLPCPEIFNMKLHYKREKPLQPVVWSQYPQPKLLEHRPTQLLTLTPWLAPIVSEGTFNPELLQHIYQPLNLTIGVTVFAVGNPSWSQPRSSSCVGTGCTTTSSLTTLQPFPGSRWVPTGFSAPSPSRVTPTGRRHPCAGWRPSASTLLRGLTGRWTTSSALMWTWCFGTRGALRPWETWWLPFTQATTPFPASSSPMSAGVFPLPLWQTAKGTSIMVGQSSGGRWPGYMSLLGAATWPSWRTRPMASWLPGGRKAT

SEQ ID NO: 5820 - protein, 72 aa, Homo Sapiens
MHRRRLALGLGFCLLAGTSLSVLWVYLENWLPVSYVPYYLPCPEILLEYRGVISAHCNLHLPGSSNCHASAT

SEQ ID NO: 5821 - protein, 72 aa, Homo Sapiens; identical to SEQ ID NO: 5820

SEQ ID NO: 5822 - protein, 160 aa, Homo Sapiens
MHRRRLALGLGFCLLAGTSLSVLWVYLENWLPVSYVPYYLPCPEILPMMMALSCLCHQQHEAALQEGEATPARGMVTVPSAQAAGAQAHTAADTHTLVGAHRLRGNLQPRASAAHLPATEPDHWGHGVCRGEVHSFHPVLPGVSRGVLHAWVPGALLHLH

SEQ ID NO: 5823 - protein, 330 aa, Homo Sapiens
MHRRRLALGLGFCLLAGTSLSVLWVYLENWLPVSYVPYYLPCPEILSQYPQPKLLEHRPTQLLTLTPWLAPIVSEGTFNPELLQHIYQPLNLTIGVTVFAVGKYTHFIQSFLESAEEFFMRGYRVHYYIFTDNPAAVPGVPLGPHRLLSSIPIQGHSHWEETSMRRMETISQHIAKRAHREVDYLFCLDVDMVFRNPWGPETLGDLVAAIHPSYYAVPRQQFPYERRRVSTAFVADSEGDFYYGGAVFGGQVARVYEFTRGCHMAILADKANGIMAAWREESHLNRHFISNKPSKVLSPEYLWDDRKPQPPSLKLIRFSTLDKDISCLRS

SEQ ID NO: 5824 - protein, 145 aa, Homo Sapiens
MKRVLVLLLAVAFGHALERGRDYEKNKVCKEFSHLGKEDFTSLSLVLYSRKFPSGTFEQVSQLVKEVVSLTEACCAEGADPDCYDTRTSALSAKSCESNSPFPVHPGTAECCTKEGLERKLCMAALKHQPQEFPTYVEPTNDEIC

SEQ ID NO: 5825 - protein, 474 aa, Homo Sapiens
MKRVLVLLLAVAFGHALERGRDYEKNKVCKEFSHLGKEDFTSLSLVLYSRKFPSGTFEQVSQLVKEVVSLTEACCAEGADPDCYDTRTSALSAKSCESNSPFPVHPGTAECCTKEGLERKLCMAALKHQPQEFPTYVEPTNDEICEAFRKDPKEYANQFMWEYSTNYGQAPLSLLVSYTKSYLSMVGSCCTSASPTVCFLKERLQLKHLSLLTTLSNRVCSQYAAYGEKKSRLSNLIKLAQKVPTADLEDVLPLAEDITNILSKCCESASEDCMAKELPEHTVKLCDNLSTKNSKFEDCCQEKTAMDVFVCTYFMPAAQLPELPDVELPTNKDVCDPGNTKVMDKYTFELSRRTHLPEVFLSKVLEPTLKSLGECCDVEDSTTCFNAKGPLLKKELSSFIDKGQELCADYSENTFTEYKKKLAERLKAKLPDATPTELAKLVNKHSDFASNCCSINSPPLYCDSEIDAELKNIL

SEQ ID NO: 5826 - protein, 348 aa, Homo Sapiens
MKRVLVLLLAVAFGHALERGRDYEKNKVCKEFSHLGKEDFTSLSLVLYSRKFPSGTFEQVSQLVKEVVSLTEACCAEGADPDCYDTRTSALSAKSCESNSPFPVHPGTAECCTKEGLERKLCMAALKHQPQEFPTYVEPTNDEICEAFRKDPKEYANQFMWEYSTNYGQAPLSLLVSYTKSYLSMVGSCCTSASPTVCFLKERLQLKHLSLLTTLSNRVCSQYAAYGEKKSRLSNLIKLAQKVPTADLEDVLPLAEDITNILSKCCESASEDCMAKELPEHTVKLCDNLSTKNSKFEDCCQEKTAMDVFVCTYFMPAAQLPELPDVELPTNKDVCDPGNTKVMDKALY

SEQ ID NO: 5827 - protein, 476 aa, Homo Sapiens
MKRVLVLLLAVAFGHALERGRDYEKNKVCKEFSHLGKEDFTSLSLVLYSRKFPSGTFEQVSQLVKEVVSLTEACCAEGADPDCYDTRTSALSAKSCESNSPFPVHPGTAECCTKEGLERKLCMAALKHQPQEFPTYVEPTNDEICEAFRKDPKEYANQFMWEYSTNYGQAPLSLLVSYTKSYLSMVGSCCTSASPTVCFLKERLQLKHLSLLTTLSNRVCSQYAAYGEKKSRLSNLIKLAQKVPTADLEDVLPLAEDITNILSKCCESASEDCMAKELPEHTVKLCDNLSTKNSKFEDCCQEKTAMDVFVCTYFMPAAQLPELPDVELPTNKDVCDPGNTKVMDKYTFELSRRTHLPEVFLSKVLEPTLKSLGECCDVEDSTTCFNAKGPLLKKELSSFIDKGQELCADYSENTFTEYKKKLAERLKAKLPDATPTELAKLVNKHSDFASNCCSINSPPLYCDSETRVGATQGNDL

SEQ ID NO: 5828 - protein, 493 aa, Homo Sapiens
MLWSWSEERGGAARLSGRKMKRVLVLLLAVAFGHALERGRDYEKNKVCKEFSHLGKEDFTSLSLVLYSRKFPSGTFEQVSQLVKEVVSLTEACCAEGADPDCYDTRTSALSAKSCESNSPFPVHPGTAECCTKEGLERKLCMAALKHQPQEFPTYVEPTNDEICEAFRKDPKEYANQFMWEYSTNYGQAPLSLLVSYTKSYLSMVGSCCTSASPTVCFLKERLQLKHLSLLTTLSNRVCSQYAAYGEKKSRLSNLIKLAQKVPTADLEDVLPLAEDITNILSKCCESASEDCMAKELPEHTVKLCDNLSTKNSKFEDCCQEKTAMDVFVCTYFMPAAQLPELPDVELPTNKDVCDPGNTKVMDKYTFELSRRTHLPEVFLSKVLEPTLKSLGECCDVEDSTTCFNAKGPLLKKELSSFIDKGQELCADYSENTFTEYKKKLAERLKAKLPDATPTELAKLVNKHSDFASNCCSINSPPLYCDSEIDAELKNIL

SEQ ID NO: 5829 - protein, 180 aa, Homo Sapiens
MKSIYFVAGLFVMLVQGSWQRSLQDTEEKSRSFSASQADPLSDPDQMNEDKRHSQGTFTSDYSKYLDSRRAQDFVQWLMNTKRNRNNIAKRHDEFERHAEGTFTSDVSSYLEGQAAKEFIAWLVKGRGRRDFPEEVAIVEELGRRHADGSFSDEMNTILDNLAARDFINWLIQTKITDRK

SEQ ID NO: 5830 - protein, 180 aa, Homo Sapiens; identical to SEQ ID NO: 5829

SEQ ID NO: 5831 - protein, 80 aa, Homo Sapiens
MPPCQPQRPLLLLLLLLACQPQVPSAQVMDFLFEKWKLYGDQCHHNLSLLPPPTELVCNRTFDKYSCWPDTPANTTANIS

SEQ ID NO: 5832 - protein, 477 aa, Homo Sapiens
MPPCQPQRPLLLLLLLLACQPQVPSAQVMDFLFEKWKLYGDQCHHNLSLLPPPTELVCNRTFDKYSCWPDTPANTTANISCPWYLPWHHKVQHRFVFKRCGPDGQWVRGPRGQPWRDASQCQMDGEEIEVQKEVAKMYSSFQVMYTVGYSLSLGALLLALAILGGLSKLHCTRNAIHANLFASFVLKASSVLVIDGLLRTRYSQKIGDDLSVSTWLSDGAVAGCRVAAVFMQYGIVANYCWLLVEGLYLHNLLGLATLPERSFFSLYLGIGWGAPMLFVVPWAVVKCLFENVQCWTSNDNMGFWWILRFPVFLAILINFFIFVRIVQLLVAKLRARQMHHTDYKFRLAKSTLTLIPLLGVHEVVFAFVTDEHAQGTLRSAKLFFDLFLSSFQGLLVAVLYCFLNKEVQSELRRRWHRWRLGKVLWEERNTSNHRASSSPGHGPPSKELQFGRGGGSQDSSAETPLAGGLPRLAESPF

SEQ ID NO: 5833 - protein, 523 aa, Homo Sapiens
MPPCQPQRPLLLLLLLLACQPQVPSAQVMDFLFEKWKLYGDQCHHNLSLLPPPTELVCNRTFDKYSCWPDTPANTTANISCPWYLPWHHKVQHRFVFKRCGPDGQWVRGPRGQPWRDASQCQMDGEEIEVQKEVAKMYSSFQVMYTVGYSLSLGALLLALAILGGLSKLHCTRNAIHANLFASFVLKASSVLVIDGLLRTRYSQKIGDDLSVSTWLSDGVSPPRRPQAGGWVGSQAGGHVAALTLHLYQAVAGCRVAAVFMQYGIVANYCWLLVEGLYLHNLLGLATLPERSFFSLYLGIGWGAPMLFVVPWAVVKCLFENVQCWTSNDNMGFWWILRFPVFLAILINFFIFVRIVQLLVAKLRARQMHHTDYKFRLAKSTLTLIPLLGVHEVVFAFVTDEHAQGTLRSAKLFFDLFLSSFQVPARPPAPPPGAQCATPDHPVSPGPAGGCPLLLPQQGGAVGAAAALAPLAPGQSAMGGAEHQQPQGLIFARPRPSQQGAAVWEGWWQPGFICGDPLGWWPP

SEQ ID NO: 5834 - protein, 308 aa, Homo Sapiens
MFVQLLRAIYVPQNVYCIHVDEKAPMKYKTAVQTLVNCFENVFISSKTEKVAYAGFTRLQADINCMKVLVHSKFQWNYVINLCGQDFPIKTNREIIHYIRSKWSDKNITPGVIQPLHIKSKTSQSHLEFVPKGSIYAPPNNRFKDKPPHNLTIYFGSAYYVLTRKFVEFILTDIHAKDMLQWSKDIRSPEQHYWVTLNRLKDAPGATPNAGWEGNVRAIKRKSEEGNVHDGCKGRYVEDICVYGPGDLPWLIQSPSLFANKFEPSTDPLVVTCLERRHRLQVLRQAEVPIEPHWHFQQQSHFNMRLNR

SEQ ID NO: 5835 - protein, 429 aa, Homo Sapiens
MSQLRATKSGLVVRAVICIFIFLYLRNPTPAESEEEPAQPEVVECGFYPDELCSALFEGKGAAPIAKFCKTPHKSEIHAHLHTPGNCSRISRGLHFITRPLSAEEGDFSLAYIITIHKELAMFVQLLRAIYVPQNVYCIHVDEKAPMKYKTAVQTLVNCFENVFISSKTEKVAYAGFTRLQADINCMKVLVHSKFQWNYVINLCGQDFPIKTNREIIHYIRSKWSDKNITPGVIQPLHIKSKTSQSHLEFVPKGSIYAPPNNRFKDKPPHNLTIYFGSAYYVLTRKFVEFILTDIHAKDMLQWSKDIRSPEQHYWVTLNRLKDAPGATPNAGWEGNVRAIKRKSEEGNVHDGCKGRYVEDICVYGPGDLPWLIQSPSLFANKFEPSTDPLVVTCLERRHRLQVLRQAEVPIEPHWHFQQQSHFNMRLNR

SEQ ID NO: 5836 - protein, 50 aa, Homo Sapiens
MALRVVRSVRALLCTLRAVPSPAAPCPPRPWQLGVGAVRTLRTGPALLSG

SEQ ID NO: 5837 - protein, 58 aa, Homo Sapiens
MALRVVRSVRALLCTLRAVPSPAAPCPPRPWQLGVGAVRTLRTGPALLSGSVGRCCLL

SEQ ID NO: 5838 - protein, 162 aa, Homo Sapiens
MALRVVRSVRALLCTLRAVPSPAAPCPPRPWQLGVGAVRTLRTGPALLSVRKFTEKHEWVTTENGIGTVGISNFAQEALGDVVYCSLPEVGTKLNKQDEFGALESVKAASELYSPLSGEVTEINEALAENPGLVNKSCYEDGKLLLEISQGITTTVNILSRI

SEQ ID NO: 5839 - protein, 173 aa, Homo Sapiens
MALRVVRSVRALLCTLRAVPSPAAPCPPRPWQLGVGAVRTLRTGPALLSVRKFTEKHEWVTTENGIGTVGISNFAQEALGDVVYCSLPEVGTKLNKQDEFGALESVKAASELYSPLSGEVTEINEALAENPGLVNKSCYEDGWLIKMTLSNPSELDELMSEEAYEKYIKSIEE

SEQ ID NO: 5840 - protein, 118 aa, Homo Sapiens
SVRALLCTLRAVPSPAAPCPPRPWQLGVGAVRTLRTGPALLSDEFGALESVKAASELYSPLSGEVTEINEALAENPGLVNKSCYEDGWLIKMTLSNPSELDELMSEEAYEKYIKSIEE

SEQ ID NO: 5841 - protein, 66 aa, Homo Sapiens
  misc_feature (1)..(1): Xaa can be any naturally occurring amino acid
XCTLRAVPSPAAPCPPRPWQLGVGAVRTLRTGPALLSVRKFTEKHEWVTTENGIGTVGISNFAQVG

SEQ ID NO: 5842 - protein, 100 aa, Homo Sapiens
  misc_feature (1)..(1): Xaa can be any naturally occurring amino acid
XEKHEWVTTENGIGTVGISNFAQEALGDVVYCSLPEVGTKLNKQGEVTEINEALAENPGLVNKSCYEDGWLIKMTLSNPSELDELMSEEAYEKYIKSIEE

SEQ ID NO: 5843 - protein, 105 aa, Homo Sapiens
  misc_feature (1)..(1): Xaa can be any naturally occurring amino acid
XTLRTGPALLSVRKFTEKHEWVTTENGIGTVGISNFAQEALGDVVYCSLPEVGTKLNKQDEFGALESVKAASELYSPLSGEVTEINEALAENPGLVNKSCYEDVS

SEQ ID NO: 5844 - protein, 80 aa, Homo Sapiens
  misc_feature (1)..(1): Xaa can be any naturally occurring amino acid
XVRSVRALLCTLRAVPSPAAPCPPRPWQLGVGAVRTLRTGPALLSVRKFTEKHEWVTTENGIGTVGISNFAQMSLVLWKV

SEQ ID NO: 5845 - protein, 372 aa, Homo Sapiens; identical to SEQ ID NO: 2629

SEQ ID NO: 5846 - protein, 478 aa, Homo Sapiens
MAHVPARTSPGPGPQLLLLLLPLFLLLLRDVAGSHRAPAWSALPAAADGLQGDRDLQRHPGDAAATLGPSAQDMVAVHMHRLYEKYSRQGARPGGGNTVRSFRARLEVVDQKAVYFFNLTSMQDSEMILTATFHFYSEPPRWPRALEVLCKPRAKNASGRPLPLGPPTRQHLLFRSLSQNTATQGLLRGAMALAPPPRGLWQAKDISPIVKAARRDGELLLSAQLDSEERDPGVPRPSPYAPYILVYANDLAISEPNSVAVTLQRYDPFPAGDPEPRAAPNNSADPRVRRAAQATGPLQDNELPGLDERPPRAHAQHFHKHQLWPSPFRALKPRPGRKDRRKKGQEVFMAASQVLDFDEKTMQKARRKQWDEPRVCSRRYLKVDFADIGWNEWIISPKSFDAYYCAGACEFPMPKIVRPSNHATIQSIVRAVGIIPGIPEPCCVPDKMNSLGVLFLDENRNVVLKVYPNMSVDTCACR

SEQ ID NO: 5847 - protein, 407 aa, Homo Sapiens
MVLAAPLLLGFLLLALELRPRGEAAEGPAAAAAAAAAAAAAGVGGERSSRPAPSVAPEPDGCPVCVWRQHSRELRLESIKSQILSKLRLKEAPNISREVVKQLLPKAPPLQQILDLHDFQGDALQPEDFLEEDEYHATTETVISMAQETDPAVQTDGSPLCCHFHFSPKVMFTKVLKAQLWVYLRPVPRPATVYLQILRLKPLTGEGTAGGGGGGRRHIRIRSLKIELHSRSGHWQSIDFKQVLHSWFRQPQSNWGIEINAFDPSGTDLAVTSLGPGAEGLHPFMELRVLENTKRSRRNLGLDCDEHSSESRCCRYPLTVDFEAFGWDWIIAPKRYKANYCSGQCEYMFMQKYPHTHLVQQANPRGSAGPCCTPTKMSPINMLYFNDKQQIIYGKIPGMVVDRCGCS

SEQ ID NO: 5848 - protein, 380 aa, Homo Sapiens
  misc_feature (1)..(1): Xaa can be any naturally occurring amino acid
XAAAAAAAAAAAAAGVGGERSSRPAPSVAPEPDGCPVCVWRQHSRELRLESIKSQILSKLRLKEAPNISREVVKQLLPKAPPLQQILDLHDFQGDALQPEDFLEEDEYHATTETVISMAQETDPAVQTDGSPLCCHFHFSPKVMFTKVLKAQLWVYLRPVPRPATVYLQILRLKPLTGEGTAGGGGGGRRHIRIRSLKIELHSRSGHWQSIDFKQVLHSWFRQPQSNWGIEINAFDPSGTDLAVTSLGPGAEGLHPFMELRVLENTKRSRRNLGLDCDEHSSESRCCRYPLTVDFEAFGWDWIIAPKRYKANYCSGQCEYMFMQKYPHTHLVQQANPRGSAGPCCTPTKMSPINMLYFNDKQQIIYGKIPGMVVDRCGCS

SEQ ID NO: 5849 - protein, 6 aa, Homo Sapiens
MPGQEL

SEQ ID NO: 5850 - protein, 113 aa, Homo Sapiens
MPGQELRTVNGSQMLLVLLVLSWLPHGGALSLAEASRASFPGPSELHSEDSRFRELRKRYEDLLTRLRANQSWEDSNTDLVPAPAVRILTPEVRLGSGGHLHLRISRAALPEG

SEQ ID NO: 5851 - protein, 308 aa, Homo Sapiens
MPGQELRTVNGSQMLLVLLVLSWLPHGGALSLAEASRASFPGPSELHSEDSRFRELRKRYEDLLTRLRANQSWEDSNTDLVPAPAVRILTPEVRLGSGGHLHLRISRAALPEGLPEASRLHRALFRLSPTASRSWDVTRPLRRQLSLARPQAPALHLRLSPPPSQSDQLLAESSSARPQLELHLRPQAARGRRRARARNGDHCPLGPGRCCRLHTVRASLEDLGWADWVLSPREVQVTMCIGACPSQFRAANMHAQIKTSLHRLKPDTVPAPCCVPASYNPMVLIQKTDTGVSLQTYDDLLAKDCHCI

SEQ ID NO: 5852 - protein, 429 aa, Homo Sapiens
MCPGALWVALPLLSLLAGSLQGKPLQSWGRGSAGGNAHSPLGVPGGGLPEHTFNLKMFLENVKVDFLRSLNLSGVPSQDKTRVEPPQYMIDLYNRYTSDKSTTPASNIVRSFSMEDAISITATEDFPFQKHILLFNISIPRHEQITRAELRLYVSCQNHVDPSHDLKGSVVIYDVLDGTDAWDSATETKTFLVSQDIQDEGWETLEVSSAVKRWVRSDSTKSKNKLEVTVESHRKGCDTLDISVPPGSRNLPFFVVFSNDHSSGTKETRLELREMISHEQESVLKKLSKDGSTEAGESSHEEDTDGHVAAGSTLARRKRSAGAGSHCQKTSLRVNFEDIGWDSWIIAPKEYEAYECKGGCFFPLADDVTPTKHAIVQTLVHLKFPTKVGKACCVPTKLSPISVLYKDDMGVPTLKYHYEGMSVAECGCR

SEQ ID NO: 5853 - protein, 364 aa, Homo Sapiens
MLRFLPDLAFSFLLILALGQAVQFQEYVFLQFLGLDKAPSPQKFQPVPYILKKIFQDREAAATTGVSRDLCYVKELGVRGNVLRFLPDQGFFLYPKKISQASSCLQKLLYFNLSAIKEREQLTLAQLGLDLGPNSYYNLGPELELALFLVQEPHVWGQTTPKPGKMFVLRSVPWPQGAVHFNLLDVAKDWNDNPRKNFGLFLEILVKEDRDSGVNFQPEDTCARLRCSLHASLLVVTLNPDQCHPSRKRRAAIPVPKLSCKNLCHRHQLFINFRDLGWHKWIIAPKGFMANYCHGECPFSLTISLNSSNYAFMQALMHAVDPEIPQAVCIPTKLSPISMLYQDNNDNVILRHYEDMVVDECGCG

SEQ ID NO: 5854 - protein, 501 aa, Homo Sapiens
MRLPKLLTFLLWYLAWLDLEFICTVLGAPDLGQRPQGTRPGLAKAEAKERPPLARNVFRPGGHSYGGGATNANARAKGGTGQTGGLTQPKKDEPKKLPPRPGGPEPKPGHPPQTRQATARTVTPKGQLPGGKAPPKAGSVPSSFLLKKAREPGPPREPKEPFRPPPITPHEYMLSLYRTLSDADRKGGNSSVKLEAGLANTITSFIDKGQDDRGPVVRKQRYVFDISALEKDGLLGAELRILRKKPSDTAKPAAPGGGRAAQLKLSSCPSGRQPAALLDVRSVPGLDGSGWEVFDIWKLFRNFKNSAQLCLELEAWERGRAVDLRGLGFDRAARQVHEKALFLVFGRTKKRDLFFNEIKARSGQDDKTVYEYLFSQRRKRRAPLATRQGKRPSKNLKARCSRKALHVNFKDMGWDDWIIAPLEYEAFHCEGLCEFPLRSHLEPTNHAVIQTLMNSMDPESTPPTCCVPTRLSPISILFIDSANNVVYKQYEDMVVESCGCR

SEQ ID NO: 5855 - protein, 501 aa, Homo Sapiens; identical to SEQ ID NO: 5854

SEQ ID NO: 5856 - protein, 271 aa, Homo Sapiens [sequence omitted]

SEQ ID NO: 5857 - protein, 455 aa, Homo Sapiens
MDTPRVLLSAVFLISFLWDLPGFQQASISSSSSSAELGSTKGMRSRKEGKMQRAPRDSDAGREGQEPQPRPQDEPRAQQPRAQEPPGRGPRVVPHEYMLSIYRTYSIAEKLGINASFFQSSKSANTITSFVDRGLDDLSHTPLRRQKYLFDVSMLSDKEELVGAELRLFRQAPSAPWGPPAGPLHVQLFPCLSPLLLDARTLDPQGAPPAGWEVFDVWQGLRHQPWKQLCLELRAAWGELDAGEAEARARGPQQPPPPDLRSLGFGRRVRPPQERALLVVFTRSQRKNLFAEMREQLGSAEAAGPGAGAEGSWPPPSGAPDARPWLPSPGRRRRRTAFASRHGKRHGKKSRLRCSKKPLHVNFKELGWDDWIIAPLEYEAYHCEGVCDFPLRSHLEPTNHAIIQTLMNSMDPGSTPPSCCVPTKLTPISILYIDAGNNVVYKQYEDMVVESCGCR

SEQ ID NO: 5858 - protein, 353 aa, Homo Sapiens [sequence omitted]

SEQ ID NO: 5859 - protein, 450 aa, Homo Sapiens
MDLSAAAALCLWLLSACRPRDGLEAAAVLRAAGAGPVRSPGGGGGGGGGGRTLAQAAGAAAVPAAAVPRARAARRAAGSGFRNGSVVPHHFMMSLYRSLAGRAPAGAAAVSASGHGRADTITGFTDQATQDESAAETGQSFLFDVSSLNDADEVVGAELRVLRRGSPESGPGSWTSPPLLLLSTCPGAARAPRLLYSRAAEPLVGQRWEAFDVADAMRRHRREPRPPRAFCLLLRAVAGPVPSPLALRRLGFGWPGGGGSAAEERAVLVVSSRTQRKESLFREIRAQARALGAALASEPLPDPGTGTASPRAVIGGRRRRRTALAGTRTAQGSGGGAGRGHGRRGRSRCSRKPLHVDFKELGWDDWIIAPLDYEAYHCEGLCDFPLRSHLEPTNHAIIQTLLNSMAPDAAPASCCVPARLSPISILYIDAANNVVYKQYEDMVVEACGCR

SEQ ID NO: 5860 - protein, 454 aa, Homo Sapiens
MARPNKFLLWFCCFAWLCFPISLGSQASGGEAQIAASAELESGAMPWSLLQHIDERDRAGLLPALFKVLSVGRGGSPRLQPDSRALHYMKKLYKTYATKEGIPKSNRSHLYNTVRLFTPCTRHKQAPGDQVTGILPSVELLFNLDRITTVEHLLKSVLLYNINNSVSFSSAVKCVCNLMIKEPKSSSRTLGRAPYSFTFNSQFEFGKKHKWIQIDVTSLLQPLVASNKRSIHMSINFTCMKDQLEHPSAQNGLFNMTLVSPSLILYLNDTSAQAYHSWYSLHYKRRPSQGPDQERSLSAYPVGEEAAEDGRSSHHRHRRGQETVSSELKKPLGPASFNLSEYFRQFLLPQNECELHDFRLSFSQLKWDNWIVAPHRYNPRYCKGDCPRAVGHRYGSPVHTMVQNIIYEKLDSSVPRPSCVPAKYSPLSVLTIEPDGSIAYKEYEDMIATKCTCR

SEQ ID NO: 5861 - protein, 366 aa, Homo Sapiens
MKKLYKTYATKEGIPKSNRSHLYNTVRLFTPCTRHKQAPGDQVTGILPSVELLFNLDRITTVEHLLKSVLLYNINNSVSFSSAVKCVCNLMIKEPKSSSRTLGRAPYSFTFNSQFEFGKKHKWIQIDVTSLLQPLVASNKRSIHMSINFTCMKDQLEHPSAQNGLFNMTLVSPSLILYLNDTSAQAYHSWYSLHYKRRPSQGPDQERSLSAYPVGEEAAEDGRSSHHRHRRGQETVSSELKKPLGPASFNLSEYFRQFLLPQNECELHDFRLSFSQLKWDNWIVAPHRYNPRYCKGDCPRAVGHRYGSPVHTMVQNIIYEKLDSSVPRPSCVPAKYSPLSVLTIEPDGSIAYKEYEDMIATKCTCR

SEQ ID NO: 5862 - protein, 366 aa, Homo Sapiens; identical to SEQ ID NO: 5861

SEQ ID NO: 5863 - protein, 366 aa, Homo Sapiens; identical to SEQ ID NO: 5861

SEQ ID NO: 5864 - protein, 366 aa, Homo Sapiens; identical to SEQ ID NO: 5861

SEQ ID NO: 5865 - protein, 61 aa, Homo Sapiens
MKLWDVVAVCLVLLHTASAFPLPAANMPEDYPDQFDDVMDFIQATIKRLKRSPDKQMAVLP

SEQ ID NO: 5866 - protein, 61 aa, Homo Sapiens; identical to SEQ ID NO: 5865

SEQ ID NO: 5867 - protein, 185 aa, Homo Sapiens
MKLWDVVAVCLVLLHTASAFPLPAANMPEDYPDQFDDVMDFIQATIKRLKRSPDKQMAVLPRRERNRQAAAANPENSRGKGRRGQRGKNRGCVLTAIHLNVTDLGLGYETKEELIFRYCSGSCDAAETTYDKILKNLSRNRRLVSDKVGQACCRPIAFDDDLSFLDDNLVYHILRKHSAKRCGCI

SEQ ID NO: 5868 - protein, 185 aa, Homo Sapiens; identical to SEQ ID NO: 5867

SEQ ID NO: 5869 - protein, 211 aa, Homo Sapiens
MKLWDVVAVCLVLLHTASAFPLPAGKRPPEAPAEDRSLGRRRAPFALSSDSNMPEDYPDQFDDVMDFIQATIKRLKRSPDKQMAVLPRRERNRQAAAANPENSRGKGRRGQRGKNRGCVLTAIHLNVTDLGLGYETKEELIFRYCSGSCDAAETTYDKILKNLSRNRRLVSDKVGQACCRPIAFDDDLSFLDDNLVYHILRKHSAKRCGCI

SEQ ID NO: 5870 - protein, 159 aa, Homo Sapiens
MPEDYPDQFDDVMDFIQATIKRLKRSPDKQMAVLPRRERNRQAAAANPENSRGKGRRGQRGKNRGCVLTAIHLNVTDLGLGYETKEELIFRYCSGSCDAAETTYDKILKNLSRNRRLVSDKVGQACCRPIAFDDDLSFLDDNLVYHILRKHSAKRCGCI

SEQ ID NO: 5871 - protein, 202 aa, Homo Sapiens
MQSLPNSNGAAAGRDFKMKLWDVVAVCLVLLHTASAFPLPAANMPEDYPDQFDDVMDFIQATIKRLKRSPDKQMAVLPRRERNRQAAAANPENSRGKGRRGQRGKNRGCVLTAIHLNVTDLGLGYETKEELIFRYCSGSCDAAETTYDKILKNLSRNRRLVSDKVGQACCRPIAFDDDLSFLDDNLVYHILRKHSAKRCGCI

SEQ ID NO: 5872 - protein, 228 aa, Homo Sapiens
MQSLPNSNGAAAGRDFKMKLWDVVAVCLVLLHTASAFPLPAGKRPPEAPAEDRSLGRRRAPFALSSDSNMPEDYPDQFDDVMDFIQATIKRLKRSPDKQMAVLPRRERNRQAAAANPENSRGKGRRGQRGKNRGCVLTAIHLNVTDLGLGYETKEELIFRYCSGSCDAAETTYDKILKNLSRNRRLVSDKVGQACCRPIAFDDDLSFLDDNLVYHILRKHSAKRCGCI

SEQ ID NO: 5873 - protein, 90 aa, Homo Sapiens
MKMLPGVGVFGTGSSARVLVPLLRAEGFTVEALWGKTEEEAKQLAEEMNIAFYTSRTDDILLHQDVDLVCISIPPPLTRQISVKALESSL

SEQ ID NO: 5874 - protein, 385 aa, Homo Sapiens
MKMLPGVGVFGTGSSARVLVPLLRAEGFTVEALWGKTEEEAKQLAEEMNIAFYTSRTDDILLHQDVDLVCISIPPPLTRQISVKALGIGKNVVCEKAATSVDAFRMVTASRYYPQLMSLVGNVLRFLPAFVRMKQLISEHYVGAVMICDARIYSGSLLSPSYGWICDELMGGGGLHTMGTYIVDLLTHLTGRRAEKVHGLLKTFVRQNAAIRGIRHVTSDDFCFFQMLMGGGVCSTVTLNFNMPGAFVHEVMVVGSAGRLVARGADLYGQKNSATQEELLLRDSLAVGAGLPEQGPQDVPLLYLKGMVYMVQALRQSFQGQGDRRTWDRTPVSMAASFEDGLYMQSVVDAIKRSSRSGEWEAVEVLTEEPDTNQNLCEALQRNNL

SEQ ID NO: 5875 - protein, 112 aa, Homo Sapiens
MKMLPGVGVFGTGSSARVLVPLLRAEGFTVEALWGKTEEEAKQLAEEMNIAFYTSRTDDILLHQDVDLVCISIPPPLTRQISVKALGTPGRPQQGQIMSLPLGSPLRVTPLL

SEQ ID NO: 5876 - protein, 112 aa, Homo Sapiens; identical to SEQ ID NO: 5875

SEQ ID NO: 5877 - protein, 88 aa, Homo Sapiens
MKMLPGVGVFGTGSSARVLVPLLRAEGFTVEALWGKTEEEAKQLAEEMNIAFYTSRTDDILLHQDVDLVLGRMWFARRQQHRWMPSGW

SEQ ID NO: 5878 - protein, 103 aa, Homo Sapiens
  misc_feature (1)..(1): Xaa can be any naturally occurring amino acid
XKTEEEAKQLAEEMNIAFYTSRTDDILLHQDVDLVCISIPPPLTRQISVKALGSTCGVPEWSLDGCGGEAQVHTLPRWASTRRVLGRMWFARRQQHRWMPSGW

SEQ ID NO: 5879 - protein, 682 aa, Homo Sapiens
MCGIFAYMNYRVPRTRKEIFETLIKGLQRLEYRGYDSAGVAIDGNNHEVKERHIQLVKKRGKVKALDEELYKQDSMDLKVEFETHFGIAHTRWATHGVPSAVNSHPQRSDKGNEFVVIHNGIITNYKDLRKFLESKGYEFESETDTETIAKLIKYVFDNRETEDITFSTLVERVIQQLEGAFALVFKSVHYPGEAVATRRGSPLLIGVRSKYKLSTEQIPILYRTCTLENVKNICKTRMKRLDSSACLHAVGDKAVEFFFASDASAIIEHTNRVIFLEDDDIAAVADGKLSIHRVKRSASDDPSRAIQTLQMELQQIMKGNFSAFMQKEIFEQPESVFNTMRGRVNFETNTVLLGGLKDHLKEIRRCRRLIVIGCGTSYHAAVATRQVLEELTELPVMVELASDFLDRNTPVFRDDVCFFISQSGETADTLLALRYCKDRGALTVGVTNTVGSSISRETDCGVHINAGPEIGVASTKAYTSQFISLVMFGLMMSEDRISLQNRRQEIIRGLRSLPELIKEVLSLEEKIHDLALELYTQRSLLVMGRGYNYATCLEGALKIKEITYMHSEGILAGELKHGPLALIDKQMPVIMVIMKDPCFAKCQNALQQVTARQGRPIILCSKDDTESSKFAYKTIELPHTVDCLQGILSVIPLQLLSFHLAVLRGYDVDFPRNLAKSVTVE

SEQ ID NO: 5880 - protein, 216 aa, Homo Sapiens
MNLLLNSISLLTFLSEFVVIHNGIITNYKDLRKFLESKGYEFESETDTETIAKLIKYVFDNRETEDITFSTLVERVIQQLEGAFALVFKSVHYPGEAVATRRGSPLLIGVRSKYKLSTEQIPILYRTCTLENVKNICKTRMKRLDSSACLHAVGDKAVEFFFASDASAIIEHTNRVIFLEDDDIAAVADGKLSIHRVKRSASDDPSRAIQTLQMEL

SEQ ID NO: 5881 - protein, 179 aa, Homo Sapiens [sequence omitted]

SEQ ID NO: 5882 - protein, 464 aa, Homo Sapiens
MILANVFCLFFFLDETLRSLASPSSLQGPELHGWRPPVDCVRANELCAAESNCSSRYRTLRQCLAGRDRNTMLANKECQAALEVLQESPLYDCRCKRGMKKELQCLQIYWSIHLGLTEGEEFYEASPYEPVTSRLSDIFRLASIFSGTGADPVVSAKSNHCLDAAKACNLNDNCKKLRSSYISICNREISPTERCNRRKCHKALRQFFDRVPSEYTYRMLFCSCQDQACAERRRQTILPSCSYEDKEKPNCLDLRGVCRTDHLCRSRLADFHANCRASYQTVTSCPADNYQACLGSYAGMIGFDMTPNYVDSSPTGIVVSPWCSCRGSGNMEEECEKFLRDFTENPCLRNAIQAFGNGTDVNVSPKGPSFQATQAPRVEKTPSLPDDLSDSTSLGTSVITTCTSVQEQGLKANNSKELSMCFTELTTNIIPGSNKVIKPNSGPSRARPSAALTVLSVLMLKLAL

SEQ ID NO: 5883 - protein, 265 aa, Homo Sapiens
MILANVFCLFFFLDETLRSLASPSSLQGPELHGWRPPVDCVRANELCAAESNCSSRYRTLRQCLAGRDRNTMLANKECQAALEVLQESPLYDCRCKRGMKKELQCLQIYWSIHLGLTEGEEFYEASPYEPVTSRLSDIFRLASIFSGTGADPVVSAKSNHCLDAAKACNLNDNCKKLRSSYISICNREISPTERCNRRKCHKALRQFFDRVPSEYTYRMLFCSCQDQACAERRRQTILPSCSYEDKEKPNCLDLRGVCRTDHLCR

SEQ ID NO: 5884 - protein, 464 aa, Homo Sapiens; identical to SEQ ID NO: 5882

SEQ ID NO: 5885 - protein, 359 aa, Homo Sapiens
MILANVFCLFFFLGEEFYEASPYEPVTSRLSDIFRLASIFSGTGADPVVSAKSNHCLDAAKACNLNDNCKKLRSSYISICNREISPTERCNRRKCHKALRQFFDRVPSEYTYRMLFCSCQDQACAERRRQTILPSCSYEDKEKPNCLDLRGVCRTDHLCRSRLADFHANCRASYQTVTSCPADNYQACLGSYAGMIGFDMTPNYVDSSPTGIVVSPWCSCRGSGNMEEECEKFLRDFTENPCLRNAIQAFGNGTDVNVSPKGPSFQATQAPRVEKTPSLPDDLSDSTSLGTSVITTCTSVQEQGLKANNSKELSMCFTELTTNIIPGSNKVIKPNSGPSRARPSAALTVLSVLMLKLAL

SEQ ID NO: 5886 - protein, 62 aa, Homo Sapiens
MILANVFCLFFFLGPGPLLRRNGVQREKTCSYIQGRMMPEFSLGYEEGCPTESPWCALAKWV

SEQ ID NO: 5887 - protein, 331 aa, Homo Sapiens
MILANVFCLFFFLGTGADPVVSAKSNHCLDAAKACNLNDNCKKLRSSYISICNREISPTERCNRRKCHKALRQFFDRVPSEYTYRMLFCSCQDQACAERRRQTILPSCSYEDKEKPNCLDLRGVCRTDHLCRSRLADFHANCRASYQTVTSCPADNYQACLGSYAGMIGFDMTPNYVDSSPTGIVVSPWCSCRGSGNMEEECEKFLRDFTENPCLRNAIQAFGNGTDVNVSPKGPSFQATQAPRVEKTPSLPDDLSDSTSLGTSVITTCTSVQEQGLKANNSKELSMCFTELTTNIIPGSNKVIKPNSGPSRARPSAALTVLSVLMLKLAL

SEQ ID NO: 5888 - protein, 74 aa, Homo Sapiens
MLANKECQAALEVLQESPLYDCRCKRGMKKELQCLQIYWSIHLGLTEGEEFYEASPYEPVTSRLSDIFRLASIF

SEQ ID NO: 5889 - protein, 299 aa, Homo Sapiens
MVRCLGPALLLLLLLGSASSVGGNRCVDAAEACTADARCQRLRSEYVAQCLGRAAQGGCPRARCRRALRRFFARGPPALTHALLFCPCAGPACAERRRQTFVPSCAFSGPGPAPPSCLEPLNFCERSRVCRCARAAAGPWRGWGRGLSPAHRPPAAQASPPGLSGLVHPSAQRPRRLPAGPGRPLPARLRGPRGVPAGTAVTPNYVDNVSARVAPWCDCGASGNRREDCEAFRGLFTRNRCLDGAIQAFASGWPPVLLDQLNPQGDPEHSLLQVSSTGRALERRSLLSILPVLALPALL

SEQ ID NO: 5890 - protein, 182 aa, Homo Sapiens
MVRCLGPALLLLLLLGSASSVGGNRCVDAAEACTADARCQRLRSEYVAQCLGRAAQGGCPRARCRRALRRFFARGPPALTHALLFCPCAGPACAERRRQTFVPSCAFSGPGPAPPSCLEPLNFCERSRVCRPRLLAFQVSCTPAPSAPDGCLLDQGARCLRAYAGLVGSPQAPPSPLTTWTT

SEQ ID NO: 5891 - protein, 269 aa, Homo Sapiens
MVRCLGPALLLLLLLGSASSVGGNRCVDAAEACTADARCQRLRSEYVAQCLGRAAQGGCPRARCRRALRRFFARGPPALTHALLFCPCAGPACAERRRQTFVPSCAFSGPGPAPPSCLEPLNFCERSRVCRPRLLAFQVSCTPAPSAPDGCLLDQGARCLRAYAGLVGTAVTPNYVDNVSARVAPWCDCGASGNRREDCEAFRGLFTRNRCLDGAIQAFASGWPPVLLDQLNPQGDPEHSLLQVSSTGRALERRSLLSILPVLALPALL

SEQ ID NO: 5892 - protein, 59 aa, Homo Sapiens
MAATAVAAAVAGTESAQGPPGPAASLELWLNKATDPSMSEQDWSAIQNFCEQVNTDPNG

SEQ ID NO: 5893 - protein, 59 aa, Homo Sapiens; identical to SEQ ID NO: 5892

SEQ ID NO: 5894 - protein, 59 aa, Homo Sapiens; identical to SEQ ID NO: 5892

SEQ ID NO: 5895 - protein, 117 aa, Homo Sapiens
MAATAVAAAVAGTESAQGPPGPAASLELWLNKATDPSMSEQDWSAIQNFCEQVNTDPNGPTHAPWLLAHKIQSPQEKEALYALTPGGEPGTTGFPPSPGGPVSVQVLEMCMNHCGEK

SEQ ID NO: 5896 - protein, 613 aa, Homo Sapiens
MAATAVAAAVAGTESAQGPPGPAASLELWLNKATDPSMSEQDWSAIQNFCEQVNTDPNGPTHAPWLLAHKIQSPQEKEALYALTVLEMCMNHCGEKFHSEVAKFRFLNELIKVLSPKYLGSWATGKVKGRVIEILFSWTVWFPEDIKIRDAYQMLKKQGIIKQDPKLPVDKILPPPSPWPKSSIFDADEEKSKLLTRLLKSNHPEDLQAANRLIKNLVKEEQEKSEKVSKRVSAVEEVRSHVKVLQEMLSMYRRPGQAPPDQEALQVVYERCEKLRPTLFRLASDTTDDDDALAEILQANDLLTQGVLLYKQVMEGRVTFGNRVTSSLGDIPVSRVFQNPAGCMKTCPLIDLEVDNGPAQMGTVVPSLLHQDLAALGISDAPVTGMVSGQNCCEEKRNPSSSTLPGGGVQNPSADRNLLDLLSAQPAPCPLNYVSQKSVPKEVPPGTKSSPGWSWEAGPLAPSPSSQNTPLAQVFVPLESVKPSSLPPLIVYDRNGFRILLHFSQTGAPGHPEVQVLLLTMMSTAPQPVWDIMFQVAVPKSMRVKLQPASSSKLPAFSPLMPPAVISQMLLLDNPHKEPIRLRYKLTFNQGGQPFSEVGEVKDFPDLAVLGAA

SEQ ID NO: 5897 - protein, 223 aa, Homo Sapiens
MAATAVAAAVAGTESAQGPPGPAASLELWLNKATDPSMSEQDWSAIQNFCEQVNTDPNGPTHAPWLLAHKIQSPQEKEALYALTVLEMCMNHCGEKFHSEVAKFRFLNELIKVLSPKYLGSWATGKVKGRVIEILFSWTVWFPEDIKIRDAYQMLKKQGIIKQDPKLPVDKILPPPSPWPKSSIFDADEEKSKLLTRLLKSNHPEDLQAAVLKVAVVYGITPF

SEQ ID NO: 5898 - protein, 49 aa, Homo Sapiens
MAATAVAAAVAGTESAQGPPGPAASLELWLSDHRPKHVGTGLVSYPEFL

SEQ ID NO: 5899 - protein, 125 aa, Homo Sapiens
MVKLPFSLSLQLANSCPSPEDKATDPSMSEQDWSAIQNFCEQVNTDPNGPTHAPWLLAHKIQSPQEKEALYALTVLEMCMNHCGEKFHSEVAKFRFLNELIKVLSPKYLGSWATGKVKGRVIEIL

SEQ ID NO: 5900 - protein, 129 aa, Homo Sapiens
  misc_feature (1)..(1): Xaa can be any naturally occurring amino acid
XAVAGTESAQGPPGPAASLELWLNKATDPSMSEQDWSAIQNFCEQVNTDPNGPTHAPWLLAHKIQSPQEKEALYALTCPHRLEAGLALVPAQSPASDYQPGGEPGTTGFPPSPGGPVSVQVLEMCMNHC

SEQ ID NO: 5901 - protein, 318 aa, Homo Sapiens
MASPGCLLCVLGLLLCGAASLELSRPHGDTAKKPIIGILMQKCRNKVMKNYGRYYIAASYVKYLESAGARVVPVRLDLTEKDYEILFKSINGILFPGGSVDLRRSDYAKVAKIFYNLSIQSFDDGDYFPVWGTCLGFEELSLLISGECLLTATDTVDVAMPLNFTGGQLHSRMFQNFPTELLLSLAVEPLTANFHKWSLSVKNFTMNEKLKKFFNVLTTNTDGKIEFISTMEGYKYPVYGVQWHPEKAPYEWKNLDGISHAPNAVKTAFYLAEFFVNEARKNNHHFKSESEEEKALIYQFSPIYTGNISSFQQCYIFD

SEQ ID NO: 5902 - protein, 30 aa, Homo Sapiens
MKKKLVVLGLLAVVLVLVIVGLCLWLPSAS

SEQ ID NO: 5903 - protein, 37 aa, Homo Sapiens
MKKKLVVLGLLAVVLVLVIVGLCLWLPSASKEPDNHV

SEQ ID NO: 5904 - protein, 68 aa, Homo Sapiens
MKKKLVVLGLLAVVLVLVIVGLCLWLPSASKEPDNHVYTRAAVAADAKQCSKIGRDALRDGGSAVDAA

SEQ ID NO: 5905 - protein, 80 aa, Homo Sapiens
MKKKLVVLGLLAVVLVLVIVGLCLWLPSASKEPDNHVYTRAAVAADAKQCSKIGRDALRDGGSAVDAAIAALLCVGLMNA

SEQ ID NO: 5906 - protein, 98 aa, Homo Sapiens
MKKKLVVLGLLAVVLVLVIVGLCLWLPSASKEPDNHVYTRAAVAADAKQCSKIGRDALRDGGSAVDAAIAALLCVGLMNAHSMGIGGGLFLTIYNSTT

SEQ ID NO: 5907 - protein, 109 aa, Homo Sapiens
MKKKLVVLGLLAVVLVLVIVGLCLWLPSASKEPDNHVYTRAAVAADAKQCSKIGRDALRDGGSAVDAAIAALLCVGLMNAHSMGIGGGLFLTIYNSTTRKAEVINAREV

SEQ ID NO: 5908 - protein, 111 aa, Homo Sapiens
MKKKLVVLGLLAVVLVLVIVGLCLWLPSASKEPDNHVYTRAAVAADAKQCSKIGRDALRDGGSAVDAAIAALLCVGLMNAHSMGIGGGLFLTIYNSTTRKAEVINAREVAP

SEQ ID NO: 5909 - protein, 116 aa, Homo Sapiens
MKKKLVVLGLLAVVLVLVIVGLCLWLPSASKEPDNHVYTRAAVAADAKQCSKIGRDALRDGGSAVDAAIAALLCVGLMNAHSMGIGGGLFLTIYNSTTRKAEVINAREVAPRLAFA

SEQ ID NO: 5910 - protein, 120 aa, Homo Sapiens
MKKKLVVLGLLAVVLVLVIVGLCLWLPSASKEPDNHVYTRAAVAADAKQCSKIGRDALRDGGSAVDAAIAALLCVGLMNAHSMGIGGGLFLTIYNSTTRKAEVINAREVAPRLAFATMFN

SEQ ID NO: 5911 - protein, 126 aa, Homo Sapiens
MKKKLVVLGLLAVVLVLVIVGLCLWLPSASKEPDNHVYTRAAVAADAKQCSKIGRDALRDGGSAVDAAIAALLCVGLMNAHSMGIGGGLFLTIYNSTTRKAEVINAREVAPRLAFATMFNSSEQSQ

SEQ ID NO: 5912 - protein, 126 aa, Homo Sapiens; identical to SEQ ID NO: 5911

SEQ ID NO: 5913 - protein, 127 aa, Homo Sapiens
MKKKLVVLGLLAVVLVLVIVGLCLWLPSASKEPDNHVYTRAAVAADAKQCSKIGRDALRDGGSAVDAAIAALLCVGLMNAHSMGIGGGLFLTIYNSTTRKAEVINAREVAPRLAFATMFNSSEQSQK

SEQ ID NO: 5914 - protein, 174 aa, Homo Sapiens
MKKKLVVLGLLAVVLVLVIVGLCLWLPSASKEPDNHVYTRAAVAADAKQCSKIGRDALRDGGSAVDAAIAALLCVGLMNAHSMGIGGGLFLTIYNSTTRKAEVINAREVAPRLAFATMFNSSEQSQKGGLSVAVPGEIRGYELAHQRHGRLPWARLFQPSIQLARQGFPVGKGL

SEQ ID NO: 5915 - protein, 569 aa, Homo Sapiens
MKKKLVVLGLLAVVLVLVIVGLCLWLPSASKEPDNHVYTRAAVAADAKQCSKIGRDALRDGGSAVDAAIAALLCVGLMNAHSMGIGGGLFLTIYNSTTRKAEVINAREVAPRLAFATMFNSSEQSQKGGLSVAVPGEIRGYELAHQRHGRLPWARLFQPSIQLARQGFPVGKGLAAALENKRTVIEQQPVLCEVFCRDRKVLREGERLTLPQLADTYETLAIEGAQAFYNGSLTAQIVKDIQAAGGIVTAEDLNNYRAELIEHPLNISLGDVVLYMPSAPLSGPVLALILNILKGYNFSRESVESPEQKGLTYHRIVEAFRFAYAKRTLLGDPKFVDVTEVVRNMTSEFFAAQLRAQISDDTTHPISYYKPEFYTPDDGGTAHLSVVAEDGSAVSATSTINLYFGSKVRSPVSGILFNNEMDDFSSPSITNEFGVPPSPANFIQPGKQPLSSMCPTIMVGQDGQVRMVVGAAGGTQITTATALAIIYNLWFGYDVKRAVEEPRLHNQLLPNVTTVERNIDQAVTAALETRHHHTQIASTFIAVVQAIVRTAGGWAAASDSRKGGEPAGY

SEQ ID NO: 5916 - protein, 366 aa, Homo Sapiens
MKKKLVVLGLLAVVLVLVIVGLCLWLPSASKEPDNHVYTRAAVAADAKQCSKIGRDALRDGGSAVDAAIAALLCVGLMNAHSMGIGGGLFLTIYNSTTRKAEVINAREVAPRLAFATMFNSSEQSQKGGLSVAVPGEIRGYELAHQRHGRLPWARLFQPSIQLARQGFPVGKGLAAALENKRTVIEQQPVLCEVFCRDRKVLREGERLTLPQLADTYETLAIEGAQAFYNGSLTAQIVKDIQAAGGIVTAEDLNNYRAELIEHPLNISLGDVVLYMPSAPLSGPVLALILNILKGYNFSRESVESPEQKGLTYHRIVEAFRFAYAKRTLLGDPKFVDVTEASSGVSAGGPQHDLRVLRCPAPGPDL

SEQ ID NO: 5917 - protein, 463 aa, Homo Sapiens
MKKKLVVLGLLAVVLVLVIVGLCLWLPSASKEPDNHVYTRAAVAADAKQCSKIGRDALRDGGSAVDAAIAALLCVGLMNAHSMGIGGGLFLTIYNSTTRKAEVINAREVAPRLAFATMFNSSEQSQKGGLSVAVPGEIRGYELAHQRHGRLPWARLFQPSIQLARQGFPVGKGLAAALENKRTVIEQQPVLCEVFCRDRKVLREGERLTLPQLADTYETLAIEGAQAFYNGSLTAQIVKDIQAAGGIVTAEDLNNYRAELIEHPLNISLGDVVLYMPSAPLSGPVLALILNILKGYNFSRESVESPEQKGLTYHRIVEAFRFAYAKRTLLGDPKFVDVTEVVRNMTSEFFAAQLRAQISDDTTHPISYYKPEFYTPDDGGTAHLSVVAEDGSAVSATSTINLYFGSKVRSPVSGILFNNEMDDFSSPSITNEFGVPPSPANFIQPGKQPLSSMCPTIMVGQDG

SEQ ID NO: 5918 - protein, 569 aa, Homo Sapiens; identical to SEQ ID NO: 5915

SEQ ID NO: 5919 - protein, 569 aa, Homo Sapiens; identical to SEQ ID NO: 5915

SEQ ID NO: 5920 - protein, 218 aa, Homo Sapiens
MTSEFFAAQLRAQISDDTTHPISYYKPEFYTPDDGGTAHLSVVAEDGSAVSATSTINLYFGSKVRSPVSGILFNNEMDDFSSPSITNEFGVPPSPANFIQPGKQPLSSMCPTIMVGQDGQPPSHADHTPMPQAIIYNLWFGYDVKRAVEEPRLHNQLLPNVTTVERNIDQAVTAALETRHHHTQIASTFIAVVQAIVRTAGGWAAASDSRKGGEPAGY

SEQ ID NO: 5921 - protein, 225 aa, Homo Sapiens
MTSEFFAAQLRAQISDDTTHPISYYKPEFYTPDDGGTAHLSVVAEDGSAVSATSTINLYFGSKVRSPVSGILFNNEMDDFSSPSITNEFGVPPSPANFIQPGKQPLSSMCPTIMVGQDGQVRMVVGAAGGTQITTATALAIIYNLWFGYDVKRAVEEPRLHNQLLPNVTTVERNIDQAVTAALETRHHHTQIASTFIAVVQAIVRTAGGWAAASDSRKGGEPAGY

SEQ ID NO: 5922 - protein, 225 aa, Homo Sapiens; identical to SEQ ID NO: 5921

SEQ ID NO: 5923 - protein, 225 aa, Homo Sapiens; identical to SEQ ID NO: 5921

SEQ ID NO: 5924 - protein, 252 aa, Homo Sapiens
MTSEFFAAQLRAQISDDTTHPISYYKPEFYTPDDGGTAHLSVVAEDGSAVSATSTINLYFGSKVRSPVSGILFNNEMDDFSSPSITNEFGVPPSPANFIQPGKQPLSSMCPTIMVGQDGQVRMVVGAAGGTQITTATALVCVTPFLPGRAHPAQPPSHADHTPMPQAIIYNLWFGYDVKRAVEEPRLHNQLLPNVTTVERNIDQAVTAALETRHHHTQIASTFIAVVQAIVRTAGGWAAASDSRKGGEPAGY

SEQ ID NO: 5925 - protein, 554 aa, Homo Sapiens
MARGYGATVSLVLLGLGLALAVIVLAVVLSRHQAPCGPQAFAHAAVAADSKVCSDIGRAILQQQGSPVDATIAALVCTSVVNPQSMGLGGGVIFTIYNVTTGAQWIGVPGELRGYAEAHRRHGRLPWAQLFQPTIALLRGGHVVAPVLSRFLHNSILRPSLQASTLRQLFFNGTEPLRPQDPLPWPALATTLETVATEGVEVFYTGRLGQMLVEDIAKEGSQLTLQDLAKFQPEVVDALEVPLGDYTLYSPPPPAGGAILSFILNVLRGFNFSTESMARPEGRVNVYHHLVETLKFAKGQRWRLGDPRSHPKLQNASRDLLGETLAQLIRQQIDGRGDHQLSHYSLAEAWGHGTGTSHVSVLGEDGSAVAATSTINTPFGAMVYSPRTGIILNNELLDLCERCPRGSGTTPSPVSGDRVGGAPGRCWPPVPGERSPSSMVPSILINKAQGSKLVIGGAGGELIISAVAQAIMSKLWLGFDLRAAIAAPILHVNSKGCVEYEPNFSQEVQRGLQDRGQNQTQRPFFLNVVQAVSQEGACVYAVSDLRKSGEAAGY

SEQ ID NO: 5926 - protein, 586 aa, Homo Sapiens
MARGYGATVSLVLLGLGLALAVIVLAVVLSRHQAPCGPQAFAHAAVAADSKVCSDIGRAILQQQGSPVDATIAALVCTSVVNPQSMGLGGGVIFTIYNVTTGKVEVINARETVPASHAPSLLDQCAQALPLGTGAQWIGVPGELRGYAEAHRRHGRLPWAQLFQPTIALLRGGHVVAPVLSRFLHNSILRPSLQASTLRQLFFNGTEPLRPQDPLPWPALATTLETVATEGVEVFYTGRLGQMLVEDIAKEGSQLTLQDLAKFQPEVVDALEVPLGDYTLYSPPPPAGGAILSFILNVLRGFNFSTESMARPEGRVNVYHHLVETLKFAKGQRWRLGDPRSHPKLQNASRDLLGETLAQLIRQQIDGRGDHQLSHYSLAEAWGHGTGTSHVSVLGEDGSAVAATSTINTPFGAMVYSPRTGIILNNELLDLCERCPRGSGTTPSPVSGDRVGGAPGRCWPPVPGERSPSSMVPSILINKAQGSKLVIGGAGGELIISAVAQAIMSKLWLGFDLRAAIAAPILHVNSKGCVEYEPNFSQEVQRGLQDRGQNQTQRPFFLNVVQAVSQEGACVYAVSDLRKSGEAAGY

SEQ ID NO: 5927 - protein, 587 aa, Homo Sapiens
MARGYGATVSLVLLGLGLALAVIVLAVVLSRHQAPCGPQAFAHAAVAADSKVCSDIGRAILQQQGSPVDATIAALVCTSVVNPQSMGLGGGVIFTIYNVTTGKVEVINARETVPASHAPSLLDQCAQALPLGTGAQWIGVPGELRGYAEAHRRHGRLPWAQLFQPTIALLRGGHVVAPVLSRFLHNSILRPSLQASTLRQLFFNGTEPLRPQDPLPWPALATTLETVATEGVEVFYTGRLGQMLVEDIAKEGSQLTLQDLAKFQPEVVDALEVPLGDYTLYSPPPPAGGAILSFILNVLRGFNFSTESMARPEGRVNVYHHLVETLKFAKGQRWRLGDPRSHPKLQNASRDLLGETLAQLIRQQIDGRGDHQLSHYSLAEAWGHGTGTSHVSVLGEDGSAVAATSTINTPFGAMVYSPRTGIILNNELLDLCERCPRGSGTTPSPAVSGDRVGGAPGRCWPPVPGERSPSSMVPSILINKAQGSKLVIGGAGGELIISAVAQAIMSKLWLGFDLRAAIAAPILHVNSKGCVEYEPNFSQEVQRGLQDRGQNQTQRPFFLNVVQAVSQEGACVYAVSDLRKSGEAAGY

SEQ ID NO: 5928 - protein, 73 aa, Homo Sapiens
MARGYGATVSLVLLGLGLALAVIVLAVVLSRHQAPCGPQAFAHAAVAADSKVCSDIGRGPVDRGARGAPWLCR

SEQ ID NO: 5929 - protein, 220 aa, Homo Sapiens
  misc_feature (1)..(1): Xaa can be any naturally occurring amino acid
XSAVAATSTINTPFGAMVYSPRTGIILNNELLDLCERCPRGSGTTPSPVSGDRVGGAPGRCWPPVPGERSPSSMVPSILINKAQGSKLVIGGAGGELIISAVAQAIMSKLWLGFDLRAAIAAPILHVNSKGCVEYEPNFSQKQDLAALPRLVSNSWPQVILLPQPPKLLALQEVQRGLQDRGQNQTQRPFFLNVVQAVSQEGACVYAVSDLRKSGEAAGY

SEQ ID NO: 5930 - protein, 30 aa, Homo Sapiens
MATEAGRWQPPDWADLQADLQQVRHKLTQR

SEQ ID NO: 5931 - protein, 217 aa, Homo Sapiens
MATGSRTSLLLAFGLLCLPWLQEGSAFPTIPLSRLFDNAMLRAHRLHQLAFDTYQEFEEAYIPKEQKYSFLQNPQTSLCFSESIPTPSNREETQQKSNLELLRISLLLIQSWLEPVQFLRSVFANSLVYGASDSNVYDLLKDLEEGIQTLMGRLEDGSPRTGQIFKQTYSKFDTNSHNDDALLKNYGLLYCFRKDMDKVETFLRIVQCRSVEGSCGF

SEQ ID NO: 5932 - protein, 177 aa, Homo Sapiens
MATGSRTSLLLAFGLLCLPWLQEGSAFPTIPLSRLFDNAMLRAHRLHQLAFDTYQEFNLELLRISLLLIQSWLEPVQFLRSVFANSLVYGASDSNVYDLLKDLEEGIQTLMGRLEDGSPRTGQIFKQTYSKFDTNSHNDDALLKNYGLLYCFRKDMDKVETFLRIVQCRSVEGSCGF

SEQ ID NO: 5933 - protein, 202 aa, Homo Sapiens
MATGSRTSLLLAFGLLCLPWLQEGSAFPTIPLSRLFDNAMLRAHRLHQLAFDTYQEFNPQTSLCFSESIPTPSNREETQQKSNLELLRISLLLIQSWLEPVQFLRSVFANSLVYGASDSNVYDLLKDLEEGIQTLMGRLEDGSPRTGQIFKQTYSKFDTNSHNDDALLKNYGLLYCFRKDMDKVETFLRIVQCRSVEGSCGF

SEQ ID NO: 5934 - protein, 122 aa, Homo Sapiens
MATGSRTSLLLAFGLLCLPWLQEGSAFPTIPLSRLFDNAMLRAHRLHQLAFDTYQEFRLEDGSPRTGQIFKQTYSKFDTNSHNDDALLKNYGLLYCFRKDMDKVETFLRIVQCRSVEGSCGF

SEQ ID NO: 5935 - protein, 245 aa, Homo Sapiens
MAAGSRTSLLLAFGLLCLSWLQEGSAFPTIPLSRLFDNAMLRARRLYQLAYDTYQEFEEAYILKEQKYSFLQNPQTSLCFSESIPTPSNRVKTQQKSNLELLRISLLLIQSWLEPVQLLRSVFANSLVYGASDSNVYRHLKDLEEGIQTLIGWKMAAPGLGRSSISPTASLTQNRTTMTHCSRTTGCSTASGRTWTRSRHSCASCSAALWRAAVASSCPGGIPVTPPQCLSWSWKVLLQCPPALS

SEQ ID NO: 5936 - protein, 217 aa, Homo Sapiens
MAAGSRTSLLLAFGLLCLSWLQEGSAFPTIPLSRLFDNAMLRARRLYQLAYDTYQEFEEAYILKEQKYSFLQNPQTSLCFSESIPTPSNRVKTQQKSNLELLRISLLLIQSWLEPVQLLRSVFANSLVYGASDSNVYRHLKDLEEGIQTLMWRLEDGSPRTGQIFNQSYSKFDTKSHNDDALLKNYGLLYCFRKDMDKVETFLRIVQCRSVEGSCGF

SEQ ID NO: 5937 - protein, 256 aa, Homo Sapiens
MAAGSRTSLLLAFGLLCLSWLQEGSAFPTIPLSRLFDNAMLRARRLYQLAYDTYQEFEEAYILKEQKYSFLQNPQTSLCFSESIPTPSNRVKTQQKSNLELLRISLLLIQSWLEPVQLLRSVFANSLVYGASDSNVYRHLKDLEEGIQTLMWVRVAPGIPNPGAPLASRDWGEKHCCPLFSSQALTQENSPYSSFPLVNPPGLSLQPGGEGGKWMNERGREQCPSAWPLLLFLHFAEAGRWQPPDWADLQSVLQQV

SEQ ID NO: 5938 - protein, 177 aa, Homo Sapiens
MAAGSRTSLLLAFGLLCLSWLQEGSAFPTIPLSRLFDNAMLRARRLYQLAYDTYQEFNLELLRISLLLIQSWLEPVQLLRSVFANSLVYGASDSNVYRHLKDLEEGIQTLMWRLEDGSPRTGQIFNQSYSKFDTKSHNDDALLKNYGLLYCFRKDMDKVETFLRIVQCRSVEGSCGF

SEQ ID NO: 5939 - protein, 202 aa, Homo Sapiens
MAAGSRTSLLLAFGLLCLSWLQEGSAFPTIPLSRLFDNAMLRARRLYQLAYDTYQEFNPQTSLCFSESIPTPSNRVKTQQKSNLELLRISLLLIQSWLEPVQLLRSVFANSLVYGASDSNVYRHLKDLEEGIQTLMWRLEDGSPRTGQIFNQSYSKFDTKSHNDDALLKNYGLLYCFRKDMDKVETFLRIVQCRSVEGSCGF

SEQ ID NO: 5940 - protein, 130 aa, Homo Sapiens
MLLWPLLLLLLLLPTLALLRQQRSQDARLSWLAGLQHRVAWGALVWAATWQRRRLEQSTLHVHQSQQQALRWCLQGAQRPHCSLRRSTDISTFRNHLPLTKASQTQQEDSGEQPLPPTSNQDLGEASLQA

SEQ ID NO: 5941 - protein, 146 aa, Homo Sapiens
MLLWPLLLLLLLLPTLALLRQQRSQDARLSWLAGLQHRVAWGALVWAATWQRRRLEQSTLHVHQSQQQALRWCLQGAQRPHCSLRRSTDISTFRNHLPLTKASQTQQEDSGEQPLPPTSNQDLGEASLQATLLGLAALNKAYPEVL

SEQ ID NO: 5942 - protein, 530 aa, Homo Sapiens
MLLWPLLLLLLLLPTLALLRQQRSQDARLSWLAGLQHRVAWGALVWAATWQRRRLEQSTLHVHQSQQQALRWCLQGAQRPHCSLRRSTDISTFRNHLPLTKASQTQQEDSGEQPLPPTSNQDLGEASLQATLLGLAALNKAYPEVLAQGRTARVTLTSPWPRPLPWPGNTLGQVGTPGTKDPRALLLDALRSPGLRALEAGTAVELLDVFLGLETDGEELAGAIAAGNPGAPLRERAAELREALEQGPRGLALRLWPKLQVVVTLDAGGQAEAVAALGALWCQGLAFFSPAYAASGGVLGLNLQPEQPHGLYLLPPGAPFIELLPVKEGTQEEAASTLLLAEAQQGKEYELVLTDRASLTRCRLGDVVRVVGAYNQCPVVRFICRLDQTLSVRGEDIGEDLFSEALGRAVGQWAGAKLLDHGCVESSILDSSAGSAPHYEVFVALRGLRNLSEENRDKLDHCLQEASPRYKSLRFWGSVGPARVHLVGQGAFRALRAALAACPSSPFPPAMPRVLRHRHLAQCLQERVVS

SEQ ID NO: 5943 - protein, 474 aa, Homo Sapiens
MLLWPLLLLLLLLPTLALLRQQRSQDARLSWLAGLQHRVAWGALVWAATWQRRRLEQSTLHVHQSQQQALRWCLQGAQRPHCSLRRSTDISTFRNHLPLTKASQTQQEDSGEQPLPPTSNQDLGEASLQATLLGLAALNKAYPEVLAQGRTARVTLTSPWPRPLPWPGNTLGQVGTPGTKDPRALLLDALRSPGLRALEAGTAVELLDVFLGLETDGEELAGAIAAGNPGAPLRERAAELREALEQGPRGLALRLWPKLQVVVTLDAGGQAEAVAALGALWCQGLAFFSPAYAASGGVLGLNLQPEQPHGLYLLPPGAPFIELLPVKEGTQEEAASTLLLAEAQQGKEYELVLTDRASLTRCRLGDVVRVVGAYNQCPVVRFICRLDQTLSVRGEDIGEDLFSEALGRAVGQWAGAKLLDHGCVESSILEWGRTDRAEDTRLGSCPFTGSMCAHGVYSQIPLRALLPTTRCLWR

SEQ ID NO: 5944 - protein, 474 aa, Homo Sapiens; identical to SEQ ID NO: 5943

SEQ ID NO: 5945 - protein, 530 aa, Homo Sapiens; identical to SEQ ID NO: 5942

SEQ ID NO: 5946 - protein, 479 aa, Homo Sapiens
MLLWPLLLLLLLLPTLALLRQQRSQDARLSWLAGLQHRVAWGALVWAATWQRRRLEQSTLHVHQSQQQALRWCLQGAQRPHCSLRRSTDISTFRNHLPLTKASQTQQEDSGEQPLPPTSNQDLGEASLQATLLGLAALNKAYPEVLAQGRTARVTLTSPWPRPLPWPGNTLGQVGTPGTKDPRALLLDALRSPGLRALEAGTAVELLDVFLGLETDGEELAGAIAAGNPGAPLRERAAELREALEQGPRGLALRLWPKLQVVVTLDAGGQAEAVAALGALWCQGLAFFSPAYAASGGVLGLNLQPEQPHGLYLLPPGAPFIELLPVKEGTQEEAASTLLLAEAQQGKEYELVLTDRASLTRCRLGDVVRVVGAYNQCPVVRFICRLDQTLSVRGEDIGEDLFSEALGRAVGQWAGAKLLDHGCVESSILDSSAGSAPHYEVFVALRGLRNLSEENRDKILASGSALGKREWTPAQPFPH

SEQ ID NO: 5947 - protein, 112 aa, Homo Sapiens
MLLWPLLLLLLLLPTLALLRQQRSQDARLSWLAGLQHRVAWGALVWAATWQRRRLEQSTLHVHQSQQQALRWCLQGAQRPHCSLRRSTGSHQSCLKLLGNWLPEAFLLSLGL

SEQ ID NO: 5948 - protein, 107 aa, Homo Sapiens
MPLWVFFFVILTLSNSSHCSPPPPLTLRMRRYADAIFTNSYRKVLGQLSARKLLQDIMSRQQGESNQERGARARLGRQVDSMWAEQKQMELESILVALLQKHRNSQG

SEQ ID NO: 5949 - protein, 108 aa, Homo Sapiens
MPLWVFFFVILTLSNSSHCSPPPPLTLRMRRYADAIFTNSYRKVLGQLSARKLLQDIMSRQQGESNQERGARARLGRQVDSMWAEQKQMELESILVALLQKHSRNSQG

SEQ ID NO: 5950 - protein, 108 aa, Homo Sapiens; identical to SEQ ID NO: 5949

SEQ ID NO: 5951 - protein, 207 aa, Homo Sapiens
MAMGEGAGQVGERGGSMQGLCGRLPFRHHDQLQLAVGRSRLPELPPGLHLPQLKESLLVAGSRWLGAARALHWHVGELQTGLRGHRVLGPGRHLPLLVDHQRAHCPLGRGELWAFSQYYPHPGEETGASSGQPPYPVSVLASLQVDTFPDPTLWNSLHHLQLPARQCWPGHPPPPGAGTGFLPGIRRLGLRCRFLGRSFDCQPPRGS

SEQ ID NO: 5952 - protein, 423 aa, Homo Sapiens
MDRRMWGAHVFCVLSPLPTVLGHMHPECDFITQLREDESACLQAAEEMPNTTLGCPATWDGLLCWPTAGSGEWVTLPCPDFFSHFSSESGAVKRDCTITGWSEPFPPYPVACPVPLELLAEEESYFSTVKIIYTVGHSISIVALFVAITILVALRRLHCPRNYVHTQLFTTFILKAGAVFLKDAALFHSDDTDHCSFSTVLCKVSVAASHFATMTNFSWLLAEAVYLNCLLASTSPSSRRAFWWLVLAGWGLPVLFTGTWVSCKLAFEDIACWDLDDTSPYWWIIKGPIVLSVGVNFGLFLNIIRILVRKLEPAQGSLHTQSQYWRLSKSTLFLIPLFGIHYIIFNFLPDNAGLGIRLPLELGLGSFQGFIVAILYCFLNQEVRTEISRKWHGHDPELLPAWRTRAKWTTPSRSAAKVLTSMC

SEQ ID NO: 5953 - protein, 151 aa, Homo Sapiens
MLPFSTATTLTTAASPLAARALHWHVGELQTGLRGHRVLGPGRHLPLLVDHQRAHCPLGRGELWAFSQYYPHPGEETGASSGQPPYPVSVLASLQVDTFPDPTLWNSLHHLQLPARQCWPGHPPPPGAGTGFLPGLHCCHPLLLPQPRGED

SEQ ID NO: 5954 - protein, 145 aa, Homo Sapiens
MVPGTPSPLLGRGKELWLESLACLPGAVKRDCTITGWSEPFPPYPVACPVPLELLAEEESYFSTVKIIYTVGHSISIVALFVAITILVALRRLHCPRNYVHTQLFTTFILKAGAVFLKDAALFHSDDTDHCSFSTGCPCSSLARG

SEQ ID NO: 5955 - protein, 359 aa, Homo Sapiens
MVPGTPSPLLGRGKELWLESLACLPGAVKRDCTITGWSEPFPPYPVACPVPLELLAEEESYFSTVKIIYTVGHSISIVALFVAITILVALRRLHCPRNYVHTQLFTTFILKAGAVFLKDAALFHSDDTDHCSFSTVLCKVSVAASHFATMTNFSWLLAEAVYLNCLLASTSPSSRRAFWWLVLAGWGLPVLFTGTWVSCKLAFEDIACWDLDDTSPYWWIIKGPIVLSVGVNFGLFLNIIRILVRKLEPAQGSLHTQSQYWRLSKSTLFLIPLFGIHYIIFNFLPDNAGLGIRLPLELGLGSFQGFIVAILYCFLNQEVRTEISRKWHGHDPELLPAWRTRAKWTTPSRSAAKVLTSMC

SEQ ID NO: 5956 - protein, 68 aa, Homo Sapiens
MVPGTPSPLLGRGKELWLESLACLPGAVKRDCTITGWSEPFPPYPVACPVPLELLAEEGCPCSSLARG

SEQ ID NO: 5957 - protein, 66 aa, Homo Sapiens
MFTCWWSYLRSTLAAVPGEASRVQFNAPFDVGIKLSGVQYQQHSQALGKFLQDILWEEAKEAPADK

SEQ ID NO: 5958 - protein, 105 aa, Homo Sapiens
MFTCWWSYLRSTLAAVPGEASRVQQRKESKKPPAKLQPRALAGWLRPEDGGQAEGAEDELEVRFNAPFDVGIKLSGVQYQQHSQALGKFLQDILWEEAKEAPADK

SEQ ID NO: 5959 - protein, 104 aa, Homo Sapiens
MFTCWWSYLRSTLAAVPGEASRVQRKESKKPPAKLQPRALAGWLRPEDGGQAEGAEDELEVRFNAPFDVGIKLSGVQYQQHSQALGKFLQDILWEEAKEAPADK

SEQ ID NO: 5960 - protein, 40 aa, Homo Sapiens
MFTCWWSYLRSTLAAVPGEASRVQRPQPTSDRPQALLTSL

SEQ ID NO: 5961 - protein, 33 aa, Homo Sapiens
MPSPGTVCSLLLLGMLWLDLAMAGSSFLSPEHQ

SEQ ID NO: 5962 - protein, 117 aa, Homo Sapiens
MPSPGTVCSLLLLGMLWLDLAMAGSSFLSPEHQRVQQRKESKKPPAKLQPRALAGWLRPEDGGQAEGAEDELEVRFNAPFDVGIKLSGVQYQQHSQALGKFLQDILWEEAKEAPADK

SEQ ID NO: 5963 - protein, 117 aa, Homo Sapiens; identical to SEQ ID NO: 5962

SEQ ID NO: 5964 - protein, 117 aa, Homo Sapiens; identical to SEQ ID NO: 5962

SEQ ID NO: 5965 - protein, 91 aa, Homo Sapiens
MPSPGTVCSLLLLGMLWLDLAMAGSSFLSPEHQRVQQRKESKKPPAKLQPRALAGWLRPEDGGQAEGAEDELEVRRPQPTSDRPQALLTSL

SEQ ID NO: 5966 - protein, 116 aa, Homo Sapiens
MPSPGTVCSLLLLGMLWLDLAMAGSSFLSPEHQRVQRKESKKPPAKLQPRALAGWLRPEDGGQAEGAEDELEVRFNAPFDVGIKLSGVQYQQHSQALGKFLQDILWEEAKEAPADK

SEQ ID NO: 5967 - protein, 116 aa, Homo Sapiens; identical to SEQ ID NO: 5966

SEQ ID NO: 5968 - protein, 48 aa, Homo Sapiens
MAWFALYLLSLLWATAGTSTQTQSSCCEYDVFPRRSGKQLPWGRGCDL

SEQ ID NO: 5969 - protein, 417 aa, Homo Sapiens
MAWFALYLLSLLWATAGTSTQTQSSCSVPSAQEPLVNGIQVLMENSVTSSAYPNPSILIAMNLAGAYNLKAQKLLTYQLMSSDNNDLTIGQLGLTIMALTSSCRDPGDKVSILQRQMENWAPSSPNAEASAFYGPSLAILALCQKNSEATLPIAVRFAKTLLANSSPFNVDTGAMATLALTCMYNKIPVGSEEGYRSLFGQVLKDIVEKISMKIKDNGIIGDIYSTGLAMQALSVTPEPSKKEWNCKKTTDMILNEIKQGKFHNPMSIAQILPSLKGKTYLDVPQVTCSPDHEVQPTLPSNPGPGPTSASNITVIYTINNQLRGVELLFNETINVSVKSGSVLLVVLEEAQRKNPMFKFETTMTSWGLVVSSINNIAENVNHKTYWQFLSGVTPLNEGVADYIPFNHEHITANFTQY

SEQ ID NO: 5970 - protein, 153 aa, Homo Sapiens
MVATKTFALLLLSLFLAVGLGEKKEGHFSALPSLPVGSHAKVSSPQPRGPRYAEGTFISDYSIAMDKIHQQDFVNWLLAQKGKKNDWKHNITQREARALELASQANRKEEEAVEPQSSPAKNPSDEDLLRDLLIQELLACLLDQTNLCRLRSR

SEQ ID NO: 5971 - protein, 199 aa, Homo Sapiens
MLAYSSVHCFREDKMKFTIVFAGLLGVFLAPALANYNINVNDDNNNAGSGQQSVSVNNEHNVANVDNNNGWDSWNSIWDYGNGFAATRLFQKKTCIVHKMNKEVMPSIQSLDALVKEKKLQGKGPGGPPPKGLMYSVNPNKVDDLSKFGKNIANMCRGIPTYMAEEMQEASLFFYSGTCYTTSVLWIVDISFCGDTVEN

SEQ ID NO: 5972 - protein, 184 aa, Homo Sapiens
MKILVAFLVVLTIFGIQSHGYEVFNIISPSNNGGNVQETVTIDNEKNTAIINIHAGSCSSTTIFDYKHGYIASRVLSRRACFILKMDHQNIPPLNNLQWYIYEKQALDNMFSSKYTWVKYNPLESLIKDVDWFLLGSPIEKLCKHIPLYKGEVVENTHNVGAGGCAKAGLLGILGISICADIHV

SEQ ID NO: 5973 - protein, 161 aa, Homo Sapiens
MKILVAFLVVLTIFGIQSHGYEVFNIISPSNNGGNVQETVTIDNEKNTAIINIHAGSCSSTTIFDYKHGYIASRVLSRRACFILKMDHQNIPPLNNLQWYIYEKQALDNMFSSKYTWVKYNPLESLIKDVDWFLLGSPIEKLCKHIPLYKGEVVENTREYQ

SEQ ID NO: 5974 - protein, 429 aa, Homo Sapiens
MQLRNPELHLGCALALRFLALVSWDIPGARALDNGLARTPTMGWLHWERFMCNLDCQEEPDSCISEKLFMEMAELMVSEGWKDAGYEYLCIDDCWMAPQRDSEGRLQADPQRFPHGIRQLANYVHSKGLKLGIYADVGNKTCAGFPGSFGYYDIDAQTFADWGVDLLKFDGCYCDSLENLADGYKHMSLALNRTGRSIVYSCEWPLYMWPFQKPNYTEIRQYCNHWRNFADIDDSWKSIKSILDWTSFNQERIVDVAGPGGWNDPDMLVIGNFGLSWNQQVTQMALWAIMAAPLFMSNDLRHISPQAKALLQDKDVIAINQDPLGKQGYQLRQGDNFEVWERPLSGLAWAVAMINRQEIGGPRSYTIAVASLGKGVACNPACFITQLLPVKRKLGFYEWTSRLRSHINPTGTVLLQLENTMQMSLKDLL

SEQ ID NO: 5975 - protein, 222 aa, Homo Sapiens
MQLRNPELHLGCALALRFLALVSWDIPGARALDNGLARTPTMGWLHWERFMCNLDCQEEPDSCISEKLFMEMAELMVSEGWKDAGYEYLCIDDCWMAPQRDSEGRLQADPQRFPHGIRQLANYVHSKGLKLGIYADVGNKTCAGFPGSFGYYDIDAQTFADWGVDLLKFDGCYCDSLENLADGYKHMSLALNRTGRSIVYSCEWPLYMWPFQKSSTLFGSIC

SEQ ID NO: 5976 - protein, 84 aa, Homo Sapiens
MFEIDYSRDSFLKDGQPFRYISGSIHYSRVPRFYWKDRLLKMKMAGLNAIQTLPGSCGQVVGSPSAQDEASPLSEWRASYNSAG

SEQ ID NO: 5977 - protein, 102 aa, Homo Sapiens
MFEIDYSRDSFLKDGQPFRYISGSIHYSRVPRFYWKDRLLKMKMAGLNAIQTYVPWNFHEPWPGQYQFSEDHDVEYFLRLAHELGLLVILRPGPYICAEWEM

SEQ ID NO: 5978 - protein, 647 aa, Homo Sapiens
MFEIDYSRDSFLKDGQPFRYISGSIHYSRVPRFYWKDRLLKMKMAGLNAIQTYVPWNFHEPWPGQYQFSEDHDVEYFLRLAHELGLLVILRPGPYICAEWEMGGLPAWLLEKESILLRSSDPDYLAAVDKWLGVLLPKMKPLLYQNGGPVITVQVENEYGSYFACDFDYLRFLQKRFRHHLGDDVVLFTTDGAHKTFLKCGALQGLYTTVDFGTGSNITDAFLSQRKCEPKGPLINSEFYTGWLDHWGQPHSTIKTEAVASSLYDILARGASVNLYMFIGGTNFAYWNGANSPYAAQPTSYDYDAPLSEAGDLTEKYFALRNIIQKFEKVPEGPIPPSTPKFAYGKVTLEKLKTVGAALDILCPSGPIKSLYPLTFIQVKQHYGFVLYRTTLPQDCSNPAPLSSPLNGVHDRAYVAVDGIPQGVLERNNVITLNITGKAGATLDLLVENMGRVNYGAYINDFKGLVSNLTLSSNILTDWTIFPLDTEDAVCSHLGGWGHRDSGHHDEAWAHNSSNYTLPAFYMGNFSIPSGIPDLPQDTFIQFPGWTKGQVWINGFNLGRYWPARGPQLTLFVPQHILMTSAPNTITVLELEWAPCSSDDPELCAVTFVDRPVIGSSVTYDHPSKPVEKRLMPPPPQKNKDSWLDHV

SEQ ID NO: 5979 - protein, 114 aa, Homo Sapiens
MGGLPAWLLEKESILLRSSDPDYLAAVDKWLGVLLPKMKPLLYQNGGPVITVQVENEYGSYFACDFDYLRFLQKRFRHHLGDDVVLFTTDGAHKTFLKCGALQGLYTTVDFGTG

SEQ ID NO: 5980 - protein, 41 aa, Homo Sapiens
MPGFLVRILPLLLVLLLLGPTRGLRITWQLWTSGWESFCPR

SEQ ID NO: 5981 - protein, 546 aa, Homo Sapiens
MPGFLVRILPLLLVLLLLGPTRGLRNATQRMFEIDYSRDSFLKDGQPFRYISGSIHYSRVPRFYWKDRLLKMKMAGLNAIQTLPGSCGQVVGSPSAQDEASPLSEWRASYNSAGSNITDAFLSQRKCEPKGPLINSEFYTGWLDHWGQPHSTIKTEAVASSLYDILARGASVNLYMFIGGTNFAYWNGANSPYAAQPTSYDYDAPLSEAGDLTEKYFALRNIIQKFEKVPEGPIPPSTPKFAYGKVTLEKLKTVGAALDILCPSGPIKSLYPLTFIQVKQHYGFVLYRTTLPQDCSNPAPLSSPLNGVHDRAYVAVDGIPQGVLERNNVITLNITGKAGATLDLLVENMGRVNYGAYINDFKGLVSNLTLSSNILTDWTIFPLDTEDAVCSHLGGWGHRDSGHHDEAWAHNSSNYTLPAFYMGNFSIPSGIPDLPQDTFIQFPGWTKGQVWINGFNLGRYWPARGPQLTLFVPQHILMTSAPNTITVLELEWAPCSSDDPELCAVTFVDRPVIGSSVTYDHPSKPVEKRLMPPPPQKNKDSWLDHV

SEQ ID NO: 5982 - protein, 677 aa, Homo Sapiens
MPGFLVRILPLLLVLLLLGPTRGLRNATQRMFEIDYSRDSFLKDGQPFRYISGSIHYSRVPRFYWKDRLLKMKMAGLNAIQTYVPWNFHEPWPGQYQFSEDHDVEYFLRLAHELGLLVILRPGPYICAEWEMGGLPAWLLEKESILLRSSDPDYLAAVDKWLGVLLPKMKPLLYQNGGPVITVQVENEYGSYFACDFDYLRFLQKRFRHHLGDDVVLFTTDGAHKTFLKCGALQGLYTTVDFGTGSNITDAFLSQRKCEPKGPLINSEFYTGWLDHWGQPHSTIKTEAVASSLYDILARGASVNLYMFIGGTNFAYWNGANSPYAAQPTSYDYDAPLSEAGDLTEKYFALRNIIQKFEKVPEGPIPPSTPKFAYGKVTLEKLKTVGAALDILCPSGPIKSLYPLTFIQVKQHYGFVLYRTTLPQDCSNPAPLSSPLNGVHDRAYVAVDGIPQGVLERNNVITLNITGKAGATLDLLVENMGRVNYGAYINDFKGLVSNLTLSSNILTDWTIFPLDTEDAVCSHLGGWGHRDSGHHDEAWAHNSSNYTLPAFYMGNFSIPSGIPDLPQDTFIQFPGWTKGQVWINGFNLGRYWPARGPQLTLFVPQHILMTSAPNTITVLELEWAPCSSDDPELCAVTFVDRPVIGSSVTYDHPSKPVEKRLMPPPPQKNKDSWLDHV

SEQ ID NO: 5983 - protein, 147 aa, Homo Sapiens
MPGFLVRILPLLLVLLLLGPTRGLRSRFLPWAFHLPRQAPKSQLPLHKRGTKTAPNEHASSNRSGRRRRRQQWNATQRMFEIDYSRDSFLKDGQPFRYISGSIHYSRVPRFYWKDRLLKMKMAGLNAIQTYVPWNFHEPWPGQYQFS

SEQ ID NO: 5984 - protein, 185 aa, Homo Sapiens
MPGFLVRILPLLLVLLLLGPTRGLRVENEYGSYFACDFDYLRFLQKRFRHHLGDDVVLFTTDGAHKTFLKCGALQGLYTTVDFGTGSNITDAFLSQRKCEPKGPLINSEFYTGWLDHWGQPHSTIKTEAVASSLYDILARGASVNLYMFIGGTNFAYWNGANSPYAAQPTSYDYDAPLSEAGDLT

SEQ ID NO: 5985 - protein, 9 aa, Homo Sapiens
MAPKKLSCL

SEQ ID NO: 5986 - protein, 26 aa, Homo Sapiens
MAPKKLSCLRSLLLPLSLTLLLPQAD

SEQ ID NO: 5987 - protein, 114 aa, Homo Sapiens
MAPKKLSCLRSLLLPLSLTLLLPQADTRSFVVDRGHDRFLLDGAPFRYVSGSLHYFRVPRVLWADRLLKMRWSGLNAIQFYVPWNYHEPQPGVYNFNGSRDLIAFLNEAALANL

SEQ ID NO: 5988 - protein, 564 aa, Homo Sapiens
MAPKKLSCLRSLLLPLSLTLLLPQADTRSFVVDRGHDRFLLDGAPFRYVSGSLHYFRVPRVLWADRLLKMRWSGLNAIQFYVPWNYHEPQPGVYNFNGSRDLIAFLNEAALANLLVILRPGPYICAEWEMGGLPSWLLRKPEIHLRTSDPADNMTKIFTLLRKYEPHGPLVNSEYYTGWLDYWGQNHSTRSVSAVTKGLENMLKLGASVNMYMFHGGTNFGYWNGADKKGRFLPITTSYDYDAPISEAGDPTPKLFALRDVISKFQEVPLGPLPPPSPKMMLGPVTLHLVGHLLAFLDLLCPRGPIHSILPMTFEAVKQDHGFMLYRTYMTHTIFEPTPFWVPNNGVHDRAYVMVDGVFQGVVERNMRDKLFLTGKLGSKLDILVENMGRLSFGSNSSDFKGLLKPPILGQTILTQWMMFPLKIDNLVKWWFPLQLPKWPYPQAPSGPTFYSKTFPILGSVGDTFLYLPGWTKGQVWINGFNLGRYWTKQGPQQTLYVPRFLLFPRGALNKITLLELEDVPLQPQVQFLDKPILNSTSTLHRTHINSLSADTLSASEPMELSGH

SEQ ID NO: 5989 - protein, 654 aa, Homo Sapiens
MAPKKLSCLRSLLLPLSLTLLLPQADTRSFVVDRGHDRFLLDGAPFRYVSGSLHYFRVPRVLWADRLLKMRWSGLNAIQFYVPWNYHEPQPGVYNFNGSRDLIAFLNEAALANLLVILRPGPYICAEWEMGGLPSWLLRKPEIHLRTSDPDFLAAVDSWFKVLLPKIYPWLYHNGGNIISIQVENEYGSYRACDFSYMRHLAGLFRALLGEKILLFTTDGPEGLKCGSLRGLYTTVDFGPADNMTKIFTLLRKYEPHGPLVNSEYYTGWLDYWGQNHSTRSVSAVTKGLENMLKLGASVNMYMFHGGTNFGYWNGADKKGRFLPITTSYDYDAPISEAGDPTPKLFALRDVISKFQEVPLGPLPPPSPKMMLGPVTLHLVGHLLAFLDLLCPRGPIHSILPMTFEAVKQDHGFMLYRTYMTHTIFEPTPFWVPNNGVHDRAYVMVDGVFQGVVERNMRDKLFLTGKLGSKLDILVENMGRLSFGSNSSDFKGLLKPPILGQTILTQWMMFPLKIDNLVKWWFPLQLPKWPYPQAPSGPTFYSKTFPILGSVGDTFLYLPGWTKGQVWINGFNLGRYWTKQGPQQTLYVPRFLLFPRGALNKITLLELEDVPLQPQVQFLDKPILNSTSTLHRTHINSLSADTLSASEPMELSGH

SEQ ID NO: 5990 - protein, 654 aa, Homo Sapiens; identical to SEQ ID NO: 5989

SEQ ID NO: 5991 - protein, 50 aa, Homo Sapiens
MAPKKLSCLRSLLLPLSLTLLLPQTGPRSAMCLAACTTFGYRGCFGPTGF

SEQ ID NO: 5992 - protein, 185 aa, Homo Sapiens
  misc_feature (1)..(1): Xaa can be any naturally occurring amino acid
XKMRWSGLNAIQFYVPWNYHEPQPGVYNFNGSRDLIAFLNEAALANLLVILRPGPYICAEWEMGGLPSWLLRKPEIHLRTSDPDFLAAVDSWFKVLLPKIYPWLYHNGGNIISIQVENEYGSYRACDFSYMRHLAGLFRALLGEKILLFTTDGPEGLKCGSLRGLYTTVDFGPGLKQGLGVESGE

SEQ ID NO: 5993 - protein, 636 aa, Homo Sapiens
MTTWSLRRRPARTLGLLLLVVLGFLVLRRLDWSTLVPLRLRHRQLGLQAKGWNFMLEDSTFWIFGGSIHYFRVPREYWRDRLLKMKACGLNTLTTYVPWNLHEPERGKFDFSGNLDLEAFVLMAAEIGLWVILRPGPYICSEMDLGGLPSWLLQDPGMRLRTTYKGFTEAVDLYFDHLMSRVVPLQYKRGGPIIAVQVENEYGSYNKDPAYMPYVKKALEDRGIVELLLTSDNKDGLSKGIVQGVLATINLQSTHELQLLTTFLFNVQGTQPKMVMEYWTGWFDSWGGPHNILDSSEVLKTVSAIVDAGSSINLYMFHGGTNFGFMNGAMHFHDYKSDVTSYDYDAVLTEAGDYTAKYMKLRDFFGSISGIPLPPPPDLLPKMPYEPLTPVLYLSLWDALKYLGEPIKSEKPINMENLPVNGGNGQSFGYILYETSITSSGILSGHVHDRGQVFVNTVSIGFLDYKTTKIAVPLIQGYTVLRILVENRGRVNYGENIDDQRKGLIGNLYLNDSPLKNFRIYSLDMKKSFFQRFGLDKWSSLPETPTLPAFFLGSLSISSTPCDTFLKLEGWEKGVVFINGQNLGRYWNIGPQKTLYLPGPWLSSGINQVIVFEETMAGPALQFTETPHLGRNQYIK

SEQ ID NO: 5994 - protein, 636 aa, Homo Sapiens; identical to SEQ ID NO: 5993

SEQ ID NO: 5995 - protein, 553 aa, Homo Sapiens
MNHVAKQQSEEAFPQEQQKAPPVVGGFNSNVGSKVLGLKYEEIDCLINDEHTIKGRREGNEVFLPFTWVEKYFDVYGKVVQYDGYDRFEFSHSYSKVYAQRAPYHPDGVFMSFEGYNVEVRDRVKCISGVEGVPLSTQWGPQGYFYPIQIAQYGLSHYSKNLTEKPPHIEVYETAEDRDKNKPNDWTVPKGCFMANVADKSRFTNVKQFIAPETSEGVSLQLGNTKDFIISFDLKFLTNGSVSVVLETTEKNQLFTIHYVSNAQLIAFKERDIYYGIGPRTSWSTVTRDLVTDLRKGVGLSNTKAVKPTKIMPKKVVRLIAKGKGFLDNITISTTAHMAAFFAASDWLVRNQDEKGGWPIMVTRKLGEGFKSLEPGWYSAMAQGQAISTLVRAYLLTKDHIFLNSALRATAPYKFLSEQHGVKAVFMNKHDWYEEYPTTPSSFVLNGFMYSLIGLYDLKETAGEKLGKEARSLYERGMESLKAMLPLYDTGSGTIYDLRHFMLGIAPNLARWDYHTTHINQLQLLSTIDESPVFKEFVKRWKSYLKGSRAKHN

SEQ ID NO: 5996 - protein, 617 aa, Homo Sapiens
MRCLAARVNYKTLIIICALFTLVTVLLWNKCSSDKAIQFPRRSSSGFRVDGFEKRAAASESNNYMNHVAKQQSEEAFPQEQQKAPPVVGGFNSNVGSKVLGLKYEEIDCLINDEHTIKGRREGNEVFLPFTWVEKYFDVYGKVVQYDGYDRFEFSHSYSKVYAQRAPYHPDGVFMSFEGYNVEVRDRVKCISGVEGVPLSTQWGPQGYFYPIQIAQYGLSHYSKNLTEKPPHIEVYETAEDRDKNKPNDWTVPKGCFMANVADKSRFTNVKQFIAPETSEGVSLQLGNTKDFIISFDLKFLTNGSVSVVLETTEKNQLFTIHYVSNAQLIAFKERDIYYGIGPRTSWSTVTRDLVTDLRKGVGLSNTKAVKPTKIMPKKVVRLIAKGKGFLDNITISTTAHMAAFFAASDWLVRNQDEKGGWPIMVTRKLGEGFKSLEPGWYSAMAQGQAISTLVRAYLLTKDHIFLNSALRATAPYKFLSEQHGVKAVFMNKHDWYEEYPTTPSSFVLNGFMYSLIGLYDLKETAGEKLGKEARSLYERGMESLKAMLPLYDTGSGTIYDLRHFMLGIAPNLARWDYHTTHINQLQLLSTIDESPVFKEFVKRWKSYLKGSRAKHN

SEQ ID NO: 5997 - protein, 1192 aa, Homo Sapiens
MAACGRVRRMFRLSAALHLLLLFAAGAEKLPGQGVHSQGQGPGANFVSFVGQAGGGGPAGQQLPQLPQSSQLQQQQQQQQQQQQPQPPQPPFPAGGPPARRGGAGAGGGWKLAEEESCREDVTRVCPKHTWSNNLAVLECLQDVRELLWNYKLNLTTDPKFESVAREVCKSTITEIKECADEPVGKGYMVSCLVDHRGNITEYQCHQYITKMTAIIFSDYRLICGFMDDCKNDINILKCGSIRLGEKDAHSQGEVVSCLEKGLVKEAEEREPKIQVSELCKKAILRVAELSSDDFHLDRHLYFACRDDRERFCENTQAGEGRVYKCLFNHKFEESMSEKCREALTTRQKLIAQDYKVSYSLAKSCKSDLKKYRCNVENLPRSREARLSYLLMCLESAVHRGRQVSSECQGEMLDYRRMLMEDFSLSPEIILSCRGEIEHHCSGLHRKGRTLHCLMKVVRGEKGNLGMNCQQALQTLIQETDPGADYRIDRALNEACESVIQTACKHIRSGDPMILSCLMEHLYTEKMVEDCEHRLLELQYFISRDWKLDPVLYRKCQGDASRLCHTHGWNETSEFMPQGAVFSCLYRHAYRTEEQGRRLSRECRAEVQRILHQRAMDVKLDPALQDKCLIDLGKWCSEKTETGQELECLQDHLDDLVVECRDIVGNLTELESEDIQIEALLMRACEPIIQNFCHDVADNQIDSGDLMECLIQNKHQKDMNEKCAIGVTHFQLVQMKDFRFSYKFKMACKEDVLKLCPNIKKKVDVVICLSTTVRNDTLQEAKEHRVSLKCRRQLRVEELEMTEDIRLEPDLYEACKSDIKNFCSAVQYGNAQIIECLKENKKQLSTRCHQKVFKLQETEMMDPELDYTLMRVCKQMIKRFCPEADSKTMLQCLKQNKNSELMDPKCKQMITKRQITQNTDYRLNPMLRKACKADIPKFCHGILTKAKDDSELEGQVISCLKLRYADQRLSSDCEDQIRIIIQESALDYRLDPQLQLHCSDEISSLCAEEAAAQEQTGQVEECLKVNLLKIKTELCKKEVLNMLKESKADIFVDPVLHTACALDIKHHCAAITPGRGRQMSCLMEALEDKRVRLQPECKKRLNDRIEMWSYAAKVAPADGFSDLAMQVMTSPSKNYILSVISGSICILFLIGLMCGRITKRVTRELKDRLQYRSETMAYKGLVWSQDVTGSPA

SEQ ID NO: 5998 - protein, 1203 aa, Homo Sapiens
MAACGRVRRMFRLSAALHLLLLFAAGAEKLPGQGVHSQGQGPGANFVSFVGQAGGGGPAGQQLPQLPQSSQLQQQQQQQQQQQQPQPPQPPFPAGGPPARRGGAGAGGGWKLAEEESCREDVTRVCPKHTWSNNLAVLECLQDVREPENEISSDCNHLLWNYKLNLTTDPKFESVAREVCKSTITEIKECADEPVGKGYMVSCLVDHRGNITEYQCHQYITKMTAIIFSDYRLICGFMDDCKNDINILKCGSIRLGEKDAHSQGEVVSCLEKGLVKEAEEREPKIQVSELCKKAILRVAELSSDDFHLDRHLYFACRDDRERFCENTQAGEGRVYKCLFNHKFEESMSEKCREALTTRQKLIAQDYKVSYSLAKSCKSDLKKYRCNVENLPRSREARLSYLLMCLESAVHRGRQVSSECQGEMLDYRRMLMEDFSLSPEIILSCRGEIEHHCSGLHRKGRTLHCLMKVVRGEKGNLGMNCQQALQTLIQETDPGADYRIDRALNEACESVIQTACKHIRSGDPMILSCLMEHLYTEKMVEDCEHRLLELQYFISRDWKLDPVLYRKCQGDASRLCHTHGWNETSEFMPQGAVFSCLYRHAYRTEEQGRRLSRECRAEVQRILHQRAMDVKLDPALQDKCLIDLGKWCSEKTETGQELECLQDHLDDLVVECRDIVGNLTELESEDIQIEALLMRACEPIIQNFCHDVADNQIDSGDLMECLIQNKHQKDMNEKCAIGVTHFQLVQMKDFRFSYKFKMACKEDVLKLCPNIKKKVDVVICLSTTVRNDTLQEAKEHRVSLKCRRQLRVEELEMTEDIRLEPDLYEACKSDIKNFCSAVQYGNAQIIECLKENKKQLSTRCHQKVFKLQETEMMDPELDYTLMRVCKQMIKRFCPEADSKTMLQCLKQNKNSELMDPKCKQMITKRQITQNTDYRLNPMLRKACKADIPKFCHGILTKAKDDSELEGQVISCLKLRYADQRLSSDCEDQIRIIIQESALDYRLDPQLQLHCSDEISSLCAEEAAAQEQTGQVEECLKVNLLKIKTELCKKEVLNMLKESKADIFVDPVLHTACALDIKHHCAAITPGRGRQMSCLMEALEDKRVRLQPECKKRLNDRIEMWSYAAKVAPADGFSDLAMQVMTSPSKNYILSVISGSICILFLIGLMCGRITKRVTRELKDRLQYRSETMAYKGLVWSQDVTGSPA

SEQ ID NO: 5999 - protein, 1179 aa, Homo Sapiens
MAACGRVRRMFRLSAALHLLLLFAAGAEKLPGQGVHSQGQGPGANFVSFVGQAGGGGPAGQQLPQLPQSSQLQQQQQQQQQQQQPQPPQPPFPAGGPPARRGGAGAGGGWKLAEEESCREDVTRVCPKHTWSNNLAVLECLQDVREPENEISSDCNHLLWNYKLNLTTDPKFESVAREVCKSTITEIKECADEPVGKGYMVSCLVDHRGNITEYQCHQYITKMTAIIFSDYRLICGFMDDCKNDINILKCGSIRLGEKDAHSQGEVVSCLEKGLVKEAEEREPKIQVSELCKKAILRVAELSSDDFHLDRHLYFACRDDRERFCENTQAGEGRVYKCLFNHKFEESMSEKCREALTTRQKLIAQDYKVSYSLAKSCKSDLKKYRCNVENLPRSREARLSYLLMCLESAVHRGRQVSSECQGEMLDYRRMLMEDFSLSPEIILSCRGEIEHHCSGLHRKGRTLHCLMKVVRGEKGNLGMNCQQALQTLIQETDPGADYRIDRALNEACESVIQTACKHIRSGDPMILSCLMEHLYTEKMVEDCEHRLLELQYFISRDWKLDPVLYRKCQGDASRLCHTHGWNETSEFMPQGAVFSCLYRHAYRTEEQGRRLSRECRAEVQRILHQRAMDVKLDPALQDKCLIDLGKWCSEKTETGQELECLQDHLDDLVVECRDIVGNLTELESEDIQIEALLMRACEPIIQNFCHDVADNQIDSGDLMECLIQNKHQKDMNEKCAIGVTHFQLVQMKDFRFSYKFKMACKEDVLKLCPNIKKKVDVVICLSTTVRNDTLQEAKEHRVSLKCRRQLRVEELEMTEDIRLEPDLYEACKSDIKNFCSAVQYGNAQIIECLKENKKQLSTRCHQKVFKLQETEMMDPELDYTLMRVCKQMIKRFCPEADSKTMLQCLKQNKNSELMDPKCKQMITKRQITQNTDYRLNPMLRKACKADIPKFCHGILTKAKDDSELEGQVISCLKLRYADQRLSSDCEDQIRIIIQESALDYRLDPQLQLHCSDEISSLCAEEAAAQEQTGQVEECLKVNLLKIKTELCKKEVLNMLKESKADIFVDPVLHTACALDIKHHCAAITPGRGRQMSCLMEALEDKRVRLQPECKKRLNDRIEMWSYAAKVAPADGFSDLAMQVMTSPSKNYILSVISGSICILFLIGLMCGRITKRVTRELKDR

SEQ ID NO: 6000 - protein, 698 aa, Homo Sapiens
MAACGRVRRMFRLSAALHLLLLFAAGAEKLPGQGVHSQGQGPGANFVSFVGQAGGGGPAGQQLPQLPQSSQLQQQQQQQQQQQQPQPPQPPFPAGGPPARRGGAGAGGGWKLAEEESCREDVTRVCPKHTWSNNLAVLECLQDVREPENEISSDCNHLLWNYKLNLTTDPKFESVAREVCKSTITEIKECADEPVGKGYMVSCLVDHRGNITEYQCHQYITKMTAIIFSDYRLICGFMDDCKNDINILKCGSIRLGEKDAHSQGEVVSCLEKGLVKEAEEREPKIQVSELCKKAILRVAELSSDDFHLDRHLYFACRDDRERFCENTQAGEGRVYKCLFNHKFEESMSEKCREALTTRQKLIAQDYKVSYSLAKSCKSDLKKYRCNVENLPRSREARLSYLLMCLESAVHRGRQVSSECQGEMLDYRRMLMEDFSLSPEIILSCRGEIEHHCSGLHRKGRTLHCLMKVVRGEKGNLGMNCQQALQTLIQETDPGADYRIDRALNEACESVIQTACKHIRSGDPMILSCLMEHLYTEKMVEDCEHRLLELQYFISRDWKLDPVLYRKCQGDASRLCHTHGWNETSEFMPQGAVFSCLYRHAYRTEEQGRRLSRECRAEVQRILHQRAMDVKLDPALQDKCLIDLGKWCSEKTETGQELECLQDHLDDLVVECRDIVGNLTELESEAEREYVFKNLPFKV

SEQ ID NO: 6001 - protein, 305 aa, Homo Sapiens
MAACGRVRRMFRLSAALHLLLLFAAGAEKLPGQGVHSQGQGPGANFVSFVGQAGGGGPAGQQLPQLPQSSQLQQQQQQQQQQQQPQPPQPPFPAGGPPARRGGAGAGGGWKLAEEESCREDVTRVCPKHTWSNNLAVLECLQDVREPENEISSDCNHLLWNYKLNLTTDPKFESVAREVCKSTITEIKECADEPVGKGYMVSCLVDHRGNITEYQCHQYITKMTAIIFSDYRLICGFMDDCKNDINILKCGSIRLGEKDAHSQDTPTALRNREGGSHGSAELKSKGSYTSVPWMSSWILPSRISA

SEQ ID NO: 6002 - protein, 698 aa, Homo Sapiens; identical to SEQ ID NO: 6000

SEQ ID NO: 6003 - protein, 152 aa, Homo Sapiens
MAACGRVRRMFRLSAALHLLLLFAAGAEKLPGQGVHSQGQGPGANFVSFVGQPPFPAGGPPARRGGAGAGGGWKLAEEESCREDVTRVCPKHTWSNNLAVLECLQDVREPENEISSDCNHLLWNYKLNLTTDPKFESVAREVCKSTITEIKE

SEQ ID NO: 6004 - protein, 74 aa, Homo Sapiens
MVSCLVDHRGNITEYQCHQYITKMTAIIFSDYRLICGFMDDCKNDINILKCGSIRLGEKDAHSQGEVVSCLEKG

SEQ ID NO: 6005 - protein, 148 aa, Homo Sapiens
MRVTLATIAWMVSFVSNYSHTANILPDIENEDFIKDCVRIHNKFRSEVKPTASDMLYMTWDPALAQIAKAWASNCQFSHNTRLKPPHKLHPNFTSLGENIWTGSVPIFSVSSAITNWYDEIQDYDFKTRICKKVCGHYTQRELPNLAI

SEQ ID NO: 6006 - protein, 238 aa, Homo Sapiens
MRVTLATIAWMVSFVSNYSHTANILPDIENEDFIKDCVRIHNKFRSEVKPTASDMLYMTWDPALAQIAKAWASNCQFSHNTRLKPPHKLHPNFTSLGENIWTGSVPIFSVSSAITNWYDEIQDYDFKTRICKKVCGHYTQVSQERGRDPNPKRGFLNLARENPGLFGQIVTKLAAQFNFALKFLALTLFPMEHILYATTDQEGITQLGHIREEPPAVPAPIMTSVWTISVLTDSETKS

SEQ ID NO: 6007 - protein, 266 aa, Homo Sapiens
MRVTLATIAWMVSFVSNYSHTANILPDIENEDFIKDCVRIHNKFRSEVKPTASDMLYMTWDPALAQIAKAWASNCQFSHNTRLKPPHKLHPNFTSLGENIWTGSVPIFSVSSAITNWYDEIQDYDFKTRICKKVCGHYTQVVWADSYKVGCAVQFCPKVSGFDALSNGAHFICNYGPGGNYPTWPYKRGATCSACPNNDKCLDNLCVNRQRDQVKRYYSVVYPGWPIYPRNRYTSLFLIVNSVILILSVIITILVQHKYPNLVLLD

SEQ ID NO: 6008 - protein, 89 aa, Homo Sapiens
MTKSRTMTSRLGYAKKSVATTLRLFGQIVTKLAAQFNFALKFLALTLFPMEHILYATTDQEGITQLGHIREEPPAVPAPIMTSVWTISV

SEQ ID NO: 6009 - protein, 233 aa, Homo Sapiens
MALKNKFSCLWILGLCLVATTSSKIPSITDPHFIDNCIEAHNEWRGKVNPPAADMKYMIWDKGLAKMAKAWANQCKFEHNDCLDKSYKCYAAFEYVGENIWLGGIKSFTPRHAITAWYNETQFYDFDSLSCSRVCGHYTQLVWANSFYVGCAVAMCPNLGGASTAIFVCNYGPAGNFANMPPYVRGESCSLCSKEEKCVKNLCKNPFLKPTGRAPQQTAFNPFSLGFLLLRIF

SEQ ID NO: 6010 - protein, 242 aa, Homo Sapiens
MALKNKFSCLWILGLCLVATTSSKIPSITDPHFIDNCIEAHNEWRGKVNPPAADMKYMIWDKGLAKMAKAWANQCKFEHNDCLDKSYKCYAAFEYVGENIWLGGIKSFTPRHAITAWYNETQFYDFDSLSCSRVCGHYTQLVWANSFYVGCAVAMCPNLGGASTAIFVCNYGPAGNFANMPPYVRGESCSLCSKEEKCVKNLCRTPQLIIPNQNPFLKPTGRAPQQTAFNPFSLGFLLLRIF

SEQ ID NO: 6011 - protein, 57 aa, Homo Sapiens
MSLLKLILLRVPCRATACQKGLTTQTFPLSPQSPKGQLAACSNKMSFLFRAEEKIHF

SEQ ID NO: 6012 - protein, 39 aa, Homo Sapiens
  misc_feature (1)..(1): Xaa can be any naturally occurring amino acid
XLSPQSPKGQLAACSNKMSFLFRAEEGLHNLLYLTKIHF

SEQ ID NO: 6013 - protein, 56 aa, Homo Sapiens
MMVQRLGLISPPASQVSTACNQISPSLQRAMNAANLNIPPSDTRKCGKHGKVPSTK

SEQ ID NO: 6014 - protein, 89 aa, Homo Sapiens
MMVQRLGLISPPASQVSTACNQISPSLQRAMNAANLNIPPSDTRSLISRESLASTTLSLTESQSASSMKQEWSQGYRALPSLSNHGSQN

SEQ ID NO: 6015 - protein, 89 aa, Homo Sapiens; identical to SEQ ID NO: 6014

SEQ ID NO: 6016 - protein, 89 aa, Homo Sapiens; identical to SEQ ID NO: 6014

SEQ ID NO: 6017 - protein, 775 aa, Homo Sapiens
MMVQRLGLISPPASQVSTACNQISPSLQRAMNAANLNIPPSDTRSLISRESLASTTLSLTESQSASSMKQEWSQGYRALPSLSNHGSQNGLDLGDLLSLPPGTSMSSNSVSNSLPSYLFGTESSHSPYPSPRHSSTRSHSARSKKRALSLSPLSDGIGIDFNTIIRTSPTSLVAYINGSRASPANLSPQPEVYGHFLGVRGSCIPQPRPVPGSQKGVLVAPGGLALPAYGEDGALEHERMQQLEHGGLQPGLVNHMVVQHGLPGPDSQSAGLFKTERLEEFPGSTVDLPPAPPLPPLPPPPGPPPPYHAHAHLHHPELGPHAQQLALPQATLDDDGEMDGIGGKHCCRWIDCSALYDQQEELVRHIEKVHIDQRKGEDFTCFWAGCPRRYKPFNARYKLLIHMRVHSGEKPNKCTFEGCEKAFSRLENLKIHLRSHTGEKPYLCQHPGCQKAFSNSSDRAKHQRTHLDTKPYACQIPGCTKRYTDPSSLRKHVKAHSSKEQQARKKLRSSTELHPDLLTDCLTVQSLQPATSPRDAAAEGTVGRSPGPGPDLYSAPIFSSNYSSRSGTAAGAVPPPHPVSHPSPGHNVQGSPHNPSSQLPPLTAVDAGAERFAPSAPSPHHISPRRVPAPSSILQRTQPPYTQQPSGSHLKSYQPETNSSFQPNGIHVHGFYGQLQKFCPPHYPDSQRIVPPVSSCSVVPSFEDCLVPTSMGQASFDVFHRAFSTHSGITVYDLPSSSSSLFGESLRSGAEDATFLQISTVDRCPSQLSSVYTEG

SEQ ID NO: 6018 - protein, 244 aa, Homo Sapiens
MNGRSCSMSLHRTSGTPQGPRMVSGHHIPAIRAHSGTPGPSPCGSTSSPTMASLANNLHLKMPSGGGMAPQNNVAESRIHLPALSPRRQMLTNGKPRFQVTQAGGMSGSHTLKPKQQEFGSPFPPNPGKGALGFGPQCKSIGKGSCNNLVVTSSPMMVQRLGLISPPASQVSTACNQISPSLQRAMNAANLNIPPSDTRSLISRESLASTTLSLTESQSASSMKQEWSQGYRALPSLSNHGSQN

SEQ ID NO: 6019 - protein, 244 aa, Homo Sapiens; identical to SEQ ID NO: 6018

SEQ ID NO: 6020 - protein, 930 aa, Homo Sapiens
MNGRSCSMSLHRTSGTPQGPRMVSGHHIPAIRAHSGTPGPSPCGSTSSPTMASLANNLHLKMPSGGGMAPQNNVAESRIHLPALSPRRQMLTNGKPRFQVTQAGGMSGSHTLKPKQQEFGSPFPPNPGKGALGFGPQCKSIGKGSCNNLVVTSSPMMVQRLGLISPPASQVSTACNQISPSLQRAMNAANLNIPPSDTRSLISRESLASTTLSLTESQSASSMKQEWSQGYRALPSLSNHGSQNGLDLGDLLSLPPGTSMSSNSVSNSLPSYLFGTESSHSPYPSPRHSSTRSHSARSKKRALSLSPLSDGIGIDFNTIIRTSPTSLVAYINGSRASPANLSPQPEVYGHFLGVRGSCIPQPRPVPGSQKGVLVAPGGLALPAYGEDGALEHERMQQLEHGGLQPGLVNHMVVQHGLPGPDSQSAGLFKTERLEEFPGSTVDLPPAPPLPPLPPPPGPPPPYHAHAHLHHPELGPHAQQLALPQATLDDDGEMDGIGGKHCCRWIDCSALYDQQEELVRHIEKVHIDQRKGEDFTCFWAGCPRRYKPFNARYKLLIHMRVHSGEKPNKCTFEGCEKAFSRLENLKIHLRSHTGEKPYLCQHPGCQKAFSNSSDRAKHQRTHLDTKPYACQIPGCTKRYTDPSSLRKHVKAHSSKEQQARKKLRSSTELHPDLLTDCLTVQSLQPATSPRDAAAEGTVGRSPGPGPDLYSAPIFSSNYSSRSGTAAGAVPPPHPVSHPSPGHNVQGSPHNPSSQLPPLTAVDAGAERFAPSAPSPHHISPRRVPAPSSILQRTQPPYTQQPSGSHLKSYQPETNSSFQPNGIHVHGFYGQLQKFCPPHYPDSQRIVPPVSSCSVVPSFEDCLVPTSMGQASFDVFHRAFSTHSGITVYDLPSSSSSLFGESLRSGAEDATFLQISTVDRCPSQLSSVYTEG

SEQ ID NO: 6021 - protein, 142 aa, Homo Sapiens
MNGRSCSMSLHRTSGTPQGPRMVSGHHIPAIRAHSGTPGPSPCGSTSSPTMASLANNLHLKMPSGGGMAPQNNVAESRIHLPALSPRRQMLTNGKPRFQVTQAGGMSGSHTLKPKQQEFGSPFPPNPGKGPLFRVSLWRPRP

SEQ ID NO: 6022 - protein, 75 aa, Homo Sapiens
FNLTFGASTGPGYWDQHYLSWSMLLGVGFPPVDGLSPLVLGIMAVALGAPGLMLLGGGLVLLLHHKKYSEYQSIN

SEQ ID NO: 6023 - protein, 320 aa, Homo Sapiens
MRGSVECTWGWGHCAPSPLLLWTLLLFAAPFGLLGEKTRQLLEFDSTNVSDTAAKPLGRPYPPYSLADFSWNNITDSLDPATLSATFQGHPMNDPTRTFANGSLAFRVQAFSRSSRPAQPPRLLHTADTCQLEVALIGASPRGNRSLFGLEVATLGQGPDCPSMQEQHSIDDEYAPAVFQLDQLLWGSLPSGFAQWRPVAYSQKPGGRESALPCQASPLHPALAYSLPQSPIVRAFFGSQNNFCAFNLTFGASTGPGYWDQHYLSWSMLLGVGFPPVDGLSPLVLGIMAVALGAPGLMLLGGGLVLLLHHKKYSEYQSIN

SEQ ID NO: 6024 - protein, 183 aa, Homo Sapiens [sequence omitted]

SEQ ID NO: 6025 - protein, 89 aa, Homo Sapiens
MRGSVECTWGWGHCAPSPLLLWTLLLFAAPFGLLGEKTRQVRRLGENQGEECRGESSSQLEGGTKDWGKAFGKTISSILLGRFLLEQHH

SEQ ID NO: 6026 - protein, 130 aa, Homo Sapiens
MRGSVECTWGWGHCAPSPLLLWTLLLFAAPFGLLGEKTRQVSLEVIPNWLGPLQNLLHIRAVGTNSTLHYVWSSLGPLAVVMVATNTPHSTLSVNWSLLLSPEPDGGLMVLPKDSIQFSSALVFTRGSCC

SEQ ID NO: 6027 - protein, 406 aa, Homo Sapiens
MRGSVECTWGWGHCAPSPLLLWTLLLFAAPFGLLGEKTRQVSLEVIPNWLGPLQNLLHIRAVGTNSTLHYVWSSLGPLAVVMVATNTPHSTLSVNWSLLLSPEPDGGLMVLPKDSIQFSSALVFTRLLEFDSTNVSDTAAKPLGRPYPPYSLADFSWNNITDSLDPATLSATFQGHPMNDPTRTFANGSLAFRVQAFSRSSRPAQPPRLLHTADTCQLEVALIGASPRGNRSLFGLEVATLGQGPDCPSMQEQHSIDDEYAPAVFQLDQLLWGSLPSGFAQWRPVAYSQKPGGRESALPCQASPLHPALAYSLPQSPIVRAFFGSQNNFCAFNLTFGASTGPGYWDQHYLSWSMLLGVGFPPVDGLSPLVLGIMAVALGAPGLMLLGGGLVLLLHHKKYSEYQSIN

SEQ ID NO: 6028 - protein, 331 aa, Homo Sapiens
MRGSVECTWGWGHCAPSPLLLWTLLLFAAPFGLLGEKTRQVSLEVIPNWLGPLQNLLHIRAVGTNSTLHYVWSSLGPLAVVMVATNTPHSTLSVNWSLLLSPEPDGGLMVLPKDSIQFSSALVFTRLLEFDSTNVSDTAAKPLGRPYPPYSLADFSWNNITDSLDPATLSATFQGHPMNDPTRTFANGSLAFRVQAFSRSSRPAQPPRLLHTADTCQLEVALIGASPRGNRSLFGLEVATLGQGPDCPSMQEQHSIDDEYAPAVFQVDAPGCGLPSSGRLVPTSPGHHGSGPGCPRAHAARGRLGSAAAPQEVLRVPVHKLRPALWREGHY

SEQ ID NO: 6029 - protein, 325 aa, Homo Sapiens
MVATNTPHSTLSVNWSLLLSPEPDGGLMVLPKDSIQFSSALVFTRLLEFDSTNVSDTAAKPLGRPYPPYSLADFSWNNITDSLDPATLSATFQGHPMNDPTRTFANGSLAFRVQAFSRSSRPAQPPRLLHTADTCQLEVALIGASPRGNRSLFGLEVATLGQGPDCPSMQEQHSIDDEYAPAVFQLDQLLWGSLPSGFAQWRPVAYSQKPGGRESALPCQASPLHPALAYSLPQSPIVRAFFGSQNNFCAFNLTFGASTGPGYWDQHYLSWSMLLGVGFPPVDGLSPLVLGIMAVALGAPGLMLLGGGLVLLLHHKKYSEYQSIN

SEQ ID NO: 6030 - protein, 111 aa, Homo Sapiens
  misc_feature (1)..(1): Xaa can be any naturally occurring amino acid
XPSMQEQHSIDDEYAPAVFQSPIVRAFFGSQNNFCAFNLTFGASTGPGYWDQHYLSWSMLLGVGFPPVDGLSPLVLGIMAVALGAPGLMLLGGGLVLLLHHKKYSEYQSIN

SEQ ID NO: 6031 - protein, 46 aa, Homo Sapiens
MKFLLTTAFLILISLWVEEAYSKEKSSKKGKGKKKQYLCPSERLYH

SEQ ID NO: 6032 - protein, 46 aa, Homo Sapiens; identical to SEQ ID NO: 6031

SEQ ID NO: 6033 - protein, 56 aa, Homo Sapiens
MKFLLTTAFLILISLWVEEAYSKEKSSKKGKGKKKQYLCPSLVRPDAKKFVLLSLI

SEQ ID NO: 6034 - protein, 497 aa, Homo Sapiens
MKFLLTTAFLILISLWVEEAYSKEKSSKKGKGKKKQYLCPSQQSAEDLARVPANSTSNILNRLLVSYDPRIRPNFKGIPVDVVVNIFINSFGSIQETTMDYRVNIFLRQKWNDPRLKLPSDFRGSDALTVDPTMYKCLWKPDLFFANEKSANFHDVTQENILLFIFRDGDVLVSMRLSITLSCPLDLTLFPMDTQRCKMQLESFGYTTDDLRFIWQSGDPVQLEKIALPQFDIKKEDIEYGNCTKYYKGTGYYTCVEVIFTLRRQVGFYMMGVYAPTLLIVVLSWLSFWINPDASAARVPLGIFSVLSLASECTTLAAELPKVSYVKALDVWLIACLLFGFASLVEYAVVQVMLNNPKRVEAEKARIAKAEQADGKGGNVAKKNTVNGTGTPVHISTLQVGETRCKKVCTSKSDLRSNDFSIVGSLPRDFELSNYDCYGKPIEVNNGLGKSQAKNNKKPPPAKPVIPTAAKRIDLYARALFPFCFLFFNVIYWSIYL

SEQ ID NO: 6035 - protein, 497 aa, Homo Sapiens; identical to SEQ ID NO: 6034

SEQ ID NO: 6036 - protein, 303 aa, Homo Sapiens
MKFLLTTAFLILISLWVEEAYSKEKSSKKGKGKKKQYLCPSQQSAEDLARVPANSTSNILNRLLVSYDPRIRPNFKGIPVDVVVNIFINSFGSIQETTMDYRVNIFLRQKWNDPRLKLPSDFRGSDALTVDPTMYKCLWKPDLFFANEKSANFHDVTQENILLFIFRDGDVLVSMRLSITLSCPLDLTLFPMDTQRCKMQLESFGYTTDDLRFIWQSGDPVQLEKIALPQFDIKKEDIEYGNCTKYYKGTGYYTCVEVIFTLRRQVGFYMMGVYAPTLLIVVLSWLSFWINPDASAARVPLGW

SEQ ID NO: 6037 - protein, 182 aa, Homo Sapiens
AKSGVAGGILLVVPNVMGMMCWSPPLDKMGNSVKGIHFCHDLVSLCNFHNYDNLRHFAKKLDPRREGGDQRVKSVINLLFAAYTGDVSALRRFALSAMDMEQRDYDSRTALHVAAAEGGITLPWMKHCTLDTMMYLKFSKNTKSSTHLKEILTTGRKIKPSIRILMDCCNGLKSQDLNHLPI

SEQ ID NO: 6038 - protein, 114 aa, Homo Sapiens
ESAKKQSGGKVADYIPQLAKFSPDLWGVSVCTVDGQRHSTGDTKVPFCLQSCVKPLKYAIAVNDLGTEYVHRYVGKEPSGLRFNKLFLNEDDKPHNPMVNAGAIVVTSLIKDWW

SEQ ID NO: 6039 - protein, 169 aa, Homo Sapiens
MAATLANGGFCPITGERVLSPEAVRNTLSLMHSCGMYDFSGQFAFHVGLPAKSGVAGGILLVVPNVMGMMCWSPPLDKMGNSVKGIHFCHDLVSLCNFHNYDNLRHFAKKLDPRREGGDQRHSFGPLDYESLQQELALKETVWKKVSPESNEDISTTVVYRMESLGEKS

SEQ ID NO: 6040 - protein, 164 aa, Homo Sapiens
MAATLANGGFCPITGERVLSPEAVRNTLSLMHSCGMYDFSGQFAFHVGLPAKSGVAGGILLVVPNVMGMMCWSPPLDKMGNSVKGIHFCHDLVSLCNFHNYDNLRHFAKKLDPRREGGDQRVKSVINLLFAAYTGDVSALRRFALSAMDMEQRDYDSRTALHVA

SEQ ID NO: 6041 - protein, 103 aa, Homo Sapiens
MGMMCWSPPLDKMGNSVKGIHFCHDLVSLCNFHNYDNLRHFAKKLDPRREGGDQRHSFGPLDYESLQQELALKETVWKKVSPESNEDISTTVVYRMESLGEKS

SEQ ID NO: 6042 - protein, 174 aa, Homo Sapiens
MGMMCWSPPLDKMGNSVKGIHFCHDLVSLCNFHNYDNLRHFAKKLDPRREGGDQRVKSVINLLFAAYTGDVSALRRFALSAMDMEQRDYDSRTALHVAAAEGHVEVVKFLLEACKVNPFPKDRWNNTPMDEALHFGHHDVFKILQEYQVQYTPQGDSDNGKENQTVHKNLDGLL

SEQ ID NO: 6043 - protein, 669 aa, Homo Sapiens
MMRLRGSGMLRDLLLRSPAGVSATLRRAQPLVTLCRRPRGGGRPAAGPAAAARLHPWWGGGGWPAEPLARGLSSSPSEILQELGKGSTHPQPGVSPPAAPAAPGPKDGPGETDAFGNSEGKELVASGENKIKQGLLPSLEDLLFYTIAEGQEKIPVHKFITALKSTGLRTSDPRLKECMDMLRLTLQTTSDGVMLDKDLFKKCVQSNIVLLTQAFRRKFVIPDFMSFTSHIDELYESAKKQSGGKVADYIPQLAKFSPDLWGVSVCTVDGQRHSTGDTKVPFCLQSCVKPLKYAIAVNDLGTEYVHRYVGKEPSGLRFNKLFLNEDDKPHNPMVNAGAIVVTSLIKQGVNNAEKFDYVMQFLNKMAGNEYVGFSNATFQSERESGDRNFAIGYYLKEKKCFPEGTDMVGILDFYFQLCSIEVTCESASVMAATLANGGFCPITGERVLSPEAVRNTLSLMHSCGMYDFSGQFAFHVGLPAKSGVAGGILLVVPNVMGMMCWSPPLDKMGNSVKGIHFCHDLVSLCNFHNYDNLRHFAKKLDPRREGGDQRVKSVINLLFAAYTGDVSALRRFALSAMDMEQRDYDSRTALHVAAAEGHVEVVKFLLEACKVNPFPKDRWNNTPMDEALHFGHHDVFKILQEYQVQYTPQGDSDNGKENQTVHKNLDGLL

SEQ ID NO: 6044 - protein, 598 aa, Homo Sapiens
MMRLRGSGMLRDLLLRSPAGVSATLRRAQPLVTLCRRPRGGGRPAAGPAAAARLHPWWGGGGWPAEPLARGLSSSPSEILQELGKGSTHPQPGVSPPAAPAAPGPKDGPGETDAFGNSEGKELVASGENKIKQGLLPSLEDLLFYTIAEGQEKIPVHKFITALKSTGLRTSDPRLKECMDMLRLTLQTTSDGVMLDKDLFKKCVQSNIVLLTQAFRRKFVIPDFMSFTSHIDELYESAKKQSGGKVADYIPQLAKFSPDLWGVSVCTVDGQRHSTGDTKVPFCLQSCVKPLKYAIAVNDLGTEYVHRYVGKEPSGLRFNKLFLNEDDKPHNPMVNAGAIVVTSLIKQGVNNAEKFDYVMQFLNKMAGNEYVGFSNATFQSERESGDRNFAIGYYLKEKKCFPEGTDMVGILDFYFQLCSIEVTCESASVMAATLANGGFCPITGERVLSPEAVRNTLSLMHSCGMYDFSGQFAFHVGLPAKSGVAGGILLVVPNVMGMMCWSPPLDKMGNSVKGIHFCHDLVSLCNFHNYDNLRHFAKKLDPRREGGDQRHSFGPLDYESLQQELALKETVWKKVSPESNEDISTTVVYRMESLGEKS

SEQ ID NO: 6045 - protein, 276 aa, Homo Sapiens
MNSKRMLLLVLFAFSLMLVERYFRNHQVEELRLSDWFHPRKRPDVITKTDWLAPVLWEGTFDRRVLEKHYRRRNITVGLAVFATGRFAEEYLRPFLHSANKHFMTGYRVIFYIMVDAFFKLPDIEPSPLRTFKAFKVGTERWWLDGPLVHVKSLGEHIASHIQDEVDFLFSMAANQVFQNEFGVETLGPLVAQLHAWWYFRNTKNFPYERRPTSAACIPFGQGDFYYGNLMVGGTPHNILDFIKEYLNGVIHDIKNGLNSTYEKHLNKYFYLNKPT

SEQ ID NO: 6046 - protein, 307 aa, Homo Sapiens
MNSKRMLLLVLFAFSLMLVERYFRNHQVEELRLSDWFHPRKRPDVITKTDWLAPVLWEGTFDRRVLEKHYRRRNITVGLAVFATGRFAEEYLRPFLHSANKHFMTGYRVIFYIMVDAFFKLPDIEPSPLRTFKAFKVGTERWWLDGPLVHVKSLGEHIASHIQDEVDFLFSMAANQVFQNEFGVETLGPLVAQLHAWWYFRNTKNFPYERRPTSAACIPFGQGDFYYGNLMVGGTPHNILDFIKEYLNGVIHDIKNGLNSTYEKHLNKYFYLNKPTLLSPAYSWDLAFSPPPQIQYVKVAHDSQRKL

SEQ ID NO: 6047 - protein, 291 aa, Homo Sapiens
MGVAARPPALRHWFSHSIPLAIFALLLLYLSVRSLGARSGCGPRAQPCVPGETAPFQVRQESGTLEAPERKQPPCLGPRGMLGRMMRRFHASLKPEGDVGLSPYLAGWRALVEFLTPLGSVFAFATREAFTKVTDLEARVHGPDAEHYWSLVAMAAWERRAGLLEQPGAAPRDPTRSSGSRTLLLLHRALRWSQLCLHRVATGALGGPDAGVQCSDAYRAALGPHHPWLVRQTARLAFLAFPGRRRLLELACPGATEAEARAALVRAAGTLEDVYNRTQSLLAERGLLQLA

SEQ ID NO: 6048 - protein, 558 aa, Homo Sapiens
MYRYLGEALLLSRAGPAALGSASADSAALLGWARGQPAAAPQPGLALAARRHYSEAVADREDDPNFFKMVEGFFDRGASIVEDKLVEDLRTRESEEQKRNRVRGILRIIKPCNHVLSLSFPIRRDDGSWEVIEGYRAQHSQHRTPCKGGIRYSTDVSVDEVKALASLMTYKCAVVDVPFGGAKAGVKINPKNYTDNELEKITRRFTMELAKKGFIGPGIDVPAPDMSTGEREMSWIADTYASTIGHYDINAHACVTGKPISQGGIHGRISATGRGVFHGIENFINEASYMSILGMTPGFGDKTFVVQGFGNVGLHSMRYLHRFGAKCIAVGESDGSIWNPDGIDPKELEDFKLQHGSILGFPKAKPYEGSILEADCDILIPAASEKQLTKSNAPRVKAKIIAEGANGPTTPEADKIFLERNIMVIPDLYLNAGGVTVSYFEWLKNLNHVSYGRLTFKYERDSNYHLLMSVQESLERKFGKHGGTIPIVPTAEFQDRISGASEKDIVHSGLAYTMERSARQIMRTAMKYNLGLDLRTAAYVNAIEKVFKVYNEAGVTFT

SEQ ID NO: 6049 - protein, 193 aa, Homo Sapiens
MQSLMQAPLLIALGLLLAAPAQAHLKKPSQLSSFSWDNCDEGKDPAVIRSLTLEPDPIIVPGNVTLSVMGSTSVPLSSPLKVDLVLEKEVAGLWIKIPCTDYIGSCTFEHFCDVLDMLIPTGEPCPEPLRTYGLPCHCPFKEGTYSLPKSEFVVPDLELPSWLTTGNYRIESVLSSSGKRLGCIKIAASLKGI

SEQ ID NO: 6050 - protein, 146 aa, Homo Sapiens
MSWVEAAGVSSTALEDRIVAKHEEVPEVSVQYEEKFQNHHKLPSQLSSFSWDNCDEGKDPAVIRSLTLEPDPIIVPGNVTLSVMGSTSVPLSSPLKVDLVLEKEVAGLWIKIPCTDYIGSCTFEHFCDVLDMLIPTGEPCPEPLRT

SEQ ID NO: 6051 - protein, 104 aa, Homo Sapiens
  misc_feature (1)..(1): Xaa can be any naturally occurring amino acid
XKDPAVIRSLTLEPDPIIVPGNVTLSVMGSTSVPLSSPLKVDLVLEKEVAGLWIKIPCTDYIGSCTFEHFCDVLDMLIPTGEPCPEPLRTYGLPCHCPFKEVST

SEQ ID NO: 6052 - protein, 118 aa, Homo Sapiens
MLLFALLLAMELPLVAASATMRAQWTYSLRCHDCAVINDFNCPNIRVCPYHIRRCMTISIQLSSGDRAAVCPGPHPTFFQPGAWIPTQVTDSKHQPLPAHLTRRHPLHGPGNILPSAI

SEQ ID NO: 6053 - protein, 158 aa, Homo Sapiens
MLLFALLLAMELPLVAASATMRAQWTYSLRCHDCAVINDFNCPNIRVCPYHIRRCMTISIRINSRELLVYKNCTNNCTFVYAAEQPPEAPGKIFKTNSFYWVCCCNSMVCNAGGPTNLERDMLPDEVTEEELPEGTVRLGVSKLLLSFASIIVSNILP

SEQ ID NO: 6054 - protein, 625 aa, Homo Sapiens
MARPVDPQRSPDPTFRSSTRHSGKLEPMEATAHLLRKQCPSRLNSPAWEASGLHWSSLDSPVGSMQALRPSAQHSWSPEPSVVPDQAWEDTALHQKKLCPLSLTSLPREAAVNFSYRSQTLLQEAQVLQGSPELLPRSPKPSGLQRLAPEEATALPLRRLCHLSLMEKDLGTTAHPRGFPELSHKSTAAASSRQSRPRVRSASLPPRTRLPSGSQAPSAAHPKRLSDLLLTSRAAAPGWRSPDPRSRLAAPPLGSTTLPSTWTAPQSRLTARPSRSPEPQIRESEQRDPQLRRKQQRWKEPLMPRREEKYPLRGTDPLPPGQPQRIPLPGQPLQPQPILTPGQPQKIPTPGQHQPILTPGHSQPIPTPGQPLPPQPIPTPGRPLTPQPIPTPGRPLTPQPIQMPGRPLRLPPPLRLLRPGQPMSPQLRQTQGLPLPQPLLPPGQPKSAGRPLQPLPPGPDARSISDPPAPRSRLPIRLLRGLLARLPGGASPRAAAAAACTTMKGWPAATMTPAETSPTMGPPDASAGFSIGEIAAAESPSATYSATFSCKPSGAASVDLRVPSPKPRALSRSRRYPWRRSADRCAKKPWRSGPRSAQRRNAVSSSTNNSRTKRWATCVRTACCF

SEQ ID NO: 6055 - protein, 245 aa, Homo Sapiens
MDRRSRAQQWRRARHNYNDLCPPIGRRAATALLWLSCSIALLRALATSNARAQQRAAAQQRRSFLNAHHRSGAQVFPESPESESDHEHEEADLELSLPECLEYEEEFDYETESETESEIESETDFETEPETAPTTEPETEPEDDRGPVVPKHSTFGQSLTQRLHALKLRSPDASPSRAPPSTQEPQSPREGEELKPEDKDPRDPEESKEPKEEKQRRRCKPKKPTRRDASPESPSKKGPIPIRRH

SEQ ID NO: 6056 - protein, 245 aa, Homo Sapiens; identical to SEQ ID NO: 6055

SEQ ID NO: 6057 - protein, 245 aa, Homo Sapiens; identical to SEQ ID NO: 6055

SEQ ID NO: 6058 - protein, 158 aa, Homo Sapiens
MGCLGNSKTEDQRNEEKAQREANKKIEKQLQEALNLFKSIWNNRWLRTISVILFLNKQDLLAEKVLAGKSKIEDYFPEFARYTTPEDATPEPGEDPRVTRAKYFIRDEFLRISTASGDGRHYCYPHFTCAVDTENIRRVFNDCRDIIQRMHLRQYELL

SEQ ID NO: 6059 - protein, 379 aa, Homo Sapiens
MGCLGNSKTEDQRNEEKAQREANKKIEKQLQKDKQVYRATHRLLLLGAGESGKSTIVKQMRILHVNGFNGDEKATKVQDIKNNLKEAIETIVAAMSNLVPPVELANPENQFRVDYILSVMNVPDFDFPPEFYEHAKALWEDEGVRACYERSNEYQLIDCAQYFLDKIDVIKQADYVPSDQDLLRCRVLTSGIFETKFQVDKVNFHMFDVGGQRDERRKWIQCFNDVTAIIFVVASSSYNMVIREDNQTNRLQEALNLFKSIWNNRWLRTISVILFLNKQDLLAEKVLAGKSKIEDYFPEFARYTTPEDATPEPGEDPRVTRAKYFIRDEFLRISTASGDGRHYCYPHFTCAVDTENIRRVFNDCRDIIQRMHLRQYELL

SEQ ID NO: 6060 - protein, 380 aa, Homo Sapiens
MGCLGNSKTEDQRNEEKAQREANKKIEKQLQKDKQVYRATHRLLLLGAGESGKSTIVKQMRILHVNGFNGDSEKATKVQDIKNNLKEAIETIVAAMSNLVPPVELANPENQFRVDYILSVMNVPDFDFPPEFYEHAKALWEDEGVRACYERSNEYQLIDCAQYFLDKIDVIKQADYVPSDQDLLRCRVLTSGIFETKFQVDKVNFHMFDVGGQRDERRKWIQCFNDVTAIIFVVASSSYNMVIREDNQTNRLQEALNLFKSIWNNRWLRTISVILFLNKQDLLAEKVLAGKSKIEDYFPEFARYTTPEDATPEPGEDPRVTRAKYFIRDEFLRISTASGDGRHYCYPHFTCAVDTENIRRVFNDCRDIIQRMHLRQYELL

SEQ ID NO: 6061 - protein, 394 aa, Homo Sapiens
MGCLGNSKTEDQRNEEKAQREANKKIEKQLQKDKQVYRATHRLLLLGAGESGKSTIVKQMRILHVNGFNGEGGEEDPQAARSNSDGEKATKVQDIKNNLKEAIETIVAAMSNLVPPVELANPENQFRVDYILSVMNVPDFDFPPEFYEHAKALWEDEGVRACYERSNEYQLIDCAQYFLDKIDVIKQADYVPSDQDLLRCRVLTSGIFETKFQVDKVNFHMFDVGGQRDERRKWIQCFNDVTAIIFVVASSSYNMVIREDNQTNRLQEALNLFKSIWNNRWLRTISVILFLNKQDLLAEKVLAGKSKIEDYFPEFARYTTPEDATPEPGEDPRVTRAKYFIRDEFLRISTASGDGRHYCYPHFTCAVDTENIRRVFNDCRDIIQRMHLRQYELL

SEQ ID NO: 6062 - protein, 87 aa, Homo Sapiens
MGCLGNSKTEDQRNEEKAQREANKKIEKQLQKDKQVYRATHRLLLLGAGESGKSTIVKQMRILHVNGFNGEGGEEDPQAARSNSDGI

SEQ ID NO: 6063 - protein, 395 aa, Homo Sapiens
MGCLGNSKTEDQRNEEKAQREANKKIEKQLQKDKQVYRATHRLLLLGAGESGKSTIVKQMRILHVNGFNGEGGEEDPQAARSNSDGSEKATKVQDIKNNLKEAIETIVAAMSNLVPPVELANPENQFRVDYILSVMNVPDFDFPPEFYEHAKALWEDEGVRACYERSNEYQLIDCAQYFLDKIDVIKQADYVPSDQDLLRCRVLTSGIFETKFQVDKVNFHMFDVGGQRDERRKWIQCFNDVTAIIFVVASSSYNMVIREDNQTNRLQEALNLFKSIWNNRWLRTISVILFLNKQDLLAEKVLAGKSKIEDYFPEFARYTTPEDATPEPGEDPRVTRAKYFIRDEFLRISTASGDGRHYCYPHFTCAVDTENIRRVFNDCRDIIQRMHLRQYELL

SEQ ID NO: 6064 - protein, 1023 aa, Homo Sapiens
MGVRNCLYGNNMSGQRDIPPEIGEQPEQPPLEAPGAAAPGAGPSPAEEMETEPPHNEPIPVENDGEACGPPEVSRPNFQVLNPAFREAGAHGSYSPPPEEAMPFEAEQPSLGGFWPTLEQPGFPSGVHAGLEAFGPALMEPGAFSGARPGLGGYSPPPEEAMPFEFDQPAQRGCSQLLLQVPDLAPGGPGAAGVPGAPPEEPQALRPAKAGSRGGYSPPPEETMPFELDGEGFGDDSPPPGLSRVIAQVDGSSQFAAVAASSAVRLTPAANAPPLWVPGAIGSPSQEAVRPPSNFTGSSPWMEISGPPFEIGSAPAGVDDTPVNMDSPPIALDGPPIKVSGAPDKRERAERPPVEEEAAEMEGAADAAEGGKVPSPGYGSPAAGAASADTAARAAPAAPADPDSGATPEDPDSGTAPADPDSGAFAADPDSGAAPAAPADPDSGAAPDAPADPDSGAAPDAPADPDAGAAPEAPAAPAAAETRAAHVAPAAPDAGAPTAPAASATRAAQVRRAASAAPASGARRKIHLRPPSPEIQAADPPTPRPTRASAWRGKSESSRGRRVYYDEGVASSDDDSSGDESDDGTSGCLRWFQHRRNRRRRKPQRNLLRNFLVQAFGGCFGRSESPQPKASRSLKVKKVPLAEKRRQMRKEALEKRAQKRAEKKRSKLIDKQLQDEKMGYMCTHRLLLLGAGESGKSTIVKQMRILHVNGFNGDSEKATKVQDIKNNLKEAIETIVAAMSNLVPPVELANPENQFRVDYILSVMNVPDFDFPPEFYEHAKALWEDEGVRACYERSNEYQLIDCAQYFLDKIDVIKQADYVPSDQDLLRCRVLTSGIFETKFQVDKVNFHMFDVGGQRDERRKWIQCFNDVTAIIFVVASSSYNMVIREDNQTNRLQEALNLFKSIWNNRWLRTISVILFLNKQDLLAEKVLAGKSKIEDYFPEFARYTTPEDATPEPGEDPRVTRAKYFIRDEFLRISTASGDGRHYCYPHFTCAVDTENIRRVFNDCRDIIQRMHLRQYELL

SEQ ID NO: 6065 - protein, 720 aa, Homo Sapiens [sequence omitted]

SEQ ID NO: 6066 - protein, 1037 aa, Homo Sapiens
MGVRNCLYGNNMSGQRDIPPEIGEQPEQPPLEAPGAAAPGAGPSPAEEMETEPPHNEPIPVENDGEACGPPEVSRPNFQVLNPAFREAGAHGSYSPPPEEAMPFEAEQPSLGGFWPTLEQPGFPSGVHAGLEAFGPALMEPGAFSGARPGLGGYSPPPEEAMPFEFDQPAQRGCSQLLLQVPDLAPGGPGAAGVPGAPPEEPQALRPAKAGSRGGYSPPPEETMPFELDGEGFGDDSPPPGLSRVIAQVDGSSQFAAVAASSAVRLTPAANAPPLWVPGAIGSPSQEAVRPPSNFTGSSPWMEISGPPFEIGSAPAGVDDTPVNMDSPPIALDGPPIKVSGAPDKRERAERPPVEEEAAEMEGAADAAEGGKVPSPGYGSPAAGAASADTAARAAPAAPADPDSGATPEDPDSGTAPADPDSGAFAADPDSGAAPAAPADPDSGAAPDAPADPDSGAAPDAPADPDAGAAPEAPAAPAAAETRAAHVAPAAPDAGAPTAPAASATRAAQVRRAASAAPASGARRKIHLRPPSPEIQAADPPTPRPTRASAWRGKSESSRGRRVYYDEGVASSDDDSSGDESDDGTSGCLRWFQHRRNRRRRKPQRNLLRNFLVQAFGGCFGRSESPQPKASRSLKVKKVPLAEKRRQMRKEALEKRAQKRAEKKRSKLIDKQLQDEKMGYMCTHRLLLLGAGESGKSTIVKQMRILHVNGFNGEGGEEDPQAARSNSDGEKATKVQDIKNNLKEAIETIVAAMSNLVPPVELANPENQFRVDYILSVMNVPDFDFPPEFYEHAKALWEDEGVRACYERSNEYQLIDCAQYFLDKIDVIKQADYVPSDQDLLRCRVLTSGIFETKFQVDKVNFHMFDVGGQRDERRKWIQCFNDVTAIIFVVASSSYNMVIREDNQTNRLQEALNLFKSIWNNRWLRTISVILFLNKQDLLAEKVLAGKSKIEDYFPEFARYTTPEDATPEPGEDPRVTRAKYFIRDEFLRISTASGDGRHYCYPHFTCAVDTENIRRVFNDCRDIIQRMHLRQYELL

SEQ ID NO: 6067 - protein, 120 aa, Homo Sapiens
MRILHVNGFNGEGGEEDPQAARSNSDGEKATKVQDIKNNLKEAIETIVAAMSNLVPPVELANPENQFRVDYILSVMNVPDFDFPPEFYEHAKALWEDEGVRACYERSNEYQLIDCAQYFL

SEQ ID NO: 6068 - protein, 160 aa, Homo Sapiens
MRILHVNGFNGEGGEEDPQAARSNSDGEKATKVQDIKNNLKEAIETIVAAMSNLVPPVELANPENQFRVDYILSVMNVPDFDFPPEFYEHAKALWEDEGVRACYERSNEYQLIDCAQYFLDKIDVIKQADYVPSDQDLLRCRVLTSGIFETKFQVDKVNF

SEQ ID NO: 6069 - protein, 166 aa, Homo Sapiens
PESESDHEHEEADLELSLPECLEYEEEFDYETESETESEIESETDFETEPETAPTTEPETEPEDDRGPVVPKHSTFGQSLTQRLHALKLRSPDASPSRAPPSTQEPQSPREGEELKPEDKDPRDPEESKEPKEEKQRRRCKPKKPTRRDASPESPSKKGPIPIRRH

SEQ ID NO: 6070 - protein, 193 aa, Homo Sapiens
PKASRSLKVKKVPLAEKRRQMRKEALEKRAQKRAEKKRSKLIDKQLQDEKMGYMCTHRLLLLGAGESGKSTIVKQMRILHVNGFNGEGGEEDPQAARSNSDGSEKATKVQDIKNNLKEAIETIVAAMSNLVPPVELANPENQFRVDYILSVMNVPDFDFPPEFYEHAKALWEDEGVRACYERSNEYQLIDCAQ

SEQ ID NO: 6071 - protein, 61 aa, Homo Sapiens
QRNEEKAQREANKKIEKQLQKDKQVYRATHRLLLLGAGESGKSTIVKQMRILHVNGFNGEI

SEQ ID NO: 6072 - protein, 199 aa, Homo Sapiens
  misc_feature (1)..(1): Xaa can be any naturally occurring amino acid
XAFGGCFGRSESPQPKASRSLKVKKVPLAEKRRQMRKEALEKRAQKRAEKKRSKLIDKQLQDEKMGYMCTHRLLLLGAGESGKSTIVKQMRILHVNGFNGDEKATKVQDIKNNLKEAIETIVAAMSNLVPPVELANPENQFRVDYILSVMNVPDFDFPPEFYEHAKALWEDEGVRACYERSNEYQLIDCAQYFLDKIDV

SEQ ID NO: 6073 - protein, 184 aa, Homo Sapiens
  misc_feature (1)..(1): Xaa can be any naturally occurring amino acid
XGRRVYYDEGVASSDDDSSGDESDDGTSGCLRWFQHRRNRRRRKPQRNLLRNFLVQAFGGCFGRSESPQPKASRSLKVKKVPLAEKRRQMRKEALEKRAQKRAEKKRSKLIDKQLQDEKMGYMCTHRLLLLGRKVVPSDTEGRFRLDRPAPATVSWTGRGFSVSSLLIRSPNPPAFTVEKPDTQ

SEQ ID NO: 6074 - protein, 113 aa, Homo Sapiens
  misc_feature (1)..(1): Xaa can be any naturally occurring amino acid
XTTEPETEPEDDRGPVVPKHSTFGQSLTQRLHALKLRSPDASPSRAPPSTQEPQSPREGEELKPEDKDPRDPEESKEPKEEKQRRRCKPKKPTRRDASPESPSKKGPIPIRRH

SEQ ID NO: 6075 - protein, 93 aa, Homo Sapiens
  misc_feature (1)..(1): Xaa can be any naturally occurring amino acid
XVPLAEKRRQMRKEALEKRAQKRAEKKRSKLIDKQLQDEKMGYMCTHRLLLLGAGESGKSTIVKQMRILHVNGFNGEGGEEDPQAARSNSDGI

SEQ ID NO: 6076 - protein, 172 aa, Homo Sapiens
MATWALLLLAAMLLGNPGLEVSVSPKGKNTSGRESGFGWAIWMEGLVFSRLSPEYYDLARAHLRDEEKSCPCLAQEGPQGDLLTKTQELGRDYRTCLTIVQKLKKMVDKPTQRSVSNAATRVCRTGRSRWRDVCRNFMRRYQSRVTQGLVAGETAQQICEDLRLCIPSTGPL

SEQ ID NO: 6077 - protein, 145 aa, Homo Sapiens
MATWALLLLAAMLLGNPGLVFSRLSPEYYDLARAHLRDEEKSCPCLAQEGPQGDLLTKTQELGRDYRTCLTIVQKLKKMVDKPTQRSVSNAATRVCRTGRSRWRDVCRNFMRRYQSRVTQGLVAGETAQQICEDLRLCIPSTGPL

SEQ ID NO: 6078 - protein, 130 aa, Homo Sapiens
MEGLVFSRLSPEYYDLARAHLRDEEKSCPCLAQEGPQGDLLTKTQELGRDYRTCLTIVQKLKKMVDKPTQRSVSNAATRVCRTGRSRWRDVCRNFMRRYQSRVTQGLVAGETAQQICEDLRLCIPSTGPL

SEQ ID NO: 6079 - protein, 187 aa, Homo Sapiens
  misc_feature (1)..(1): Xaa can be any naturally occurring amino acid
XHLRDEEKSCPCLAQEGPQGDLLTKTQELGRDYRTCLTIVQKLKKMVDKPTQRSVSNAATRVCRTGRSRWRDVCRNFMRRYQSRVTQGLVAGETAQQICEDLRLCIPSTGPTTCSGCRLASRMCLWVPSEPSHLVLWKKHRLLSSDPGNLSNLCRLLASSIQNPLSSLPPLTPSAVLPSHENKVSSK

SEQ ID NO: 6080 - protein, 76 aa, Homo Sapiens
MAAGLARLLLLLGLSAGGPAPAGAAKMKVVEEPNAFGVNNPFLPQASRLQAKRDPSPVSETGFHRVSQDGLDLLTS

SEQ ID NO: 6081 - protein, 76 aa, Homo Sapiens; identical to SEQ ID NO: 6080

SEQ ID NO: 6082 - protein, 61 aa, Homo Sapiens
MAAGLARLLLLLGLSAGGPAPAGAAKMKVVEEPNAFGVNNPFLPQASRLQAKRDPSPVSGE

SEQ ID NO: 6083 - protein, 305 aa, Homo Sapiens
MAAGLARLLLLLGLSAGGPAPAGAAKMKVVEEPNAFGVNNPFLPQASRLQAKRDPSPVSGPVHLFRLSGKCFSLVESTYKYEFCPFHNVTQHEQTFRWNAYSGILGIWHEWEIANNTFTGMWMRDGDACRSRSRQSKVELACGKSNRLAHVSEPSTCVYALTFETPLVCHPHALLVYPTLPEALQRQWDQVEQDLADELITPQGHEKLLRTLFEDAGYLKTPEENEPTQLEGGPDSLGFETLENCRKAHKELSKEIKRLKGLLTQHGIPYTRPTETSNLEHLGHETPRAKSPEQLRGDPGLRGSL

SEQ ID NO: 6084 - protein, 185 aa, Homo Sapiens
  misc_feature (1)..(1): Xaa can be any naturally occurring amino acid
XRLLLLLGLSAGGEWPGRPRPQAPRALCTPASPLTVSLPVGPAPAGAAKMKVVEEPNAFGVNNPFLPQASRLQAKRDPSPVSGPVHLFRLSGKCFSLVESTYKYEFCPFHNVTQHEQTFRWNAYSGILGIWHEWEIANNTFTGMWMRDGDACRSRSRQSKVELACGKSNRLAHVSEPSTCVYALT

SEQ ID NO: 6085 - protein, 92 aa, Homo Sapiens
MKPIQKLLAGLILLTWCVEGCSSQHWSYGLRPGGKRDAENLIDSFQEIVKEVGQLAETQRFECTTHQPRSPLRDLKGALESLIEEETGQKKI

SEQ ID NO: 6086 - protein, 92 aa, Homo Sapiens; identical to SEQ ID NO: 6085

SEQ ID NO: 6087 - protein, 113 aa, Homo Sapiens
MASSRRGLLLLLLLTAHLGPSEAQHWSHGWYPGGKRALSSAQDPQNALRPPAGSPVQTAHGLPSDALAPLDDSMPWEGRTTAQWSLHRKRHLARTLLTAAREPRPAPPSSNKV

SEQ ID NO: 6088 - protein, 113 aa, Homo Sapiens; identical to SEQ ID NO: 6087

SEQ ID NO: 6089 - protein, 120 aa, Homo Sapiens
MASSRRGLLLLLLLTAHLGPSEAQHWSHGWYPGGKRALSSAQDPQNALRPPGRALDTAAGSPVQTAHGLPSDALAPLDDSMPWEGRTTAQWSLHRKRHLARTLLTAAREPRPAPPSSNKV

SEQ ID NO: 6090 - protein, 112 aa, Homo Sapiens
MASSRRGLLLLLLLTAHLGPSEAQHWSHGWYPGGKRALSSAQDPQNALRPPGSPVQTAHGLPSDALAPLDDSMPWEGRTTAQWSLHRKRHLARTLLTAAREPRPAPPSSNKV

SEQ ID NO: 6091 - protein, 496 aa, Homo Sapiens
MDNYLLLQTPLKKTKALIGEMGMTFSSAYVPSALCCPSRASILTGKYPHNHHVVNNTLEGNCSSKSWQKIQEPNTFPAILRSMCGYQTFFAGKYLNEYGAPDAGGLEHVPLGWSYWYALEKNSKYYNYTLSINGKARKHGENYSVDYLTDVLANVSLDFLDYKSNFEPFFMMIATPAPHSPWTAAPQYQKAFQNVFAPRNKNFNIHGTNKHWLIRQAKTPMTNSSIQFLDNAFRKRWQTLLSVDDLVEKLVKRLEFTGELNNTYIFYTSDNGYHTGQFSLPIDKRQLYEFDIKVPLLVRGPGIKPNQTSKMLVANIDLGPTILDIAGYDLNKTQMDGMSLLPILRGASNLTWRSDVLVEYQGEGRNVTDPTCPSLSPGVSQCFPDCVCEDAYNNTYACVRTMSALWNLQYCEFDDQEVFVEVYNLTADPDQITNIAKTIDPELLGKMNYRLMMLQSCSGPTCRTPGVFDPGYRFDPRLMFSNRGSVRTRRFSKHLL

SEQ ID NO: 6092 - protein, 248 aa, Homo Sapiens
MGMTFSSAYVPSALCCPSRASILTGKYPHNHHVVNNTLEGNCSSKSWQKIQEPNTFPAILRSMCGYQTFFAGKYLNEYGAPDAGGLEHVPLGWSYWYALEKNSKYYNYTLSINGKARKHGENYSVDYLTDVLANVSLDFLDYKSNFEPFFMMIATPAPHSPWTAAPQYQKAFQNVFAPRNKNFNIHGTNKHWLIRQAKTPMTNSSIQFLDNAFRKRWQTLLSVDDLVEKLVKRLEFTGELNNTYIFYT

SEQ ID NO: 6093 - protein, 584 aa, Homo Sapiens
MRLLPLAPGRLRRGSPRHLPSCSPALLLLVLGGCLGVFGVAAGTRRPNVVLLLTDDQDEVLGGMAFSEYSTTNCQTGLQGEELGQEHLRTYLEPSRTPLKKTKALIGEMGMTFSSAYVPSALCCPSRASILTGKYPHNHHVVNNTLEGNCSSKSWQKIQEPNTFPAILRSMCGYQTFFAGKYLNEYGAPDAGGLEHVPLGWSYWYALEKNSKYYNYTLSINGKARKHGENYSVDYLTDVLANVSLDFLDYKSNFEPFFMMIATPAPHSPWTAAPQYQKAFQNVFAPRNKNFNIHGTNKHWLIRQAKTPMTNSSIQFLDNAFRKRWQTLLSVDDLVEKLVKRLEFTGELNNTYIFYTSDNGYHTGQFSLPIDKRQLYEFDIKVPLLVRGPGIKPNQTSKMLVANIDLGPTILDIAGYDLNKTQMDGMSLLPILRGASNLTWRSDVLVEYQGEGRNVTDPTCPSLSPGVSQCFPDCVCEDAYNNTYACVRTMSALWNLQYCEFDDQEVFVEVYNLTADPDQITNIAKTIDPELLGKMNYRLMMLQSCSGPTCRTPGVFDPGYRFDPRLMFSNRGSVRTRRFSKHLL

SEQ ID NO: 6094 - protein, 552 aa, Homo Sapiens
MRLLPLAPGRLRRGSPRHLPSCSPALLLLVLGGCLGVFGVAAGTRRPNVVLLLTDDQDEVLGGMTPLKKTKALIGEMGMTFSSAYVPSALCCPSRASILTGKYPHNHHVVNNTLEGNCSSKSWQKIQEPNTFPAILRSMCGYQTFFAGKYLNEYGAPDAGGLEHVPLGWSYWYALEKNSKYYNYTLSINGKARKHGENYSVDYLTDVLANVSLDFLDYKSNFEPFFMMIATPAPHSPWTAAPQYQKAFQNVFAPRNKNFNIHGTNKHWLIRQAKTPMTNSSIQFLDNAFRKRWQTLLSVDDLVEKLVKRLEFTGELNNTYIFYTSDNGYHTGQFSLPIDKRQLYEFDIKVPLLVRGPGIKPNQTSKMLVANIDLGPTILDIAGYDLNKTQMDGMSLLPILRGASNLTWRSDVLVEYQGEGRNVTDPTCPSLSPGVSQCFPDCVCEDAYNNTYACVRTMSALWNLQYCEFDDQEVFVEVYNLTADPDQITNIAKTIDPELLGKMNYRLMMLQSCSGPTCRTPGVFDPGYRFDPRLMFSNRGSVRTRRFSKHLL

SEQ ID NO: 6095 - protein, 532 aa, Homo Sapiens
MRLLPLAPGRLRRGSPRHLPSCSPALLLLVLGGCLGVFGVAAGTRRPNVVLLLTDDQDEVLGGMYVPSALCCPSRASILTGKYPHNHHVVNNTLEGNCSSKSWQKIQEPNTFPAILRSMCGYQTFFAGKYLNEYGAPDAGGLEHVPLGWSYWYALEKNSKYYNYTLSINGKARKHGENYSVDYLTDVLANVSLDFLDYKSNFEPFFMMIATPAPHSPWTAAPQYQKAFQNVFAPRNKNFNIHGTNKHWLIRQAKTPMTNSSIQFLDNAFRKRWQTLLSVDDLVEKLVKRLEFTGELNNTYIFYTSDNGYHTGQFSLPIDKRQLYEFDIKVPLLVRGPGIKPNQTSKMLVANIDLGPTILDIAGYDLNKTQMDGMSLLPILRGASNLTWRSDVLVEYQGEGRNVTDPTCPSLSPGVSQCFPDCVCEDAYNNTYACVRTMSALWNLQYCEFDDQEVFVEVYNLTADPDQITNIAKTIDPELLGKMNYRLMMLQSCSGPTCRTPGVFDPGYRFDPRLMFSNRGSVRTRRFSKHLL

SEQ ID NO: 6096 - protein, 303 aa, Homo Sapiens
  misc_feature (1)..(1): Xaa can be any naturally occurring amino acid
XYNYTLSINGKARKHGENYSVDYLTDVLANVSLDFLDYKSNFEPFFMMIATPAPHSPWTAAPQYQKAFQNVFAPRNKNFNIHGTNKHWLIRQAKTPMTNSSIQFLDNAFRKRWQTLLSVDDLVEKLVKRLEFTGELNNTYIFYTSDNGYHTGQFSLPIDKRQLYEFDIKVPLLVRGPGIKPNQTSKRGASNLTWRSDVLVEYQGEGRNVTDPTCPSLSPGVSQCFPDCVCEDAYNNTYACVRTMSALWNLQYCEFDDQEVFVEVYNLTADPDQITNIAKTIDPELLGKMNYRLMMLQSCSGPT

SEQ ID NO: 6097 - protein, 80 aa, Homo Sapiens
MMGLGNGRRSMKSPPLVLAALVACIIVLGFNYWIASSRSVDLQTRIMELEGRVRRAAAERGAVELKKNEFQGELEKQREQ

SEQ ID NO: 6098 - protein, 121 aa, Homo Sapiens
MMGLGNGRRSMKSPPLVLAALVACIIVLGFNYWIASSRSVDLQTRIMELEGRVRRAAAERGAVELKKNEFQGELEKQREQLDKIQSSHNFQLESVNKLYQDEKAVLVNNITTGERLIRVLQ

SEQ ID NO: 6099 - protein, 401 aa, Homo Sapiens
MMGLGNGRRSMKSPPLVLAALVACIIVLGFNYWIASSRSVDLQTRIMELEGRVRRAAAERGAVELKKNEFQGELEKQREQLDKIQSSHNFQLESVNKLYQDEKAVLVNNITTGERLIRVLQDQLKTLQRNYGRLQQDVLQFQKNQTNLERKFSYDLSQCINQMKEVKEQCEERIEEVTKKGNEAVASRDLSENNDQRQQLQALSEPQPRLQAAGLPHTEVPQGKGNVLGNSKSQTPAPSSEVVLDSKRQVEKEETNEIQVVNEEPQRDRLPQEPGREQVVEDRPVGGRGFGGAGELGQTPQVQAALSVSQENPEMEGPERDQLVIPDGQEEEQEAAGEGRNQQKLRGEDDYNMDENEAESETDKQAALAGNDRNIDVFNVEDQKRDTINLLDQREKRNHTL

SEQ ID NO: 6100 - protein, 401 aa, Homo Sapiens; identical to SEQ ID NO: 6099

SEQ ID NO: 6101 - protein, 105 aa, Homo Sapiens
MMGLGNGRRSMKSPPLVLAALVACIIVLGFNYWIASSRSVDLQTRIMELEGRVRRAAAERGAVELKKNEFQGELEKQREQLDKIQSSHNFQLESVNKLYQDEKTS

SEQ ID NO: 6102 - protein, 246 aa, Homo Sapiens
MSWAAVLAVAAARFGHFWGCRWPGPMAQGWAGFSEEELRRLKQTKDPFEPQRRLPAKKSRQQLQREKALVEQSQKLGLQDGSTSLLPEQLLSAPKQRVNVQKPPFSSPTLPSHFTLTSPVGDGQPQGIESQPKELGLENSHDGHNNVEILPPKPDCKLEKKKVELQEKSRWEVLQQEQRLMEEKNKRKKALLAKAIAERSKRTQAETMKLKRIQKELQALDDMVSADIGILRNRIDQASLDYSYAR

SEQ ID NO: 6103 - protein, 394 aa, Homo Sapiens
MSWAAVLAVAAARFGHFWGCRWPGPMAQGWAGFSEEELRRLKQTKDPFEPQRRLPAKKSRQQLQREKALVEQSQKLGLQDGSTSLLPEQLLSAPKQRVNVQKPPFSSPTLPSHFTLTSPVGDGQPQGIESQPKELGLENSHDGHNNVEILPPKPDCKLEKKKVELQEKSRWEVLQQEQRLMEEKNKRKKALLAKAIAERSKRTQAETMKLKRIQKELQALDDMVSADIGILRNRIDQASLDYSYARKRFDRAEAEYIAAKLDIQRKTEIKEQLTEHLCTIIQQNELRKAKKLEELMQQLDVEADEETLELEVEVERLLHEQEVESRRPVVRLERPFQPAEESVTLEFAKENRKCQEQAVSPKVDDQCGNSSSIPFLSPNCPNQEGNDISAALAT

SEQ ID NO: 6104 - protein, 126 aa, Homo Sapiens
  misc_feature (1)..(1): Xaa can be any naturally occurring amino acid
XSWAAVLAVAAARFGHFWGCRWPGPMAQGWAGFSEEELRRLKQTKGYKCPGLWSDSSRLMRRQTTKLCDSRYCKNLLQRQEEPHSAGDWMELGKISQSLCVSRGAFSRTKEKSTKDMNRYFLEKEI

SEQ ID NO: 6105 - protein, 59 aa, Homo Sapiens
MALLHSGRVLPGIAAAFHPGLAAAASARARQRPRLPQKIWTRNTCPLGDWLNFARHLQN

SEQ ID NO: 6106 - protein, 430 aa, Homo Sapiens
MALLHSGRVLPGIAAAFHPGLAAAASARASSWWTHVEMGPPDPILGVTEAFKRDTNSKKMNLGVGAYRDDNGKPYVLPSVRKAEAQIAAKNLDKEYLPIGGLAEFCKASAELALGENSEVLKSGRFVTVQTISGTGALRIGASFLQRFFKFSRDVFLPKPTWGNHTPIFRDAGMQLQGYRYYDPKTCGFDFTGAVEDISKIPEQSVLLLHACAHNPTGVDPRPEQWKEIATVVKKRNLFAFFDMAYQGFASGDGDKDAWAVRHFIEQGINVCLCQSYAKNMGLYGERVGAFTMVCKDADEAKRVESQLKILIRPMYSNPPLNGARIAAAILNTPDLRKQWLQEVKVMADRIIGMRTQLVSNLKKEGSTHNWQHITDQIGMFCFTGLKPEQVERLIKEFSIYMTKDGRISVAGVTSSNVGYLAHAIHQVTK

SEQ ID NO: 6107 - protein, 387 aa, Homo Sapiens
MALLHSGRVLPGIAAAFHPGLAAAASARASSWWTHVEMGPPDPILGVTEAFKRDTNSKKMNLGVGAYRDDNGKPYVLPSVRKFVTVQTISGTGALRIGASFLQRFFKFSRDVFLPKPTWGNHTPIFRDAGMQLQGYRYYDPKTCGFDFTGAVEDISKIPEQSVLLLHACAHNPTGVDPRPEQWKEIATVVKKRNLFAFFDMAYQGFASGDGDKDAWAVRHFIEQGINVCLCQSYAKNMGLYGERVGAFTMVCKDADEAKRVESQLKILIRPMYSNPPLNGARIAAAILNTPDLRKQWLQEVKVMADRIIGMRTQLVSNLKKEGSTHNWQHITDQIGMFCFTGLKPEQVERLIKEFSIYMTKDGRISVAGVTSSNVGYLAHAIHQVTK

SEQ ID NO: 6108 - protein, 145 aa, Homo Sapiens
MPHLMERMVGSGLLWLALVSCILTQASAVQRDPSTVEDKCEKACRPEEECLALNSTWGCFCRQDLNSSDVHSLQPQLDCGPREIKVKVDKCLLGGLGLGEEVIAYLRDPNCSSILQTEERNWVSVTSPVQASACRNILERNQTHA

SEQ ID NO: 6109 - protein, 387 aa, Homo Sapiens
MPHLMERMVGSGLLWLALVSCILTQASAVQRDPSTVEDKCEKACRPEEECLALNSTWGCFCRQDLNSSDVHSLQPQLDCGPREIKVKVDKCLLGGLGLGEEVIAYLRDPNCSSILQTEERNWVSVTSPVQASACRNILERNQTHAIYKNTLSLVNDFIIRDTILNINFQCAYPLDMKVSLQAALQPIVSSLNVSVDGNGEFIVRMALFQDQNYTNPYEGDAVELSVESVLYVGAILEQGDTSRFNLVLRNCYATPTEDKADLVKYFIIRNSCSNQRDSTIHVEENGQSSESRFSVQMFMFAGHYDLVFLHCEIHLCDSLNEQCQPSCSRSQVRSEVPAIDLARVLDLGPITRRGAQSPGVMNGTPSTAGFLVAWPMVLLTVLLAWLF

SEQ ID NO: 6110 - protein, 163 aa, Homo Sapiens
MPHLMERMVGSGLLWLALVSCILTQASAVQRGEGGVRMSETCVQVHRCQTDAPMWLNGTHPALGDGITNHTACAHWSGNCCFWKTEVLVKACPGGYHVYRLEGTPWCNLRYCTDPSTVEDKCEKACRPEEECLALNSTWGCFCRQDLNSSDVHSLQPQLDCGP

SEQ ID NO: 6111 - protein, 128 aa, Homo Sapiens
MPHLMERMVGSGLLWLALVSCILTQASAVQRGYGNPIEASSYGLDLDCGAPGTPEAHVCFDPCQNYTLLDEPFRSTENSAGSQGCDKNMSGWYRFVGEGGVRMSETCVQVHRCQTDAPMWLNGTHPAL

SEQ ID NO: 6112 - protein, 534 aa, Homo Sapiens
MPHLMERMVGSGLLWLALVSCILTQASAVQRGYGNPIEASSYGLDLDCGAPGTPEAHVCFDPCQNYTLLDEPFRSTENSAGSQGCDKNMSGWYRFVGEGGVRMSETCVQVHRCQTDAPMWLNGTHPALGDGITNHTACAHWSGNCCFWKTEVLVKACPGGYHVYRLEGTPWCNLRYCTDPSTVEDKCEKACRPEEECLALNSTWGCFCRQDLNSSDVHSLQPQLDCGPREIKVKVDKCLLGGLGLGEEVIAYLRDPNCSSILQTEERNWVSVTSPVQASACRNILERNQTHAIYKNTLSLVNDFIIRDTILNINFQCAYPLDMKVSLQAALQPIVSSLNVSVDGNGEFIVRMALFQDQNYTNPYEGDAVELSVESVLYVGAILEQGDTSRFNLVLRNCYATPTEDKADLVKYFIIRNSCSNQRDSTIHVEENGQSSESRFSVQMFMFAGHYDLVFLHCEIHLCDSLNEQCQPSCSRSQVRSEVPAIDLARVLDLGPITRRGAQSPGVMNGTPSTAGFLVAWPMVLLTVLLAWLF

SEQ ID NO: 6113 - protein, 537 aa, Homo Sapiens
MPHLMERMVGSGLLWLALVSCILTQASAVQRGYGNPIEASSYGLDLDCGAPGTPEAHVCFDPCQNYTLLDEPFRSTENSAGSQGCDKNMSGWYRFVGEGGVRMSETCVQVHRCQTDAPMWLNGTHPALGDGITNHTACAHWSGNCCFWKTEVLVKACPGGYHVYRLEGTPWCNLRYCTVPRDPSTVEDKCEKACRPEEECLALNSTWGCFCRQDLNSSDVHSLQPQLDCGPREIKVKVDKCLLGGLGLGEEVIAYLRDPNCSSILQTEERNWVSVTSPVQASACRNILERNQTHAIYKNTLSLVNDFIIRDTILNINFQCAYPLDMKVSLQAALQPIVSSLNVSVDGNGEFIVRMALFQDQNYTNPYEGDAVELSVESVLYVGAILEQGDTSRFNLVLRNCYATPTEDKADLVKYFIIRNSCSNQRDSTIHVEENGQSSESRFSVQMFMFAGHYDLVFLHCEIHLCDSLNEQCQPSCSRSQVRSEVPAIDLARVLDLGPITRRGAQSPGVMNGTPSTAGFLVAWPMVLLTVLLAWLF

SEQ ID NO: 6114 - protein, 390 aa, Homo Sapiens
MPHLMERMVGSGLLWLALVSCILTQASAVQRVPRDPSTVEDKCEKACRPEEECLALNSTWGCFCRQDLNSSDVHSLQPQLDCGPREIKVKVDKCLLGGLGLGEEVIAYLRDPNCSSILQTEERNWVSVTSPVQASACRNILERNQTHAIYKNTLSLVNDFIIRDTILNINFQCAYPLDMKVSLQAALQPIVSSLNVSVDGNGEFIVRMALFQDQNYTNPYEGDAVELSVESVLYVGAILEQGDTSRFNLVLRNCYATPTEDKADLVKYFIIRNSCSNQRDSTIHVEENGQSSESRFSVQMFMFAGHYDLVFLHCEIHLCDSLNEQCQPSCSRSQVRSEVPAIDLARVLDLGPITRRGAQSPGVMNGTPSTAGFLVAWPMVLLTVLLAWLF

SEQ ID NO: 6115 - protein, 141 aa, Homo Sapiens
MSGWYRFVGEGGVRMSETCVQVHRCQTDAPMWLNGTHPALGDGITNHTACAHWSGNCCFWKTEVLVKACPGGYHVYRLEGTPWCNLRYCTDPSTVEDKCEKACRPEEECLALNSTWGCFCRQDLNSSDVHSLQPQLDCGPR

SEQ ID NO: 6116 - protein, 42 aa, Homo Sapiens
  misc_feature (1)..(1): Xaa can be any naturally occurring amino acid
XERMVGSGLLWLALVSCILTQASAVQRGKYSAHLASQMSRKT

SEQ ID NO: 6117 - protein, 117 aa, Homo Sapiens
MKRSLAGRYRCSYQNGSLWSLPSDQLELVATGVFAKPSLSAQPGPAVSSGGDVTLQCQTRYGFDQFALYKEGDPAPYKNPERWYRASFPIITVTAAHSGTYRCYSFSSRDPYLWSAP

SEQ ID NO: 6118 - protein, 321 aa, Homo Sapiens
MSPSPTALFCLGLCLGRVPAQSGPLPKPSLQALPSSLVPLEKPVTLRCQGPPGVDLYRLEKLSSSRYQDQAVLFIPAMKRSLAGRYRCSYQNGSLWSLPSDQLELVATGVFAKPSLSAQPGPAVSSGGDVTLQCQTRYGFDQFALYKEGDPAPYKNPERWYRASFPIITVTAAHSGTYRCYSFSSRDPYLWSAPSDPLELVVTEFSEATAELTVSFTNEVFTTETSRSITASPKESDSPAGPARQYYTKGNLVRICLGAVILIILAGFLAEDWHSRRKRLRHRGRAVQRPLPPLPPLPLTRKSNGGQDGGRQDVHSRGLCS

SEQ ID NO: 6119 - protein, 620 aa, Homo Sapiens
MSPSPTALFCLGLCLGRVPAQSGPLPKPSLQALPSSLVPLEKPVTLRCQGPPGVDLYRLEKLSSSRYQDQAVLFIPAMKRSLAGRYRCSYQNGSLWSLPSDQLELVATGVFAKPSLSAQPGPAVSSGGDVTLQCQTRYGFDQFALYKEGDPAPYKNPERWYRASFPIITVTAAHSGTYRCYSFSSRDPYLWSAPSDPLELVVTGTSVTPSRLPTEPPSPVAEFSEATAELTVSFTNEVFTTETSRSITASPKESDSPAGESCPPVLHQGQPGPDMPRGCDPNNPGGVSGRGLAQPEEAPAAQGQGCAEAASAPPAPPADPEIKRGSGWRPTGCSQPRVMFMTAEPQARSYPREGSWHGRRLKDWRVWSVEAGGQRLQLWKRGHAASSWCSIREPFGQCLSVCLPLCLRAPSIWDGRNLWRPHPPPCTLWMTWYPGWTTYWPLSSTSLIWAPDGSLRFPALRVDSVPSSVQNPPVLPFGPLCSCLVFPRNSHPHSISHCGLTNLLSSLRTGLAGSLGMSFIFLSVKLARCPLPFTLENKISLCNMVKPHLYQQNKKTQKLARCGGASLYSQQLRGLRWENGLSLGGRGCSELRSHHCTLARVTKPDFVSKNTGMNMSITLI

SEQ ID NO: 6120 - protein, 339 aa, Homo Sapiens
MSPSPTALFCLGLCLGRVPAQSGPLPKPSLQALPSSLVPLEKPVTLRCQGPPGVDLYRLEKLSSSRYQDQAVLFIPAMKRSLAGRYRCSYQNGSLWSLPSDQLELVATGVFAKPSLSAQPGPAVSSGGDVTLQCQTRYGFDQFALYKEGDPAPYKNPERWYRASFPIITVTAAHSGTYRCYSFSSRDPYLWSAPSDPLELVVTGTSVTPSRLPTEPPSPVAEFSEATAELTVSFTNEVFTTETSRSITASPKESDSPAGPARQYYTKGNLVRICLGAVILIILAGFLAEDWHSRRKRLRHRGRAVQRPLPPLPPLPLTRKSNGGQDGGRQDVHSRGLCS

SEQ ID NO: 6121 - protein, 134 aa, Homo Sapiens
MSALRPLLLLLLPLCPGPGPGPGSEAKVTRSCAETRQVLGARGYSLNLIPPALISGEHLRVCPQEYTCCSSETEQRLIRETEATFRGLVEDSGSFLVHTLAARHRKFDDNPDPGGCPSLCAGPGDWKKCGQRSA

SEQ ID NO: 6122 - protein, 579 aa, Homo Sapiens
MSALRPLLLLLLPLCPGPGPGPGSEAKVTRSCAETRQVLGARGYSLNLIPPALISGEHLRVCPQEYTCCSSETEQRLIRETEATFRGLVEDSGSFLVHTLAARHRKFDEFFLEMLSVAQHSLTQLFSHSYGRLYAQHALIFNGLFSRLRDFYGESGEGLDDTLADFWAQLLERVFPLLHPQYSFPPDYLLCLSRLASSTDGSLQPFGDSPRRLRLQITRTLVAARAFVQGLETGRNVVSEALKVPVSEGCSQALMRLIGCPLCRGVPSLMPCQGFCLNVVRGCLSSRGLEPDWGNYLDGLLILADKLQGPFSFELTAESIGVKISEGLMYLQENSAKVSAQVFQECGPPDPVPARNRRAPPPREEAGRLWSMVTEEERPTTAAGTNLHRLVWELRERLARMRGFWARLSLTVCGDSRMAADASLEAAPCWTGAGRGRYLPPVVGGSPAEQVNNPELKVDASGPDVPTRRRRLQLRAATARMKTAALGHDLDGQDADEDASGSGGGQQYADDWMAGAVAPPARPPRPPYPPRRDGSGGKGGGGSARYNQGRSRSGGASIGFHTQTILILSLSALALLGPR

SEQ ID NO: 6123 - protein, 320 aa, Homo Sapiens [sequence omitted]

SEQ ID NO: 6124 - protein, 572 aa, Homo Sapiens
MDAQTWPVGFRCLLLLALVGSARSEGVQTCEEVRKLFQWRLLGAVRGLPDSPRAGPDLQVCISKKPTCCTRKMEERYQIAARQDMQQFLQTSSSTLKFLISRNAAAFQETLETLIKQAENYTSILFCSTYRNMALEAAASVQEFFTDVGLYLFGADVNPEEFVNRFFDSLFPLVYNHLINPGVTDSSLEYSECIRMARRDVSPFGNIPQRVMGQMGRSLLPSRTFLQALNLGIEVINTTDYLHFSKECSRALLKMQYCPHCQGLALTKPCMGYCLNVMRGCLAHMAELNPHWHAYIRSLEELSDAMHGTYDIGHVLLNFHLLVNDAVLQAHLNGQKLLEQVNRICGRPVRTPTQSPRCSFDQSKEKHGMKTTTRNSEETLANRRKEFINSLRLYRSFYGGLADQLCANELAAADGLPCWNGEDIVKSYTQRVVGNGIKAQSGNPEVKVKGIDPVINQIIDKLKHVVQLLQGRSPKPDKWELLQLGSGGGMVEQVSGDCDDEDGCGGSGSGEVKRTLKITDWMPDDMNFSDVKQIHQTDTGSTLDTTGAGCAVATESMTFTLISVVMLLPGIW

SEQ ID NO: 6125 - protein, 51 aa, Homo Sapiens
  misc_feature (1)..(1): Xaa can be any naturally occurring amino acid
XMPDDMNFSDVKQIHQTDTGSTLDTTGAGCAVATESMTFTLISVVMLLPGI

SEQ ID NO: 6126 - protein, 263 aa, Homo Sapiens
DAMLLVAERLEGPFNIESVMDPIDVKISEAIMNMQENSMQVSAKVFQGCGQPKPAPALRSARSAPENFNTRFRPYNPEERPTTAAGTSLDRLVTDIKEKLKLSKKVWSALPYTICKDESVTAGTSNEEECWNGHSKARYLPEIMNDGLTNQINNPEVDVDITRPDTFIRQQIMALRVMTNKLKNAYNGNDVNFQDTSDESSGSGSGSGCMDDVCPTEFEFVTTEAPAVDPDRREVDSSAAQRGHSLLSWSLTCIVLALQRLCR

SEQ ID NO: 6127 - protein, 555 aa, Homo Sapiens
MPSWIGAVILPLLGLLLSLPAGADVKARSCGEVRQAYGAKGFSLADIPYQEIAGEHLRICPQEYTCCTTEMEDKLSQQSKLEFENLVEETSHFVRTTFVSRHKKFDEFFRELLENAEKSLNDMFVRTYGMLYMQNSEVFQDLFTELKRYYTGGNVNLEEMLNDFWARLLERMFQLINPQYHFSEDYLECVSKYTDQLKPFGDVPRKLKIQVTRAFIAARTFVQGLTVGREVANRVSKVSPTPGCIRALMKMLYCPYCRGLPTVRPCNNYCLNVMKGCLANQADLDTEWNLFIDAMLLVAERLEGPFNIESVMDPIDVKISEAIMNMQENSMQVSAKVFQGCGQPKPAPALRSARSAPENFNTRFRPYNPEERPTTAAGTSLDRLVTDIKEKLKLSKKVWSALPYTICKDESVTAGTSNEEECWNGHSKARYLPEIMNDGLTNQINNPEVDVDITRPDTFIRQQIMALRVMTNKLKNAYNGNDVNFQDTSDESSGSGSGSGCMDDVCPTEFEFVTTEAPAVDPDRREVDSSAAQRGHSLLSWSLTCIVLALQRLCR

SEQ ID NO: 6128 - protein, 109 aa, Homo Sapiens
MAFQKAVKGTILVGGGALATVLGLSQFAHYRRKQMNLAYVKAADCISEPVNREPPSREAQLLTLQNTSEFDILVIGGGATGSGCALDAVTRGLKTALVERDDFSSGTSS

SEQ ID NO: 6129 - protein, 727 aa, Homo Sapiens
MAFQKAVKGTILVGGGALATVLGLSQFAHYRRKQMNLAYVKAADCISEPVNREPPSREAQLLTLQNTSEFDILVIGGGATGSGCALDAVTRGLKTALVERDDFSSGTSSRSTKLIHGGVRYLQKAIMKLDIEQYRMVKEALHERANLLEIAPHLSAPLPIMLPVYKWWQLPYYWVGIKLYDLVAGSNCLKSSYVLSKSRALEHFPMLQKDKLVGAIVYYDGQHNDARMNLAIALTAARYGAATANYMEVVSLLKKTDPQTGKVRVSGARCKDVLTGQEFDVRAKCVINATGPFTDSVRKMDDKDAAAICQPSAGVHIVMPGYYSPESMGLLDPATSDGRVIFFLPWQKMTIAGTTDTPTDVTHHPIPSEEDINFILNEVRNYLSCDVEVRRGDVLAAWSGIRPLVTDPKSADTQSISRNHVVDISESGLITIAGGKWTTYRSMAEDTINAAVKTHNLKAGPSRTVGLFLQGGKDWSPTLYIRLVQDYGLESEVAQHLAATYGDKAFEVAKMASVTGKRWPIVGVRLVSEFPYIEAEVKYGIKEYACTAVDMISRRTRLAFLNVQAAEEALPRIVELMGRELNWDDYKKQEQLETARKFLYYEMGYKSRSEQLTDRSEISLLPSDIDRYKKRFHKFDADQKGFITIVDVQRVLESINVQMDENTLHEILNEVDLNKNGQVELNEFLQLMSAIQKGRVSGSRLAILMKTAEENLDRRVPIPVDRSCGGL

SEQ ID NO: 6130 - protein, 727 aa, Homo Sapiens; identical to SEQ ID NO: 6129

SEQ ID NO: 6131 - protein, 727 aa, Homo Sapiens; identical to SEQ ID NO: 6129

SEQ ID NO: 6132 - protein, 727 aa, Homo Sapiens; identical to SEQ ID NO: 6129

SEQ ID NO: 6133 - protein, 379 aa, Homo Sapiens
MAFQKAVKGTILVGGGALATVLGLSQFAHYRRKQMNLAYVKAADCISEPVNREPPSREAQLLTLQNTSEFDILVIGGGATGSGCALDAVTRGLKTALVERDDFSSGTSSRSTKLIHGGVRYLQKAIMKLDIEQYRMVKEALHERANLLEIAPHLSAPLPIMLPVYKWWQLPYYWVGIKLYDLVAGSNCLKSSYVLSKSRALEHFPMLQKDKLVGAIVYYDGQHNDARMNLAIALTAARYGAATANYMEVVSLLKKTDPQTGKVRVSGARCKDVLTGQEFDVRAKCVINATGPFTDSVRKMDDKDAAAICQPSAGVHIVMPGYYSPESMGLLDPATSDGRVIFFLPWQKMTIAGTTDTPTDVTHHPIPSEEDINFILNEV

SEQ ID NO: 6134 - protein, 56 aa, Homo Sapiens
MAFQKAVKGTILVGGGALATVLGLSQFAHYRRKQNIVLSGELRNEECILLRKCGKT

SEQ ID NO: 6135 - protein, 56 aa, Homo Sapiens; identical to SEQ ID NO: 6134

SEQ ID NO: 6136 - protein, 601 aa, Homo Sapiens
MKLDIEQYRMVKEALHERANLLEIAPHLSAPLPIMLPVYKWWQLPYYWVGIKLYDLVAGSNCLKSSYVLSKSRALEHFPMLQKDKLVGAIVYYDGQHNDARMNLAIALTAARYGAATANYMEVVSLLKKTDPQTGKVRVSGARCKDVLTGQEFDVRAKCVINATGPFTDSVRKMDDKDAAAICQPSAGVHIVMPGYYSPESMGLLDPATSDGRVIFFLPWQKMTIAGTTDTPTDVTHHPIPSEEDINFILNEVRNYLSCDVEVRRGDVLAAWSGIRPLVTDPKSADTQSISRNHVVDISESGLITIAGGKWTTYRSMAEDTINAAVKTHNLKAGPSRTVGLFLQGGKDWSPTLYIRLVQDYGLESEVAQHLAATYGDKAFEVAKMASVTGKRWPIVGVRLVSEFPYIEAEVKYGIKEYACTAVDMISRRTRLAFLNVQAAEEALPRIVELMGRELNWDDYKKQEQLETARKFLYYEMGYKSRSEQLTDRSEISLLPSDIDRYKKRFHKFDADQKGFITIVDVQRVLESINVQMDENTLHEILNEVDLNKNGQVELNEFLQLMSAIQKGRVSGSRLAILMKTAEENLDRRVPIPVDRSCGGL

SEQ ID NO: 6137 - protein, 73 aa, Homo Sapiens
MDVTSQARGVGLEMYPGTAQPAAPNTTSPELNLSHPLLGTALANGTGELSEHQQYVIGLFLSCLYTIFLFPIG

SEQ ID NO: 6138 - protein, 375 aa, Homo Sapiens
MDVTSQARGVGLEMYPGTAQPAAPNTTSPELNLSHPLLGTALANGTGELSEHQQYVIGLFLSCLYTIFLFPIGFVGNILILVVNISFREKMTIPDLYFINLAVADLILVADSLIEVFNLHERYYDIAVLCTFMSLFLQVNMYSSVFFLTWMSFDRYIALARAMRCSLFRTKHHARLSCGLIWMASVSATLVPFTAVHLQHTDEACFCFADVREVQWLEVTLGFIVPFAIIGLCYSLIVRVLVRAHRHRGLRPRRQKALRMILAVVLVFFVCWLPENVFISVHLLQRTQPGAAPCKQSFRHAHPLTGHIVNLAAFSNSCLNPLIYSFLGETFRDKLRLYIEQKTNLPALNRFCHAALKAVIPDSTEQSDVRFSSAV

SEQ ID NO: 6139 - protein, 375 aa, Homo Sapiens; identical to SEQ ID NO: 6138

SEQ ID NO: 6140 - protein, 375 aa, Homo Sapiens; identical to SEQ ID NO: 6138

SEQ ID NO: 6141 - protein, 375 aa, Homo Sapiens; identical to SEQ ID NO: 6138

SEQ ID NO: 6142 - protein, 408 aa, Homo Sapiens
MDVTSQARGVGLEMYPGTAQPAAPNTTSPELNLSHPLLGTALANGTGELSEHQQYVIGLFLSCLYTIFLFPIGFVGNILILVVNISFREKMTIPDLYFINLAVADLILVADSLIEVFNLHERYYDIAVLCTFMSLFLQVNMYSSVFFLTWMSFDRYIALARAMRCSLFRTKHHARLSCGLIWMASVSATLVPFTAVHLQHTDEACFCFADVREVQWLEVTLGFIVPFAIIGLCYSLIVRVLVRAHRHRGLRPRRQKALRMILAVVLVFFVCWLPENVFISVHLLQRTQPGAAPCKQSFRHAHPLTHGHVMSLNCGQMWLLAPRGLARVTLAWSPWGCLGNLTTGHLALLTQNCYNPKALAPQGPKASGDQPVTQLLPANPACRCTCLPLQETFLTPSTRKATRRGHCG

SEQ ID NO: 6143 - protein, 176 aa, Homo Sapiens
MSLNCGQMWLLAPRGLARVTLAWSPWGCLGNLTTGHLALLTQNCYNPKALAPQGPKASGDQPVTQLLPANPACRCTCLPLQETFLSVLHLPGWQQWRCAASPGPRGAAALGPEQQEGPSVERPPSAPGWFSHCLLTSTWQLHSCGLGPCELPCGLVGCQDNEILQHLWLTNLFLQK

SEQ ID NO: 6144 - protein, 129 aa, Homo Sapiens
MPMASPQTLVLYLLVLAVTEAWGQEAVIPGCHLHPFNVTVRSDRQGTCQGSHVAQACVGHCESSAFPSRYSVLVASGYRHNITSVSQCCTISGLKKVKVQLQCVGSRREELEIFTARACQCDMCRLSRY

SEQ ID NO: 6145 - protein, 129 aa, Homo Sapiens; identical to SEQ ID NO: 6144

SEQ ID NO: 6146 - protein, 118 aa, Homo Sapiens
MPMASPQTLVLYLLVLAVTEAWGQEAVIPGCHLHPFNVTVRSDRQGTCQGSHVAQACVGHCESSAFPSRYSVLVASGYRHNITSVSQCCTISGLKKVRRARARWMDAGVAGRPERWRS

SEQ ID NO: 6147 - protein, 130 aa, Homo Sapiens
MKLAFLFLGPMALLLLAGYGCVLGASSGNLRTFVGCAVREFTFLAKKPGCRGLRITTDACWGRCETWEKPILEPPYIEAHHRVCTYNETKQVTVKLPNCAPGVDPFYTYPVAIRCDCGACSTATTECETI

SEQ ID NO: 6148 - protein, 130 aa, Homo Sapiens; identical to SEQ ID NO: 6147

SEQ ID NO: 6149 - protein, 184 aa, Homo Sapiens
MKALGAVLLALLLFGRPGRGQTQQEEEEEDEDHGPDDYDEEDEDEVEEEETNRLPGGRSRVLLRCYTCKSLPRDERCNLTQNCSHGQTCTTLIAHGNTESGLLTTHSTWCTDSCQPITKTVEGTQVTMTCCQSSLCNVPPWQSSRVQDPTGKGAGGPRGSSETVGAALLLNLLAGLGAMGARRP

SEQ ID NO: 6150 - protein, 840 aa, Homo Sapiens
MSAFRLWPGLLIMLGSLCHRGSPCGLSTHVEIGHRALEFLQLHNGRVNYRELLLEHQDAYQAGIVFPDCFYPSICKGGKFHDVSESTHWTPFLNASVHYIRENYPLPWEKDTEKLVAFLFGITSHMAADVSWHSLGLEQGFLRTMGAIDFHGSYSEAHSAGDFGGDVLSQFEFNFNYLARRWYVPVKDLLGIYEKLYGRKVITENVIVDCSHIQFLEMYGEMLAVSKLYPTYSTKSPFLVEQFQEYFLGGLDDMAFWSTNIYHLTSFMLENGTSDCNLPENPLFIACGGQQNHTQGSKMQKNDFHRNLTTSLTESVDRNINYTERGVFFSVNSWTPDSMSFIYKALERNIRTMFIGGSQLSQKHVSSPLASYFLSFPYARLGWAMTSADLNQDGHGDLVVGAPGYSRPGHIHIGRVYLIYGNDLGLPPVDLDLDKEAHRILEGFQPSGRFGSALAVLDFNVDGVPDLAVGAPSVGSEQLTYKGAVYVYFGSKQGGMSSSPNITISCQDIYCNLGWTLLAADVNGDSEPDLVIGSPFAPGGGKQKGIVAAFYSGPSLSDKEKLNVEAANWTVRGEEDFSWFGYSLHGVTVDNRTLLLVGSPTWKNASRLGHLLHIRDEKKSLGRVYGYFPPNGQSWFTISGDKAMGKLGTSLSSGHVLMNGTLKQVLLVGAPTYDDVSKVAFLTVTLHQGGATRMYALTSDAQPLLLSTFSGDRRFSRFGGVLHLSDLDDDGLDEIIMAAPLRIADVTSGLIGGEDGRVYVYNGKETTLGDMTGKCKSWITPCPEEKAQYVLISPEASSRFGSSLITVRSKAKNQVVIAAGRSSLGARLSGALHVYSLGSD

SEQ ID NO: 6151 - protein, 560 aa, Homo Sapiens
MECLYYFLGFLLLAARLPLDAAKRFHDVLGNERPSAYMREHNQLNGWSSDENDWNEKLYPVWKRGDMRWKNSWKGGRVQAVLTSDSPALVGSNITFAVNLIFPRCQKEDANGNIVYEKNCRNEAGLSADPYVYNWTAWSEDSDGENGTGQSHHNVFPDGKPFPHHPGWRRWNFIYVFHTLGQYFQKLGRCSVRVSVNTANVTLGPQLMEVTVYRRHGRAYVPIAQVKDVYVVTDQIPVFVTMFQKNDRNSSDETFLKDLPIMFDVLIHDPSHFLNYSTINYKWSFGDNTGLFVSTNHTVNHTYVLNGTFSLNLTVKAAAPGPCPPPPPPPRPSKPTPSLGPAGDNPLELSRIPDENCQINRYGHFQATITIVEGILEVNIIQMTDVLMPVPWPESSLIDFVVTCQGSIPTEVCTIISDPTCEITQNTVCSPVDVDEMCLLTVRRTFNGSGTYCVNLTLGDDTSLALTSTLISVPDRDPASPLRMANSALISVGCLAIFVTVISLLVYKKHKEYNPIENSPGNVVRSKGLSVFLNRAKAVFFPGNQEKDPLLKNQEFKGVS

SEQ ID NO: 6152 - protein, 572 aa, Homo Sapiens
MECLYYFLGFLLLAARLPLDAAKRFHDVLGNERPSAYMREHNQLNGWSSDENDWNEKLYPVWKRGDMRWKNSWKGGRVQAVLTSDSPALVGSNITFAVNLIFPRCQKEDANGNIVYEKNCRNEAGLSADPYVYNWTAWSEDSDGENGTGQSHHNVFPDGKPFPHHPGWRRWNFIYVFHTLGQYFQKLGRCSVRVSVNTANVTLGPQLMEVTVYRRHGRAYVPIAQVKDVYVVTDQIPVFVTMFQKNDRNSSDETFLKDLPIMFDVLIHDPSHFLNYSTINYKWSFGDNTGLFVSTNHTVNHTYVLNGTFSLNLTVKAAAPGPCPPPPPPPRPSKPTPSLATTLKSYDSNTPGPAGDNPLELSRIPDENCQINRYGHFQATITIVEGILEVNIIQMTDVLMPVPWPESSLIDFVVTCQGSIPTEVCTIISDPTCEITQNTVCSPVDVDEMCLLTVRRTFNGSGTYCVNLTLGDDTSLALTSTLISVPDRDPASPLRMANSALISVGCLAIFVTVISLLVYKKHKEYNPIENSPGNVVRSKGLSVFLNRAKAVFFPGNQEKDPLLKNQEFKGVS

SEQ ID NO: 6153 - protein, 206 aa, Homo Sapiens
MECLYYFLGFLLLAARLPLDAAKRFHDVLGNERPSAYMREHNQLNGWSSDENDWNEKLYPVWKRGDMRWKNSWKGGRVQAVLTSDSPALVGSNITFAVNLIFPRCQKEDANGNIVYEKNCRNEAGLSADPYVYNWTAWSEDSDGENGTGQSHHNVFPDGKPFPHHPGWRRWNFIYVFHTLGWLLQTPKLLLYLSLKFQPSLFLLYN

SEQ ID NO: 6154 - protein, 588 aa, Homo Sapiens
MARGGAGAEEASLRSNALSWLACGLLALLANAWIILSISAKQQKHKPLELLLCFLAGTHILMAAVPLTTFAVVQLRRQASSDYDWNESICKVFVSTYYTLALATCFTVASLSYHRMWMVRWPVNYRLSNAKKQALHAVMGIWMVSFILSTLPSIGWHNNGERYYARGCQFIVSKIGLGFGVCFSLLLLGGIVMGLVCVAITFYQTLWARPRRARQARRVGGGGGTKAGGPGALGTRPAFEVPAIVVEDARGKRRSSLDGSESAKTSLQVTNLVSAIVFLYDSLTGVPILVVSFFSLKSDSAPPWMVLAVLWCSMAQTLLLPSFIWSCERYRADVRTVWEQCVAIMSEEDGDDDGGCDDYAEGRVCKVRFDANGATGPGSRDPAQVKLLPGRHMLFPPLERVHYLQVPLSRRLSHDETNIFSTPREPGSFLHKWSSSDDIRVLPAQSRALGGPPEYLGQRHRLEDEEDEEEAEGGGLASLRQFLESGVLGSGGGPPRGPGFFREEITTFIDETPLPSPTASPGHSPRRPRPLGLSPRRLSLGSPESRAVGLPLGLSAGRRCSLTGGEESARAWGGSWGPGNPIFPQLTL

SEQ ID NO: 6155 - protein, 304 aa, Homo Sapiens
MLSTGVVSFFSLKSDSAPPWMVLAVLWCSMAQTLLLPSFIWSCERYRADVRTVWEQCVAIMSEEDGDDDGGCDDYAEGRVCKVRFDANGATGPGSRDPAQVKLLPGRHMLFPPLERVHYLQVPLSRRLSHDETNIFSTPREPGSFLHKWSSSDDIRVLPAQSRALGGPPEYLGQRHRLEDEEDEEEAEGGGLASLRQFLESGVLGSGGGPPRGPGFFREEITTFIDETPLPSPTASPGHSPRRPRPLGLSPRRLSLGSPESRAVGLPLGLSAGRRCSLTGGEESARAWGGSWGPGNPIFPQLTL

SEQ ID NO: 6156 - protein, 284 aa, Homo Sapiens
MVLAVLWCSMAQTLLLPSFIWSCERYRADVRTVWEQCVAIMSEEDGDDDGGCDDYAEGRVCKVRFDANGATGPGSRDPAQVKLLPGRHMLFPPLERVHYLQVPLSRRLSHDETNIFSTPREPGSFLHKWSSSDDIRVLPAQSRALGGPPEYLGQRHRLEDEEDEEEAEGGGLASLRQFLESGVLGSGGGPPRGPGFFREEITTFIDETPLPSPTASPGHSPRRPRPLGLSPRRLSLGSPESRAVGLPLGLSAGRRCSLTGGEESARAWGGSWGPGNPIFPQLTL

SEQ ID NO: 6157 - protein, 228 aa, Homo Sapiens
  misc_feature (1)..(1): Xaa can be any naturally occurring amino acid
XITFYQTLWARPRRARQARRVGGGGGTKAGGPGALGTRPAFEVPAIVVEDARGKRRSSLDGSESAKTSLQVTNLVVSFFSLKSDSAPPWMVLAVLWCSMAQTLLLPSFIWSCERYRADVRTVWEQCVAIMSEEDGDDDGGCDDYAEGRVCKVRFDANGATGPGSRDPAQVKLLPGRHMLFPPLERVHYLQLKKLDLAAAAAHTFFVANPMHLQMREDMAKYRRMSGVR

SEQ ID NO: 6158 - protein, 138 aa, Homo Sapiens
MARLLQASCLLSLLLAGFVSQSRGQEKSKAPRQMGNPQMDCHGGISGTIYEYGALTIDGEEYIPFKQYAGKYVLFVNVASYGLTGQYIELNALQEELAPFGLVILGFPCNQFGKQEPGENSEILPTLKYVRPGGGFVP

SEQ ID NO: 6159 - protein, 62 aa, Homo Sapiens
MARLLQASCLLSLLLAGFVSQSRGQEKSKAPRQMGNPQVRETSTPFAAPSAAGTPPPTVVVS

SEQ ID NO: 6160 - protein, 72 aa, Homo Sapiens
MARLLQASCLLSLLLAGFVSQSRGQEKSKMDCHGGISGTIYEYGALTIDGEEYIPFKQYAGKYVLFVNVASY

SEQ ID NO: 6161 - protein, 225 aa, Homo Sapiens
MARLLQASCLLSLLLAGFVSQSRGQEKSKMDCHGGISGTIYEYGALTIDGEEYIPFKQYAGKYVLFVNVASYGLTGQYIELNALQEELAPFGLVILGFPCNQFGKQEPGENSEILPTLKYVRPGGGFVPNFQLFEKGDVNGEKEQKFYTFLKNSCPPTSELLGTSDRLFWEPMKVHDIRWNFEKFLVGPDGIPIMRWHHRTTVSNVKMDILSYMRRQAALGVKRK

SEQ ID NO: 6162 - protein, 225 aa, Homo Sapiens; identical to SEQ ID NO: 6161

SEQ ID NO: 6163 - protein, 99 aa, Homo Sapiens
MARLLQASCLLSLLLAGFVSQSRGQEKSKNMHYRKSLHHSVWSFWAFPATNLENRNQERTQRSFLPSSMSDQVEALSLISSSLRKGMSMERKSRNSTLS

SEQ ID NO: 6164 - protein, 170 aa, Homo Sapiens
  misc_feature (1)..(1): Xaa can be any naturally occurring amino acid
XCHGGISGTIYEYGALTIDGEEYIPFKQYAGKYVLFVNVASYGLTGQYIELNALQEELAPFGLVILGFPCNQFGKQEPGENSEILPTLKTPVLPPRSSWVHLTASSGNPRFTTSAGTLRSSWWGQMVYPSCAGTTGPRSATSRWTSCPTGGRQPWGSRGSNRPSHPMSTM

SEQ ID NO: 6165 - protein, 79 aa, Homo Sapiens
  misc_feature (1)..(1): Xaa can be any naturally occurring amino acid
XFGKQEPGENSEILPTLKYVRPGGGFVPNFQLFEKGDVNGEKEQKFYTFLKGQAIPQEGLGRKRVRGPQARLTLLLSLL

SEQ ID NO: 6166 - protein, 174 aa, Homo Sapiens
MCASRDDWRCARSMHEFSAKDIDGHMVNLDKYRGFVCIVTNVASQGKTEVNYTQLVDLHARYAECGLRILAFPCNQFGKQEPGSNEEIKEFAAGYNVKFDMFSKICVNGDDAHPLWKWMKIQPKGKGILGKTAWGLWGAAGDAHVHVLLFQCHQVELHQVPHRQERLRGEALRT

SEQ ID NO: 6167 - protein, 240 aa, Homo Sapiens
MCASRDDWRCARSMHEFSAKDIDGHMVNLDKYRGFVCIVTNVASQGKTEVNYTQLVDLHARYAECGLRILAFPCNQFGKQEPGSNEEIKEFAAGYNVKFDMFSKICVNGDDAHPLWKWMKIQPKGKGILGNAIKWNFTKFGHRLSTVPHRQERLRGEALRTHGGAPGDREGPAPLFLAPQVCGPARAPAHALGAFHRHSRPACKPAGGADPKIQRAPRRRKVPWPAGLGSAPPPLATLWE

SEQ ID NO: 6168 - protein, 169 aa, Homo Sapiens
MCASRDDWRCARSMHEFSAKDIDGHMVNLDKYRGFVCIVTNVASQGKTEVNYTQLVDLHARYAECGLRILAFPCNQFGKQEPGSNEEIKEFAAGYNVKFDMFSKICVNGDDAHPLWKWMKIQPKGKGILGNAIKWNFTKFLIDKNGCVVKRYGPMEEPLVIEKDLPHYF

SEQ ID NO: 6169 - protein, 133 aa, Homo Sapiens
MGRAGAGSPGRRRQRCQSRGRRRPRAPRRRKAPACRRRRARRRRKKPCPRSLRPEIHECPKSQDPCASRDDWRCARSMHEFSAKDIDGHMVNLDKGFVCIVTNVASQGKTEVNYTQLVDLHARYAECGLRILA

SEQ ID NO: 6170 - protein, 233 aa, Homo Sapiens
MGRAGAGSPGRRRQRCQSRGRRRPRAPRRRKAPACRRRRARRRRKKPCPRSLRPEIHECPKSQDPCASRDDWRCARSMHEFSAKDIDGHMVNLDKYRGFVCIVTNVASQGKTEVNYTQLVDLHARYAECGLRILAFPCNQFGKQEPGSNEEIKEFAAGYNVKFDMFSKICVNGDDAHPLWKWMKIQPKGKGILGNAIKWNFTKFLIDKNGCVVKRYGPMEEPLVIEKDLPHYF

SEQ ID NO: 6171 - protein, 179 aa, Homo Sapiens
MGRAGAGSPGRRRQRCQSRGRRRPRAPRRRKAPACRRRRARRRRKKPCPRSLRPEIHECPKSQDPCASRDDWRCARSMHEFSAKDIDGHMVNLDKYRGFVCIVTNVASQGKTEVNYTQLVDLHARYAECGLRILAFPCNQFGKQEPGSNEEIKEFAAGYNVKFDMFSKICVNGDDAHPL

SEQ ID NO: 6172 - protein, 154 aa, Homo Sapiens
MHEFSAKDIDGHMVNLDKYRGFVCIVTNVASQGKTEVNYTQLVDLHARYAECGLRILAFPCNQFGKQEPGSNEEIKEFAAGYNVKFDMFSKICVNGDDAHPLWKWMKIQPKGKGILGNAIKWNFTKFLIDKNGCVVKRYGPMEEPLVIEKDLPH

SEQ ID NO: 6173 - protein, 196 aa, Homo Sapiens
MSLGRLCRLLKPALLCGALAAPGLAGTMCASRDDWRCARSMHEFSAKDIDGHMVNLDKYRGFVCIVTNVASQGKTEVNYTQLVDLHARYAECGLRILAFPCNQFGKQEPGSNEEIKEFAAGYNVKFDMFSKICVNGDDAHPLWKWMKIQPKGKGILGNAIKWNFTKFLIDKNGCVVKRYGPMEEPLVIEKDLPHYF

SEQ ID NO: 6174 - protein, 196 aa, Homo Sapiens; identical to SEQ ID NO: 6173

SEQ ID NO: 6175 - protein, 177 aa, Homo Sapiens
MSLGRLCRLLKPALLCGALAAPGLAGTMCASRDDWRCARSMHEFSAKDIDGHMVNLDKYRGFVCIVTNVASQGKTEVNYTQLVDLHARYAECGLRILAFPCNQFGKQEPGSNEEIKEFAAGYNVKFDMFSKICVNGDDAHPLWKWMKIQPKGKGILGNSSSTRTAAWSATDPWRSPW

SEQ ID NO: 6176 - protein, 166 aa, Homo Sapiens
YAECGLRILAFPCNQFGKQEPGSNEEIKEFAAGYNVKFDMFSKICVNGDDAHPLWKWMKIQPKGKGILGNAIKWNFTKFLIDKNGCVVKRYGPMEEPLLHKCVAPPEPLPTPLEPSTGTHDGLPANLLVGQTRKSSVHPAGGRSHGLLGLARRPHPWLPCGNKQTN

SEQ ID NO: 6177 - protein, 221 aa, Homo Sapiens
MTTQLRVVHLLPLLLACFVQTSPKQEKMKMDCHKDEKGTIYDYEAIALNKNEYVSFKQYVGKHILFVNVATYCGLTAQYPELNALQEELKPYGLVVLGFPCNQFGKQEPGDNKEILPGLKYVRPGGGFVPSFQLFEKGDVNGEKEQKVFSFLKHSCPHPSEILGTFKSISWDPVKVHDIRWNFEKFLVGPDGIPVMRWSHRATVSSVKTDILAYLKQFKTK

SEQ ID NO: 6178 - protein, 100 aa, Homo Sapiens
MTTQLRVVHLLPLLLACFVQTSPKQEKMKMDCHKDEKGTIYDYEAIALNKNEYVSFKQYVGKHILFVNVATYCGLTAQYPGMSVQGEDLYLVSSFLRKGM

SEQ ID NO: 6179 - protein, 220 aa, Homo Sapiens
MFQQFQASCLVLFFLVGFAQQTLKPQNRKVDCNKGVTGTIYEYGALTLNGEEYIQFKQFAGKHVLFVNVAAYGLAAQYPELNALQEELKNFGVIVLAFPCNQFGKQEPGTNSEILLGLKYVCPGSGFVPSFQLFEKGDVNGEKEQKVFTFLKNSCPPTSDLLGSSSQLFWEPMKVHDIRWNFEKFLVGPDGVPVMHWFHQAPVSTVKSDILEYLKQFNTH

SEQ ID NO: 6180 - protein, 179 aa, Homo Sapiens
MFQQFQASCLVLFFLVGFAQQTLKPQNRKVDCNKGVTGTIYEYGALTLNGEEYIQFKQFAGKHVLFVNVAAYGLAAQYPELNALQEELKNFGVIVLAFPCNQFGKQEPGTNSEILLGLKTPALRPLIFWAHQANSSGSPRSMISAGTLRNFWWGPMESLSCIGSTRLQSAQSSQTSWST

SEQ ID NO: 6181 - protein, 220 aa, Homo Sapiens; identical to SEQ ID NO: 6179

SEQ ID NO: 6182 - protein, 187 aa, Homo Sapiens
MVAATVAAAWLLLWAAACAQQEQDFYDFKAVNIRGKLVSLEKYRGSVSLVVNVASECGFTDQHYRALQQLQRDLGPHHFNVLAFPCNQFGQQEPDSNKEIESFARRTYSVSFPMFSKIAVTGTGAHPAFKYLAQTSGKEPTWNFWKYLVAPDGKVVGAWDPTVSVEEVRPQITALVRKLILLKREDL

SEQ ID NO: 6183 - protein, 42 aa, Homo Sapiens
MSRTAYTVGALLLLLGTLLPAAEGKKKGSQGAIPPPAKRPCM

SEQ ID NO: 6184 - protein, 143 aa, Homo Sapiens
MSRTAYTVGALLLLLGTLLPAAEGKKKGSQGAIPPPDKALHVTERKYLKRDWCKTQPLKQTIHEEGCNSRTIINRFCYGQCNSFYIPRHIRKEEGSFQSCSFCKPKKFTTMMVTLNCPELQPPTKKKRVTRVKQCRCISIDLD

SEQ ID NO: 6185 - protein, 184 aa, Homo Sapiens
MSRTAYTVGALLLLLGTLLPAAEGKKKGSQGAIPPPDKAQHNDSEQTQSPQQPGSRNRGRGQGRGTAMPGEEVLESSQEALHVTERKYLKRDWCKTQPLKQTIHEEGCNSRTIINRFCYGQCNSFYIPRHIRKEEGSFQSCSFCKPKKFTTMMVTLNCPELQPPTKKKRVTRVKQCRCISIDLD

SEQ ID NO: 6186 - protein, 168 aa, Homo Sapiens
MFWKLSLSLFLVAVLVKVAEARKNRPAGAIPSPYKDGSSNNSERWQHQIKEVLASSQEALVVTERKYLKSDWCKTQPLRQTVSEEGCRSRTILNRFCYGQCNSFYIPRHVKKEEESFQSCAFCKPQRVTSVLVELECPGLDPPFRLKKIQKVKQCRCMSVNLSDSDKQ

SEQ ID NO: 6187 - protein, 81 aa, Homo Sapiens
MMRVNGDDDSVAALSFLYDYYMGPKEKRILSSSTGGRNDQGKRYYHGMEYETDLTPLESPTHLMKFLTENVSGTPEYPDLL

SEQ ID NO: 6188 - protein, 556 aa, Homo Sapiens
MMRVNGDDDSVAALSFLYDYYMGPKEKRILSSSTGGRNDQGKRYYHGMEYETDLTPLESPTHLMKFLTENVSGTPEYPDLLKKNNLMSLEGALPTPGKAAPLPAGPSKLEAGSVDSYLLPTTDMYDNGSLNSLFESIHGVPPTQRWQPDSTFKDDPQESMLFPDILKTSPEPPCPEDYPSLKSDFEYTLGSPKAIHIKSGESPMAYLNKGQFYPVTLRTPAGGKGLALSSNKVKSVVMVVFDNEKVPVEQLRFWKHWHSRQPTAKQRVIDVADCKENFNTVEHIEEVAYNALSFVWNVNEEAKVFIGVNCLSTDFSSQKGVKGVPLNLQIDTYDCGLGTERLVHRAVCQIKIFCDKGAERKMRDDERKQFRRKVKCPDSSNSGVKGCLLSGFRGNETTYLRPETDLETPPVLFIPNVHFSSLQRSGGAAPSAGPSSSNRLPLKRTCSPFTEEFEPLPSKQAKEGDLQRVLLYVRRETEEVFDALMLKTPDLKGLRNAISEKYGFPEENIYKVYKKCKRGILVNMDNNIIQHYSNHVAFLLDMGELDGKIQIILKEL

SEQ ID NO: 6189 - protein, 626 aa, Homo Sapiens
MSNELDFRSVRLLKNDPVNLQKFSYTSEDEAWKTYLENPLTAATKAMMRVNGDDDSVAALSFLYDYYMGPKEKRILSSSTGGRNDQGKRYYHGMEYETDLTPLESPTHLMKFLTENVSGTPEYPDLLKKNNLMSLEGALPTPGKAAPLPAGPSKLEAGSVDSYLLPTTDMYDNGSLNSLFESIHGVPPTQRWQPDSTFKDDPQESMLFPDILKTSPEPPCPEDYPSLKSDFEYTLGSPKAIHIKSGESPMAYLNKGQFYPVTLRTPAGGKGLALSSNKVKSVVMVVFDNEKVPVEQLRFWKHWHSRQPTAKQRVIDVADCKENFNTVEHIEEVAYNALSFVWNVNEEAKVFIGVNCLSTDFSSQKGVKGVPLNLQIDTYDCGLGTERLVHRAVCQIKIFCDKGAERKMRDDERKQFRRKVKCPDSSNSGVKGCLLSGFRGNETTYLRPETDLETPPVLFIPNVHFSSLQRSGGAAPSAGPSSSNRLPLKRTCSPFTEEFEPLPSKQAKEGDLQRVLLYVRRETEEVFDALMLKTPDLKGLRNAISEKYGFPEENIYKVYKKCKRGETSLLHPRLSRHPPPDCLECSHPVTQVRNMGFGDGFWRQRDLDSNPSPTTVNSLHFTVNSE

SEQ ID NO: 6190 - protein, 602 aa, Homo Sapiens
MSNELDFRSVRLLKNDPVNLQKFSYTSEDEAWKTYLENPLTAATKAMMRVNGDDDSVAALSFLYDYYMGPKEKRILSSSTGGRNDQGKRYYHGMEYETDLTPLESPTHLMKFLTENVSGTPEYPDLLKKNNLMSLEGALPTPGKAAPLPAGPSKLEAGSVDSYLLPTTDMYDNGSLNSLFESIHGVPPTQRWQPDSTFKDDPQESMLFPDILKTSPEPPCPEDYPSLKSDFEYTLGSPKAIHIKSGESPMAYLNKGQFYPVTLRTPAGGKGLALSSNKVKSVVMVVFDNEKVPVEQLRFWKHWHSRQPTAKQRVIDVADCKENFNTVEHIEEVAYNALSFVWNVNEEAKVFIGVNCLSTDFSSQKGVKGVPLNLQIDTYDCGLGTERLVHRAVCQIKIFCDKGAERKMRDDERKQFRRKVKCPDSSNSGVKGCLLSGFRGNETTYLRPETDLETPPVLFIPNVHFSSLQRSGGAAPSAGPSSSNRLPLKRTCSPFTEEFEPLPSKQAKEGDLQRVLLYVRRETEEVFDALMLKTPDLKGLRNAISEKYGFPEENIYKVYKKCKRGILVNMDNNIIQHYSNHVAFLLDMGELDGKIQIILKEL

SEQ ID NO: 6191 - protein, 607 aa, Homo Sapiens
MWMNSILPIFLFRSVRLLKNDPVNLQKFSYTSEDEAWKTYLENPLTAATKAMMRVNGDDDSVAALSFLYDYYMGPKEKRILSSSTGGRNDQGKRYYHGMEYETDLTPLESPTHLMKFLTENVSGTPEYPDLLKKNNLMSLEGALPTPGKAAPLPAGPSKLEAGSVDSYLLPTTDMYDNGSLNSLFESIHGVPPTQRWQPDSTFKDDPQESMLFPDILKTSPEPPCPEDYPSLKSDFEYTLGSPKAIHIKSGESPMAYLNKGQFYPVTLRTPAGGKGLALSSNKVKSVVMVVFDNEKVPVEQLRFWKHWHSRQPTAKQRVIDVADCKENFNTVEHIEEVAYNALSFVWNVNEEAKVFIGVNCLSTDFSSQKGVKGVPLNLQIDTYDCGLGTERLVHRAVCQIKIFCDKGAERKMRDDERKQFRRKVKCPDSSNSGVKGCLLSGFRGNETTYLRPETDLETPPVLFIPNVHFSSLQRSGGAAPSAGPSSSNRLPLKRTCSPFTEEFEPLPSKQAKEGDLQRVLLYVRRETEEVFDALMLKTPDLKGLRNAISEKYGFPEENIYKVYKKCKRGILVNMDNNIIQHYSNHVAFLLDMGELDGKIQIILKEL

SEQ ID NO: 6192 - protein, 52 aa, Homo Sapiens
MWMNSILPIFLVPRRSGYCPPALGAGMTKERGTTMAWNMRRTSLPLKAPHTS

SEQ ID NO: 6193 - protein, 48 aa, Homo Sapiens
MQKIMHISVLLSPVLWGLIFGVSSNSIQIGGLFPRGADQEYSAFRVGM

SEQ ID NO: 6194 - protein, 125 aa, Homo Sapiens
MQKIMHISVLLSPVLWGLIFGVSSNSIQIGGLFPRGADQEYSAFRVGMVQFSTSEFRLTPHIDNLEVANSFAVTNAFCSQFSRGVYAIFGFYDKKSVNTITSFCGTLHVSFITPSFPTDGTHPFV

SEQ ID NO: 6195 - protein, 883 aa, Homo Sapiens
MQKIMHISVLLSPVLWGLIFGVSSNSIQIGGLFPRGADQEYSAFRVGMVQFSTSEFRLTPHIDNLEVANSFAVTNAFCSQFSRGVYAIFGFYDKKSVNTITSFCGTLHVSFITPSFPTDGTHPFVIQMRPDLKGALLSLIEYYQWDKFAYLYDSDRGLSTLQAVLDSAAEKKWQVTAINVGNINNDKKDEMYRSLFQDLELKKERRVILDCERDKVNDIVDQVITIGKHVKGYHYIIANLGFTDGDLLKIQFGGANVSGFQIVDYDDSLVSKFIERWSTLEEKEYPGAHTTTIKYTSALTYDAVQVMTEAFRNLRKQRIEISRRGNAGDCLANPAVPWGQGVEIERALKQVQVEGLSGNIKFDQNGKRINYTINIMELKTNGPRKIGYWSEVDKMVVTLTELPSGNDTSGLENKTVVVTTILESPYVMMKKNHEMLEGNERYEGYCVDLAAEIAKHCGFKYKLTIVGDGKYGARDADTKIWNGMVGELVYGKADIAIAPLTITLVREEVIDFSKPFMSLGISIMIKKPQKSKPGVFSFLDPLAYEIWMCIVFAYIGVSVVLFLVSRFSPYEWHTEEFEDGRETQSSESTNEFGIFNSLWFSLGAFMQQGCDISPRSLSGRIVGGVWWFFTLIIISSYTANLAAFLTVERMVSPIESAEDLSKQTEIAYGTLDSGSTKEFFRRSKIAVFDKMWTYMRSAEPSVFVRTTAEGVARVRKSKGKYAYLLESTMNEYIEQRKPCDTMKVGGNLDSKGYGIATPKGSSLRNAVNLAVLKLNEQGLLDKLKNKWWYDKGECGSGGGDSKEKTSALSLSNVAGVFYILVGGLGLAMLVALIEFCYKSRAEAKRMKVAKNAQNINPSSSQNSQNFATYKEGYNVYGIESVKI

SEQ ID NO: 6196 - protein, 883 aa, Homo Sapiens
MQKIMHISVLLSPVLWGLIFGVSSNSIQIGGLFPRGADQEYSAFRVGMVQFSTSEFRLTPHIDNLEVANSFAVTNAFCSQFSRGVYAIFGFYDKKSVNTITSFCGTLHVSFITPSFPTDGTHPFVIQMRPDLKGALLSLIEYYQWDKFAYLYDSDRGLSTLQAVLDSAAEKKWQVTAINVGNINNDKKDEMYRSLFQDLELKKERRVILDCERDKVNDIVDQVITIGKHVKGYHYIIANLGFTDGDLLKIQFGGANVSGFQIVDYDDSLVSKFIERWSTLEEKEYPGAHTTTIKYTSALTYDAVQVMTEAFRNLRKQRIEISRRGNAGDCLANPAVPWGQGVEIERALKQVQVEGLSGNIKFDQNGKRINYTINIMELKTNGPRKIGYWSEVDKMVVTLTELPSGNDTSGLENKTVVVTTILESPYVMMKKNHEMLEGNERYEGYCVDLAAEIAKHCGFKYKLTIVGDGKYGARDADTKIWNGMVGELVYGKADIAIAPLTITLVREEVIDFSKPFMSLGISIMIKKPQKSKPGVFSFLDPLAYEIWMCIVFAYIGVSVVLFLVSRFSPYEWHTEEFEDGRETQSSESTNEFGIFNSLWFSLGAFMQQGCDISPRSLSGRIVGGVWWFFTLIIISSYTANLAAFLTVERMVSPIESAEDLSKQTEIAYGTLDSGSTKEFFRRSKIAVFDKMWTYMRSAEPSVFVRTTAEGVARVRKSKGKYAYLLESTMNEYIEQRKPCDTMKVGGNLDSKGYGIATPKGSSLRTPVNLAVLKLSEQGVLDKLKNKWWYDKGECGAKDSGSKEKTSALSLSNVAGVFYILVGGLGLAMLVALIEFCYKSRAEAKRMKVAKNAQNINPSSSQNSQNFATYKEGYNVYGIESVKI

SEQ ID NO: 6197 - protein, 901 aa, Homo Sapiens
MQKIMHISVLLSPVLWGLIFGVSSNSIQIGGLFPRGADQEYSAFRVGMVQFSTSEFRLTPHIDNLEVANSFAVTNAFCSQFSRGVYAIFGFYDKKSVNTITSFCGTLHVSFITPSFPTDGTHPFVIQMRPDLKGALLSLIEYYQWDKFAYLYDSDRGLSTLQAVLDSAAEKKWQVTAINVGNINNDKKDEMYRSLFQDLELKKERRVILDCERDKVNDIVDQVITIGKHVKGYHYIIANLGFTDGDLLKIQFGGANVSGFQIVDYDDSLVSKFIERWSTLEEKEYPGAHTTTIKYTSALTYDAVQVMTEAFRNLRKQRIEISRRGNAGDCLANPAVPWGQGVEIERALKQVQVEGLSGNIKFDQNGKRINYTINIMELKTNGPRKIGYWSEVDKMVVTLTELPSGNDTSGLENKTVVVTTILESPYVMMKKNHEMLEGNERYEGYCVDLAAEIAKHCGFKYKLTIVGDGKYGARDADTKIWNGMVGELVYGKADIAIAPLTITLVREEVIDFSKPFMSLGISIMIKKPQKSKPGVFSFLDPLAYEIWMCIVFAYIGVSVVLFLVSRFSPYEWHTEEFEDGRETQSSESTNEFGIFNSLWFSLGAFMQQGCDISPRSLSGRIVGGVWWFFTLIIISSYTANLAAFLTVERMVSPIESAEDLSKQTEIAYGTLDSGSTKEFFRRSKIAVFDKMWTYMRSAEPSVFVRTTAEGVARVRKSKGKYAYLLESTMNEYIEQRKPCDTMKVGGNLDSKGYGIATPKGSSLRNAVNLAVLKLNEQGLLDKLKNKWWYDKGECGSGGGDSKEKTSALSLSNVAGVFYILVGGLGLAMLVALIEFCYKSRAEAKRMKMTLNDAMRNKARLSITGSTGENGRVMTPEFPKAVHAVPYVSPGMGMNVSVTDLS

SEQ ID NO: 6198 - protein, 105 aa, Homo Sapiens
MRPDLKGALLSLIEYYQWDKFAYLYDSDRGLSTLQAVLDSAAEKKWQVTAINVGNINNDKKDEMYRSLFQDLELKKERRVILDCERDKVNDIVDQVITIGKHVKG

SEQ ID NO: 6199 - protein, 57 aa, Homo Sapiens
MVQFSTSEFRLTPHIDNLEVANSFAVTNAFCSQFSRGVYAIFGFYDKKSVNTITSFC

SEQ ID NO: 6200 - protein, 145 aa, Homo Sapiens
MVQFSTSEFRLTPHIDNLEVANSFAVTNAFCSQFSRGVYAIFGFYDKKSVNTITSFCGTLHVSFITPSFPTDGTHPFVIQMRPDLKGALLSLIEYYQWDKFAYLYDSDRGLSTLQAVLDSAAEKKWQVTAINVGNINNDKKDEMY

SEQ ID NO: 6201 - protein, 730 aa, Homo Sapiens
MVQFSTSEFRLTPHIDNLEVANSFAVTNAFCSQFSRGVYAIFGFYDKKSVNTITSFCGTLHVSFITPSFPTDGTHPFVIQMRPDLKGALLSLIEYYQWDKFAYLYDSDRGLSTLQAVLDSAAEKKWQVTAINVGNINNDKKDEMYRSLFQDLELKKERRVILDCERDKVNDIVDQVITIGKHVKGYHYIIANLGFTDGDLLKIQFGGANVSGFQIVDYDDSLVSKFIERWSTLEEKEYPGAHTTTIKYTSALTYDAVQVMTEAFRNLRKQRIEISRRGNAGDCLANPAVPWGQGVEIERALKQVQVEGLSGNIKFDQNGKRINYTINIMELKTNGPRKIGYWSEVDKMVVTLTELPSGNDTSGLENKTVVVTTILESPYVMMKKNHEMLEGNERYEGYCVDLAAEIAKHCGFKYKLTIVGDGKYGARDADTKIWNGMVGELVYGKADIAIAPLTITLVREEVIDFSKPFMSLGISIMIKKPQKSKPGVFSFLDPLAYEIWMCIVFAYIGVSVVLFLVSRFSPYEWHTEEFEDGRETQSSESTNEFGIFNSLWFSLGAFMQQGCDISPRSLSGRIVGGVWWFFTLIIISSYTANLAAFLTVERMVSPIESAEDLSKQTEIAYGTLDSGSTKEFFRRSKIAVFDKMWTYMRSAEPSVFVRTTAEGVARVRKSKGKYAYLLESTMNEYIEQRKPCDTMKVGGNLDSKGYGIATPKGSSLSGVTFKTLLFVCCG

SEQ ID NO: 6202 - protein, 836 aa, Homo Sapiens
MVQFSTSEFRLTPHIDNLEVANSFAVTNAFCSQFSRGVYAIFGFYDKKSVNTITSFCGTLHVSFITPSFPTDGTHPFVIQMRPDLKGALLSLIEYYQWDKFAYLYDSDRGLSTLQAVLDSAAEKKWQVTAINVGNINNDKKDEMYRSLFQDLELKKERRVILDCERDKVNDIVDQVITIGKHVKGYHYIIANLGFTDGDLLKIQFGGANVSGFQIVDYDDSLVSKFIERWSTLEEKEYPGAHTTTIKYTSALTYDAVQVMTEAFRNLRKQRIEISRRGNAGDCLANPAVPWGQGVEIERALKQVQVEGLSGNIKFDQNGKRINYTINIMELKTNGPRKIGYWSEVDKMVVTLTELPSGNDTSGLENKTVVVTTILESPYVMMKKNHEMLEGNERYEGYCVDLAAEIAKHCGFKYKLTIVGDGKYGARDADTKIWNGMVGELVYGKADIAIAPLTITLVREEVIDFSKPFMSLGISIMIKKPQKSKPGVFSFLDPLAYEIWMCIVFAYIGVSVVLFLVSRFSPYEWHTEEFEDGRETQSSESTNEFGIFNSLWFSLGAFMQQGCDISPRSLSGRIVGGVWWFFTLIIISSYTANLAAFLTVERMVSPIESAEDLSKQTEIAYGTLDSGSTKEFFRRSKIAVFDKMWTYMRSAEPSVFVRTTAEGVARVRKSKGKYAYLLESTMNEYIEQRKPCDTMKVGGNLDSKGYGIATPKGSSLRTPVNLAVLKLSEQGVLDKLKNKWWYDKGECGAKDSGSKEKTSALSLSNVAGVFYILVGGLGLAMLVALIEFCYKSRAEAKRMKVAKNAQNINPSSSQNSQNFATYKEGYNVYGIESVKI

SEQ ID NO: 6203 - protein, 836 aa, Homo Sapiens; identical to SEQ ID NO: 6202

SEQ ID NO: 6204 - protein, 214 aa, Homo Sapiens
  misc_feature (1)..(1): Xaa can be any naturally occurring amino acid
XLDSGSTKEFFRRSKIAVFDKMWTYMRSAEPSVFVRTTAEGVARVRKSKGKYAYLLESTMNEYIEQRKPCDTMKVGGNLDSKGYGIATPKGSSLRTPVNLAVLKLSEQGVLDKLKNKWWYDKGECGAKDSGSKEKTSALSLSNVAGVFYILVGGLGLAMLVALIEFCYKSRAEAKRMKVAKNAQNINPSSSQNSQNFATYKEGYNVYGIESVKI

SEQ ID NO: 6205 - protein, 144 aa, Homo Sapiens
MARQKKMGQSVLRAVFFLVLGLLGHSHGGFPNTISIGGLFMRNTVQEHSAFRFAVQLYNTNQNTTEKPFHLNYHVDHLDSSNSFSVTNACPAERDYLPWPGSIRENNWTALPCCKDHGLLHLKCSPGGARQNWAYCIWGVTGEL

SEQ ID NO: 6206 - protein, 144 aa, Homo Sapiens; identical to SEQ ID NO: 6205

SEQ ID NO: 6207 - protein, 894 aa, Homo Sapiens
MARQKKMGQSVLRAVFFLVLGLLGHSHGGFPNTISIGGLFMRNTVQEHSAFRFAVQLYNTNQNTTEKPFHLNYHVDHLDSSNSFSVTNAFCSQFSRGVYAIFGFYDQMSMNTLTSFCGALHTSFVTPSFPTDADVQFVIQMRPALKGAILSLLGHYKWEKFVYLYDTERGFSILQAIMEAAVQNNWQVTARSVGNIKDVQEFRRIIEEMDRRQEKRYLIDCEVERINTILEQVVILGKHSRGYHYMLANLGFTDILLERVMHGGANITGFQIVNNENPMVQQFIQRWVRLDEREFPEAKNAPLKYTSALTHDAILVIAEAFRYLRRQRVDVSRRGSAGDCLANPAVPWSQGIDIERALKMVQVQGMTGNIQFDTYGRRTNYTIDVYEMKVSGSRKAGYWNEYERFVPFSDQQISNDSASSENRTIVVTTILESPYVMYKKNHEQLEGNERYEGYCVDLAYEIAKHVRIKYKLSIVGDGKYGARDPETKIWNGMVGELVYGRADIAVAPLTITLVREEVIDFSKPFMSLGISIMIKKPQKSKPGVFSFLDPLAYEIWMCIVFAYIGVSVVLFLVSRFSPYEWHLEDNNEEPRDPQSPPDPPNEFGIFNSLWFSLGAFMQQGCDISPRSLSGRIVGGVWWFFTLIIISSYTANLAAFLTVERMVSPIESAEDLAKQTEIAYGTLDSGSTKEFFRRSKIAVYEKMWSYMKSAEPSVFTKTTADGVARVRKSKGKFAFLLESTMNEYIEQRKPCDTMKVGGNLDSKGYGVATPKGSALRTPVNLAVLKLSEQGILDKLKNKWWYDKGECGAKDSGSKDKTSALSLSNVAGVFYILVGGLGLAMMVALIEFCYKSRAESKRMKLTKNTQNFKPAPATNTQNYATYREGYNVYGTESVKI

SEQ ID NO: 6208 - protein, 824 aa, Homo Sapiens
MARQKKMGQSVLRAVFFLVLGLLGHSHGGFPNTISIGGLFMRNTVQEHSAFRFAVQLYNTNQNTTEKPFHLNYHVDHLDSSNSFSVTNAFCSQFSRGVYAIFGFYDQMSMNTLTSFCGALHTSFVTPSFPTDADVQFVIQMRPALKGAILSLLGHYKWEKFVYLYDTERGFSILQAIMEAAVQNNWQVTARSVGNIKDVQEFRRIIEEMDRRQEKRYLIDCEVERINTILEQVVILGKHSRGYHYMLANLGFTDILLERVMHGGANITGFQIVNNENPMVQQFIQRWVRLDEREFPEAKNAPLKYTSALTHDAILVIAEAFRYLRRQRVDVSRRGSAGDCLANPAVPWSQGIDIERALKMVQVQGMTGNIQFDTYGRRTNYTIDVYEMKVSGSRKAGYWNEYERFVPFSDQQISNDSASSENRTIVVTTILESPYVMYKKNHEQLEGNERYEGYCVDLAYEIAKHVRIKYKLSIVGDGKYGARDPETKIWNGMVGELVYGRADIAVAPLTITLVREEVIDFSKPFMSLGISIMIKKPQKSKPGVFSFLDPLAYEIWMCIVFAYIGVSVVLFLVSRFSPYEWHLEDNNEEPRDPQSPPDPPNEFGIFNSLWFSLGAFMQQGCDISPRSLSGRIVGGVWWFFTLIIISSYTANLAAFLTVERMVSPIESAEDLAKQTEIAYGTLDSGSTKEFFRRSKIAVYEKMWSYMKSAEPSVFTKTTADGVARVRKSKGKFAFLLESTMNEYIEQRKPCDTMKVGGNLDSKGYGVATPKGSALRNAVNLAVLKLNEQGLLDKLKNKWWYDKGECGSGGGDSKNACKPCSIETQ

SEQ ID NO: 6209 - protein, 894 aa, Homo Sapiens
MARQKKMGQSVLRAVFFLVLGLLGHSHGGFPNTISIGGLFMRNTVQEHSAFRFAVQLYNTNQNTTEKPFHLNYHVDHLDSSNSFSVTNAFCSQFSRGVYAIFGFYDQMSMNTLTSFCGALHTSFVTPSFPTDADVQFVIQMRPALKGAILSLLGHYKWEKFVYLYDTERGFSILQAIMEAAVQNNWQVTARSVGNIKDVQEFRRIIEEMDRRQEKRYLIDCEVERINTILEQVVILGKHSRGYHYMLANLGFTDILLERVMHGGANITGFQIVNNENPMVQQFIQRWVRLDEREFPEAKNAPLKYTSALTHDAILVIAEAFRYLRRQRVDVSRRGSAGDCLANPAVPWSQGIDIERALKMVQVQGMTGNIQFDTYGRRTNYTIDVYEMKVSGSRKAGYWNEYERFVPFSDQQISNDSASSENRTIVVTTILESPYVMYKKNHEQLEGNERYEGYCVDLAYEIAKHVRIKYKLSIVGDGKYGARDPETKIWNGMVGELVYGRADIAVAPLTITLVREEVIDFSKPFMSLGISIMIKKPQKSKPGVFSFLDPLAYEIWMCIVFAYIGVSVVLFLVSRFSPYEWHLEDNNEEPRDPQSPPDPPNEFGIFNSLWFSLGAFMQQGCDISPRSLSGRIVGGVWWFFTLIIISSYTANLAAFLTVERMVSPIESAEDLAKQTEIAYGTLDSGSTKEFFRRSKIAVYEKMWSYMKSAEPSVFTKTTADGVARVRKSKGKFAFLLESTMNEYIEQRKPCDTMKVGGNLDSKGYGVATPKGSALRNAVNLAVLKLNEQGLLDKLKNKWWYDKGECGSGGGDSKDKTSALSLSNVAGVFYILVGGLGLAMMVALIEFCYKSRAESKRMKLTKNTQNFKPAPATNTQNYATYREGYNVYGTESVKI

SEQ ID NO: 6210 - protein, 894 aa, Homo Sapiens; identical to SEQ ID NO: 6209

SEQ ID NO: 6211 - protein, 82 aa, Homo Sapiens
MRIISRQIVLLFSGFWGLAMGAFPSSVQIGGLFIRNTDQEYTAFRLAIFLHNTSPNASEAPFNLVPHVDNIETANSFAVTNA

SEQ ID NO: 6212 - protein, 82 aa, Homo Sapiens; identical to SEQ ID NO: 6211

SEQ ID NO: 6213 - protein, 82 aa, Homo Sapiens; identical to SEQ ID NO: 6211

SEQ ID NO: 6214 - protein, 84 aa, Homo Sapiens
MRIISRQIVLLFSGFWGLAMGAFPSSVQIGGLFIRNTDQEYTAFRLAIFLHNTSPNASEAPFNLVPHVDNIETANSFAVTNACK

SEQ ID NO: 6215 - protein, 225 aa, Homo Sapiens
MRIISRQIVLLFSGFWGLAMGAFPSSVQIGGLFIRNTDQEYTAFRLAIFLHNTSPNASEAPFNLVPHVDNIETANSFAVTNAFCSQYSRGVFAIFGLYDKRSVHTLTSFCSALHISLITPSFPTEGESQFVLQLRPSLRGALLSLLDHYEWNCFVFLYDTDRGLVISTTPLASNCMPSSVVHSWLYVLYNKSINSITACLLGPSTELNVFNYLIADSNLNNGNYI

SEQ ID NO: 6216 - protein, 902 aa, Homo Sapiens
MRIISRQIVLLFSGFWGLAMGAFPSSVQIGGLFIRNTDQEYTAFRLAIFLHNTSPNASEAPFNLVPHVDNIETANSFAVTNAFCSQYSRGVFAIFGLYDKRSVHTLTSFCSALHISLITPSFPTEGESQFVLQLRPSLRGALLSLLDHYEWNCFVFLYDTDRGYSILQAIMEKAGQNGWHVSAICVENFNDVSYRQLLEELDRRQEKKFVIDCEIERLQNILEQIVSVGKHVKGYHYIIANLGFKDISLERFIHGGANVTGFQLVDFNTPMVIKLMDRWKKLDQREYPGSETPPKYTSALTYDGVLVMAETFRSLRRQKIDISRRGNAGDCLANPAAPWGQGIDMERTLKQVRIQGLTGNVQFDHYGRRVNYTMDVFELKSTGPRKVGYWNDMDKLVLIQDVPTLGNDTAAIENRTVVVTTIMESPYVMYKKNHEMFEGNDKYEGYCVDLASEIAKHIGIKYKIAIVPDGKYGARDADTKIWNGMVGELVYGKAEIAIAPLTITLVREEVIDFSKPFMSLGISIMIKKPQKSKPGVFSFLDPLAYEIWMCIVFAYIGVSVVLFLVSRFSPYEWHTEEPEDGKEGPSDQPPNEFGIFNSLWFSLGAFMQQGCDISPRSLSGRIVGGVWWFFTLIIISSYTANLAAFLTVERMVSPIESAEDLAKQTEIAYGTLDSGSTKEFFRRSKIAVYEKMWTYMRSAEPSVFTRTTAEGVARVRKSKGKFAFLLESTMNEYIEQRKPCDTMKVGGNLDSKGYGVATPKGSSLRTPVNLAVLKLSEAGVLDKLKNKWWYDKGECGPKDSGSKDKTSALSLSNVAGVFYILVGGLGLAMLVALIEFCYKSRAEAKRMKLTFSEAIRNKARLSITGSVGENGRVLTPDCPKAVHTGTAIRQSSGLAVIASDLP

SEQ ID NO: 6217 - protein, 433 aa, Homo Sapiens
MRIISRQIVLLFSGFWGLAMGAFPSSVQIGGLFIRNTDQEYTAFRLAIFLHNTSPNASEAPFNLVPHVDNIETANSFAVTNAFCSQYSRGVFAIFGLYDKRSVHTLTSFCSALHISLITPSFPTEGESQFVLQLRPSLRGALLSLLDHYEWNCFVFLYDTDRGYSILQAIMEKAGQNGWHVSAICVENFNDVSYRQLLEELDRRQEKKFVIDCEIERLQNILEQIVSVGKHVKGYHYIIANLGFKDISLERFIHGGANVTGFQLVDFNTPMVIKLMDRWKKLDQREYPGSETPPKYTSALTYDGVLVMAETFRSLRRQKIDISRRGNAGDCLANPAAPWGQGIDMERTLKQVRIQGLTGNVQFDHYGRRVNYTMDVFELKSTGPRKVGYWNDMDKLVLIQDVPTLGNDTAAIENRTVVVTTIMPLMKNPILRN

SEQ ID NO: 6218 - protein, 884 aa, Homo Sapiens
MRIISRQIVLLFSGFWGLAMGAFPSSVQIGGLFIRNTDQEYTAFRLAIFLHNTSPNASEAPFNLVPHVDNIETANSFAVTNAFCSQYSRGVFAIFGLYDKRSVHTLTSFCSALHISLITPSFPTEGESQFVLQLRPSLRGALLSLLDHYEWNCFVFLYDTDRGYSILQAIMEKAGQNGWHVSAICVENFNDVSYRQLLEELDRRQEKKFVIDCEIERLQNILEQIVSVGKHVKGYHYIIANLGFKDISLERFIHGGANVTGFQLVDFNTPMVIKLMDRWKKLDQREYPGSETPPKYTSALTYDGVLVMAETFRSLRRQKIDISRRGNAGDCLANPAAPWGQGIDMERTLKQVRIQGLTGNVQFDHYGRRVNYTMDVFELKSTGPRKVGYWNDMDKLVLIQDVPTLGNDTAAIENRTVVVTTIMESPYVMYKKNHEMFEGNDKYEGYCVDLASEIAKHIGIKYKIAIVPDGKYGARDADTKIWNGMVGELVYGKAEIAIAPLTITLVREEVIDFSKPFMSLGISIMIKKPQKSKPGVFSFLDPLAYEIWMCIVFAYIGVSVVLFLVSRFSPYEWHTEEPEDGKEGPSDQPPNEFGIFNSLWFSLGAFMQQGCDISPRSLSGRIVGGVWWFFTLIIISSYTANLAAFLTVERMVSPIESAEDLAKQTEIAYGTLDSGSTKEFFRRSKIAVYEKMWTYMRSAEPSVFTRTTAEGVARVRKSKGKFAFLLESTMNEYIEQRKPCDTMKVGGNLDSKGYGVATPKGSSLRNAVNLAVLKLNEQGLLDKLKNKWWYDKGECGSGGGDSKDKTSALSLSNVAGVFYILVGGLGLAMLVALIEFCYKSRAEAKRMKVAKSAQTFNPTSSQNTQNLATYREGYNVYGTESIKI

SEQ ID NO: 6219 - protein, 433 aa, Homo Sapiens; identical to SEQ ID NO: 6217

SEQ ID NO: 6220 - protein, 902 aa, Homo Sapiens; identical to SEQ ID NO: 6216

SEQ ID NO: 6221 - protein, 884 aa, Homo Sapiens; identical to SEQ ID NO: 6218

SEQ ID NO: 6222 - protein, 104 aa, Homo Sapiens
  misc_feature (1)..(1): Xaa can be any naturally occurring amino acid
XVARVRKSKGKFAFLLESTMNEYIEQRKPCDTMKVGGNLDSKGYGVATPKGSSLRNAVNLAVLKLNEQGLLDKLKNKWWYDKGECGSGGGDSKNSCKPCRFETQ

SEQ ID NO: 6223 - protein, 180 aa, Homo Sapiens
CSHEMAAGILKQALAMGMMTEYYHYIFTTLTDAALMYDAVHVVSVAVQQFPQMTVSSLQCNRHKPWRFGTRFMSLIKEAHWEGLTGRITFNKTNGLRTDFDLDVISLKEEGLEKIGTWDPASGLNMTESQKGKPANITDSLSNRSLIVTTILEEPYVLFKKSDKPLYGNDRFEGYCIDLL

SEQ ID NO: 6224 - protein, 854 aa, Homo Sapiens
GGIFEYVESGPMGAEELAFRFAVNTINRNRTLLPNTTLTYDTQKINLYDSFEASKKACDQLSLGVAAIFGPSHSSSANAVQSICNALGVPHIQTRWKHQVSDNKDSFYVSLYPDFSSLSRAILDLVQFFKWKTVTVVYDDSTGLIRLQELIKAPSRYNLRLKIRQLPADTKDAKPLLKEMKRGKEFHVIFDCSHEMAAGILKQALAMGMMTEYYHYIFTTLDLFALDVEPYRYSGVNMTGFRILNTENTQVSSIIEKWSMERLQAPPKPDSGLLDGFMTTDAALMYDAVHVVSVAVQQFPQMTVSSLQCNRHKPWRFGTRFMSLIKEAHWEGLTGRITFNKTNGLRTDFDLDVISLKEEGLEKIGTWDPASGLNMTESQKGKPANITDSLSNRSLIVTTILEEPYVLFKKSDKPLYGNDRFEGYCIDLLRELSTILGFTYEIRLVEDGKYGAQDDANGQWNGMVRELIDHKADLAVAPLAITYVREKVIDFSKPFMTLGISILYRKPNGTNPGVFSFLNPLSPDIWMYILLAYLGVSCVLFVIARFSPYEWYNPHPCNPDSDVVENNFTLLNSFWFGVGALMQQGSELMPKALSTRIVGGIWWFFTLIIISSYTANLAAFLTVERMESPIDSADDLAKQTKIEYGAVEDGATMTFFKKSKISTYDKMWAFMSSRRQSVLVKSNEEGIQRVLTSDYAFLMESTTIEFVTQRNCNLTQIGGLIDSKGYGVGTPMGSPYRDKITIAILQLQEEGKLHMMKEKWWRGNGCPEEESKEASALGVQNIGGIFIVLAAGLVLSVFVAVGEFLYKSKKNAQLEKRAKTKLPQDYVFLPILESVSISTVLSSSPSSSSLSSCS

SEQ ID NO: 6225 - protein, 870 aa, Homo Sapiens
GGIFEYVESGPMGAEELAFRFAVNTINRNRTLLPNTTLTYDTQKINLYDSFEASKKACDQLSLGVAAIFGPSHSSSANAVQSICNALGVPHIQTRWKHQVSDNKDSFYVSLYPDFSSLSRAILDLVQFFKWKTVTVVYDDSTGLIRLQELIKAPSRYNLRLKIRQLPADTKDAKPLLKEMKRGKEFHVIFDCSHEMAAGILKQALAMGMMTEYYHYIFTTLDLFALDVEPYRYSGVNMTGFRILNTENTQVSSIIEKWSMERLQAPPKPDSGLLDGFMTTDAALMYDAVHVVSVAVQQFPQMTVSSLQCNRHKPWRFGTRFMSLIKEAHWEGLTGRITFNKTNGLRTDFDLDVISLKEEGLEKIGTWDPASGLNMTESQKGKPANITDSLSNRSLIVTTILEEPYVLFKKSDKPLYGNDRFEGYCIDLLRELSTILGFTYEIRLVEDGKYGAQDDANGQWNGMVRELIDHKADLAVAPLAITYVREKVIDFSKPFMTLGISILYRKPNGTNPGVFSFLNPLSPDIWMYILLAYLGVSCVLFVIARFSPYEWYNPHPCNPDSDVVENNFTLLNSFWFGVGALMQQGSELMPKALSTRIVGGIWWFFTLIIISSYTANLAAFLTVERMESPIDSADDLAKQTKIEYGAVEDGATMTFFKKSKISTYDKMWAFMSSRRQSVLVKSNEEGIQRVLTSDYAFLMESTTIEFVTQRNCNLTQIGGLIDSKGYGVGTPMGSPYRDKITIAILQLQEEGKLHMMKEKWWRGNGCPEEESKEASALGVQNIGGIFIVLAAGLVLSVFVAVGEFLYKSKKNAQLEKRSFCSAMVEELRMSLKCQRRLKHKPQAPVIVKTEEVINMHTFNDRRLPGKETMA

SEQ ID NO: 6226 - protein, 831 aa, Homo Sapiens
GGIFEYVESGPMGAEELAFRFAVNTINRNRTLLPNTTLTYDTQKINLYDSFEASKKACDQLSLGVAAIFGPSHSSSANAVQSICNALGVPHIQTRWKHQVSDNKDSFYVSLYPDFSSLSRAILDLVQFFKWKTVTVVYDDSTGLIRLQELIKAPSRYNLRLKIRQLPADTKDAKPLLKEMKRGKEFHVIFDCSHEMAAGILKQALAMGMMTEYYHYIFTTLDLFALDVEPYRYSGVNMTGFRILNTENTQVSSIIEKWSMERLQAPPKPDSGLLDGFMTTDAALMYDAVHVVSVAVQQFPQMTVSSLQCNRHKPWRFGTRFMSLIKEAHWEGLTGRITFNKTNGLRTDFDLDVISLKEEGLEKIGTWDPASGLNMTESQKGKPANITDSLSNRSLIVTTILEEPYVLFKKSDKPLYGNDRFEGYCIDLLRELSTILGFTYEIRLVEDGKYGAQDDANGQWNGMVRELIDHKADLAVAPLAITYVREKVIDFSKPFMTLGISILYRKPNGTNPGVFSFLNPLSPDIWMYILLAYLGVSCVLFVIARFSPYEWYNPHPCNPDSDVVENNFTLLNSFWFGVGALMQQGSELMPKALSTRIVGGIWWFFTLIIISSYTANLAAFLTVERMESPIDSADDLAKQTKIEYGAVEDGATMTFFKKSKISTYDKMWAFMSSRRQSVLVKSNEEGIQRVLTSDYAFLMESTTIEFVTQRNCNLTQIGGLIDSKGYGVGTPMGSPYRDKITIAILQLQEEGKLHMMKEKWWRGNGCPEEESKEASALGVQNIGGIFIVLAAGLVLSVFVAVGEFLYKSKKNAQLEKESSIWLVPPYHPDTV

SEQ ID NO: 6227 - protein, 182 aa, Homo Sapiens
IGTWDPASGLNMTESQKGKPANITDSLSNRSLIVTTILEEPYVLFKKSDKPLYGNDRFEGYCIDLLRELSTILGFTYEIRLVEDGKYGAQDDANGQWNGMVRELIDHKADLAVAPLAITYVREKVIDFSKPFMTLGISILYRKPNGTNPGVFSFLNPLSPDIWMYILLAYLGVSCVLFVIAR

SEQ ID NO: 6228 - protein, 892 aa, Homo Sapiens
MKIIFPILSNPVFRRTVKLLLCLLWIGYSQGTTHVLRFGGIFEYVESGPMGAEELAFRFAVNTINRNRTLLPNTTLTYDTQKINLYDSFEASKKACDQLSLGVAAIFGPSHSSSANAVQSICNALGVPHIQTRWKHQVSDNKDSFYVSLYPDFSSLSRAILDLVQFFKWKTVTVVYDDSTGLIRLQELIKAPSRYNLRLKIRQLPADTKDAKPLLKEMKRGKEFHVIFDCSHEMAAGILKQALAMGMMTEYYHYIFTTLDLFALDVEPYRYSGVNMTGFRILNTENTQVSSIIEKWSMERLQAPPKPDSGLLDGFMTTDAALMYDAVHVVSVAVQQFPQMTVSSLQCNRHKPWRFGTRFMSLIKEAHWEGLTGRITFNKTNGLRTDFDLDVISLKEEGLEKIGTWDPASGLNMTESQKGKPANITDSLSNRSLIVTTILEEPYVLFKKSDKPLYGNDRFEGYCIDLLRELSTILGFTYEIRLVEDGKYGAQDDANGQWNGMVRELIDHKADLAVAPLAITYVREKVIDFSKPFMTLGISILYRKPNGTNPGVFSFLNPLSPDIWMYILLAYLGVSCVLFVIARFSPYEWYNPHPCNPDSDVVENNFTLLNSFWFGVGALMQQGSELMPKALSTRIVGGIWWFFTLIIISSYTANLAAFLTVERMESPIDSADDLAKQTKIEYGAVEDGATMTFFKKSKISTYDKMWAFMSSRRQSVLVKSNEEGIQRVLTSDYAFLMESTTIEFVTQRNCNLTQIGGLIDSKGYGVGTPMGSPYRDKITIAILQLQEEGKLHMMKEKWWRGNGCPEEESKEASALGVQNIGGIFIVLAAGLVLSVFVAVGEFLYKSKKNAQLEKRAKTKLPQDYVFLPILESVSISTVLSSSPSSSSLSSCS

SEQ ID NO: 6229 - protein, 353 aa, Homo Sapiens
MKIIFPILSNPVFRRTVKLLLCLLWIGYSQGTTHVLRFGGIFEYVESGPMGAEELAFRFAVNTINRNRTLLPNTTLTYDTQKINLYDSFEASKKACDQLSLGVAAIFGPSHSSSANAVQSICNALGVPHIQTRWKHQVSDNKDSFYVSLYPDFSSLSRAILDLVQFFKWKTVTVVYDDSTGLIRLQELIKAPSRYNLRLKIRQLPADTKDAKPLLKEMKRGKEFHVIFDCSHEMAAGILKQALAMGMMTEYYHYIFTTLDLFALDVEPYRYSGVNMTGFRILNTENTQVSSIIEKWSMERLQAPPKPDSGLLDGFMTMEFHSCCPGWSAMARSQLTATSASWVQAILLPQPPE

SEQ ID NO: 6230 - protein, 869 aa, Homo Sapiens
MKIIFPILSNPVFRRTVKLLLCLLWIGYSQGTTHVLRFGGIFEYVESGPMGAEELAFRFAVNTINRNRTLLPNTTLTYDTQKINLYDSFEASKKACDQLSLGVAAIFGPSHSSSANAVQSICNALGVPHIQTRWKHQVSDNKDSFYVSLYPDFSSLSRAILDLVQFFKWKTVTVVYDDSTGLIRLQELIKAPSRYNLRLKIRQLPADTKDAKPLLKEMKRGKEFHVIFDCSHEMAAGILKQALAMGMMTEYYHYIFTTLDLFALDVEPYRYSGVNMTGFRILNTENTQVSSIIEKWSMERLQAPPKPDSGLLDGFMTTDAALMYDAVHVVSVAVQQFPQMTVSSLQCNRHKPWRFGTRFMSLIKEAHWEGLTGRITFNKTNGLRTDFDLDVISLKEEGLEKIGTWDPASGLNMTESQKGKPANITDSLSNRSLIVTTILEEPYVLFKKSDKPLYGNDRFEGYCIDLLRELSTILGFTYEIRLVEDGKYGAQDDANGQWNGMVRELIDHKADLAVAPLAITYVREKVIDFSKPFMTLGISILYRKPNGTNPGVFSFLNPLSPDIWMYILLAYLGVSCVLFVIARFSPYEWYNPHPCNPDSDVVENNFTLLNSFWFGVGALMQQGSELMPKALSTRIVGGIWWFFTLIIISSYTANLAAFLTVERMESPIDSADDLAKQTKIEYGAVEDGATMTFFKKSKISTYDKMWAFMSSRRQSVLVKSNEEGIQRVLTSDYAFLMESTTIEFVTQRNCNLTQIGGLIDSKGYGVGTPMGSPYRDKITIAILQLQEEGKLHMMKEKWWRGNGCPEEESKEASALGVQNIGGIFIVLAAGLVLSVFVAVGEFLYKSKKNAQLEKESSIWLVPPYHPDTV

SEQ ID NO: 6231 - protein, 908 aa, Homo Sapiens
MKIIFPILSNPVFRRTVKLLLCLLWIGYSQGTTHVLRFGGIFEYVESGPMGAEELAFRFAVNTINRNRTLLPNTTLTYDTQKINLYDSFEASKKACDQLSLGVAAIFGPSHSSSANAVQSICNALGVPHIQTRWKHQVSDNKDSFYVSLYPDFSSLSRAILDLVQFFKWKTVTVVYDDSTGLIRLQELIKAPSRYNLRLKIRQLPADTKDAKPLLKEMKRGKEFHVIFDCSHEMAAGILKQALAMGMMTEYYHYIFTTLDLFALDVEPYRYSGVNMTGFRILNTENTQVSSIIEKWSMERLQAPPKPDSGLLDGFMTTDAALMYDAVHVVSVAVQQFPQMTVSSLQCNRHKPWRFGTRFMSLIKEAHWEGLTGRITFNKTNGLRTDFDLDVISLKEEGLEKIGTWDPASGLNMTESQKGKPANITDSLSNRSLIVTTILEEPYVLFKKSDKPLYGNDRFEGYCIDLLRELSTILGFTYEIRLVEDGKYGAQDDANGQWNGMVRELIDHKADLAVAPLAITYVREKVIDFSKPFMTLGISILYRKPNGTNPGVFSFLNPLSPDIWMYILLAYLGVSCVLFVIARFSPYEWYNPHPCNPDSDVVENNFTLLNSFWFGVGALMQQGSELMPKALSTRIVGGIWWFFTLIIISSYTANLAAFLTVERMESPIDSADDLAKQTKIEYGAVEDGATMTFFKKSKISTYDKMWAFMSSRRQSVLVKSNEEGIQRVLTSDYAFLMESTTIEFVTQRNCNLTQIGGLIDSKGYGVGTPMGSPYRDKITIAILQLQEEGKLHMMKEKWWRGNGCPEEESKEASALGVQNIGGIFIVLAAGLVLSVFVAVGEFLYKSKKNAQLEKRSFCSAMVEELRMSLKCQRRLKHKPQAPVIVKTEEVINMHTFNDRRLPGKETMA

SEQ ID NO: 6232 - protein, 46 aa, Homo Sapiens
ANLAAFMIQEEYVDQVSGLSDKKMRTLRLRRSIFPKVTKLVTEPGF

SEQ ID NO: 6233 - protein, 35 aa, Homo Sapiens
MKPRAECCSPKFWLVLAVLAVSGSRARSQKSPPSI

SEQ ID NO: 6234 - protein, 35 aa, Homo Sapiens; identical to SEQ ID NO: 6233

SEQ ID NO: 6235 - protein, 1484 aa, Homo Sapiens [sequence omitted]

SEQ ID NO: 6236 - protein, 70 aa, Homo Sapiens [sequence omitted]

SEQ ID NO: 6237 - protein, 435 aa, Homo Sapiens
MGSLLALLALLLLWGAVAEGPAKKVLTLEGDLVLGGLFPVHQKGGPAEDCGPVNEHRGIQRLEAMLFALDRINRDPHLLPGVRLGAHILDSCSKDTHALEQALDFVRASLSRGADGSRHICPDGSYATHGDAPTAITGVIGGSYSDVSIQVANLLRLFQIPQISYASTSAKLSDKSRYDYFARTVPPDFFQAKAMAEILRFFNWTYVSTVASEGDYGETGIEAFELEARARNICVATSEKVGRAMSRAAFEGVVRALLQKPSARVAVLFTRSEDARELLAASQRLNASFTWVASDGWGALESVVAGSEGAAEGAITIELASYPISDFASYFQSLDPWNNSRNPWFREFWEQRFRCSFRQRDCAAHSLRAVPFEQESKIMFVVNAVYAMAHALHNMHRALCPNTTRLCDAMRPVNGRRLYKDFVLNVKFDGDLKVS

SEQ ID NO: 6238 - protein, 872 aa, Homo Sapiens [sequence omitted]

SEQ ID NO: 6239 - protein, 594 aa, Homo Sapiens
MGSLLALLALLLLWGAVAEGPAKKVLTLEGDLVLGGLFPVHQKGGPAEDCGPVNEHRGIQRLEAMLFALDRINRDPHLLPGVRLGAHILDSCSKDTHALEQALDFVRASLSRGADGSRHICPDGSYATHGDAPTAITGVIGGSYSDVSIQVANLLRLFQIPQISYASTSAKLSDKSRYDYFARTVPPDFFQAKAMAEILRFFNWTYVSTVASEGDYGETGIEAFELEARARNICVATSEKVGRAMSRAAFEGVVRALLQKPSARVAVLFTRSEDARELLAASQRLNASFTWVASDGWGALESVVAGSEGAAEGAITIELASYPISDFASYFQSLDPWNNSRNPWFREFWEQRFRCSFRQRDCAAHSLRAVPFEQESKIMFVVNAVYAMAHALHNMHRALCPNTTRLCDAMRPVNGRRLYKDFVLNVKFDAPFRPADTHNEVRFDRFGDGIGRYNIFTYLRAGSGRYRYQKTRKCPENFNEAKFIGFTMYTTCIIWLAFLPIFYVTSSDYRVQTTTMCVSVSLSGSVVLGCLFAPKLHIILFQPQKNVVSHRAPTSRFGSAAARASSSLGQGSGSQFVPTVCNGREVVDSTTSSL

SEQ ID NO: 6240 - protein, 81 aa, Homo Sapiens
MKMLTRLQVLTLALFSKGFLLSLGDHNFLRREIKIEGDLVLGGLFPINEKGTGTEECGRINEDRGIQRLEAMLFAIDEINK

SEQ ID NO: 6241 - protein, 87 aa, Homo Sapiens
MKMLTRLQVLTLALFSKGFLLSLGDHNFLRREIKIEGDLVLGGLFPINEKGTGTEECGRINEDRGIQRLEAMLFAIDEINKDDYLLP

SEQ ID NO: 6242 - protein, 879 aa, Homo Sapiens
MKMLTRLQVLTLALFSKGFLLSLGDHNFLRREIKIEGDLVLGGLFPINEKGTGTEECGRINEDRGIQRLEAMLFAIDEINKDDYLLPGVKLGVHILDTCSRDTYALEQSLEFVRASLTKVDEAEYMCPDGSYAIQENIPLLIAGVIGGSYSSVSIQVANLLRLFQIPQISYASTSAKLSDKSRYDYFARTVPPDFYQAKAMAEILRFFNWTYVSTVASEGDYGETGIEAFEQEARLRNICIATAEKVGRSNIRKSYDSVIRELLQKPNARVVVLFMRSDDSRELIAAASRANASFTWVASDGWGAQESIIKGSEHVAYGAITLELASQPVRQFDRYFQSLNPYNNHRNPWFRDFWEQKFQCSLQNKRNHRRVCDKHLAIDSSNYEQESKIMFVVNAVYAMAHALHKMQRTLCPNTTKLCDAMKILDGKKLYKDYLLKINFTAPFNPNKDADSIVKFDTFGDGMGRYNVFNFQNVGGKYSYLKVGHWAETLSLDVNSIHWSRNSVPTSQCSDPCAPNEMKNMQPGDVCCWICIPCEPYEYLADEFTCMDCGSGQWPTADLTGCYDLPEDYIRWEDAWAIGPVTIACLGFMCTCMVVTVFIKHNNTPLVKASGRELCYILLFGVGLSYCMTFFFIAKPSPVICALRRLGLGSSFAICYSALLTKTNCIARIFDGVKNGAQRPKFISPSSQVFICLGLILVQIVMVSVWLILEAPGTRRYTLAEKRETVILKCNVKDSSMLISLTYDVILVILCTVYAFKTRKCPENFNEAKFIGFTMYTTCIIWLAFLPIFYVTSSDYRVQTTTMCISVSLSGFVVLGCLFAPKVHIILFQPQKNVVTHRLHLNRFSVSGTGTTYSQSSASTYVPTVCNGREVLDSTTSSL

SEQ ID NO: 6243 - protein, 537 aa, Homo Sapiens
MKMLTRLQVLTLALFSKGFLLSLGDHNFLRREIKIEGDLVLGGLFPINEKGTGTEECGRINEDRGIQRLEAMLFAIDEINKDDYLLPGVKLGVHILDTCSRDTYALEQSLEFVRASLTKVDEAEYMCPDGSYAIQENIPLLIAGVIGGSYSSVSIQVANLLRLFQIPQISYASTSAKLSDKSRYDYFARTVPPDFYQAKAMAEILRFFNWTYVSTVASEGDYGETGIEAFEQEARLRNICIATAEKVGRSNIRKSYDSVIRELLQKPNARVVVLFMRSDDSRELIAAASRANASFTWVASDGWGAQESIIKGSEHVAYGAITLELASQPVRQFDRYFQSLNPYNNHRNPWFRDFWEQKFQCSLQNKRNHRRVCDKHLAIDSSNYEQESKIMFVVNAVYAMAHALHKMQRTLCPNTTKLCDAMKILDGKKLYKDYLLKINFTGADDNHVHLCQPEWLCGLGLFVCTQGSHHPVSTPEECCHTQTAPQQVQCQWNWDHILSVLCKHVCANGVQWAGSPRLHHLISVIVNCSSVLVFLDC

SEQ ID NO: 6244 - protein, 171 aa, Homo Sapiens
MSQSPGAGSPPPLPPRSAPVPARSCRCEVANLLRLFQIPQISYASTSAKLSDKSRYDYFARTVPPDFYQAKAMAEILRFFNWTYVSTVASEGDYGETGIEAFEQEARLRNICIATAEKVGRSNIRKSYDSVIRELLQKPNARVVVLFMRSDDSRELIAAASRANASFTWVA

SEQ ID NO: 6245 - protein, 1212 aa, Homo Sapiens
MVLLLILSVLLLKEDVRGSAQSSERRVVAHMPGDIIIGALFSVHHQPTVDKVHERKCGAVREQYGIQRVEAMLHTLERINSDPTLLPNITLGCEIRDSCWHSAVALEQSIEFIRDSLISSEEEEGLVRCVDGSSSSFRSKKPIVGVIGPGSSSVAIQVQNLLQLFNIPQIAYSATSMDLSDKTLFKYFMRVVPSDAQQARAMVDIVKRYNWTYVSAVHTEGNYGESGMEAFKDMSAKEGICIAHSYKIYSNAGEQSFDKLLKKLTSHLPKARVVACFCEGMTVRGLLMAMRRLGLAGEFLLLGSDGWADRYDVTDGYQREAVGGITIKLQSPDVKWFDDYYLKLRPETNHRNPWFQEFWQHRFQCRLEGFPQENSKYNKTCNSSLTLKTHHVQDSKMGFVINAIYSMAYGLHNMQMSLCPGYAGLCDAMKPIDGRKLLESLMKTNFTGVSGDTILFDENGDSPGRYEIMNFKEMGKDYFDYINVGSWDNGELKMDDDEVWSKKSNIIRSVCSEPCEKGQIKVIRKGEVSCCWTCTPCKENEYVFDEYTCKACQLGSWPTDDLTGCDLIPVQYLRWGDPEPIAAVVFACLGLLATLFVTVVFIIYRDTPVVKSSSRELCYIILAGICLGYLCTFCLIAKPKQIYCYLQRIGIGLSPAMSYSALVTKTNRIARILAGSKKKICTKKPRFMSACAQLVIAFILICIQLGIIVALFIMEPPDIMHDYPSIREVYLICNTTNLGVVTPLGYNGLLILSCTFYAFKTRNVPANFNEAKYIAFTMYTTCIIWLAFVPIYFGSNYKIITMCFSVSLSATVALGCMFVPKVYIILAKPERNVRSAFTTSTVVRMHVGDGKSSSAASRSSSLVNLWKRRGSSGETLRYKDRRLAQHKSEIECFTPKGSMGNGGRATMSSSNGKSVTWAQNEKSSRGQHLWQRLSIHINKKENPNQTAVIKPFPKSTESRGLGAGAGAGGSAGGVGATGGAGCAGAGPGGPESPDAGPKALYDVAEAEEHFPAPARPRSPSPISTLSHRAGSASRTDDDVPSLHSEPVARSSSSQGSLMEQISSVVTRFTANISELNSMMLSTAAPSPGVGAPLCSSYLIPKEIQLPTTMTTFAEIQPLPAIEVTGGAQPAAGAQAAGDAARESPAAGPEAAAAKPDLEELVALTPPSPFRDSVDSGSTTPNSPVSESALCIPSSPKYDTLIIRDYTQSSSSL

SEQ ID NO: 6246 - protein, 1180 aa, Homo Sapiens
MVLLLILSVLLLKEDVRGSAQSSERRVVAHMPGDIIIGALFSVHHQPTVDKVHERKCGAVREQYGIQRVEAMLHTLERINSDPTLLPNITLGCEIRDSCWHSAVALEQSIEFIRDSLISSEEEEGLVRCVDGSSSSFRSKKPIVGVIGPGSSSVAIQVQNLLQLFNIPQIAYSATSMDLSDKTLFKYFMRVVPSDAQQARAMVDIVKRYNWTYVSAVHTEGNYGESGMEAFKDMSAKEGICIAHSYKIYSNAGEQSFDKLLKKLTSHLPKARVVACFCEGMTVRGLLMAMRRLGLAGEFLLLGSDGWADRYDVTDGYQREAVGGITIKLQSPDVKWFDDYYLKLRPETNHRNPWFQEFWQHRFQCRLEGFPQENSKYNKTCNSSLTLKTHHVQDSKMGFVINAIYSMAYGLHNMQMSLCPGYAGLCDAMKPIDGRKLLESLMKTNFTGVSGDTILFDENGDSPGRYEIMNFKEMGKDYFDYINVGSWDNGELKMDDDEVWSKKSNIIRSVCSEPCEKGQIKVIRKGEVSCCWTCTPCKENEYVFDEYTCKACQLGSWPTDDLTGCDLIPVQYLRWGDPEPIAAVVFACLGLLATLFVTVVFIIYRDTPVVKSSSRELCYIILAGICLGYLCTFCLIAKPKQIYCYLQRIGIGLSPAMSYSALVTKTNRIARILAGSKKKICTKKPRFMSACAQLVIAFILICIQLGIIVALFIMEPPDIMHDYPSIREVYLICNTTNLGVVTPLGYNGLLILSCTFYAFKTRNVPANFNEAKYIAFTMYTTCIIWLAFVPIYFGSNYKIITMCFSVSLSATVALGCMFVPKVYIILAKPERNVRSAFTTSTVVRMHVGDGKSSSAASRSSSLVNLWKRRGSSGETLSSNGKSVTWAQNEKSSRGQHLWQRLSIHINKKENPNQTAVIKPFPKSTESRGLGAGAGAGGSAGGVGATGGAGCAGAGPGGPESPDAGPKALYDVAEAEEHFPAPARPRSPSPISTLSHRAGSASRTDDDVPSLHSEPVARSSSSQGSLMEQISSVVTRFTANISELNSMMLSTAAPSPGVGAPLCSSYLIPKEIQLPTTMTTFAEIQPLPAIEVTGGAQPAAGAQAAGDAARESPAAGPEAAAAKPDLEELVALTPPSPFRDSVDSGSTTPNSPVSESALCIPSSPKYDTLIIRDYTQSSSSL

SEQ ID NO: 6247 - protein, 1180 aa, Homo Sapiens; identical to SEQ ID NO: 6246

SEQ ID NO: 6248 - protein, 298 aa, Homo Sapiens
MVLLLILSVLLLKEDVRGSAQSSERRVVAHMPGDIIIGALFSVHHQPTVDKVHERKCGAVREQYGIQRVEAMLHTLERINSDPTLLPNITLGCEIRDSCWHSAVALEQSIEFIRDSLISSEEEEGLVRCVDGSSSSFRSKKPIVGVIGPGSSSVAIQVQNLLQLFNIPQIAYSATSMDLSDKTLFKYFMRVVPSDAQQARAMVDIVKRYNWTYVSAVHTEGRGTKKEEMRKRDQTLMLSFMRCVFLRFEEIRWNDSLVYDALENENIQVLSLCFPSSAVIQINTFLSPIALINRLNVT

SEQ ID NO: 6249 - protein, 87 aa, Homo Sapiens
  misc_feature (1)..(1): Xaa can be any naturally occurring amino acid
XQIAYSATSMDLSDKTLFKYFMRVVPSDAQQARAMVDIVKRYNWTYVSAVHTEGRGTKKEEMRKRDQTLMLSFMRFKLFSCLSLQRS

SEQ ID NO: 6250 - protein, 37 aa, Homo Sapiens
MWTLVSWVALTAGLVAGTRCPDGQFCPVACCLDPGGA

SEQ ID NO: 6251 - protein, 62 aa, Homo Sapiens
MWTLVSWVALTAGLVAGTRCPDGQFCPVACCLDPGGASYSCCRPLLDKWPTTLSRHLGGPCQ

SEQ ID NO: 6252 - protein, 172 aa, Homo Sapiens
MWTLVSWVALTAGLVAGTRCPDGQFCPVACCLDPGGASYSCCRPLLDKWPTTLSRHLGGPCQVDAHCSAGHSCIFTVSGTSSCCPFPEASCCEDRVHCCPHGAFCDLVHTRCITPTGTHPLAKKLPAQRTNRAVALSSSVMCPDARSRCPDGSTCCELPSGKYGCCPMPNAT

SEQ ID NO: 6253 - protein, 111 aa, Homo Sapiens
MWTLVSWVALTAGLVAGTRCPDGQFCPVACCLDPGGASYSCCRPLLDKWPTTLSRHLGGPCQVDAHCSAGHSCIFTVSGTSSCCPFPEAVACGDGHHCCPRGFHCSADGRS

SEQ ID NO: 6254 - protein, 135 aa, Homo Sapiens
MWTLVSWVALTAGLVAGTRCPDGQFCPVACCLDPGGASYSCCRPLLDKWPTTLSRHLGGPCQVDAHCSAGHSCIFTVSGTSSCCPFPEAVACGDGHHCCPRGFHCSADGRSCFQRSGNNSVGAIQCPDSQFECPD

SEQ ID NO: 6255 - protein, 136 aa, Homo Sapiens
MWTLVSWVALTAGLVAGTRCPDGQFCPVACCLDPGGASYSCCRPLLDKWPTTLSRHLGGPCQVDAHCSAGHSCIFTVSGTSSCCPFPEAVACGDGHHCCPRGFHCSADGRSCFQRSGNNSVGAIQCPDSQFECPDF

SEQ ID NO: 6256 - protein, 142 aa, Homo Sapiens
MWTLVSWVALTAGLVAGTRCPDGQFCPVACCLDPGGASYSCCRPLLDKWPTTLSRHLGGPCQVDAHCSAGHSCIFTVSGTSSCCPFPEAVACGDGHHCCPRGFHCSADGRSCFQRSGNNSVGAIQCPDSQFECPDFSTCCVM

SEQ ID NO: 6257 - protein, 149 aa, Homo Sapiens
MWTLVSWVALTAGLVAGTRCPDGQFCPVACCLDPGGASYSCCRPLLDKWPTTLSRHLGGPCQVDAHCSAGHSCIFTVSGTSSCCPFPEAVACGDGHHCCPRGFHCSADGRSCFQRSGNNSVGAIQCPDSQFECPDFSTCCVMVDGSWGC

SEQ ID NO: 6258 - protein, 163 aa, Homo Sapiens
MWTLVSWVALTAGLVAGTRCPDGQFCPVACCLDPGGASYSCCRPLLDKWPTTLSRHLGGPCQVDAHCSAGHSCIFTVSGTSSCCPFPEAVACGDGHHCCPRGFHCSADGRSCFQRSGNNSVGAIQCPDSQFECPDFSTCCVMVDGSWGCCPMPQASCCEDRVH

SEQ ID NO: 6259 - protein, 593 aa, Homo Sapiens
MWTLVSWVALTAGLVAGTRCPDGQFCPVACCLDPGGASYSCCRPLLDKWPTTLSRHLGGPCQVDAHCSAGHSCIFTVSGTSSCCPFPEAVACGDGHHCCPRGFHCSADGRSCFQRSGNNSVGAIQCPDSQFECPDFSTCCVMVDGSWGCCPMPQASCCEDRVHCCPHGAFCDLVHTRCITPTGTHPLAKKLPAQRTNRAVALSSSVMCPDARSRCPDGSTCCELPSGKYGCCPMPNATCCSDHLHCCPQDTVCDLIQSKCLSKENATTDLLTKLPAHTVGDVKCDMEVSCPDGYTCCRLQSGAWGCCPFTQAVCCEDHIHCCPAGFTCDTQKGTCEQGPHQVPWMEKAPAHLSLPDPQALKRDVPCDNVSSCPSSDTCCQLTSGEWGCCPIPEAVCCSDHQHCCPQGYTCVAEGQCQRGSEIVAGLEKMPARRASLSHPRDIGCDQHTSCPVGQTCCPSLGGSWACCQLPHAVCCEDRQHCCPAGYTCNVKARSCEKEVVSAQPATFLARSPHVGVKDVECGEGHFCHDNQTCCRDNRQGWACCPYRQGVCCADRRHCCPAGFRCAARGTKCLRREAPRWDAPLRDPALRQLL

SEQ ID NO: 6260 - protein, 438 aa, Homo Sapiens
MWTLVSWVALTAGLVAGTRCPDGQFCPVACCLDPGGASYSCCRPLLDKWPTTLSRHLGGPCQVDAHCSAGHSCIFTVSGTSSCCPFPEAVACGDGHHCCPRGFHCSADGRSCFQRSGNNSVGAIQCPDSQFECPDFSTCCVMVDGSWGCCPMPQASCCEDRVHCCPHGAFCDLVHTRCITPTGTHPLAKKLPAQRTNRAVALSSSVMCPDARSRCPDGSTCCELPSGKYGCCPMPNATCCSDHLHCCPQDTVCDLIQSKCLSKENATTDLLTKLPAHTVGDVKCDMEVSCPDGYTCCRLQSGAWGCCPFTQAVCCEDHIHCCPAGFTCDTQKGTCEQGPHQVPWMEKAPAHLSLPDPQALKRDVPCDNVSSCPSSDTCCRDNRQGWACCPYRQGVCCADRRHCCPAGFRCAARGTKCLRREAPRWDAPLRDPALRQLL

SEQ ID NO: 6261 - protein, 436 aa, Homo Sapiens
MWTLVSWVALTAGLVAGTRCPDGQFCPVACCLDPGGASYSCCRPLLDKWPTTLSRHLGGPCQVDAHCSAGHSCIFTVSGTSSCCPFPEAVACGDGHHCCPRGFHCSADGRSCFQRSGNNSVGAIQCPDSQFECPDFSTCCVMVDGSWGCCPMPQAVCCEDHIHCCPAGFTCDTQKGTCEQGPHQVPWMEKAPAHLSLPDPQALKRDVPCDNVSSCPSSDTCCQLTSGEWGCCPIPEAVCCSDHQHCCPQGYTCVAEGQCQRGSEIVAGLEKMPARRASLSHPRDIGCDQHTSCPVGQTCCPSLGGSWACCQLPHAVCCEDRQHCCPAGYTCNVKARSCEKEVVSAQPATFLARSPHVGVKDVECGEGHFCHDNQTCCRDNRQGWACCPYRQGVCCADRRHCCPAGFRCAARGTKCLRREAPRWDAPLRDPALRQLL

SEQ ID NO: 6262 - protein, 189 aa, Homo Sapiens
MWTLVSWVALTAGLVAGTRCPDGQFCPVACCLDPGGASYSCCRPLLDKWPTTLSRHLGGPCQVDAHCSAGHSCIFTVSGTSSCCPFPEAVACGDGHHCCPRGFHCSADGRSCFQRSGNNSVGAIQCPDSQFECPDFSTCCVMVDGSWGCCPMPQGALLSARCLLRPGSHPLHHTHGHPPPGKEAPCPED

SEQ ID NO: 6263 - protein, 191 aa, Homo Sapiens
MWTLVSWVALTAGLVAGTRCPDGQFCPVACCLDPGGASYSCCRPLLDKWPTTLSRHLGGPCQVDAHCSAGHSCIFTVSGTSSCCPFPEIKGPCQCRFLCVPQAVACGDGHHCCPRGFHCSADGRSCFQRSGNNSVGAIQCPDSQFECPDFSTCCVMVDGSWGCCPMPQASCCEDRVHCCPHGAFCDLVHTR

SEQ ID NO: 6264 - protein, 388 aa, Homo Sapiens
  misc_feature (1)..(1): Xaa can be any naturally occurring amino acid
XAKKLPAQRTNRAVALSSSVMCPDARSRCPDGSTCCELPSGKYGCCPMPNATCCSDHLHCCPQDTVCDLIQSKCLSKENATTDLLTKLPAHTVGDVKCDMEVSCPDGYTCCRLQSGAWGCCPFTQAVCCEDHIHCCPAGFTCDTQKGTCEQGPHQVPWMEKAPAHLSLPDPQALKRDVPCDNVSSCPSSDTCCQLTSGEWGCCPIPEAVCCSDHQHCCPQGYTCVAEGQCQRGSEIVAGLEKMPARRASLSHPRDIGCDQHTSCPVGQTCCPSLGGSWACCQLPHAVCCEDRQHCCPAGYTCNVKARSCEKEVVSAQPATFLARSPHVGVKDVECGEGHFCHDNQTCCRDNRQGWACCPYRQVSANPHPGAGYGQGPGPTSSNPLAPL

SEQ ID NO: 6265 - protein, 110 aa, Homo Sapiens
  misc_feature (1)..(1): Xaa can be any naturally occurring amino acid
XCPSLGGSWACCQLPHAVCCEDRQHCCPAGYTCNVKARSCEKEVVSAQPATFLARSPHVGVKDVECGEGHFCHDNQTCCRDNRQGWACCPYRQPGVPSVCAGRPRAGTPL

SEQ ID NO: 6266 - protein, 138 aa, Homo Sapiens
MRGRELPLVLLALVLCLAPRGRAVPLPAGGGTVLTKMYPRGNHWAVGHLMGKKSTGESSSVSERGSLKQQLREYIRWEEAARNLLGLIEAKENRNHQPPQPKALGNQQPSWDSEDSSNFKDLVDSLLQVLNVKEGTPS

SEQ ID NO: 6267 - protein, 141 aa, Homo Sapiens
MRGRELPLVLLALVLCLAPRGRAVPLPAGGGTVLTKMYPRGNHWAVGHLMGKKSTGESSSVSERGSLKQQLREYIRWEEAARNLLGLIEAKENRNHQPPQPKALGNQQPSWDSEDSSNFKDVGSKGKGSQREGRNPQLNQQ

SEQ ID NO: 6268 - protein, 148 aa, Homo Sapiens
MRGRELPLVLLALVLCLAPRGRAVPLPAGGGTVLTKMYPRGNHWAVGHLMGKKSTGESSSVSERGSLKQQLREYIRWEEAARNLLGLIEAKENRNHQPPQPKALGNQQPSWDSEDSSNFKDVGSKGKVGRLSAPGSQREGRNPQLNQQ

SEQ ID NO: 6269 - protein, 96 aa, Homo Sapiens
  misc_feature (1)..(1): Xaa can be any naturally occurring amino acid
XHLMGKKSTGESSSVSERGSLKQQLREYIRWEEAARNLLGLIEAKENRNHQPPQPKALGNQQPSWDSEDSSNFKDVGSKGKDSLLQVLNVKEGTPS

SEQ ID NO: 6270 - protein, 35 aa, Homo Sapiens
  misc_feature (1)..(1): Xaa can be any naturally occurring amino acid
XISSLRGIQRIAATSKILSAPGSQREGRNPQLNQQ

SEQ ID NO: 6271 - protein, 496 aa, Homo Sapiens
MFAKATRNFLREVDADGDLIAVSNLNDSDKLQLLSLVTKKKRFWCWQRPKYQFLSLTLGDVLIEDQFPSPVVVESDFVKYEGKFANHVSGTLETALGKVKLNLGGSSRVESQSSFGTLRKQEVDLQQLIRDSAERTINLRNPVLQQVLEGRNEVLCVLTQKITTMQKCVISEHMQVEEKCGGIVGIQTKTVQVSATEDGNVTKDSNVVLEIPAATTIAYGVIELYVKLDGQFEFCLLRGKQGGFENKKRIDSVYLDPLVFREFAFIDMPDAAHGISSQDGPLSVLKQATLLLERNFHPFAELPEPQQTALSDIFQAVLFDDELLMVLEPVCDDLVSGLSPTVAVLGELKPRQQQDLVAFLQLVGCSLQGGCPGPEDAGSKQLFMTAYFLVSALAEMPDSAAALLGTCCKLQIIPTLCHLLRALSDDGVSDLEDPTLTPLKDTERFGIVQRLFASADISLERLKSSVKAVILKDSKVFPLLLCITLNGLCALGREHS

SEQ ID NO: 6272 - protein, 356 aa, Homo Sapiens
MFAKATRNFLREVDADGDLIAVSNLNDSDKLQLLSLVTKKKRFWCWQRPKYQFLSLTLGDVLIEDQFPSPVVVESDFVKYEGKFANHVSGTLETALGKVKLNLGGSSRVESQSSFGTLRKQEVDLQQLIRDSAERTINLRNPVLQQVLEGRNEVLCVLTQKITTMQKCVISEHMQVEEKCGGIVGIQTKTVQVSATEDGNVTKDSNVVLEIPAATTIAYGVIELYVKLDGQFEFCLLRGKQGGFENKKRIDSVYLDPLVFREFAFIDMPDAAHGISSQDGPLSVLKQATLLLERNFHPFAELPEPQQTALSDIFQAVLFDDELLMVLEPVVSPETSQGSVFTGVFWNRGGGRMELC

SEQ ID NO: 6273 - protein, 496 aa, Homo Sapiens; identical to SEQ ID NO: 6271

SEQ ID NO: 6274 - protein, 496 aa, Homo Sapiens; identical to SEQ ID NO: 6271

SEQ ID NO: 6275 - protein, 332 aa, Homo Sapiens
MQKCVISEHMQVEEKCGGIVGIQTKTVQVSATEDGNVTKDSNVVLEIPAATTIAYGVIELYVKLDGQFEFCLLRGKQGGFENKKRIDSVYLDPLVFREFAFIDMPDAAHGISSQDGPLSVLKQATLLLERNFHPFAELPEPQQTALSDIFQAVLFDDELLMVLEPVCDDLVSGLSPTVAVLGELKPRQQQDLVAFLQLVGCSLQGGCPGPEDAGSKQLFMTAYFLVSALAEMPDSAAALLGTCCKLQIIPTLCHLLRALSDDGVSDLEDPTLTPLKDTERFGIVQRLFASADISLERLKSSVKAVILKDSKVFPLLLCITLNGLCALGREHS

SEQ ID NO: 6276 - protein, 332 aa, Homo Sapiens; identical to SEQ ID NO: 6275

SEQ ID NO: 6277 - protein, 55 aa, Homo Sapiens
QLFMTAYFLVSALAEMPDSAAALLGTCCKLQIIPTLCHLVSNLPGGTLEWIGMGK

SEQ ID NO: 6278 - protein, 155 aa, Homo Sapiens
  misc_feature (1)..(1): Xaa can be any naturally occurring amino acid
XAATTIAYGVIELYVKLDGQFEFCLLRGKQGGFENKKRIDSVYLDPLVFREFAFIDMPDAAHGISSQDGPLSVLKQATLLLERNFHPFAELPEPQQTALSDIFQAVLFDDELLMVLEPVKDILGRSSSLTLSCTNGESHTSCQPSSHPDSVSSLS

SEQ ID NO: 6279 - protein, 192 aa, Homo Sapiens
  misc_feature (1)..(1): Xaa can be any naturally occurring amino acid
XEEKCGGIVGIQTKTVQVSATEDGNVTKDSNVVLEIPAATTIAYGVIELYVKLDGQFEFCLLRGKQGGFENKKRIDSVYLDPLVFREFAFIDMPDAAHGISSQDGPLSVLKQATLLLERNFHPFAELPEPQQTALSDIFQAVLFDDELLMVLEPVQKDILGRSSSLTLSCTNGESHTSCQPSSHPDSVSSLS

SEQ ID NO: 6280 - protein, 211 aa, Homo Sapiens
MAKMELSKAFSGQRTLLSAILSMLSLSFSTTSLLSNYWFVGTQKVPKPLCEKGLAAKCFDMPVSLDGDTNTSTQEVVQYNWETGDDRFSFRSFRSGMWLSCEETVEEPAKSEMEEELKKCVYLHLYLLLCHLALLHPQSWKQFRALRSSGTAAAKGERCRSFIELTPPAKRGEKGLLEFATLQGPCHPTLRFGGKRLMEKASLPSPPLGLC

SEQ ID NO: 6281 - protein, 298 aa, Homo Sapiens
MAKMELSKAFSGQRTLLSAILSMLSLSFSTTSLLSNYWFVGTQKVPKPLCEKGLAAKCFDMPVSLDGDTNTSTQEVVQYNWETGDDRFSFRSFRSGMWLSCEETVEEPALLHPQSWKQFRALRSSGTAAAKGERCRSFIELTPPAKRGLLGMVAHMMYSQVFQATVNLGPEDWRPHVWNYGWAFYMAWLSFTCCMASAVTTFNTYTRMVLEFKCKHSKSFKENPNCLPHHHQCFPRRLSSAAPTVGPLTSYHQYHNQPIHSVSEGVDFYSELRNKGFQRGASQELKEAVRSSVEEEQC

SEQ ID NO: 6282 - protein, 326 aa, Homo Sapiens
MAKMELSKAFSGQRTLLSAILSMLSLSFSTTSLLSNYWFVGTQKVPKPLCEKGLAAKCFDMPVSLDGDTNTSTQEVVQYNWETGDDRFSFRSFRSGMWLSCEETVEEPGERCRSFIELTPPAKREILWLSLGTQITYIGLQFISFLLLLTDLLLTGNPACGLKLSAFAAVSSVLSGLLGMVAHMMYSQVFQATVNLGPEDWRPHVWNYGWAFYMAWLSFTCCMASAVTTFNTYTRMVLEFKCKHSKSFKENPNCLPHHHQCFPRRLSSAAPTVGPLTSYHQYHNQPIHSVSEGVDFYSELRNKGFQRGASQELKEAVRSSVEEEQC

SEQ ID NO: 6283 - protein, 285 aa, Homo Sapiens
MAKMELSKAFSGQRTLLSAILSMLSLSFSTTSLLSNYWFVGTQKVPKPLCEKGLAAKCFDMPVSLDGDTNTSTQEVVQYNWETGDDRFSFRSFRSGMWLSCEETVEEPGERCRSFIELTPPAKRGEKGLLEFATLQGPCHPTLRFGGKRLMEKASLPSPPLGLCGKNPMVIPGNADHLHRTSIHQLPPATNRLATHWEPCLWAQTERLCCCFLCPVRSPGDGGPHDVFTSLPSDCQLGSRRLETTCLELWLGLLHGLALLHLLHGVGCHHLQHVHQDGAGVQVQA

SEQ ID NO: 6284 - protein, 275 aa, Homo Sapiens
MAKMELSKAFSGQRTLLSAILSMLSLSFSTTSLLSNYWFVGTQKVPKPLCEKGLAAKCFDMPVSLDGDTNTSTQEVVQYNWETGDDRFSFRSFRSGMWLSCEETVEEPGERCRSFIELTPPAKRGLLGMVAHMMYSQVFQATVNLGPEDWRPHVWNYGWAFYMAWLSFTCCMASAVTTFNTYTRMVLEFKCKHSKSFKENPNCLPHHHQCFPRRLSSAAPTVGPLTSYHQYHNQPIHSVSEGVDFYSELRNKGFQRGASQELKEAVRSSVEEEQC

SEQ ID NO: 6285 - protein, 220 aa, Homo Sapiens
MSDPSQLTQNVCLTQEMELSKAFSGQRTLLSAILSMLSLSFSTTSLLSNYWFVGTQKVPKPLCEKGLAAKCFDMPVSLDGDTNTSTQEVVQYNWETGDDRFSFRSFRSGMWLSCEETVEEPAKSEMEEELKKCVYLHLYLLLCHLALLHPQSWKQFRALRSSGTAAAKGERCRSFIELTPPAKREILWLSLGTQITYIGLQFISFLLLLTDLLLTGNPAC

SEQ ID NO: 6286 - protein, 321 aa, Homo Sapiens
MSDPSQLTQNVCLTQEMELSKAFSGQRTLLSAILSMLSLSFSTTSLLSNYWFVGTQKVPKPLCEKGLAAKCFDMPVSLDGDTNTSTQEVVQYNWETGDDRFSFRSFRSGMWLSCEETVEEPALLHPQSWKQFRALRSSGTAAAKGERCRSFIELTPPAKRGEKGLLEFATLQGPCHPTLRFGGKRLMEKASLPSPPLGLCGKNPMVIPGNADHLHRTSIHQLPPATNRLATHWEPCLWAQTERLCCCFLCPVRSPGDGGPHDVFTSLPSDCQLGSRRLETTCLELWLGLLHGLALLHLLHGVGCHHLQHVHQDGAGVQVQA

SEQ ID NO: 6287 - protein, 339 aa, Homo Sapiens
MSDPSQLTQNVCLTQEMELSKAFSGQRTLLSAILSMLSLSFSTTSLLSNYWFVGTQKVPKPLCEKGLAAKCFDMPVSLDGDTNTSTQEVVQYNWETGDDRFSFRSFRSGMWLSCEETVEEPGERCRSFIELTPPAKREILWLSLGTQITYIGLQFISFLLLLTDLLLTGNPACGLKLSAFAAVSSVLSGLLGMVAHMMYSQVFQATVNLGPEDWRPHVWNYGWAFYMAWLSFTCCMASAVTTFNTYTRMVLEFKCKHSKSFKENPNCLPHHHQCFPRRLSSAAPTVGPLTSYHQYHNQPIHSVSEGVDFYSELRNKGFQRGASQELKEAVRSSVEEEQC

SEQ ID NO: 6288 - protein, 236 aa, Homo Sapiens
MSDPSQLTQNVCLTQEMELSKAFSGQRTLLSAILSMLSLSFSTTSLLSNYWFVGTQKVPKPLCEKGLAAKCFDMPVSLDGDTNTSTQEVVQYNWETGDDRFSFRSFRSGMWLSCEETVEEPGERCRSFIELTPPAKRGEKGLLEFATLQGPCHPTLRFGGKRLMEKASLPSPPLGLCGKNPMVIPGNADHLHRTSIHQLPPATNRLATHWEPCLWAQTERLCCCFLCPVRSPGDGG

SEQ ID NO: 6289 - protein, 748 aa, Homo Sapiens
MAEEEALRGNSDPWPNSMVVEHPEFLKAGKEPGLQIWRVEKFDLVPVPTNLYGDFFTGDAYVILKTVQLRNGNLQYDLHYWLGNECSQDESGAAAIFTVQLDDYLNGRAVQHREVQGFESATFLGYFKSGLKYKKGGVASGFKHVVPNEVVVQRLFQVKGRRVVRATEVPVSWESFNNGDCFILDLGNNIHQWCGSNSNRYERLKATQVSKGIRDNERSGRARVHVSEEGTEPEAMLQVLGPKPALPAGTEDTAKEDAANRKLAKLYKVSNGAGTMSVSLVADENPFAQGALKSEDCFILDHGKDGKIFVWKGKQANTEERKAALKTASDFITKMDYPKQTQVSVLPEGGETPLFKQFFKNWRDPDQTDGLGLSYLSSHIANVERVPFDAATLHTSTAMAAQHGMDDDGTGQKQIWRIEGSNKVPVDPATYGQFYGGDSYIILYNYRHGGRQGQIIYNWQGAQSTQDEVAASAILTAQLDEELGGTPVQSRVVQGKEPAHLMSLFGGKPMIIYKGGTSREGGQTAPASTRLFQVRANSAGATRAVEVLPKAGALNSNDAFVLKTPSAAYLWVGTGASEAEKTGAQELLRVLRAQPVQVAEGSEPDGFWEALGGKAAYRTSPRLKDKKMDAHPPRLFACSNKIGRFVIEEVPGELMQEDLATDDVMLLDTWDQVFVWVGKDSQEEEKTEALTSAKRYIETDPANRDRRTPITVVKQGFEPPSFVGWFLGWDDDYWSVDPLDRAMAELAA

SEQ ID NO: 6290 - protein, 782 aa, Homo Sapiens
MAPHRPAPALLCALSLALCALSLPVRAATASRGASQAGAPQGRVPEARPNSMVVEHPEFLKAGKEPGLQIWRVEKFDLVPVPTNLYGDFFTGDAYVILKTVQLRNGNLQYDLHYWLGNECSQDESGAAAIFTVQLDDYLNGRAVQHREVQGFESATFLGYFKSGLKYKKGGVASGFKHVVPNEVVVQRLFQVKGRRVVRATEVPVSWESFNNGDCFILDLGNNIHQWCGSNSNRYERLKATQVSKGIRDNERSGRARVHVSEEGTEPEAMLQVLGPKPALPAGTEDTAKEDAANRKLAKLYKVSNGAGTMSVSLVADENPFAQGALKSEDCFILDHGKDGKIFVWKGKQANTEERKAALKTASDFITKMDYPKQTQVSVLPEGGETPLFKQFFKNWRDPDQTDGLGLSYLSSHIANVERVPFDAATLHTSTAMAAQHGMDDDGTGQKQIWRIEGSNKVPVDPATYGQFYGGDSYIILYNYRHGGRQGQIIYNWQGAQSTQDEVAASAILTAQLDEELGGTPVQSRVVQGKEPAHLMSLFGGKPMIIYKGGTSREGGQTAPASTRLFQVRANSAGATRAVEVLPKAGALNSNDAFVLKTPSAAYLWVGTGASEAEKTGAQELLRVLRAQPVQVAEGSEPDGFWEALGGKAAYRTSPRLKDKKMDAHPPRLFACSNKIGRFVIEEVPGELMQEDLATDDVMLLDTWDQVFVWVGKDSQEEEKTEALTSAKRYIETDPANRDRRTPITVVKQGFEPPSFVGWFLGWDDDYWSVDPLDRAMAELAA

SEQ ID NO: 6291 - protein, 232 aa, Homo Sapiens
MEKLFCCFPNSMVVEHPEFLKAGKEPGLQIWRVEKFDLVPVPTNLYGDFFTGDAYVILKTVQLRNGNLQYDLHYWLGNECSQDESGAAAIFTVQLDDYLNGRAVQHREVQGFESATFLGYFKSGLKYKKGGVASGFKHVVPNEVVVQRLFQVKGRRVVRATEVPVSWESFNNGDCFILDLGNNIHQWCGSNSNRYERLKATQVSKGIRDNERSGRARVHVSEEGTEPEAMLQ

SEQ ID NO: 6292 - protein, 742 aa, Homo Sapiens
MEKLFCCFPNSMVVEHPEFLKAGKEPGLQIWRVEKFDLVPVPTNLYGDFFTGDAYVILKTVQLRNGNLQYDLHYWLGNECSQDESGAAAIFTVQLDDYLNGRAVQHREVQGFESATFLGYFKSGLKYKKGGVASGFKHVVPNEVVVQRLFQVKGRRVVRATEVPVSWESFNNGDCFILDLGNNIHQWCGSNSNRYERLKATQVSKGIRDNERSGRARVHVSEEGTEPEAMLQVLGPKPALPAGTEDTAKEDAANRKLAKLYKVSNGAGTMSVSLVADENPFAQGALKSEDCFILDHGKDGKIFVWKGKQANTEERKAALKTASDFITKMDYPKQTQVSVLPEGGETPLFKQFFKNWRDPDQTDGLGLSYLSSHIANVERVPFDAATLHTSTAMAAQHGMDDDGTGQKQIWRIEGSNKVPVDPATYGQFYGGDSYIILYNYRHGGRQGQIIYNWQGAQSTQDEVAASAILTAQLDEELGGTPVQSRVVQGKEPAHLMSLFGGKPMIIYKGGTSREGGQTAPASTRLFQVRANSAGATRAVEVLPKAGALNSNDAFVLKTPSAAYLWVGTGASEAEKTGAQELLRVLRAQPVQVAEGSEPDGFWEALGGKAAYRTSPRLKDKKMDAHPPRLFACSNKIGRFVIEEVPGELMQEDLATDDVMLLDTWDQVFVWVGKDSQEEEKTEALTSAKRYIETDPANRDRRTPITVVKQGFEPPSFVGWFLGWDDDYWSVDPLDRAMAELAA

SEQ ID NO: 6293 - protein, 767 aa, Homo Sapiens
MNTGLTRLLWPSWLPDGDMSHPQPELFLFPKAQPNSMVVEHPEFLKAGKEPGLQIWRVEKFDLVPVPTNLYGDFFTGDAYVILKTVQLRNGNLQYDLHYWLGNECSQDESGAAAIFTVQLDDYLNGRAVQHREVQGFESATFLGYFKSGLKYKKGGVASGFKHVVPNEVVVQRLFQVKGRRVVRATEVPVSWESFNNGDCFILDLGNNIHQWCGSNSNRYERLKATQVSKGIRDNERSGRARVHVSEEGTEPEAMLQVLGPKPALPAGTEDTAKEDAANRKLAKLYKVSNGAGTMSVSLVADENPFAQGALKSEDCFILDHGKDGKIFVWKGKQANTEERKAALKTASDFITKMDYPKQTQVSVLPEGGETPLFKQFFKNWRDPDQTDGLGLSYLSSHIANVERVPFDAATLHTSTAMAAQHGMDDDGTGQKQIWRIEGSNKVPVDPATYGQFYGGDSYIILYNYRHGGRQGQIIYNWQGAQSTQDEVAASAILTAQLDEELGGTPVQSRVVQGKEPAHLMSLFGGKPMIIYKGGTSREGGQTAPASTRLFQVRANSAGATRAVEVLPKAGALNSNDAFVLKTPSAAYLWVGTGASEAEKTGAQELLRVLRAQPVQVAEGSEPDGFWEALGGKAAYRTSPRLKDKKMDAHPPRLFACSNKIGRFVIEEVPGELMQEDLATDDVMLLDTWDQVFVWVGKDSQEEEKTEALTSAKRYIETDPANRDRRTPITVVKQGFEPPSFVGWFLGWDDDYWSVDPLDRAMAELAA

SEQ ID NO: 6294 - protein, 739 aa, Homo Sapiens
MPLCTPNSMVVEHPEFLKAGKEPGLQIWRVEKFDLVPVPTNLYGDFFTGDAYVILKTVQLRNGNLQYDLHYWLGNECSQDESGAAAIFTVQLDDYLNGRAVQHREVQGFESATFLGYFKSGLKYKKGGVASGFKHVVPNEVVVQRLFQVKGRRVVRATEVPVSWESFNNGDCFILDLGNNIHQWCGSNSNRYERLKATQVSKGIRDNERSGRARVHVSEEGTEPEAMLQVLGPKPALPAGTEDTAKEDAANRKLAKLYKVSNGAGTMSVSLVADENPFAQGALKSEDCFILDHGKDGKIFVWKGKQANTEERKAALKTASDFITKMDYPKQTQVSVLPEGGETPLFKQFFKNWRDPDQTDGLGLSYLSSHIANVERVPFDAATLHTSTAMAAQHGMDDDGTGQKQIWRIEGSNKVPVDPATYGQFYGGDSYIILYNYRHGGRQGQIIYNWQGAQSTQDEVAASAILTAQLDEELGGTPVQSRVVQGKEPAHLMSLFGGKPMIIYKGGTSREGGQTAPASTRLFQVRANSAGATRAVEVLPKAGALNSNDAFVLKTPSAAYLWVGTGASEAEKTGAQELLRVLRAQPVQVAEGSEPDGFWEALGGKAAYRTSPRLKDKKMDAHPPRLFACSNKIGRFVIEEVPGELMQEDLATDDVMLLDTWDQVFVWVGKDSQEEEKTEALTSAKRYIETDPANRDRRTPITVVKQGFEPPSFVGWFLGWDDDYWSVDPLDRAMAELAA

SEQ ID NO: 6295 - protein, 731 aa, Homo Sapiens
MVVEHPEFLKAGKEPGLQIWRVEKFDLVPVPTNLYGDFFTGDAYVILKTVQLRNGNLQYDLHYWLGNECSQDESGAAAIFTVQLDDYLNGRAVQHREVQGFESATFLGYFKSGLKYKKGGVASGFKHVVPNEVVVQRLFQVKGRRVVRATEVPVSWESFNNGDCFILDLGNNIHQWCGSNSNRYERLKATQVSKGIRDNERSGRARVHVSEEGTEPEAMLQVLGPKPALPAGTEDTAKEDAANRKLAKLYKVSNGAGTMSVSLVADENPFAQGALKSEDCFILDHGKDGKIFVWKGKQANTEERKAALKTASDFITKMDYPKQTQVSVLPEGGETPLFKQFFKNWRDPDQTDGLGLSYLSSHIANVERVPFDAATLHTSTAMAAQHGMDDDGTGQKQIWRIEGSNKVPVDPATYGQFYGGDSYIILYNYRHGGRQGQIIYNWQGAQSTQDEVAASAILTAQLDEELGGTPVQSRVVQGKEPAHLMSLFGGKPMIIYKGGTSREGGQTAPASTRLFQVRANSAGATRAVEVLPKAGALNSNDAFVLKTPSAAYLWVGTGASEAEKTGAQELLRVLRAQPVQVAEGSEPDGFWEALGGKAAYRTSPRLKDKKMDAHPPRLFACSNKIGRFVIEEVPGELMQEDLATDDVMLLDTWDQVFVWVGKDSQEEEKTEALTSAKRYIETDPANRDRRTPITVVKQGFEPPSFVGWFLGWDDDYWSVDPLDRAMAELAA

SEQ ID NO: 6296 - protein, 260 aa, Homo Sapiens
MVVEHPEFLKAGKEPGLQIWRVEKFDLVPVPTNLYGDFFTGDAYVILKTVQLRNGNLQYDLHYWLGNECSQDESGAAAIFTVQLDDYLNGRAVQHREVQGFESATFLGYFKSGLKYKKGGVASGFKHVVPNEVVVQRLFQVKGRRVVRATEVPVSWESFNNGDCFILDLGNNIHQWCGSNSNRYERLKATQVSKGIRDNERSGRARVHVSEEGTEPEAMLQVLGPKPALPAGTEDTAKEDAANRKLAKLYKVSNGAGTMS

SEQ ID NO: 6297 - protein, 67 aa, Homo Sapiens
  misc_feature (1)..(1): Xaa can be any naturally occurring amino acid
XKGGTSREGGQTAPASTRLFQVRANSAGATRAVEVISRSWNTEGIGLPETSQLNDQISRHRNGGRGW

SEQ ID NO: 6298 - protein, 329 aa, Homo Sapiens
MESFLTSMGKFMKLIPDHRPKDLESIIRPKCQVIYFPIRFPDVSRFMPKHKTTHLKKMLGLKGNGGAVLSMALPFQPEQRDSEDLLKNFNSECDTHCGLDTARQEYLGNSLRQESDLKKSTSSDNSSSHHGENKQNLTVDPCDILGGVDNQQRLLHIVWPHRWEHDKDPESFFKVLMHLKDLGLNFHVSVLGETFTDVPDIFSEAKKALGSSVLHWGYLPSKDDYFQVLCMADVVISTAKHEFFGVAMLEAVYCGCYPLCPKDLVYPEIFPAEYLYSTPEQLSKRLQNFCKRPDIIRKHLYKGEIAPFSWAALHGKFRSLLTTEPREDL

SEQ ID NO: 6299 - protein, 426 aa, Homo Sapiens
MLTLHVWIWFGFMPCPNLMQNYNHQCCRTLFASSVLNLTELAALRPDLGKLKKILYFHENQLIYPVKKCQERDFQYGYNQILSCLVADVVVFNSVFNMESFLTSMGKFMKLIPDHRPKDLESIIRPKCQVIYFPIRFPDVSRFMPKHKTTHLKKMLGLKGNGGAVLSMALPFQPEQRDSEDLLKNFNSECDTHCGLDTARQEYLGNSLRQESDLKKSTSSDNSSSHHGENKQNLTVDPCDILGGVDNQQRLLHIVWPHRWEHDKDPESFFKVLMHLKDLGLNFHVSVLGETFTDVPDIFSEAKKALGSSVLHWGYLPSKDDYFQVLCMADVVISTAKHEFFGVAMLEAVYCGCYPLCPKDLVYPEIFPAEYLYSTPEQLSKRLQNFCKRPDIIRKHLYKGEIAPFSWAALHGKFRSLLTTEPREDL

SEQ ID NO: 6300 - protein, 66 aa, Homo Sapiens
MSILIIEAFYGGSHKQLVDLLQEELGDCVVYTLPAKKWHWRARTSALYFSQTIPISEHYRQSEITN

SEQ ID NO: 6301 - protein, 66 aa, Homo Sapiens; identical to SEQ ID NO: 6300

SEQ ID NO: 6302 - protein, 99 aa, Homo Sapiens
MSILIIEAFYGGSHKQLVDLLQEELGDCVVYTLPAKKWHWRARTSALYFSQTIPISEHYRTLFASSVLNLTELAALRPDLGKLKKILYFHENQLIYPVK

SEQ ID NO: 6303 - protein, 173 aa, Homo Sapiens
MSILIIEAFYGGSHKQLVDLLQEELGDCVVYTLPAKKWHWRARTSALYFSQTIPISEHYRTLFASSVLNLTELAALRPDLGKLKKILYFHENQLIYPVKKCQERDFQYGYNQILSCLVADVVVFNSVFNMESFLTSMGKFMKLIPDHRPKDLESIIRPKCQVIYFPIRFPDVS

SEQ ID NO: 6304 - protein, 340 aa, Homo Sapiens
MSILIIEAFYGGSHKQLVDLLQEELGDCVVYTLPAKKWHWRARTSALYFSQTIPISEHYRTLFASSVLNLTELAALRPDLGKLKKILYFHENQLIYPVKKCQERDFQYGYNQILSCLVADVVVFNSVFNMESFLTSMGKFMKLIPDHRPKDLESIIRPKCQVIYFPIRFPDVSREHDKDPESFFKVLMHLKDLGLNFHVSVLGETFTDVPDIFSEAKKALGSSVLHWGYLPSKDDYFQVLCMADVVISTAKHEFFGVAMLEAVYCGCYPLCPKDLVYPEIFPAEYLYSTPEQLSKRLQNFCKRPDIIRKHLYKGEIAPFSWAALHGKFRSLLTTEPREDL

SEQ ID NO: 6305 - protein, 376 aa, Homo Sapiens
MSILIIEAFYGGSHKQLVDLLQEELGDCVVYTLPAKKWHWRARTSALYFSQTIPISEHYRTLFASSVLNLTELAALRPDLGKLKKILYFHENQLIYPVKKCQERDFQYGYNQILSCLVADVVVFNSVFNMESFLTSMGKFMKLIPDHRPKDLESIIRPKCQVIYFPIRFPDVSRFMPKHKTTHLKKMLGLKGNGGAVLSMALPFQPEQRDSEDLLKNFNSECDTHCGLDTARQEYLGNSLRQESDLKKSTSSDNSSSHHGENKQNLTVDPCDILGGVDNQQRLLHIVWPHRWEHDKDPESFFKVLMHLKDLGLNFHVSVLGETFTDVPGWKLCTVGVTHFVLKIWFIPKYFQLNICILHLNSFQKGSRISARDQIL

SEQ ID NO: 6306 - protein, 458 aa, Homo Sapiens
MSILIIEAFYGGSHKQLVDLLQEELGDCVVYTLPAKKWHWRARTSALYFSQTIPISEHYRTLFASSVLNLTELAALRPDLGKLKKILYFHENQLIYPVKKCQERDFQYGYNQILSCLVADVVVFNSVFNMESFLTSMGKFMKLIPDHRPKDLESIIRPKCQVIYFPIRFPDVSRFMPKHKTTHLKKMLGLKGNGGAVLSMALPFQPEQRDSEDLLKNFNSECDTHCGLDTARQEYLGNSLRQESDLKKSTSSDNSSSHHGENKQNLTVDPCDILGGVDNQQRLLHIVWPHRWEHDKDPESFFKVLMHLKDLGLNFHVSVLGETFTDVPDIFSEAKKALGSSVLHWGYLPSKDDYFQVLCMADVVISTAKHEFFGVAMLEAVYCGCYPLCPKDLVYPEIFPAEYLYSTPEQLSKRLQNFCKRPDIIRKHLYKGEIAPFSWAALHGKFRSLLTTEPREDL

SEQ ID NO: 6307 - protein, 373 aa, Homo Sapiens
MSILIIEAFYGGSHKQLVDLLQEELGDCVVYTLPAKKWHWRARTSALYFSQTIPISEHYRTLFASSVLNLTELAALRPDLGKLKKILYFHENQLIYPVKKCQERDFQYGYNQILSCLVADVVVFNSVFNMESFLTSMGKFMKLIPDHRPKDLESIIRPKCQVIYFPIRFPDVSRFMPKHKTTHLKKMLGLKGNGGAVLSMALPFQPEQRDSEDLLKNFNSECDTHCGLDTARQEYLGNSLRQESDLKKSTSSDNSSSHHGENKQNLTVDPCDILGGVDNQQRLLHIVWPHRWLEAVYCGCYPLCPKDLVYPEIFPAEYLYSTPEQLSKRLQNFCKRPDIIRKHLYKGEIAPFSWAALHGKFRSLLTTEPREDL

SEQ ID NO: 6308 - protein, 376 aa, Homo Sapiens; identical to SEQ ID NO: 6305

SEQ ID NO: 6309 - protein, 458 aa, Homo Sapiens; identical to SEQ ID NO: 6306

SEQ ID NO: 6310 - protein, 458 aa, Homo Sapiens; identical to SEQ ID NO: 6306

SEQ ID NO: 6311 - protein, 458 aa, Homo Sapiens; identical to SEQ ID NO: 6306

SEQ ID NO: 6312 - protein, 236 aa, Homo Sapiens
MRTVSLCHPDWSALASSWLTAASTSWAQYGNFIDKLRLFTRGGSGGMGYPRLGGEGGKGGDVWVVAQNRMTLKQLKDRYPRKRFVAGVGANSKISALKGSKGKDCEIPVPVGISVTDENGKIIGELNKENDRILVAQGGLGGKLLTNFLPLKGQKRIIHLDLKLIADVGLVGFPNAGKSSLLSCVSHAKPAIADYAFTTLKPELGKIMYSDFKQISVADLPGLIEGAHMNKGMGHK

SEQ ID NO: 6313 - protein, 107 aa, Homo Sapiens
MRYGNFIDKLRLFTRGGSGGMGYPRLGGEGGKGGDVWVVAQNRMTLKQLKDRYPRKRFVAGVGANSKISALKGSKGKDCEIPVPVGISVTDENGKIIDSQMLENPLC

SEQ ID NO: 6314 - protein, 210 aa, Homo Sapiens
MRYGNFIDKLRLFTRGGSGGMGYPRLGGEGGKGGDVWVVAQNRMTLKQLKDRYPRKRFVAGVGANSKISALKGSKGKDCEIPVPVGISVTDENGKIIGELNKENDRILVAQGGLGGKLLTNFLPLKGQKRIIHLDLKLIADVGLVGFPNAGKSSLLSCVSHAKPAIADYAFTTLKPELGKIMYSDFKQISVADLPGLIEGAHMNKGMGHK

SEQ ID NO: 6315 - protein, 70 aa, Homo Sapiens
MRYGNFIDKLRLFTRGGSGGMGYPRLGGEGGKGGDVWVVAQNRMTLKQLKDRYPRKRFVAGVGANSKRTQ

SEQ ID NO: 6316 - protein, 308 aa, Homo Sapiens
MVHCSCVLFRKYGNFIDKLRLFTRGGSGGMGYPRLGGEGGKGGDVWVVAQNRMTLKQLKDRYPRKRFVAGVGANSKFPNAGKSSLLSCVSHAKPAIADYAFTTLKPELGKIMYSDFKQISVADLPGLIEGAHMNKGMGHKFLKHIERTRQLLFVVDISGFQLSSHTQYRTAFETIILLTKELELYKEELQTKPALLAVNKMDLPDAQDKFHELMSQLQNPKDFLHLFEKNMIPERTVEFQHIIPISAVTGEGIEELKNCIRKSLDEQANQENDALHKKQLLNLWISDTMSSTEPPSKHAVTTSKMDII

SEQ ID NO: 6317 - protein, 116 aa, Homo Sapiens
MVHCSCVLFRKYGNFIDKLRLFTRGGSGGMGYPRLGGEGGKGGDVWVVAQNRMTLKQLKDRYPRKRFVAGVGANSKISALKGSKGKDCEIPVPVGISVTDENGKIIDSQMLENPLC

SEQ ID NO: 6318 - protein, 387 aa, Homo Sapiens
MVHCSCVLFRKYGNFIDKLRLFTRGGSGGMGYPRLGGEGGKGGDVWVVAQNRMTLKQLKDRYPRKRFVAGVGANSKISALKGSKGKDCEIPVPVGISVTDENGKIIGELNKENDRILVAQGGLGGKLLTNFLPLKGQKRIIHLDLKLIADVGLVGFPNAGKSSLLSCVSHAKPAIADYAFTTLKPELGKIMYSDFKQISVADLPGLIEGAHMNKGMGHKFLKHIERTRQLLFVVDISGFQLSSHTQYRTAFETIILLTKELELYKEELQTKPALLAVNKMDLPDAQDKFHELMSQLQNPKDFLHLFEKNMIPERTVEFQHIIPISAVTGEGIEELKNCIRKSLDEQANQENDALHKKQLLNLWISDTMSSTEPPSKHAVTTSKMDII

SEQ ID NO: 6319 - protein, 243 aa, Homo Sapiens
MVHCSCVLFRKYGNFIDKLRLFTRGGSGGMGYPRLGGEGGKGGDVWVVAQNRMTLKQLKDRYPRKRFVAGVGANSKISALKGSKGKDCEIPVPVGISVTDENGKIIVTTLKPELGKIMYSDFKQISVADLPGLIEGAHMNKGMGHKFLKHIERTRQLLFVVDISGFQLSSHTQYRTAFETIILLTKELELYKEELQTKPALLAVNKMDLPDAQDKFHELMSQLQNPKDFLHLFEKNMIPERTV

SEQ ID NO: 6320 - protein, 79 aa, Homo Sapiens
MVHCSCVLFRKYGNFIDKLRLFTRGGSGGMGYPRLGGEGGKGGDVWVVAQNRMTLKQLKDRYPRKRFVAGVGANSKRTQ

SEQ ID NO: 6321 - protein, 115 aa, Homo Sapiens
MNAFLLSALCLLGAWAALAGGVTVQDGNFSFSLESVKKLKDLQEPQEPRVGKLRNFAPIPGEPVVPILCSNPNFPEELKPLCKEPNAQEILQRLEEIAEDPGTCEICAYAACTGC

SEQ ID NO: 6322 - protein, 112 aa, Homo Sapiens
MGCRAASGLLPGVAVVLLLLLQSTQSVYIQYQGFRVQLESMKKLSDLEAQWAPSPRLQAQSLLPAVCHHPALPQDLQPVCASQEASSIFKTLRTIANDDCELCVNVACTGCL

SEQ ID NO: 6323 - protein, 134 aa, Homo Sapiens
MARGSAVAWAALGPLLWGCALGLQGGMLYPQESPSRECKELDGLWSFRADFSDNRRRGFEEQWYRRPLWESGPTVDMPVPSSFNDISQDWRLRHFVGWVWYEREVILPERWTQDLRTRVVLRIGSAHSYAIVGW

SEQ ID NO: 6324 - protein, 144 aa, Homo Sapiens
MARGSAVAWAALGPLLWGCALGLQGGMLYPQESPSRECKELDGLWSFRADFSDNRRRGFEEQWYRRPLWESGPTVDMPVPSSFNDISQDWRLRHFVGWVWYEREVILPERWTQDLRTRVVLRIGSAHSYAIVVSQGLLCPEHIF

SEQ ID NO: 6325 - protein, 144 aa, Homo Sapiens; identical to SEQ ID NO: 6324

SEQ ID NO: 6326 - protein, 651 aa, Homo Sapiens
MARGSAVAWAALGPLLWGCALGLQGGMLYPQESPSRECKELDGLWSFRADFSDNRRRGFEEQWYRRPLWESGPTVDMPVPSSFNDISQDWRLRHFVGWVWYEREVILPERWTQDLRTRVVLRIGSAHSYAIVWVNGVDTLEHEGGYLPFEADISNLVQVGPLPSRLRITIAINNTLTPTTLPPGTIQYLTDTSKYPKGYFVQNTYFDFFNYAGLQRSVLLYTTPTTYIDDITVTTSVEQDSGLVNYQISVKGSNLFKLEVRLLDAENKVVANGTGTQGQLKVPGVSLWWPYLMHERPAYLYSLEVQLTAQTSLGPVSDFYTLPVGIRTVAVTKSQFLINGKPFYFHGVNKHEDADIRGKGFDWPLLVKDFNLLRWLGANAFRTSHYPYAEEVMQMCDRYGIVVIDECPGVGLALPQFFNNVSLHHHMQVMEEVVRRDKNHPAVVMWSVANEPASHLESAGYYLKMVIAHTKSLDPSRPVTFVSNSNYAADKGAPYVDVICLNSYYSWYHDYGHLELIQLQLATQFENWYKKYQKPIIQSEYGAETIAGFHQDPPLMFTEEYQKSLLEQYHLGLDQKRRKYVVGELIWNFADFMTEQSPTRVLGNKKGIFTRQRQPKSAAFLLRERYWKIANETRYPHSVAKSQCLENSLFT

SEQ ID NO: 6327 - protein, 505 aa, Homo Sapiens
MARGSAVAWAALGPLLWGCALGLQGGMLYPQESPSRECKELDGLWSFRADFSDNRRRGFEEQWYRRPLWESGPTVDMPVPSSFNDISQDWRLRHFVGWVWYEREVILPERWTQDLRTRVVLRIGSAHSYAIVWVNGVDTLEHEGGYLPFEADISNLVQVQLTAQTSLGPVSDFYTLPVGIRTVAVTKSQFLINGKPFYFHGVNKHEDADIRGKGFDWPLLVKDFNLLRWLGANAFRTSHYPYAEEVMQMCDRYGIVVIDECPGVGLALPQFFNNVSLHHHMQVMEEVVRRDKNHPAVVMWSVANEPASHLESAGYYLKMVIAHTKSLDPSRPVTFVSNSNYAADKGAPYVDVICLNSYYSWYHDYGHLELIQLQLATQFENWYKKYQKPIIQSEYGAETIAGFHQDPPLMFTEEYQKSLLEQYHLGLDQKRRKYVVGELIWNFADFMTEQSPTRVLGNKKGIFTRQRQPKSAAFLLRERYWKIANETRYPHSVAKSQCLENSLFT

SEQ ID NO: 6328 - protein, 195 aa, Homo Sapiens; identical to SEQ ID NO: 73

SEQ ID NO: 6329 - protein, 440 aa, Homo Sapiens
MRRYLRVVVLCVACGFCSLLYAFSQLAVSLEEGTGGGGGKPQAAVASWLAGGGRGAVRGAGVAGPAAHPGVSDRCKDFSLCYWNPYWMLPSDVCGMNCFWEAAFRYSLKIQPVEKMHLAVVACGERLEETMTMLKSAIIFSIKPLQFHIFAEDQLHHSFKGRLDNWSFLQTFNYTLYPITFPSENAAEWKKLFKPCASQRLFLPLILKEVDSLLYVDTDILFLRPVDDIWSLLKKFNSTQIAAMAPEHEEPRIGWYNRFARHPYYGKTGVNSGVMLMNMTRMRRKYFKNDMTTVRLQWGDILMPLLKKYKLNITWGDQDLLNIVFFHNPESLFVFPCQWNYRPDHCIYGSNCQEAEEGGIFILHGNRGVYHDDKQPAFRAVYEALRNCSFEDDNIRSLLKPLELELQKTVHTYCGKIYKIFIKQLAKSVRDRYARSPKEK

SEQ ID NO: 6330 - protein, 409 aa, Homo Sapiens
MRRYLRVVVLCVACGFCSLLYAFSQLAVSLEEGTGGGGGKPQAAVASWLAGGGRGAVRGAGVAGPAAHPGVSDRYSLKIQPVEKMHLAVVACGERLEETMTMLKSAIIFSIKPLQFHIFAEDQLHHSFKGRLDNWSFLQTFNYTLYPITFPSENAAEWKKLFKPCASQRLFLPLILKEVDSLLYVDTDILFLRPVDDIWSLLKKFNSTQIAAMAPEHEEPRIGWYNRFARHPYYGKTGVNSGVMLMNMTRMRRKYFKNDMTTVRLQWGDILMPLLKKYKLNITWGDQDLLNIVFFHNPESLFVFPCQWNYRPDHCIYGSNCQEAEEGGIFILHGNRGVYHDDKQPAFRAVYEALRNCSFEDDNIRSLLKPLELELQKTVHTYCGKIYKIFIKQLAKSVRDRYARSPKEK

SEQ ID NO: 6331 - protein, 164 aa, Homo Sapiens
MAPEHEIPKIGWYSRFARHPFYGSAGVNSGVMLMNLTRIRSTQFKNSMIPTGLAWEDMLYPLYQKYKNAITWGDQDLLNIIFYFNPECLYVFPCQWNYRPDHCMYGSNCREAEHEGVSVLHGNRGVYHDDKQPTFRALYEAIRDILRRGGKRKFVLSWISFFVM

SEQ ID NO: 6332 - protein, 443 aa, Homo Sapiens
MKLRSKAAALLLLALAALLLALLSLRAGRAEPPALPARPASAPQRHPAPVPARWPGPGALPGASPGVRRRRPPRPRPRAGRRGAARLEKLARRPGEPRSFQAVLPPELWIHLAVVACGNRLEETLVMLKSAVLFSHRKIQFHIFTEDSLKPEFDKQLRQWPDSYTKKFEHRIYPITFSVGNPQEWKKLFKPCAAQRLFLPVILKDVDSLLYVDTDVLFLRPVDDIWKLLRLFNSTQLAAMAPEHEIPKIGWYSRFARHPFYGSAGVNSGVMLMNLTRIRSTQFKNSMIPTGLAWEDMLYPLYQKYKNAITWGDQDLLNIIFYFNPECLYVFPCQWNYRPDHCMYGSNCREAEHEGVSVLHGNRGVYHDDKQPTFRALYEAIRDFPFQDNLFQSMYYPLQLKFLETVHTLCGRIPQVFLKQIEKTMKRAYEKHVIIHVGPNQMH

SEQ ID NO: 6333 - protein, 102 aa, Homo Sapiens
MLKSAVLFSHRKIQFHIFTEDSLKPEFDKQLRQWPDSYTKKFEHRIYPITFSVGNPQEWKKLFKPCAAQRLFLPVILKDVDSLLYVDTDVLFLRPVDDIWKL

SEQ ID NO: 6334 - protein, 65 aa, Homo Sapiens
MHTSTSSSVTKSYISSQTNGETGQLVHRFTVPAPVVIILIILCVMAGIIGTILLISYSIRRLIKA

SEQ ID NO: 6335 - protein, 121 aa, Homo Sapiens
MYGKIIFVLLLSEIVSISALSTTEVAMHTSTSSSVTKSYISSQTNDKHKRDTCPAHTANEVSEISVTTVSPPEKKNGETGQLVHRFTVPAPVVIILIILCVMAGIIGTILLISYSIRRLIK

SEQ ID NO: 6336 - protein, 91 aa, Homo Sapiens
MYGKIIFVLLLSEIVSISALSTTEVAMHTSTSSSVTKSYISSQTNGETGQLVHRFTVPAPVVIILIILCVMAGIIGTILLISYSIRRLIKA

SEQ ID NO: 6337 - protein, 62 aa, Homo Sapiens
MYGKIIFVLLLSEIVSISALSTTEVAMHTSTSSSVTKSYISSQTNGETGQLVHRFTVPVFAD

SEQ ID NO: 6338 - protein, 42 aa, Homo Sapiens
MYGKIIFVLLLSGDGANPENSGRRGQKAEGRARAKILKQEKL

SEQ ID NO: 6339 - protein, 58 aa, Homo Sapiens
MYGKIIFVLLLSGETGQLVHRFTVPAPVVIILIILCVMAGIIGTILLISYSIRRLIKA

SEQ ID NO: 6340 - protein, 45 aa, Homo Sapiens
MYGKIIFVLLLSGNFEHSAEGPSWLPLRRSPSTSTPLHLGAIPLI

SEQ ID NO: 6341 - protein, 45 aa, Homo Sapiens; identical to SEQ ID NO: 6340

SEQ ID NO: 6342 - protein, 45 aa, Homo Sapiens; identical to SEQ ID NO: 6340

SEQ ID NO: 6343 - protein, 262 aa, Homo Sapiens
MRNSYRFLASSLSVVVSLLLIPEDVCEKIIGGNEVTPHSRPYMVLLSLDRKTICAGALIAKDWVLTAAHCNLNKRSQVILGAHSITREEPTKQIMLVKKEFPYPCYDPATREGDLKLLQLMEKAKINKYVTILHLPKKGDDVKPGTMCQVAGWGRTHNSASWSDTLREVNITIIDRKVCNDRNHYNFNPVIGMNMVCAGSLRGGRDSCNGDSGSPLLCEGVFRGVTSFGLENKCGDPRGPGVYILLSKKHLNWIIMTIKGAV

SEQ ID NO: 6344 - protein, 44 aa, Homo Sapiens
MQECSELQLPFYQDPPSVMLDKLSAGMAEQQAILKKSQGDHRGT

SEQ ID NO: 6345 - protein, 35 aa, Homo Sapiens
MQPILLLLAFLLLPRADAAGEKGQADQSCAAPQAT

SEQ ID NO: 6346 - protein, 202 aa, Homo Sapiens
MQPILLLLAFLLLPRADAGEIIGGHEAKPHSRPYMAYLMIWDQKSLKRCGGFLIRDDFVLTAAHCWGRLERKAKRTRAVQPLRLPSNKAQVKPGQTCSVAGWGQTAPLGKHSHTLQEVKMTVQEDRKCESDLRHYYDSTIELCVGDPEIKKTSFKGDSGGPLVCNKVAQGIVSYGRNNGMPPRACTKVSSFVHWIKKTMKRY

SEQ ID NO: 6347 - protein, 202 aa, Homo Sapiens; identical to SEQ ID NO: 6346

SEQ ID NO: 6348 - protein, 247 aa, Homo Sapiens
MQPILLLLAFLLLPRADAGEIIGGHEAKPHSRPYMAYLMIWDQKSLKRCGGFLIRDDFVLTAAHCWGSSINVTLGAHNIKEQEPTQQFIPVKRPIPHPAYNPKNFSNDIMLLQLERKAKRTRAVQPLRLPSNKAQVKPGQTCSVAGWGQTAPLGKHSHTLQEVKMTVQEDRKCESDLRHYYDSTIELCVGDPEIKKTSFKGDSGGPLVCNKVAQGIVSYGRNNGMPPRACTKVSSFVHWIKKTMKRY

SEQ ID NO: 6349 - protein, 90 aa, Homo Sapiens
MQPILLLLAFLLLPRADAGEIIGGHEAKPHSRPYMAYLMIWDQKSLKRCGGFLIRDDFVLTAAHCWGSWRERPSGPELCSPSGYLATRPR

SEQ ID NO: 6350 - protein, 90 aa, Homo Sapiens; identical to SEQ ID NO: 6349

SEQ ID NO: 6351 - protein, 152 aa, Homo Sapiens
MQPILLLLAFLLLPRADQLERKAKRTRAVQPLRLPSNKAQVKPGQTCSVAGWGQTAPLGKHSHTLQEVKMTVQEDRKCESDLRHYYDSTIELCVGDPEIKKTSFKGDSGGPLVCNKVAQGIVSYGRNNGMPPRACTKVSSFVHWIKKTMKRY

SEQ ID NO: 6352 - protein, 235 aa, Homo Sapiens
MQTFPSGEIIGGHEAKPHSRPYMAYLMIWDQKSLKRCGGFLIRDDFVLTAAHCWGSSINVTLGAHNIKEQEPTQQFIPVKRPIPHPAYNPKNFSNDIMLLQLERKAKRTRAVQPLRLPSNKAQVKPGQTCSVAGWGQTAPLGKHSHTLQEVKMTVQEDRKCESDLRHYYDSTIELCVGDPEIKKTSFKGDSGGPLVCNKVAQGIVSYGRNNGMPPRACTKVSSFVHWIKKTMKRY

SEQ ID NO: 6353 - protein, 115 aa, Homo Sapiens
MQPFLLLLAFLLTPGAGTEEIIGGHEAKPHSRPYMAFVQFLQEKSRKRCGGILVRKDFVLTAAHCQGRGDSGGPLVCKDVAQGILSYGNKKGTPPGVYIKVSHFLPWIKRTMKRL

SEQ ID NO: 6354 - protein, 160 aa, Homo Sapiens
MQPFLLLLAFLLTPGAGTEEIIGGHEAKPHSRPYMAFVQFLQEKSRKRCGGILVRKDFVLTAAHCQGSSINVTLGAHNIKEQERTQQFIPVKRPIPHPAYNPKNFSNDIMLLQGDSGGPLVCKDVAQGILSYGNKKGTPPGVYIKVSHFLPWIKRTMKRL

SEQ ID NO: 6355 - protein, 246 aa, Homo Sapiens
MQPFLLLLAFLLTPGAGTEEIIGGHEAKPHSRPYMAFVQFLQEKSRKRCGGILVRKDFVLTAAHCQGSSINVTLGAHNIKEQERTQQFIPVKRPIPHPAYNPKNFSNDIMLLQLERKAKWTTAVRPLRLPSSKAQVKPGQLCSVAGWGYVSMSTLATTLQEVLLTVQKDCQCERLFHGNYSRATEICVGDPKKTQTGFKGDSGGPLVCKDVAQGILSYGNKKGTPPGVYIKVSHFLPWIKRTMKRL

SEQ ID NO: 6356 - protein, 264 aa, Homo Sapiens
MTKFSSFSLFFLIVGAYMTHVCFNMEIIGGKEVSPHSRPFMASIQYGGHHVCGGVLIDPQWVLTAAHCQYRFTKGQSPTVVLGAHSLSKNEASKQTLEIKKFIPFSRVTSDPQSNDIMLVKLQTAAKLNKHVKMLHIRSKTSLRSGTKCKVTGWGATDPDSLRPSDTLREVTVTVLSRKLCNSQSYYNGDPFITKDMVCAGDAKGQKDSCKGDSGGPLICKGVFHAIVSGGHECGVATKPGIYTLLTKKYQTWIKSNLVPPHTN

SEQ ID NO: 6357 - protein, 218 aa, Homo Sapiens
MASLQRNGSHLCGGVLVHPKWVLTAAHCLAQRMAQLRLVLGLHTLDSPGLTFHIKAAIQHPRYKPVPALENDLALLQLDGKVKPSRTIRPLALPSKRQVVAAGTRCSMAGWGLTHQGGRLSRVLRELDLQVLDTRMCNNSRFWNGSLSPSMVCLAADSKDQAPCKGDSGGPLVCGKGRVLARVLSFSSRVCTDIFKPPVATAVAPYVSWIRKVTGRSA

SEQ ID NO: 6358 - protein, 257 aa, Homo Sapiens
MEACVSSLLVLALGALSVGSSFGTQIIGGREVIPHSRPYMASLQRNGSHLCGGVLVHPKWVLTAAHCLAQRMAQLRLVLGLHTLDSPGLTFHIKAAIQHPRYKPVPALENDLALLQLDGKVKPSRTIRPLALPSKRQVVAAGTRCSMAGWGLTHQGGRLSRVLRELDLQVLDTRMCNNSRFWNGSLSPSMVCLAADSKDQAPCKGDSGGPLVCGKGRVLARVLSFSSRVCTDIFKPPVATAVAPYVSWIRKVTGRSA

SEQ ID NO: 6359 - protein, 802 aa, Homo Sapiens
MLAEPFNWHPGMWNMLIVAMCLALLGCLQAQELQGHVSIILLGATGDLAKKYLWQGLFQLYLDEAGRGHSFSFHGAALTAPKQGQELMAKALESLSCPKDMAPSHCAEHKDQFLQLSQYRQLKTAEDYQALNKDIEAQLQHAGLREAGRIFYFSVPPFAYEDIARNINSSCRPGPGAWLRVVLEKPFGHDHFSAQQLATELGTFFQEEEMYRVDHYLGKQAVAQILPFRDQNRKALDGLWNRHHVERVEIIMKETVDAEGRTSFYEEYGVIRDVLQNHLTEVLTLVAMELPHNVSSAEAVLRHKLQVFQALRGLQRGSAVVGQYQSYSEQVRRELQKPDSFHSLTPTFAAVLVHIDNLRWEGVPFILMSGKALDERVGYARILFKNQACCVQSEKHWAAAQSQCLPRQLVFHIGHGDLGSPAVLVSRNLFRPSLPSSWKEMEGPPGLRLFGSPLSDYYAYSPVRERDAHSVLLSHIFHGRKNFFITTENLLASWNFWTPLLESLAHKAPRLYPGGAENGRLLDFEFSSGRLFFSQQQPEQLVPGPGPAPMPSDFQVLRAKYRESPLVSAWSEELISKLANDIEATAVRAVRRFGQFHLALSGGSSPVALFQQLATAHYGFPWAHTHLWLVDERCVPLSDPESNFQGLQAHLLQHVRIPYYNIHPMPVHLQQRLCAEEDQGAQIYAREISALVANSSFDLVLLGMGADGHTASLFPQSPTGLDGEQLVVLTTSPSQPHRRMSLSLPLINRAKKVAVLVMGRMKREITTLVSRVGHEPKKWPISGVLPHSGQLVWYMDYDAFLG

SEQ ID NO: 6360 - protein, 791 aa, Homo Sapiens
MWNMLIVAMCLALLGCLQAQELQGHVSIILLGATGDLAKKYLWQGLFQLYLDEAGRGHSFSFHGAALTAPKQGQELMAKALESLSCPKDMAPSHCAEHKDQFLQLSQYRQLKTAEDYQALNKDIEAQLQHAGLREAGRIFYFSVPPFAYEDIARNINSSCRPGPGAWLRVVLEKPFGHDHFSAQQLATELGTFFQEEEMYRVDHYLGKQAVAQILPFRDQNRKALDGLWNRHHVERVEIIMKETVDAEGRTSFYEEYGVIRDVLQNHLTEVLTLVAMELPHNVSSAEAVLRHKLQVFQALRGLQRGSAVVGQYQSYSEQVRRELQKPDSFHSLTPTFAAVLVHIDNLRWEGVPFILMSGKALDERVGYARILFKNQACCVQSEKHWAAAQSQCLPRQLVFHIGHGDLGSPAVLVSRNLFRPSLPSSWKEMEGPPGLRLFGSPLSDYYAYSPVRERDAHSVLLSHIFHGRKNFFITTENLLASWNFWTPLLESLAHKAPRLYPGGAENGRLLDFEFSSGRLFFSQQQPEQLVPGPGPAPMPSDFQVLRAKYRESPLVSAWSEELISKLANDIEATAVRAVRRFGQFHLALSGGSSPVALFQQLATAHYGFPWAHTHLWLVDERCVPLSDPESNFQGLQAHLLQHVRIPYYNIHPMPVHLQQRLCAEEDQGAQIYAREISALVANSSFDLVLLGMGADGHTASLFPQSPTGLDGEQLVVLTTSPSQPHRRMSLSLPLINRAKKVAVLVMGRMKREITTLVSRVGHEPKKWPISGVLPHSGQLVWYMDYDAFLG

SEQ ID NO: 6361 - protein, 560 aa, Homo Sapiens
MFARMSDLHVLLLMALVGKTACGFSLMSLLESLDPDWTPDQYDYSYEDYNQEENTSSTLTHAENPDWYYTEDQADPCQPNPCEHGGDCLVHGSTFTCSCLAPFSGNKCQKVQNTCKDNPCGRGQCLITQSPPYYRCVCKHPYTGPSCSQVVPVCRPNPCQNGATCSRHKRRSKFTCACPDQFKGKFCEIGSDDCYVGDGYSYRGKMNRTVNQHACLYWNSHLLLQENYNMFMEDAETHGIGEHNFCRNPDADEKPWCFIKVTNDKVKWEYCDVSACSAQDVAYPEESPTEPSTKLPGFDSCGKTEIAERKIKRIYGGFKSTAGKHPWQASLQSSLPLTISMPQGHFCGGALIHPCWVLTAAHCTDIKTRHLKVVLGDQDLKKEEFHEQSFRVEKIFKYSHYNERDEIPHNDIALLKLKPVDGHCALESKYVKTVCLPDGSFPSGSECHISGWGVTETGKGSRQLLDAKVKLIANTLCNSRQLYDHMIDDSMICAGNLQKPGQDTCQGDSGGPLTCEKDGTYYVYGIVSWGLECGKRPGVYTQVTKFLNWIKATIKSESGF

SEQ ID NO: 6362 - protein, 534 aa, Homo Sapiens
MSLLESLDPDWTPDQYDYSYEDYNQEENTSSTLTHAENPDWYYTEDQADPCQPNPCEHGGDCLVHGSTFTCSCLAPFSGNKCQKVQNTCKDNPCGRGQCLITQSPPYYRCVCKHPYTGPSCSQVVPVCRPNPCQNGATCSRHKRRSKFTCACPDQFKGKFCEIGSDDCYVGDGYSYRGKMNRTVNQHACLYWNSHLLLQENYNMFMEDAETHGIGEHNFCRNPDADEKPWCFIKVTNDKVKWEYCDVSACSAQDVAYPEESPTEPSTKLPGFDSCGKTEIAERKIKRIYGGFKSTAGKHPWQASLQSSLPLTISMPQGHFCGGALIHPCWVLTAAHCTDIKTRHLKVVLGDQDLKKEEFHEQSFRVEKIFKYSHYNERDEIPHNDIALLKLKPVDGHCALESKYVKTVCLPDGSFPSGSECHISGWGVTETGKGSRQLLDAKVKLIANTLCNSRQLYDHMIDDSMICAGNLQKPGQDTCQGDSGGPLTCEKDGTYYVYGIVSWGLECGKRPGVYTQVTKFLNWIKATIKSESGF

SEQ ID NO: 6363 - protein, 459 aa, Homo Sapiens
MTILTYPFKNLPTASKWALRFSIRPLSCSSQLRAAPAVQTKTKKTLAKPNIRNVVVVDGVRTPFLLSGTSGLLHRTSVPKEVVDYIIFGTVIQEVKTSNVAREAALGAGFSDKTPAHTVTMACISANQAMTTGVGLIASGQCDVIVAGGVELMSDVPIRHSRKMRKLMLDLNKAKSMGQRLSLISKFRFNFLAPELPAVSEFSTSETMGHSADRLAAAFAVSRLEQDEYALRSHSLAKKAQDEGLLSDVVPFKVPGKDTVTKDNGIRPSSLEQMAKLKPAFIKPYGTVTAANSSFLTDGASAMLIMAEEKALAMGYKPKAYLRDFMYVSQDPKDQLLLGPTYATPKVLEKAGLTMNDIDAFEFHEAFSGQILANFKAMDSDWFAENYMGRKTKVGLPPLEKFNNWGGSLSLGHPFGATGCRLVMAAANRLRKEGGQYGLVAACAAGGQGHAMIVEAYPK

SEQ ID NO: 6364 - protein, 85 aa, Homo Sapiens
MTILTYPFKNLPTASKWALRFSIRPLSCSSQLRAAPAVQTKTKKTLAKPNIRNVVVVDGVRTPFLLSGTSYKDLMPHDLARAALT

SEQ ID NO: 6365 - protein, 351 aa, Homo Sapiens
MTILTYPFKNLPTASKWALRFSIRPLSCSSQLRAAPAVQTKTKKTLAKPNIRNVVVVDGVRTPFLLSGTSYKDLMPHDLARAALTGLLHRTSVPKEVVDYIIFGTVIQEVKTSNVAREAALGAGFSDKTPAHTVTMACISANQAMTTGKDTVTKDNGIRPSSLEQMAKLKPAFIKPYGTVTAANSSFLTDGASAMLIMAEEKALAMGYKPKAYLRDFMYVSQDPKDQLLLGPTYATPKVLEKAGLTMNDIDAFEFHEAFSGQILANFKAMDSDWFAENYMGRKTKVGLPPLEKFNNWGGSLSLGHPFGATGCRLVMAAANRLRKEGGQYGLVAACAAGGQGHAMIVEAYPK

SEQ ID NO: 6366 - protein, 150 aa, Homo Sapiens
MTILTYPFKNLPTASKWALRFSIRPLSCSSQLRAAPAVQTKTKKTLAKPNIRNVVVVDGVRTPFLLSGTSYKDLMPHDLARAALTGLLHRTSVPKEVVDYIIFGTVIQEVKTSNVAREAALGAGFSDKTPAHTVTMACISANQAMTTGVG

SEQ ID NO: 6367 - protein, 176 aa, Homo Sapiens
MTILTYPFKNLPTASKWALRFSIRPLSCSSQLRAAPAVQTKTKKTLAKPNIRNVVVVDGVRTPFLLSGTSYKDLMPHDLARAALTGLLHRTSVPKEVVDYIIFGTVIQEVKTSNVAREAALGAGFSDKTPAHTVTMACISANQAMTTGVGLIASGQCDVIVAGGVELMSDVPIRHS

SEQ ID NO: 6368 - protein, 474 aa, Homo Sapiens
MTILTYPFKNLPTASKWALRFSIRPLSCSSQLRAAPAVQTKTKKTLAKPNIRNVVVVDGVRTPFLLSGTSYKDLMPHDLARAALTGLLHRTSVPKEVVDYIIFGTVIQEVKTSNVAREAALGAGFSDKTPAHTVTMACISANQAMTTGVGLIASGQCDVIVAGGVELMSDVPIRHSRKMRKLMLDLNKAKSMGQRLSLISKFRFNFLAPELPAVSEFSTSETMGHSADRLAAAFAVSRLEQDEYALRSHSLAKKAQDEGLLSDVVPFKVPGKDTVTKDNGIRPSSLEQMAKLKPAFIKPYGTVTAANSSFLTDGASAMLIMAEEKALAMGYKPKAYLRDFMYVSQDPKDQLLLGPTYATPKVLEKAGLTMNDIDAFEFHEAFSGQILANFKAMDSDWFAENYMGRKTKVGLPPLEKFNNWGGSLSLGHPFGATGCRLVMAAANRLRKEGGQYGLVAACAAGGQGHAMIVEAYPK

SEQ ID NO: 6369 - protein, 452 aa, Homo Sapiens
MTLVSGWLLYGWIIAVQTKTKKTLAKPNIRNVVVVDGVRTPFLLSGTSYKDLMPHDLARAALTGLLHRTSVPKEVVDYIIFGTVIQEVKTSNVAREAALGAGFSDKTPAHTVTMACISANQAMTTGVGLIASGQCDVIVAGGVELMSDVPIRHSRKMRKLMLDLNKAKSMGQRLSLISKFRFNFLAPELPAVSEFSTSETMGHSADRLAAAFAVSRLEQDEYALRSHSLAKKAQDEGLLSDVVPFKVPGKDTVTKDNGIRPSSLEQMAKLKPAFIKPYGTVTAANSSFLTDGASAMLIMAEEKALAMGYKPKAYLRDFMYVSQDPKDQLLLGPTYATPKVLEKAGLTMNDIDAFEFHEAFSGQILANFKAMDSDWFAENYMGRKTKVGLPPLEKFNNWGGSLSLGHPFGATGCRLVMAAANRLRKEGGQYGLVAACAAGGQGHAMIVEAYPK

SEQ ID NO: 6370 - protein, 84 aa, Homo Sapiens
MALSSQIWAACLLLLLLLASLTSGSVFPQQTGQLAELQPQDRAGARASWMPMFQRRRRRDTHFPICIFCCGCCHRSKCGMCCKT

SEQ ID NO: 6371 - protein, 84 aa, Homo Sapiens; identical to SEQ ID NO: 6370

SEQ ID NO: 6372 - protein, 153 aa, Homo Sapiens
MKSLLLLVLISICWADHLSDNYTLDHDRAIHIQAENGPHLLVEAEQAKVFSHRGGNVTLPCKFYRDPTAFGSGIHKIRIKWTKLTSDYLKEVDVFVSMGYHKKTYGGYQGRVFLKGGSDSDASLVITDLTLEDYGRYKCEVIEGLEDDTVVVA

SEQ ID NO: 6373 - protein, 161 aa, Homo Sapiens
MKSLLLLVLISICWADHLSDNYTLDHDRAIHIQAENGPHLLVEAEQAKVFSHRGGNVTLPCKFYRDPTAFGSGIHKIRIKWTKLTSDYLKEVDVFVSMGYHKKTYGGYQGRVFLKGGSDSDASLVITDLTLEDYGRYKCEVIEGLEDDTVVVALDLQGMYL

SEQ ID NO: 6374 - protein, 169 aa, Homo Sapiens
MKSLLLLVLISICWADHLSDNYTLDHDRAIHIQAENGPHLLVEAEQAKVFSHRGGNVTLPCKFYRDPTAFGSGIHKIRIKWTKLTSDYLKEVDVFVSMGYHKKTYGGYQGRVFLKGGSDSDASLVITDLTLEDYGRYKCEVIEGLEDDTVVVALDLQGVVFPYFPRLGR

SEQ ID NO: 6375 - protein, 199 aa, Homo Sapiens
MKSLLLLVLISICWADHLSDNYTLDHDRAIHIQAENGPHLLVEAEQAKVFSHRGGNVTLPCKFYRDPTAFGSGIHKIRIKWTKLTSDYLKEVDVFVSMGYHKKTYGGYQGRVFLKGGSDSDASLVITDLTLEDYGRYKCEVIEGLEDDTVVVALDLQGVVFPYFPRLGRYNLNFHEAQQACLDQDAVIASFDQLYDAWR

SEQ ID NO: 6376 - protein, 354 aa, Homo Sapiens
MKSLLLLVLISICWADHLSDNYTLDHDRAIHIQAENGPHLLVEAEQAKVFSHRGGNVTLPCKFYRDPTAFGSGIHKIRIKWTKLTSDYLKEVDVFVSMGYHKKTYGGYQGRVFLKGGSDSDASLVITDLTLEDYGRYKCEVIEGLEDDTVVVALDLQGVVFPYFPRLGRYNLNFHEAQQACLDQDAVIASFDQLYDAWRGGLDWCNAGWLSDGSVQYPITKPREPCGGQNTVPGVRNYGFWDKDKSRYDVFCFTSNFNGRFYYLIHPTKLTYDEAVQACLNDGAQIAKVGQIFAAWKILGYDRCDAGWLADGSVRYPISRPRRRCSPTEAAVRFVGFPDKKHKLYGVYCFRAYN

SEQ ID NO: 6377 - protein, 258 aa, Homo Sapiens
MKSLLLLVLISICWADHLSDNYTLDHDRAIHIQAENGPHLLVEAEQAKVFSHRGGNVTLPCKFYRDPTAFGSGIHKIRIKWTKLTSDYLKEVDVFVSMGYHKKTYGGYQGRVFLKGGSDSDASLVITDLTLEDYGRYKCEVIEGLEDDTVVVALDLQGVVFPYFPRLGRYNLNFHEAQQACLDQDAVIASFDQLYDAWRGGLDWCNAGWLSDGSVQYPITKPREPCGGQNTVPGVRNYGFWDKDKSRYDVFCFTSNFN

SEQ ID NO: 6378 - protein, 182 aa, Homo Sapiens
MKSLLLLVLISICWADHLSDNYTLDHDRAIHIQENGPHLLVEAEQAKVFSHRGGNVTLPCKFYRDPTAFGSGIHKIRIKWTKLTSDYLKEVDVFVSMGYHKKTYGGYQGRVFLKGGSDSDASLVITDLTLEDYGRYKCEVIEGLEDDTVVVALDLQGVVFPYFPRLGRYNLNFHEAQQACLD

SEQ ID NO: 6379 - protein, 185 aa, Homo Sapiens
MPGWLTLPTLCRFLLWAFTIFHKAQGDPASHPGPHYLLPPIHEVIHSHRGATATLPCVLGTTPPSYKVRWSKVEPGELRETLILITNGLHARGYGPLGGRARMRRGHRLDASLVIAGVRLEDEGRYRCELINGIEDESVALTLSLEGVVFPYQPSRGRYQFNYYEAKQACEEQDGRLATYSQLYQ

SEQ ID NO: 6380 - protein, 340 aa, Homo Sapiens
MPGWLTLPTLCRFLLWAFTIFHKAQGDPASHPGPHYLLPPIHEVIHSHRGATATLPCVLGTTPPSYKVRWSKVEPGELRETLILITNGLHARGYGPLGGRARMRRGHRLDASLVIAGVRLEDEGRYRCELINGIEDESVALTLSLEGVVFPYQPSRGRYQFNYYEAKQACEEQDGRLATYSQLYQAWTEGLDWCNAGWLLEGSVRYPVLTARAPCGGRGRPGIRSYGPRDRMRDRYDAFCFTSALAGQVFFVPGRLTLSEAHAACRRRGAVVAKVGHLYAAWKFSGLDQCDGGWLADGSVRFPITTPRPRCGGLPDPGVRSFGFPRPQQAAYGTYCYAEN

SEQ ID NO: 6381 - protein, 226 aa, Homo Sapiens
MGLLLLVPLLLLPGSYGLPFYNGFYYSNSANDQNLGNGHGKDLLNGVKLVVETPEETLFTYQGASVILPCRYRYEPALVSPRRVRVKWWKLSENGAPEKDVLVAIGLRHRSFGDYQGRVHLRQDKEHDVSLEIQDLRLEDYGRYRCEVIDGLEDESGLVELELRAESQERGGNGQEVWSFLTSPPTGATSSTSTRASRSVQSRLRWWPPLSSSSGPGRRAWTGATR

SEQ ID NO: 6382 - protein, 360 aa, Homo Sapiens
MGLLLLVPLLLLPGSYGLPFYNGFYYSNSANDQNLGNGHGKDLLNGVKLVVETPEETLFTYQGASVILPCRYRYEPALVSPRRVRVKWWKLSENGAPEKDVLVAIGLRHRSFGDYQGRVHLRQDKEHDVSLEIQDLRLEDYGRYRCEVIDGLEDESGLVELELRGVVFPYQSPNGRYQFNFHEGQQVCAEQAAVVASFEQLFRAWEEGLDWCNAGWLQDATVQYPIMLPRQPCGGPGLAPGVRSYGPRHRRLHRYDVFCFATALKGRVYYLEHPEKLTLTEAREACQEDDATIAKVGQLFAAWKFHGLDRCDAGWLADGSVRYPVVHPHPNCGPPEPGVRSFGFPDPQSRLYGVYCYRQH

SEQ ID NO: 6383 - protein, 186 aa, Homo Sapiens
MGLLLLVPLLLLPGSYGLPFYNGFYYSNSANDQNLGNGHGKDLLNGVKLVVETPEETLFTYQGASVILPCRYRYEPALVSPRRVRVKWWKLSENGAPEKDVLVAIGLRHRSFGDYQGRVHLRQDKEHDVSLEIQDLRLEDYGRYRCEVIDGLEDESGLVELELRGWGCVSSHLSHMLGRQFGDRGR

SEQ ID NO: 6384 - protein, 422 aa, Homo Sapiens
MRKWRHREVNLPEVTQQDAVCPAPIPSPGLSAQTGLQKIWGTIHCQVCPGAPAWPGSPWHEEMGLLLLVPLLLLPGSYGLPFYNGFYYSNSANDQNLGNGHGKDLLNGVKLVVETPEETLFTYQGASVILPCRYRYEPALVSPRRVRVKWWKLSENGAPEKDVLVAIGLRHRSFGDYQGRVHLRQDKEHDVSLEIQDLRLEDYGRYRCEVIDGLEDESGLVELELRGVVFPYQSPNGRYQFNFHEGQQVCAEQAAVVASFEQLFRAWEEGLDWCNAGWLQDATVQYPIMLPRQPCGGPGLAPGVRSYGPRHRRLHRYDVFCFATALKGRVYYLEHPEKLTLTEAREACQEDDATIAKVGQLFAAWKFHGLDRCDAGWLADGSVRYPVVHPHPNCGPPEPGVRSFGFPDPQSRLYGVYCYRQH

SEQ ID NO: 6385 - protein, 402 aa, Homo Sapiens
MVCARAALGPGALWAAAWGVLLLTAPAGAQRGRKKVVHVLEGESGSVVVQTAPGQVVSHRGGTIVLPCRYHYEAAAHGHDGVRLKWTKVVDPLAFTDVFVALGPQHRAFGSYRGRAELQGDGPGDASLVLRNVTLQDYGRYECEVTNELEDDAGMVKLDLEGVVFPYHPRGGRYKLTFAEAQRACAEQDGILASAEQLHAAWRDGLDWCNAGWLRDGSVQYPVNRPREPCGGLGGTGSAGGGGDANGGLRNYGYRHNAEERYDAFCFTSNLPGRVFFLKPLRPVPFSGAARACAARGAAVAKVGQLFAAWKLQLLDRCTAGWLADGSARYPIVNPRARCGGRRPGVRSLGFPDATRRLFGVYCYRAPGAPDPAPGGWGWGWAGGGGWAGGARDPAAWTPLHV

SEQ ID NO: 6386 - protein, 334 aa, Homo Sapiens
MPLLGLLPRRAWASLLSQLLRPPCASCTGAVRCQSQDFDIAGQFDPMIPDAECLKIMCEILSGLQLGDFLIKMAWKDVRHEMVVKKGLAPEVADRIGDYVQCHGGVSLVEQMFQDPRLSQNKQALEGLGDLKLLFEYLTLFGIADKISFDLSLARGLDYYTGVIYEAVLLQTPTQAGEEPLNVGSVAAGGRYDGLVGMFDPKGHKVPCVGLSIGVERIFYIVEQRMKTKGEKVRTTETQVFVATPQKNFLQERLKLIAELWDSGIKAEMLYKNNPKLLTQLHYCESTGIPLVVIIGEQELKEGVIKIRSVASREEVAIKRENFVAEIQKRLSES

SEQ ID NO: 6387 - protein, 512 aa, Homo Sapiens
MPLLGLLPRRAWASLLSQLLRPPCASCTGAVRCQSQGEESLQVAEAVLTSQLKAHQEKPNFIIKTPKGTRDLSPQHMVVREKILDLVISCFKRHGAKGMDTPAFELKETLTEKYGEDSGLMYDLKDQGGELLSLRYDLTVPFARYLAMNKVKKMKRYHVGKVWRRESPTIVQGRYREFCQCDFDIAGQFDPMIPDAECLKIMCEILSGLQLGDFLIKVNDRRIVDGMFAVCGVPESKFRAICSSIDKLDKMAWKDVRHEMVVKKGLAPEVADRIGDYVQCHGGVSLVEQMFQDPRLSQNKQALEGLGDLKLLFEYLTLFGIADKISFDLSLARGLDYYTGVIYEAVLLQTPTQAGEEPLNVGSVAAGGRYDGLVGMFDPKGHKVPCVGLSIGVERIFYIVEQRMKTKGEKVRTTETQVFVATPQKNFLQERLKLIAELWDSGIKAEMLYKNNPKLLTQLHYCESTGIPLVVIIGEQELKEGVIKIRSVASREEVAIKRENFVAEIQKRLSES

SEQ ID NO: 6388 - protein, 512 aa, Homo Sapiens; identical to SEQ ID NO: 6387

SEQ ID NO: 6389 - protein, 99 aa, Homo Sapiens
MPLLGLLPRRAWASLLSQLLRPPCASCTGAVRCQSQGEESLQVGGQQGQRCHRSGQCPEKPHLTFILLPGCRGSVNIPTESTSRETKFYYQDPKGYQGS

SEQ ID NO: 6390 - protein, 99 aa, Homo Sapiens; identical to SEQ ID NO: 6389

SEQ ID NO: 6391 - protein, 481 aa, Homo Sapiens
MPLLGLLPRRAWASLLSQLLRPPCASCTGAVRCQSQGTRDLSPQHMVVREKILDLVISCFKRHGAKGMDTPAFELKETLTEKYGEDSGLMYDLKDQGGELLSLRYDLTVPFARYLAMNKVKKMKRYHVGKVWRRESPTIVQGRYREFCQCDFDIAGQFDPMIPDAECLKIMCEILSGLQLGDFLIKVNDRRIVDGMFAVCGVPESKFRAICSSIDKLDKMAWKDVRHEMVVKKGLAPEVADRIGDYVQCHGGVSLVEQMFQDPRLSQNKQALEGLGDLKLLFEYLTLFGIADKISFDLSLARGLDYYTGVIYEAVLLQTPTQAGEEPLNVGSVAAGGRYDGLVGMFDPKGHKVPCVGLSIGVERIFYIVEQRMKTKGEKVRTTETQVFVATPQKNFLQERLKLIAELWDSGIKAEMLYKNNPKLLTQLHYCESTGIPLVVIIGEQELKEGVIKIRSVASREEVAIKRENFVAEIQKRLSES

SEQ ID NO: 6392 - protein, 399 aa, Homo Sapiens
MPLLGLLPRRAWASLLSQLLRPPCASCTGAVRCQSQVAEAVLTSQLKAHQEKPNFIIKTPKGTRDLSPQHMVVREKILDLVISCFKRHGAKGMDTPAFELKDFDIAGQFDPMIPDAECLKIMCEILSGLQLGDFLIKMAWKDVRHEMVVKKGLAPEVADRIGDYVQCHGGVSLVEQMFQDPRLSQNKQALEGLGDLKLLFEYLTLFGIADKISFDLSLARGLDYYTGVIYEAVLLQTPTQAGEEPLNVGSVAAGGRYDGLVGMFDPKGHKVPCVGLSIGVERIFYIVEQRMKTKGEKVRTTETQVFVATPQKNFLQERLKLIAELWDSGIKAEMLYKNNPKLLTQLHYCESTGIPLVVIIGEQELKEGVIKIRSVASREEVAIKRENFVAEIQKRLSES

SEQ ID NO: 6393 - protein, 473 aa, Homo Sapiens
MPLLGLLPRRAWASLLSQLLRPPCASCTGAVRCQSQVAEAVLTSQLKAHQEKPNFIIKTPKGTRDLSPQHMVVREKILDLVISCFKRHGAKGMDTPAFELKETLTEKYGEDSGLMYDLKDQGGELLSLRYDLTVPFARYLAMNKVKKMKRYHVGKVWRRESPTIVQGRYREFCQCDFDIAGQFDPMIPDAECLKIMCEILSGLQLGDFLIKMAWKDVRHEMVVKKGLAPEVADRIGDYVQCHGGVSLVEQMFQDPRLSQNKQALEGLGDLKLLFEYLTLFGIADKISFDLSLARGLDYYTGVIYEAVLLQTPTQAGEEPLNVGSVAAGGRYDGLVGMFDPKGHKVPCVGLSIGVERIFYIVEQRMKTKGEKVRTTETQVFVATPQKNFLQERLKLIAELWDSGIKAEMLYKNNPKLLTQLHYCESTGIPLVVIIGEQELKEGVIKIRSVASREEVAIKRENFVAEIQKRLSES

SEQ ID NO: 6394 - protein, 506 aa, Homo Sapiens
MPLLGLLPRRAWASLLSQLLRPPCASCTGAVRCQSQVAEAVLTSQLKAHQEKPNFIIKTPKGTRDLSPQHMVVREKILDLVISCFKRHGAKGMDTPAFELKETLTEKYGEDSGLMYDLKDQGGELLSLRYDLTVPFARYLAMNKVKKMKRYHVGKVWRRESPTIVQGRYREFCQCDFDIAGQFDPMIPDAECLKIMCEILSGLQLGDFLIKVNDRRIVDGMFAVCGVPESKFRAICSSIDKLDKMAWKDVRHEMVVKKGLAPEVADRIGDYVQCHGGVSLVEQMFQDPRLSQNKQALEGLGDLKLLFEYLTLFGIADKISFDLSLARGLDYYTGVIYEAVLLQTPTQAGEEPLNVGSVAAGGRYDGLVGMFDPKGHKVPCVGLSIGVERIFYIVEQRMKTKGEKVRTTETQVFVATPQKNFLQERLKLIAELWDSGIKAEMLYKNNPKLLTQLHYCESTGIPLVVIIGEQELKEGVIKIRSVASREEVAIKRENFVAEIQKRLSES

SEQ ID NO: 6395 - protein, 506 aa, Homo Sapiens; identical to SEQ ID NO: 6394

SEQ ID NO: 6396 - protein, 506 aa, Homo Sapiens; identical to SEQ ID NO: 6394

SEQ ID NO: 6397 - protein, 160 aa, Homo Sapiens
MVVREKILDLVISCFKRHGAKGMDTPAFELKETLTEKYGEDSGLMYDLKDQGGELLSLRYDLTVPFARYLAMNKVKKMKRYHVGKVWRRESPTIVQGRYREFCQCDFDIAGQFDPMIPDAECLKIMCEILSGLQLGDFLIKESRYCHCFEWKGIDKHLGH

SEQ ID NO: 6398 - protein, 436 aa, Homo Sapiens
MVVREKILDLVISCFKRHGAKGMDTPAFELKETLTEKYGEDSGLMYDLKDQGGELLSLRYDLTVPFARYLAMNKVKKMKRYHVGKVWRRESPTIVQGRYREFCQCDFDIAGQFDPMIPDAECLKIMCEILSGLQLGDFLIKVNDRRIVDGMFAVCGVPESKFRAICSSIDKLDKMAWKDVRHEMVVKKGLAPEVADRIGDYVQCHGGVSLVEQMFQDPRLSQNKQALEGLGDLKLLFEYLTLFGIADKISFDLSLARGLDYYTGVIYEAVLLQTPTQAGEEPLNVGSVAAGGRYDGLVGMFDPKGHKVPCVGLSIGVERIFYIVEQRMKTKGEKVRTTETQVFVATPQKNFLQERLKLIAELWDSGIKAEMLYKNNPKLLTQLHYCESTGIPLVVIIGEQELKEGVIKIRSVASREEVAIKRENFVAEIQKRLSES

SEQ ID NO: 6399 - protein, 293 aa, Homo Sapiens
MVVREKILDLVISCFKRHGAKGMDTPAFELKETLTEKYGEDSGLMYDLKDQGGELLSLRYDLTVPFARYLAMNKVKKMKRYHVGKVWRRESPTIVQGRYREFCQCDFDIAGQFDPMIPDAECLKIMCEILSGLQLGDFLIKVNDRRIVDGMFAVCGVPESKFRAICSSIDKLDKMAWKDVRHEMVVKKGLAPEVADRIGDYVQCHGGVSLVEQMFQDPRLSQNKQALEGLGDLKLLFEYLTLFGIADKISFDLSLARGLDYYTGVIYEAVLLQTPTQAGEEPLNVGSVAAGGR

SEQ ID NO: 6400 - protein, 436 aa, Homo Sapiens; identical to SEQ ID NO: 6398

SEQ ID NO: 6401 - protein, 219 aa, Homo Sapiens
  misc_feature (1)..(1): Xaa can be any naturally occurring amino acid
XASLLSQLLRPPCASCTGAVRCQSQVAEAVLTSQLKAHQEKPNFIIKTPKGTRDLSPQHMVVREKILDLVISCFKRHGAKGMDTPAFELKETLTEKYGEDSGLMYDLKDQGGELLSLRYDLTVPFARYLAMNKVKKMKRYHVGKVWRRESPTIVQGRYREFCQCDFDIAGQFDPMIPDAECLKIMCEILSGLQLGDFLIKESRYCHCFEWKGIDKHLGH

SEQ ID NO: 6402 - protein, 223 aa, Homo Sapiens
MHPQVVILSLILHLADSVAGSVKVGGEAGPSVTLPCHYSGAVTSMCWNRGSCSLFTCQNGIVWTNGTHVTYRKDTRYKLLGDLSRRDVSLTIENTAVSDSGVYCCRVEHRGWFNDMKITVSLEIVPPKVTTTPIVTTVPTVTTVRTSTTVPTTTTVPMTTVPTTTVPTTMSIPTTTTVLTTMTVSTTTSVPTTTSIPTTTSVPVTTTVSTFVPPMPLPRQNHE

SEQ ID NO: 6403 - protein, 364 aa, Homo Sapiens
MHPQVVILSLILHLADSVAGSVKVGGEAGPSVTLPCHYSGAVTSMCWNRGSCSLFTCQNGIVWTNGTHVTYRKDTRYKLLGDLSRRDVSLTIENTAVSDSGVYCCRVEHRGWFNDMKITVSLEIVPPKVTTTPIVTTVPTVTTVRTSTTVPTTTTVPMTTVPTTTVPTTMSIPTTTTVLTTMTVSTTTSVPTTTSIPTTTSVPVTTTVSTFVPPMPLPRQNHEPVATSPSSPQPAETHPTTLQGAIRREPTSSPLYSYTTDGNDTVTESSDGLWNNNQTQLFLEHSLLTANTTKGIYAGVCISVLVLLALLGVIIAKKYFFKKEVQQLSVSFSSLQIKALQNAVEKEVQAEDNIYIENSLYATD

SEQ ID NO: 6404 - protein, 401 aa, Homo Sapiens
MHPQVVILSLILHLADSVAGSVKVGGEAGPSVTLPCHYSGAVTSMCWNRGSCSLFTCQNGIVWTNGTHVTYRKDTRYKLLGDLSRRDVSLTIENTAVSDSGVYCCRVEHRGWFNDMKITVSLEIVPPKVTTTPIVTTVPTVTTVRTSTTVPTTTTVPMTTVPTTTVPTTMSIPTTTTVLTTMTVSTTTSVPTTTSIPTTTSVPVTTTVSTFVPPMPLPRQNHEPVATSPSSPQPAETHPTTLQGAIRREPTSSPLYSYTTDGNDTVTESSDGLWNNNQTQLFLEHSLLTANTTKGIYAGVCISVLVLLALLGVIIAKMFHLAAFKLKLCKMQLKRKSKQKTISTLRIVFMPRTKTQWCSLRVYAHECRRLNRHQHIRRLLDPKTIFLFQFHLAFQHVSDTG

SEQ ID NO: 6405 - protein, 364 aa, Homo Sapiens; identical to SEQ ID NO: 6403

SEQ ID NO: 6406 - protein, 401 aa, Homo Sapiens; identical to SEQ ID NO: 6404

SEQ ID NO: 6407 - protein, 268 aa, Homo Sapiens
MGLSPSAPAVAVQASNASASPPSGCPMHEGKMKGCPVNTEPSGPTCEKKTYSVPAHQERAYEYVECPIRGTAAENKENLDPSNLMPPPNQTPAPDQPFALSTVREESSIPRADSEKKWVYPSEQMFWNAMLKKGWKWKDEDISQKDMYNIIRIHNQNNEQAWKEILKWEALHAAECPCGPSLIRFGGKAKEYSPRARIRSWMGYELPFDRHDWIINRCGTEVRYVIDYYDGGEVNKDYQFTILDVRPALDSLSAVWDRMKVAWWRWTS

SEQ ID NO: 6408 - protein, 268 aa, Homo Sapiens; identical to SEQ ID NO: 6407

SEQ ID NO: 6409 - protein, 268 aa, Homo Sapiens; identical to SEQ ID NO: 6407

SEQ ID NO: 6410 - protein, 131 aa, Homo Sapiens
MNLPSTKVSWAAVTLLLLLLLLPPALLSSGAAAQPLPDCCRQKTCSCRLYELLHGAGNHAAGILTLGKRRSGPPGLQGRLQRLLQASGNHAAGILTMGRRAGAEPAPRPCLGRRCSAPAAASVAPGGQSGI

SEQ ID NO: 6411 - protein, 223 aa, Homo Sapiens
MAAWGCVAALGAARGLCWRAARAAAGLQGRPARRCYAVGPAQPLPRNDFPRIEGVLLLGEPVRWETSLQLIMDVLLSNGSPGAGLATPPYPHLPVLASNMDLLWMAEAKMPSDNPMSDVYGANLFHQYLQKATHDGAPELGAGGTRQQQPSASQSCISILVCTGVYNPRNPQSTEPVLGGGEPPFHGHRDLCFSPGLMEASHVVNDVNEAVQLVFRKEGWALE

SEQ ID NO: 6412 - protein, 423 aa, Homo Sapiens
MAAWGCVAALGAARGLCWRAARAAAGLQGRPARRCYAVGPAQSPPTFGFLLDIDGVLVRGHRVIPAALKAFRRLVNSQGQLRVPVVFVTNAGNILQHSKAQELSALLGCEVDADQVILSHSPMKLFSEYHEKRMLVSGQGPVMENAQGLGFRNVVTVDELRMAFPLLDMVDLERRLKTTPLPRNDFPRIEGVLLLGEPVRWETSLQLIMDVLLSNGSPGAGLATPPYPHLPVLASNMDLLWMAEAKMPRFGHGTFLLCLETIYQKVTGKELRYEGLMGKPSILTYQYAEDLIRRQAERRGWAAPIRKLYAVGDNPMSDVYGANLFHQYLQKATHDGAPELGAGGTRQQQPSASQSCISILVCTGVYNPRNPQSTEPVLGGGEPPFHGHRDLCFSPGLMEASHVVNDVNEAVQLVFRKEGWALE

SEQ ID NO: 6413 - protein, 393 aa, Homo Sapiens
MYAWFFLPSFSQSPPTFGFLLDIDGVLVRGHRVIPAALKAFRRLVNSQGQLRVPVVFVTNAGNILQHSKAQELSALLGCEVDADQVILSHSPMKLFSEYHEKRMLVSGQGPVMENAQGLGFRNVVTVDELRMAFPLLDMVDLERRLKTTPLPRNDFPRIEGVLLLGEPVRWETSLQLIMDVLLSNGSPGAGLATPPYPHLPVLASNMDLLWMAEAKMPRFGHGTFLLCLETIYQKVTGKELRYEGLMGKPSILTYQYAEDLIRRQAERRGWAAPIRKLYAVGDNPMSDVYGANLFHQYLQKATHDGAPELGAGGTRQQQPSASQSCISILVCTGVYNPRNPQSTEPVLGGGEPPFHGHRDLCFSPGLMEASHVVNDVNEAVQLVFRKEGWALE

SEQ ID NO: 6414 - protein, 87 aa, Homo Sapiens
MELAHSLLLNEEAYNQLGEVQKAEFIFEWLRYLEKLLLATSRNDVREKQKTLVEQLLSLLNSSPGPPTRKLLAKNLAILYSIGDTFS

SEQ ID NO: 6415 - protein, 113 aa, Homo Sapiens
MELAHSLLLNEEAYNQLGEVQKAEFIFEWLRYLEKLLLATSRNDVREKQKTLVEQLLSLLNSSPGPPTRKLLAKNLAILYSIGDTFSVHEAIDKCNDLIRSKDDSPSYLPTKL

SEQ ID NO: 6416 - protein, 2046 aa, Homo Sapiens
MELAHSLLLNEEAYNQLGEVQKAEFIFEWLRYLEKLLLATSRNDVREKQKTLVEQLLSLLNSSPGPPTRKLLAKNLAILYSIGDTFSVHEAIDKCNDLIRSKDDSPSYLPTKLAAVVCLGSLYKKLGRILGNTFTDTVGNILKAMKSAESQGRYEIMLSLQNILNGLGAAAAPCHRDVYKAARSCLTDRSMAVRCAAAKCLLELQNEAIFMWSTDLDSVATLCFKSFEGSNYDVRISVSKLLGIILAKAVISKHPGTAASRQSIRRVSLEEVLELLGTGFLRGSSGFLRASGDMLKGTSSVSRDVRVGVTQAYVVFVSTLGGAWLEKNFAAFFSHILSLASPSHPKATQTQIDAVCCRRCVSFILRTTIGGLLGEKAQLAAVKDICQAIWKLKKVMDAVMSDGNLETRLGSTDVAASQHMLVCALQELGNLIHNLGTTAAPLLQDSSTGLLDSILSVILHPSISVRLAAAWCLHCIAVALPSYLTPLLDRCLERLTGHKSSPEAVTGFSFAVAALLGAVKHCPLGIPHGKGKIIMTLAEDLLCSAAQNSRLSAQRTQAGWLLISALMTLGPAVVSHHLARVLLLWKCVFPASPKDLETEKSRGDSFTWQVTLEGRAGALCAIKSFVSHCGDLLTEEVTQRLLPPLPCAVDLLTQLSSILKMYGSPLKTPSVVYRQRLYELLILLPPETYEGNLCAILRELAADLTAPDIQVAASTFLLPPLCHQDDLLILSPFLQETDHRFIEEQLLLGNGVACGSLEYDPYSIYEKDVEGDSVPKPLPPALSVISSASKLFGVVCAHVGETQRLLILEQLLDSIKHTKGARQQVVQLHVVSSVSSFLKYVAGSKGCLGPEEMKRFALTLVMGALESPNPLLRCAAAESWARLAQVVDDGAFTAGLAQVSFDKLKSARDVVTRTGHSLALGSLHRYLGGISSSQHLNSCIGILYTLAQDSTSPDVQTWALHSLSLIIDSAGPLYYVHVEPTLSLIIMLLLNVPPTHAEVHQSLGRCLNALITTLGPELQGNSTSISTLRTSCLLGCAVMQDNPDCLVQAQAISCLQQLHMFAPRHVNLSSLVSCLCVNLCSPYLLLRRAVLACLRQLVQREAAEVSEHAVMLAKDSREELTPDANIREVGLEGALLILLDKETDERLCHDIKETLNYMLTSMAVEKLSLWLKLCKDVLAASADFTAVTCVDTMQEEEGDKGDDASVLTTRRDEKSHPFTNPRWATRVFAAECVCRIINQCENANSAHFDIALAQEMKKRDSRNDFLVLHLADLIRMAFMAATDHSDQLRLSGLEMLLVVIRRFATVPEPEFPGHVILEQYQANVGAALRPAFTSETPPDVTAKACQVCSAWIASGVVSDLNDLRRVHQLLVSSLTKIQAGKEALSHLYNESASTMEILAVLKAWAEVYIIAVQRHKNHRQPLKTTTCLEDGIRNGSCSSDGLLDLVYADLGTLSRLWLAALQDFALLTLPSEFASQLPAEGGAFYTAETSENAKLHYYNSWALILHATALWLTSTGFVVADPDEGASNLSRPVTPTSMCQGSSSGATIKSPEDVYTDRFHLILGISVEFLCSLRSDATMESITACLHALQALLDVPWPRSKIGSDQDLGIELLNVLHRVILTRESPSIQLASLEVVRQIICAAQEHVKEKRRSAEVDDGAAEKETLPEFGEGKDTGGLVPGKSLVFATLELCVCILVRQLPELNPKLTGSPGVKATKPQILLEDGSRLVSAALVILSELPAVCSPEGSISILPTILYLTIGVLRETAVKLPGGQLSSTVAASLQALKGILSSPMARAEKSRTAWTDLLRSALTTILDCWDPVDETHQELDEVSLLTAITVFILSTSPEVTTIPCLQKRCIDKFKATLEIKDPVVQIKTYQLLHSIFQYPNPAVSYPYIYSLASCIMEKLQEIDKRKPENTAELEIFQEGIKVLETLVTVAEEHHRAQLVACLLPILISFLLDENSLGSATSIMRNLHDFALQNLMQIGPQYSSVFKSLVASSPALKARLEAAIKGNQESVKVKIPTSKYTKSPGKNSSIQLKTSFL

SEQ ID NO: 6417 - protein, 1599 aa, Homo Sapiens
  misc_feature (1)..(1): Xaa can be any naturally occurring amino acid
XGEKAQLAAVKDICQAIWKLKKVMDAVMSDGNLETRLGSTDVAASQHMLVCALQELGNLIHNLGTTAAPLLQDSSTGLLDSILSVILHPSISVRLAAAWCLHCIAVALPSYLTPLLDRCLERLTGHKSSPEAVTGFSFAVAALLGAVKHCPLGIPHGKGKIIMTLAEDLLCSAAQNSRLSAQRTQAGWLLISALMTLGPAVVSHHLARVLLLWKCVFPASPKDLETEKSRGDSFTWQVTLEGRAGALCAIKSFVSHCGDLLTEEVTQRLLPPLPCAVDLLTQLSSILKMYGSPLKTPSVVYRQRLYELLILLPPETYEGNLCAILRELAADLTAPDIQVAASTFLLPPLCHQDDLLILSPFLQETDHRFIEEQLLLGNGVACGSLEYDPYSIYEKDVEGDSVPKPLPPALSVISSASKLFGVVCAHVGETQRLLILEQLLDSIKHTKGARQQVVQLHVVSSVSSFLKYVAGSKGCLGPEEMKRFALTLVMGALESPNPLLRCAAAESWARLAQVVDDGAFTAGLAQVSFDKLKSARDVVTRTGHSLALGSLHRYLGGISSSQHLNSCIGILYTLAQDSTSPDVQTWALHSLSLIIDSAGPLYYVHVEPTLSLIIMLLLNVPPTHAEVHQSLGRCLNALITTLGPELQGNSTSISTLRTSCLLGCAVMQDNPDCLVQAQAISCLQQLHMFAPRHVNLSSLVSCLCVNLCSPYLLLRRAVLACLRQLVQREAAEVSEHAVMLAKDSREELTPDANIREVGLEGALLILLDKETDERLCHDIKETLNYMLTSMAVEKLSLWLKLCKDVLAASADFTAVTCVDTMQEEEGDKGDDASVLTTRRDEKSHPFTNPRWATRVFAAECVCRIINQCENANSAHFDIALAQEMKKRDSRNDFLVLHLADLIRMAFMAATDHSDQLRLSGLEMLLVVIRRFATVPEPEFPGHVILEQYQANVGAALRPAFTSETPPDVTAKACQVCSAWIASGVVSDLNDLRRVHQLLVSSLTKIQAGKEALSHLYNESASTMEILAVLKAWAEVYIIAVQRHKNHRQPLKTTTCLEDGIRNGSCSSDGLLDLVYADLGTLSRLWLAALQDFALLTLPSEFASQLPAEGGAFYTAETSENAKLHYYNSWALILHATALWLTSTGFVVADPDEGASNLSRPVTPTSMCQGSSSGATIKSPEDVYTDRFHLILGISVEFLCSLRSDATMESITACLHALQALLDVPWPRSKIGSDQDLGIELLNVLHRVILTRESPSIQLASLEVVRQIICAAQEHVKEKRRSAEVDDGAAEKETLPEFGEGKDTGGLVPGKSLVFATLELCVCILVRQLPELNPKLTGSPGVKATKPQILLEDGSRLVSAALVILSELPAVCSPEVDETHQELDEVSLLTAITVFILSTSPEVTTIPCLQKRCIDKFKATLEIKDPVVQIKTYQLLHSIFQYPNPAVSYPYIYSLASCIMEKLQEIDKRKPENTAELEIFQEGIKVLETLVTVAEEHHRAQLVACLLPILISFLLDENSLGSATSIMRNLHDFALQNLMQIGPQYSSVFKSLVASSPALKARLEAAIKGNQESVKVKIPTSKYTKSPGKNSSIQLKTSFL

SEQ ID NO: 6418 - protein, 124 aa, Homo Sapiens
  misc_feature (1)..(1): Xaa can be any naturally occurring amino acid
XLLLRRAVLACLRQLVQREAAEVSEHAVMLAKDSREELTPDANIREVGLEGALLILLDKETDERLCHDIKETLNYMLTSMAVEKLSLWLKLCKDVLAASAGKYWTLSVKIIKLKFETLHKIVYH

SEQ ID NO: 6419 - protein, 896 aa, Homo Sapiens
  misc_feature (1)..(1): Xaa can be any naturally occurring amino acid
XSHPKATQTQIDAVCCRRCVSFILRTTIGGLLGEKAQLAAVKDICQAIWKLKKVMDVAASQHMLVCALQELGNLIHNLGTTAAPLLQDSSTGLLDSILSVILHPSISVRLAAAWCLHCIAVALPSYLTPLLDRCLERLTGHKSSPEAVTGFSFAVAALLGAVKHCPLGIPHGKGKIIMTLAEDLLCSAAQNSRLSAQRTQAGWLLISALMTLGPAVVSHHLARVLLLWKCVFPASPKDLETEKSRGDSFTWQVTLEGRAGALCAIKSFVSHCGDLLTEEVTQRLLPPLPCAVDLLTQLSSILKMYGSPLKTPSVVYRQRLYELLILLPPETYEGNLCAILRELAADLTAPDIQVAASTFLLPPLCHQDDLLILSPFLQETDHRFIEEQLLLGNGVACGSLEYDPYSIYEKDVEGDSVPKPLPPALSVISSASKLFGVVCAHVGETQRLLILEQLLDSIKHTKGARQQVVQLHVVSSVSSFLKYVAGSKGCLGPEEMKRFALTLVMGALESPNPLLRCAAAESWARLAQVVDDGAFTAGLAQVSFDKLKSARDVVTRTGHSLALGSLHRYLGGISSSQHLNSCIGILYTLAQDSTSPDVQTWALHSLSLIIDSAGPLYYVHVEPTLSLIIMLLLNVPPTHAEVHQSLGRCLNALITTLGPELQGNSTSISTLRTSCLLGCAVMQDNPDCLVQAQAISCLQQLHMFAPRHVNLSSLVSCLCVNLCSPYLLLRRAVLACLRQLVQREAAEVSEHAVMLAKDSREELTPDANIREVGLEGALLILLDKETDERLCHDIKETLNYMLTSMAVEKLSLWLKLCKDVLAASADFTAVTCVDTMQEEEGDKGDDASVLTTRRDEKSHPFTNPRWATRVFAAECVCRIINQCENANSAHFDIALA

SEQ ID NO: 6420 - protein, 199 aa, Homo Sapiens
  misc_feature (1)..(1): Xaa can be any naturally occurring amino acid
XSLIIMLLLNVPPTHAEVHQSLGRCLNALITTLGPELQGNSTSISTLRTSCLLGCAVMQDNPDCLVQAQAISCLQQLHMFAPRHVNLSSLVSCLCEILLDNSVLVNLCSPYLLLRRAVLACLRQLVQREAAEVSEHAVMLAKDSREELTPDANIREVGLEGALLILLDKETDERLCHDIKETLNYMLTSMAVEKLSLWL

SEQ ID NO: 6421 - protein, 208 aa, Homo Sapiens
MESGHLLWALLFMQSLWPQLTDGATRVYYLGIRDVQWNYAPKGRNVITNQPLDSDIVASSFLKSDKNRIGGTYKKTIYKEYKDDSYTDEVAQPAWLGFLGPVLQAEVGDVILIHLKNFATRPYTIHPHGVFYEKDSEGSLYPDGSSGPLKADDSVPPGGSHIYNWTIPEGHAPTDADPACLTWIYHSHVDAPRDIATGLIGPLITCKR

SEQ ID NO: 6422 - protein, 1158 aa, Homo Sapiens
MESGHLLWALLFMQSLWPQLTDGATRVYYLGIRDVQWNYAPKGRNVITNQPLDSDIVASSFLKSDKNRIGGTYKKTIYKEYKDDSYTDEVAQPAWLGFLGPVLQAEVGDVILIHLKNFATRPYTIHPHGVFYEKDSEGSLYPDGSSGPLKADDSVPPGGSHIYNWTIPEGHAPTDADPACLTWIYHSHVDAPRDIATGLIGPLITCKRGALDGNSPPQRQDVDHDFFLLFSVVDENLSWHLNENIATYCSDPASVDKEDETFQESNRMHAINGFVFGNLPELNMCAQKRVAWHLFGMGNEIDVHTAFFHGQMLTTRGHHTDVANIFPATFVTAEMVPWEPGTWLISCQVNSHFRDGMQALYKVKSCSMAPPVDLLTGKVRQYFIEAHEIQWDYGPMGHDGSTGKNLREPGSISDKFFQKSSSRIGGTYWKVRYEAFQDETFQEKMHLEEDRHLGILGPVIRAEVGDTIQVVFYNRASQPFSMQPHGVFYEKDYEGTVYNDGSSYPGLVAKPFEKVTYRWTVPPHAGPTAQDPACLTWMYFSAADPIRDTNSGLVGPLLVCRAGALGADGKQKGVDKEFFLLFTVLDENKSWYSNANQAAAMLDFRLLSEDIEGFQDSNRMHAINGFLFSNLPRLDMCKGDTVAWHLLGLGTETDVHGVMFQGNTVQLQGMRKGAAMLFPHTFVMAIMQPDNLGTFEIYCQAGSHREAGMRAIYNVSQCPGHQATPRQRYQAARIYYIMAEEVEWDYCPDRSWEREWHNQSEKDSYGYIFLSNKDGLLGSRYKKAVFREYTDGTFRIPRPRTGPEEHLGILGPLIKGEVGDILTVVFKNNASRPYSVHAHGVLESTTVWPLAAEPGEVVTYQWNIPERSGPGPNDSACVSWIYYSAVDPIKDMYSGLVGPLAICQKGILEPHGGRSDMDREFALLFLIFDENKSWYLEENVATHGSQDPGSINLQDETFLESNKMHAINGKLYANLRGLTMYQGERVAWYMLAMGQDVDLHTIHFHAESFLYRNGENYRADVVDLFPGTFEVVEMVASNPGTWLMHCHVTDHVHAGMETLFTVFSRTEHLSPLTVITKETEKAVPPRDIEEGNVKMLGMQIPIKNVEMLASVLVAISVTLLLVVLALGGVVWYQHRQRKLRRNRRSILDDSFKLLSFKQ

SEQ ID NO: 6423 - protein, 811 aa, Homo Sapiens
MESGHLLWALLFMQSLWPQLTDGATRVYYLGIRDVQWNYAPKGRNVITNQPLDSDIVASSFLKSDKNRIGGTYKKTIYKEYKDDSYTDEVAQPAWLGFLGPVLQAEVGDVILIHLKNFATRPYTIHPHGVFYEKDSEGSLYPDGSSGPLKADDSVPPGGSHIYNWTIPEGHAPTDADPACLTWIYHSHVDAPRDIATGLIGPLITCKRGALDGNSPPQRQDVDHDFFLLFSVVDENLSWHLNENIATYCSDPASVDKEDETFQESNRMHAINGFVFGNLPELNMCAQKRVAWHLFGMGNEIDVHTAFFHGQMLTTRGHHTDVANIFPATFVTAEMVPWEPGTWLISCQVNSHFRDGMQALYKVKSCSMAPPVDLLTGKVRQYFIEAHEIQWDYGPMGHDGSTGKNLREPGSISDKFFQKSSSRIGGTYWKVRYEAFQDETFQEKMHLEEDRHLGILGPVIRAEVGDTIQVVFYNRASQPFSMQPHGVFYEKDYEGTVYNDDPIRDTNSGLVGPLLVCRAGALGADGKQKGVDKEFFLLFTVLDENKSWYSNANQAAAMLDFRLLSEDIEGFQDSNRMHAINGFLFSNLPRLDMCKGDTVAWHLLGLGTETDVHGVMFQGNTVQLQGMRKGAAMLFPHTFVMAIMQPDNLGTFEIYCQAGSHREAGMRAIYNVSQCPGHQATPRQRYQAARIYYIMAEEVEWDYCPDRSWEREWHNQSEKDSYGYIFLSNKDGLLGSRYKKAVFREYTDGTFRIPRPRTGPEEHLGILGPLIKGEVGDILTVVFKNNASRPYSVHAHGVLESTTVWPLAAEP

SEQ ID NO: 6424 - protein, 891 aa, Homo Sapiens
MHAINGFVFGNLPELNMCAQKRVAWHLFGMGNEIDVHTAFFHGQMLTTRGHHTDVANIFPATFVTAEMVPWEPGTWLISCQVNSHFRDGMQALYKVKSCSMAPPVDLLTGKVRQYFIEAHEIQWDYGPMGHDGSTGKNLREPGSISDKFFQKSSSRIGGTYWKVRYEAFQDETFQEKMHLEEDRHLGILGPVIRAEVGDTIQVVFYNRASQPFSMQPHGVFYEKDYEGTVYNDGSSYPGLVAKPFEKVTYRWTVPPHAGPTAQDPACLTWMYFSAADPIRDTNSGLVGPLLVCRAGALGADGKQKGVDKEFFLLFTVLDENKSWYSNANQAAAMLDFRLLSEDIEGFQDSNRMHAINGFLFSNLPRLDMCKGDTVAWHLLGLGTETDVHGVMFQGNTVQLQGMRKGAAMLFPHTFVMAIMQPDNLGTFEIYCQAGSHREAGMRAIYNVSQCPGHQATPRQRYQAARIYYIMAEEVEWDYCPDRSWEREWHNQSEKDSYGYIFLSNKDGLLGSRYKKAVFREYTDGTFRIPRPRTGPEEHLGILGPLIKGEVGDILTVVFKNNASRPYSVHAHGVLESTTVWPLAAEPGEVVTYQWNIPERSGPGPNDSACVSWIYYSAVDPIKDMYSGLVGPLAICQKGILEPHGGRSDMDREFALLFLIFDENKSWYLEENVATHGSQDPGSINLQDETFLESNKMHAINGKLYANLRGLTMYQGERVAWYMLAMGQDVDLHTIHFHAESFLYRNGENYRADVVDLFPGTFEVVEMVASNPGTWLMHCHVTDHVHAGMETLFTVFSRTEHLSPLTVITKETEKAVPPRDIEEGNVKMLGMQIPIKNVEMLASVLVAISVTLLLVVLALGGVVWYQHRQRKLRRNRRSILDDSFKLLSFKQ

SEQ ID NO: 6425 - protein, 1212 aa, Homo Sapiens
MTQTLPYHLSLLNVLFPGPCSRHFKFRRGKCAQPAWRKVSAPSQDLLITKVMWAMESGHLLWALLFMQSLWPQLTDGATRVYYLGIRDVQWNYAPKGRNVITNQPLDSDIVASSFLKSDKNRIGGTYKKTIYKEYKDDSYTDEVAQPAWLGFLGPVLQAEVGDVILIHLKNFATRPYTIHPHGVFYEKDSEGSLYPDGSSGPLKADDSVPPGGSHIYNWTIPEGHAPTDADPACLTWIYHSHVDAPRDIATGLIGPLITCKRGALDGNSPPQRQDVDHDFFLLFSVVDENLSWHLNENIATYCSDPASVDKEDETFQESNRMHAINGFVFGNLPELNMCAQKRVAWHLFGMGNEIDVHTAFFHGQMLTTRGHHTDVANIFPATFVTAEMVPWEPGTWLISCQVNSHFRDGMQALYKVKSCSMAPPVDLLTGKVRQYFIEAHEIQWDYGPMGHDGSTGKNLREPGSISDKFFQKSSSRIGGTYWKVRYEAFQDETFQEKMHLEEDRHLGILGPVIRAEVGDTIQVVFYNRASQPFSMQPHGVFYEKDYEGTVYNDGSSYPGLVAKPFEKVTYRWTVPPHAGPTAQDPACLTWMYFSAADPIRDTNSGLVGPLLVCRAGALGADGKQKGVDKEFFLLFTVLDENKSWYSNANQAAAMLDFRLLSEDIEGFQDSNRMHAINGFLFSNLPRLDMCKGDTVAWHLLGLGTETDVHGVMFQGNTVQLQGMRKGAAMLFPHTFVMAIMQPDNLGTFEIYCQAGSHREAGMRAIYNVSQCPGHQATPRQRYQAARIYYIMAEEVEWDYCPDRSWEREWHNQSEKDSYGYIFLSNKDGLLGSRYKKAVFREYTDGTFRIPRPRTGPEEHLGILGPLIKGEVGDILTVVFKNNASRPYSVHAHGVLESTTVWPLAAEPGEVVTYQWNIPERSGPGPNDSACVSWIYYSAVDPIKDMYSGLVGPLAICQKGILEPHGGRSDMDREFALLFLIFDENKSWYLEENVATHGSQDPGSINLQDETFLESNKMHAINGKLYANLRGLTMYQGERVAWYMLAMGQDVDLHTIHFHAESFLYRNGENYRADVVDLFPGTFEVVEMVASNPGTWLMHCHVTDHVHAGMETLFTVFSRTEHLSPLTVITKETEKAVPPRDIEEGNVKMLGMQIPIKNVEMLASVLVAISVTLLLVVLALGGVVWYQHRQRKLRRNRRSILDDSFKLLSFKQ

SEQ ID NO: 6426 - protein, 1160 aa, Homo Sapiens
MWAMESGHLLWALLFMQSLWPQLTDGATRVYYLGIRDVQWNYAPKGRNVITNQPLDSDIVASSFLKSDKNRIGGTYKKTIYKEYKDDSYTDEVAQPAWLGFLGPVLQAEVGDVILIHLKNFATRPYTIHPHGVFYEKDSEGSLYPDGSSGPLKADDSVPPGGSHIYNWTIPEGHAPTDADPACLTWIYHSHVDAPRDIATGLIGPLITCKRGALDGNSPPQRQDVDHDFFLLFSVVDENLSWHLNENIATYCSDPASVDKEDETFQESNRMHAINGFVFGNLPELNMCAQKRVAWHLFGMGNEIDVHTAFFHGQMLTTRGHHTDVANIFPATFVTAEMVPWEPGTWLISCQVNSHFRDGMQALYKVKSCSMAPPVDLLTGKVRQYFIEAHEIQWDYGPMGHDGSTGKNLREPGSISDKFFQKSSSRIGGTYWKVRYEAFQDETFQEKMHLEEDRHLGILGPVIRAEVGDTIQVVFYNRASQPFSMQPHGVFYEKDYEGTVYNDGSSYPGLVAKPFEKVTYRWTVPPHAGPTAQDPACLTWMYFSAADPIRDTNSGLVGPLLVCRAGALGADGKQKGVDKEFFLLFTVLDENKSWYSNANQAAAMLDFRLLSEDIEGFQDSNRMHAINGFLFSNLPRLDMCKGDTVAWHLLGLGTETDVHGVMFQGNTVQLQGMRKGAAMLFPHTFVMAIMQPDNLGTFEIYCQAGSHREAGMRAIYNVSQCPGHQATPRQRYQAARIYYIMAEEVEWDYCPDRSWEREWHNQSEKDSYGYIFLSNKDGLLGSRYKKAVFREYTDGTFRIPRPRTGPEEHLGILGPLIKGEVGDILTVVFKNNASRPYSVHAHGVLESTTVWPLAAEPGEVVTYQWNIPERSGPGPNDSACVSWIYYSAVDPIKDMYSGLVGPLAICQKGILEPHGGRSDMDREFALLFLIFDENKSWYLEENVATHGSQDPGSINLQDETFLESNKMHAINGKLYANLRGLTMYQGERVAWYMLAMGQDVDLHTIHFHAESFLYRNGENYRADVVDLFPGTFEVVEMVASNPGTWLMHCHVTDHVHAGMETLFTVFSRTEHLSPLTVITKETEKVPPRDIEEGNVKMLGMQIPIKNVEMLASVLVAISVTLLLVVLALGGVVWYQHRQRKLRRNRRSILDDSFKLLSFKQ

SEQ ID NO: 6427 - protein, 969 aa, Homo Sapiens
MWAMESGHLLWALLFMQSLWPQLTDGATRVYYLGIRDVQWNYAPKGRNVITNQPLDSDIVASSFLKSDKNRIGGTYKKTIYKEYKDDSYTDEVAQPAWLGFLGPVLQAEVGDVILIHLKNFATRPYTIHPHGVFYEKDSEGSLYPDGSSGPLKADDSVPPGGSHIYNWTIPEGHAPTDADPACLTWIYHSHVDAPRDIATGLIGPLITCKRGALDGNSPPQRQDVDHDFFLLFSVVDENLSWHLNENIATYCSDPASVDKEDETFQESNRMHAINGFVFGNLPELNMCAQKRVAWHLFGMGNEIDVHTAFFHGQMLTTRGHHTDVANIFPATFVTAEMVPWEPGTWLISCQVNSHFRDGMQALYKVKSCSMAPPVDLLTGKVRQYFIEAHEIQWDYGPMGHDGSTGKNLREPGSISDKFFQKSSSRIGGTYWKVRYEAFQDETFQEKMHLEEDRHLGILGPVIRAEVGDTIQVVFYNRASQPFSMQPHGVFYEKDYEGTVYNDGTFEIYCQAGSHREAGMRAIYNVSQCPGHQATPRQRYQAARIYYIMAEEVEWDYCPDRSWEREWHNQSEKDSYGYIFLSNKDGLLGSRYKKAVFREYTDGTFRIPRPRTGPEEHLGILGPLIKGEVGDILTVVFKNNASRPYSVHAHGVLESTTVWPLAAEPGEVVTYQWNIPERSGPGPNDSACVSWIYYSAVDPIKDMYSGLVGPLAICQKGILEPHGGRSDMDREFALLFLIFDENKSWYLEENVATHGSQDPGSINLQDETFLESNKMHAINGKLYANLRGLTMYQGERVAWYMLAMGQDVDLHTIHFHAESFLYRNGENYRADVVDLFPGTFEVVEMVASNPGTWLMHCHVTDHVHAGMETLFTVFSRTEHLSPLTVITKETEKAVPPRDIEEGNVKMLGMQIPIKNVEMLASVLVAISVTLLLVVLALGGVVWYQHRQRKLRRNRRSILDDSFKLLSFKQ

SEQ ID NO: 6428 - protein, 63 aa, Homo Sapiens
MWAMESGHLLWALLFMQSLWPQLTDGATRVYYLGIRDVQWNYAPKGRNVITNQPLDSDIYVKM

SEQ ID NO: 6429 - protein, 88 aa, Homo Sapiens
MTSSRLWFSLLLAAAFAGRATALWPWPQNFQTSDQRYVLYPNNFQFQYDVSSAAQPGCSVLDEAFQRYRDLLFGSGSWPRPYLTANMY

SEQ ID NO: 6430 - protein, 143 aa, Homo Sapiens
MTSSRLWFSLLLAAAFAGRATALWPWPQNFQTSDQRYVLYPNNFQFQYDVSSAAQPGCSVLDEAFQRYRDLLFGSGSWPRPYLTGKRHTLEKNVLVVSVVTPGCNQLPTLESVENYTLTINDDQCLLLSETVWGALRGCHGVQ

SEQ ID NO: 6431 - protein, 529 aa, Homo Sapiens
MTSSRLWFSLLLAAAFAGRATALWPWPQNFQTSDQRYVLYPNNFQFQYDVSSAAQPGCSVLDEAFQRYRDLLFGSGSWPRPYLTGKRHTLEKNVLVVSVVTPGCNQLPTLESVENYTLTINDDQCLLLSETVWGALRGLETFSQLVWKSAEGTFFINKTEIEDFPRFPHRGLLLDTSRHYLPLSSILDTLDVMAYNKLNVFHWHLVDDPSFPYESFTFPELMRKGSYNPVTHIYTAQDVKEVIEYARLRGIRVLAEFDTPGHTLSWGPGIPGLLTPCYSGSEPSGTFGPVNPSLNNTYEFMSTFFLEVSSVFPDFYLHLGGDEVDFTCWKSNPEIQDFMRKKGFGEDFKQLESFYIQTLLDIVSSYGKGYVVWQEVFDNKVKIQPDTIIQVWREDIPVNYMKELELVTKAGFRALLSAPWYLNRISYGPDWKDFYIVEPLAFEGTPEQKALVIGGEACMWGEYVDNTNLVPRLWPRAGAVAERLWSNKLTSDLTFAYERLSHFRCELLRRGVQAQPLNVGFCEQEFEQT

SEQ ID NO: 6432 - protein, 509 aa, Homo Sapiens
MTSSRLWFSLLLAAAFAGRATALWPWPQNFQTSDQRYVLYPNNFQFQYDVSSAAQPGCSVLDEAFQRYRDLLFGSGSWPRPYLTGKRHTLEKNVLVVSVVTPGCNQLPTLESVENYTLTINDDQCLLLSETVWGALRGLETFSQLVWKSAEGTFFINKTEIEDFPRFPHRGLLLDTSRHYLPLSSILDTLDVMAYNKLNVFHWHLVDDPSFPYESFTFPELMRKGSYNPVTHIYTAQDVKEVIEYARLRGIRVLAEFDTPGHTLSWGPGIPGLLTPCYSGSEPSGTFGPVNPSLNNTYEFMSTFFLEVSSVFPDFYLHLGGDEVDFTCWKSNPEIQDFMRKKGFGEDFKQLESFYIQTLLDIVSSYGKGYVVWQEVFDNKVKIQPDTIIQVWREDIPVNYMKELELVTKAGFRALLSAPWYLNRISYGPDWKDFYIVEPLAFEGTPEQKALVIGGEACMWGEYVDNTNLVPRLWPRAGAVAERLWSNKLTSDLTFAYERLSHFRCELLR

SEQ ID NO: 6433 - protein, 373 aa, Homo Sapiens
MTSSRLWFSLLLAAAFAGRATALWPWPQNFQTSDQRYVLYPNNFQFQYDVSSAAQPGCSVLDEAFQRYRDLLFGSGSWPRPYLTGKRHTLEKNVLVVSVVTPGCNQLPTLESVENYTLTINDDQCLLLSETVWGALRGLETFSQLVWKSAEGTFFINKTEIEDFPRFPHRGLLLDTSRHYLPLSSILDTLDVMAYNKLNVFHWHLVDDPSFPYESFTFPELMRKGSYNPVTHIYTAQDVKEVIEYARLRGIRVLAEFDTPGHTLSWGPGIPGLLTPCYSGSEPSGTFGPVNPSLNNTYEFMSTFFLEVSSVFPDFYLHLGGDEVDFTCWKSNPEIQDFMRKKGFGEDFKQLESFYIQTFSQTQSYRCGERIFQ

SEQ ID NO: 6434 - protein, 143 aa, Homo Sapiens
MTSSRLWFSLLLAAAFAGRATALWPWPQNFQTSDQRYVLYPNNFQFQYDVSSAAQPGCSVLDEAFQRYRDLLFGSGSWPRPYLTGKRHTLEKNVLVVSVVTPGCNQLPTLESVENYTLTINDDQCLLLSETVWGALRVLYQQD

SEQ ID NO: 6435 - protein, 119 aa, Homo Sapiens
MTSSRLWFSLLLAAAFAGRATALWPWPQNFQTSDQRYVLYPNNFQFQYDVSSAAQPGCSVLDEAFQRYRDLLFGSGSWPRPYLTGLSLSFRLECSGVITAYSNLELQDSSSLPASLMSS

SEQ ID NO: 6436 - protein, 540 aa, Homo Sapiens
MTSSRLWFSLLLAAAFAGRATALWPWPQNFQTSDQRYVLYPNNFQFQYDVSSAAQPGCSVLDEAFQRYRDLLFGSGSWPRPYLTGWPHQAYPVFLGKRHTLEKNVLVVSVVTPGCNQLPTLESVENYTLTINDDQCLLLSETVWGALRGLETFSQLVWKSAEGTFFINKTEIEDFPRFPHRGLLLDTSRHYLPLSSILDTLDVMAYNKLNVFHWHLVDDPSFPYESFTFPELMRKGSYNPVTHIYTAQDVKEVIEYARLRGIRVLAEFDTPGHTLSWGPGIPGLLTPCYSGSEPSGTFGPVNPSLNNTYEFMSTFFLEVSSVFPDFYLHLGGDEVDFTCWKSNPEIQDFMRKKGFGEDFKQLESFYIQTLLDIVSSYGKGYVVWQEVFDNKVKIQPDTIIQVWREDIPVNYMKELELVTKAGFRALLSAPWYLNRISYGPDWKDFYIVEPLAFEGTPEQKALVIGGEACMWGEYVDNTNLVPRLWPRAGAVAERLWSNKLTSDLTFAYERLSHFRCELLRRGVQAQPLNVGFCEQEFEQT

SEQ ID NO: 6437 - protein, 318 aa, Homo Sapiens
  misc_feature (1)..(1): Xaa can be any naturally occurring amino acid
XFQFQYDVSSAAQPGCSVLDEAFQRYRDLLFGSGSWPRPYLTGKRHTLEKNVLVVSVVTPGCNQLPTLESVENYTLTINDDQCLLLSETVWGALRGLETFSQLVWKSAEGTFFINKTEIEDFPRFPHRGLLLDTSRHYLPLSSILDTLDVMAYNKLNVFHWHLVDDPSFPYESFTFPELMRKGSYNPVTHIYTAQDVKEVIEYARLRGIRVLAEFDTPGHTLSWGPGIPGLLTPCYSGSEPSGTFGPVNPSLNNTYEFMSTFFLEVSSVFPDFYLHLGGDEVDFTCWKSNPEIQDFMRKKGFGEDFKQLESFYIQTYP

SEQ ID NO: 6438 - protein, 128 aa, Homo Sapiens
  misc_feature (1)..(1): Xaa can be any naturally occurring amino acid
XFSLLLAAAFAGRATALWPWPQNFQTSDQRYVLYPNNFQFQYDVSSAAQPGCSVLDEAFQRYRDLLFGSGSWPRPYLTGKRHTLEKNVLVVSVVTPGCNQLPTLESVENCIPVPFARRRLLSSFCCGN

SEQ ID NO: 6439 - protein, 331 aa, Homo Sapiens
MAFNKFNVLHWHIVDDQSFPYQSITFPELSNKGSYSLSHVYTPNDVRMVIEYARLRGIRVLPEFDTPGHTLSWGKGQKDLLTPCYSRQNKLDSFGPINPTLNTTYSFLTTFFKEISEVFPDQFIHLGGDEVEFKCWESNPKIQDFMRQKGFGTDFKKLESFYIQKVLDIIATINKGSIVWQEVFDDKAKLAPGTIVEVWKDSAYPEELSRVTASGFPVILSAPWYLDLISYGQDWRKYYKVEPLDFGGTQKQKQLFIGGEACLWGEYVDATNLTPRLWPRASAVGERLWSSKDVRDMDDAYDRLTRHRCRMVERGIAAQPLYAGYCNHENM

SEQ ID NO: 6440 - protein, 35 aa, Homo Sapiens
MDDAYDRLTRHRCRMVERGIAAQPLYAGYCNHENM

SEQ ID NO: 6441 - protein, 556 aa, Homo Sapiens
MELCGLGLPRPPMLLALLLATLLAAMLALLTQVALVVQVAEAARAPSVSAKPGPALWPLPLLVKMTPNLLHLAPENFYISHSPNSTAGPSCTLLEEAFRRYHGYIFGFYKWHHEPAEFQAKTQVQQLLVSITLQSECDAFPNISSDESYTLLVKEPVAVLKANRVWGALRGLETFSQLVYQDSYGTFTINESTIIDSPRFSHRGILIDTSRHYLPVKIILKTLDAMAFNKFNVLHWHIVDDQSFPYQSITFPELSNKGSYSLSHVYTPNDVRMVIEYARLRGIRVLPEFDTPGHTLSWGKGQKDLLTPCYSRQNKLDSFGPINPTLNTTYSFLTTFFKEISEVFPDQFIHLGGDEVEFKCWESNPKIQDFMRQKGFGTDFKKLESFYIQKVLDIIATINKGSIVWQEVFDDKAKLAPGTIVEVWKDSAYPEELSRVTASGFPVILSAPWYLDLISYGQDWRKYYKVEPLDFGGTQKQKQLFIGGEACLWGEYVDATNLTPRLWPRASAVGERLWSSKDVRDMDDAYDRLTRHRCRMVERGIAAQPLYAGYCNHENM

SEQ ID NO: 6442 - protein, 52 aa, Homo Sapiens
  misc_feature (1)..(1): Xaa can be any naturally occurring amino acid
XDATNLTPRLWPRASAVGERLWSSKDVRDMDDAYDRLTRHRCRMVEGLASFL

SEQ ID NO: 6443 - protein, 170 aa, Homo Sapiens
  misc_feature (1)..(1): Xaa can be any naturally occurring amino acid
XFGTDFKKLESFYIQKVLDIIATINKGSIVWQEVFDDKAKLAPGTIVEVWKDSAYPEELSRVTASGFPVILSAPWYLDLISYGQDWRKYYKVEPLDFGGTQKQKQLFIGGEACLWGEYVDATNLTPRLWPRASAVGERLWSSKDVRDMDDAYDRLTRHRCRMVEGLASFL

SEQ ID NO: 6444 - protein, 202 aa, Homo Sapiens
  misc_feature (1)..(1): Xaa can be any naturally occurring amino acid
XNTTYSFLTTFFKEISEVFPDQFIHLGGDEVEFKCWVLDIIATINKGSIVWQEVFDDKAKLAPGTIVEVWKDSAYPEELSRVTASGFPVILSAPWYLDLISYGQDWRKYYKVEPLDFGGTQKQKQLFIGGEACLWGEYVDATNLTPRLWPRASAVGERLWSSKDVRDMDDAYDRLTRHRCRMVERGIAAQPLYAGYCNHENM

SEQ ID NO: 6445 - protein, 70 aa, Homo Sapiens
MGEPGQSPSPRSSHGSPPTLSTLTLLLLLCGHAHSQCKILRCNADSPSYLRTCRNALIRRCIRLRWIIFL

SEQ ID NO: 6446 - protein, 93 aa, Homo Sapiens
MGEPGQSPSPRSSHGSPPTLSTLTLLLLLCGHAHSQCKILRCNAEYVSSTLSLRGGGSSGALRGGGGGGRGGGVGSGGLCRALRSYALCTRRT

SEQ ID NO: 6447 - protein, 426 aa, Homo Sapiens
MGEPGQSPSPRSSHGSPPTLSTLTLLLLLCGHAHSQCKILRCNAEYVSSTLSLRGGGSSGALRGGGGGGRGGGVGSGGLCRALRSYALCTRRTARTCRGDLAFHSAVHGIEDLMIQHNCSRQGPTAPPPPRGPALPGAGSGLPAPDPCDYEGRFSRLHGRPPGFLHCASFGDPHVRSFHHHFHTCRVQGAWPLLDNDFLFVQATSSPMALGANATATRKLTIIFKNMQECIDQKVYQAEVDNLPVAFEDGSINGGDRPGGSSLSIQTANPGNHVEIQAAYIGTTIIIRQTAGQLSFSIKVAEDVAMAFSAEQDLQLCVGGCPPSQRLSRSERNRRGAITIDTARRLCKEGLPVEDAYFHSCVFDVLISGDPNFTVAAQAALEDARAFLPDLEKLHLFPSDAGVPLSSATLLAPLLSGLFVLWLCIQ

SEQ ID NO: 6448 - protein, 313 aa, Homo Sapiens
MIQHNCSRQGPTAPPPPRGPALPGAGSGLPAPDPCDYEGRFSRLHGRPPGFLHCASFGDPHVRSFHHHFHTCRVQGAWPLLDNDFLFVQATSSPMALGANATATRKLTIIFKNMQECIDQKVYQAEVDNLPVAFEDGSINGGDRPGGSSLSIQTANPGNHVEIQAAYIGTTIIIRQTAGQLSFSIKVAEDVAMAFSAEQDLQLCVGGCPPSQRLSRSERNRRGAITIDTARRLCKEGLPVEDAYFHSCVFDVLISGDPNFTVAAQAALEDARAFLPDLEKLHLFPSDAGVPLSSATLLAPLLSGLFVLWLCIQ

SEQ ID NO: 6449 - protein, 200 aa, Homo Sapiens
MQECIDQKVYQAEVDNLPVAFEDGSINGGDRPGGSSLSIQTANPGNHVEIQAAYIGTTIIIRQTAGQLSFSIKVAEDVAMAFSAEQDLQLCVGGCPPSQRLSRSERNRRGAITIDTARRLCKEGLPVEDAYFHSCVFDVLISGDPNFTVAAQAALEDARAFLPDLEKLHLFPSDAGVPLSSATLLAPLLSGLFVLWLCIQ

SEQ ID NO: 6450 - protein, 200 aa, Homo Sapiens; identical to SEQ ID NO: 6449

SEQ ID NO: 6451 - protein, 200 aa, Homo Sapiens; identical to SEQ ID NO: 6449

SEQ ID NO: 6452 - protein, 118 aa, Homo Sapiens
MWVTKLLPALLLQHVLLHLLLLPIAIPYAEGQRKRRNTIHEFKKSAKTTLIKIDPALKIKTKKVNTADQCANRCTRNKGLPFTCKAFVFDKARKQCLWFPFNSMSSGVKKEFGHEFDL

SEQ ID NO: 6453 - protein, 141 aa, Homo Sapiens
MWVTKLLPALLLQHVLLHLLLLPIAIPYAEGQRKRRNTIHEFKKSAKTTLIKIDPALKIKTKKVNTADQCANRCTRNKGLPFTCKAFVFDKARKQCLWFPFNSMSSGVKKEFGHEFDLYENKDYIRNCIIGKGRSYKGTVS

SEQ ID NO: 6454 - protein, 161 aa, Homo Sapiens
MWVTKLLPALLLQHVLLHLLLLPIAIPYAEGQRKRRNTIHEFKKSAKTTLIKIDPALKIKTKKVNTADQCANRCTRNKGLPFTCKAFVFDKARKQCLWFPFNSMSSGVKKEFGHEFDLYENKDYIRNCIIGKGRSYKGTVSITKSGIKCQPWSSMIPHEHR

SEQ ID NO: 6455 - protein, 210 aa, Homo Sapiens
MWVTKLLPALLLQHVLLHLLLLPIAIPYAEGQRKRRNTIHEFKKSAKTTLIKIDPALKIKTKKVNTADQCANRCTRNKGLPFTCKAFVFDKARKQCLWFPFNSMSSGVKKEFGHEFDLYENKDYIRNCIIGKGRSYKGTVSITKSGIKCQPWSSMIPHEHSFLPSSYRGKDLQENYCRNPRGEEGGPWCFTSNPEVRYEVCDIPQCSEGK

SEQ ID NO: 6456 - protein, 728 aa, Homo Sapiens
MWVTKLLPALLLQHVLLHLLLLPIAIPYAEGQRKRRNTIHEFKKSAKTTLIKIDPALKIKTKKVNTADQCANRCTRNKGLPFTCKAFVFDKARKQCLWFPFNSMSSGVKKEFGHEFDLYENKDYIRNCIIGKGRSYKGTVSITKSGIKCQPWSSMIPHEHSFLPSSYRGKDLQENYCRNPRGEEGGPWCFTSNPEVRYEVCDIPQCSEVECMTCNGESYRGLMDHTESGKICQRWDHQTPHRHKFLPERYPDKGFDDNYCRNPDGQPRPWCYTLDPHTRWEYCAIKTCADNTMNDTDVPLETTECIQGQGEGYRGTVNTIWNGIPCQRWDSQYPHEHDMTPENFKCKDLRENYCRNPDGSESPWCFTTDPNIRVGYCSQIPNCDMSHGQDCYRGNGKNYMGNLSQTRSGLTCSMWDKNMEDLHRHIFWEPDASKLNENYCRNPDDDAHGPWCYTGNPLIPWDYCPISRCEGDTTPTIVNLDHPVISCAKTKQLRVVNGIPTRTNIGWMVSLRYRNKHICGGSLIKESWVLTARQCFPSRDLKDYEAWLGIHDVHGRGDEKCKQVLNVSQLVYGPEGSDLVLMKLARPAVLDDFVSTIDLPNYGCTIPEKTSCSVYGWGYTGLINYDGLLRVAHLYIMGNEKCSQHHRGKVTLNESEICAGAEKIGSGPCEGDYGGPLVCEQHKMRMVLGVIVPGRGCAIPNRPGIFVRVAYYAKWIHKIILTYKVPQS

SEQ ID NO: 6457 - protein, 290 aa, Homo Sapiens
MWVTKLLPALLLQHVLLHLLLLPIAIPYAEGQRKRRNTIHEFKKSAKTTLIKIDPALKIKTKKVNTADQCANRCTRNKGLPFTCKAFVFDKARKQCLWFPFNSMSSGVKKEFGHEFDLYENKDYIRNCIIGKGRSYKGTVSITKSGIKCQPWSSMIPHEHSFLPSSYRGKDLQENYCRNPRGEEGGPWCFTSNPEVRYEVCDIPQCSEVECMTCNGESYRGLMDHTESGKICQRWDHQTPHRHKFLPERYPDKGFDDNYCRNPDGQPRPWCYTLDPHTRWEYCAIKTCET

SEQ ID NO: 6458 - protein, 728 aa, Homo Sapiens; identical to SEQ ID NO: 6456

SEQ ID NO: 6459 - protein, 184 aa, Homo Sapiens
MWVTKLLPALLLQHVLLHLLLLPIAIPYAEGQRKRRNTIHEFKKSAKTTLIKIDPALKIKTKKVNTADQCANRCTRNKGLPFTCKAFVFDKARKQCLWFPFNSMSSGVKKEFGHEFDLYENKDYIRNCIIGKGRSYKGTVSITKSGIKCQPWSSMIPHEHSGGDDCLVESTFYSIPFWGHNSAR

SEQ ID NO: 6460 - protein, 205 aa, Homo Sapiens
MWVTKLLPALLLQHVLLHLLLLPIAIPYAEGQRKRRNTIHEFKKSAKTTLIKIDPALKIKTKKVNTADQCANRCTRNKGLPFTCKAFVFDKARKQCLWFPFNSMSSGVKKEFGHEFDLYENKDYIRNCIIGKGRSYKGTVSITKSGIKCQPWSSMIPHEHSYRGKDLQENYCRNPRGEEGGPWCFTSNPEVRYEVCDIPQCSEGK

SEQ ID NO: 6461 - protein, 285 aa, Homo Sapiens
MWVTKLLPALLLQHVLLHLLLLPIAIPYAEGQRKRRNTIHEFKKSAKTTLIKIDPALKIKTKKVNTADQCANRCTRNKGLPFTCKAFVFDKARKQCLWFPFNSMSSGVKKEFGHEFDLYENKDYIRNCIIGKGRSYKGTVSITKSGIKCQPWSSMIPHEHSYRGKDLQENYCRNPRGEEGGPWCFTSNPEVRYEVCDIPQCSEVECMTCNGESYRGLMDHTESGKICQRWDHQTPHRHKFLPERYPDKGFDDNYCRNPDGQPRPWCYTLDPHTRWEYCAIKTCET

SEQ ID NO: 6462 - protein, 723 aa, Homo Sapiens
MWVTKLLPALLLQHVLLHLLLLPIAIPYAEGQRKRRNTIHEFKKSAKTTLIKIDPALKIKTKKVNTADQCANRCTRNKGLPFTCKAFVFDKARKQCLWFPFNSMSSGVKKEFGHEFDLYENKDYIRNCIIGKGRSYKGTVSITKSGIKCQPWSSMIPHEHSYRGKDLQENYCRNPRGEEGGPWCFTSNPEVRYEVCDIPQCSEVECMTCNGESYRGLMDHTESGKICQRWDHQTPHRHKFLPERYPDKGFDDNYCRNPDGQPRPWCYTLDPHTRWEYCAIKTCADNTMNDTDVPLETTECIQGQGEGYRGTVNTIWNGIPCQRWDSQYPHEHDMTPENFKCKDLRENYCRNPDGSESPWCFTTDPNIRVGYCSQIPNCDMSHGQDCYRGNGKNYMGNLSQTRSGLTCSMWDKNMEDLHRHIFWEPDASKLNENYCRNPDDDAHGPWCYTGNPLIPWDYCPISRCEGDTTPTIVNLDHPVISCAKTKQLRVVNGIPTRTNIGWMVSLRYRNKHICGGSLIKESWVLTARQCFPSRDLKDYEAWLGIHDVHGRGDEKCKQVLNVSQLVYGPEGSDLVLMKLARPAVLDDFVSTIDLPNYGCTIPEKTSCSVYGWGYTGLINYDGLLRVAHLYIMGNEKCSQHHRGKVTLNESEICAGAEKIGSGPCEGDYGGPLVCEQHKMRMVLGVIVPGRGCAIPNRPGIFVRVAYYAKWIHKIILTYKVPQS

SEQ ID NO: 6463 - protein, 655 aa, Homo Sapiens
MGRWAWVPSPWPPPGLGPFLLLLLLLLLLPRGFQPQPGGNRTESPEPNATATPAIPTILVTSVTSETPATSAPEAEGPQSGGLPPPPRAVPSSSSPQAQALTEDGRPCRFPFRYGGRMLHACTSEGSAHRKWCATTHNYDRDRAWGYCVEATPPPGGPAALDPCASGPCLNGGSCSNTQDPQSYHCSCPRAFTGKDCGTEKCFDETRYEYLEGGDRWARVRQGHVEQCECFGGRTWCEGTRHTACLSSPCLNGGTCHLIVATGTTVCACPPGFAGRLCNIEPDERCFLGNGTGYRGVASTSASGLSCLAWNSDLLYQELHVDSVGAAALLGLGPHAYCRNPDNDERPWCYVVKDSALSWEYCRLEACESLTRVQLSPDLLATLPEPASPGRQACGRRHKKRTFLRPRIIGGSSSLPGSHPWLAAIYIGDSFCAGSLVHTCWVVSAAHCFSHSPPRDSVSVVLGQHFFNRTTDVTQTFGIEKYIPYTLYSVFNPSDHDLVLIRLKKKGDRCATRSQFVQPICLPEPGSTFPAGHKCQIAGWGHLDENVSGYSSSLREALVPLVADHKCSSPEVYGADISPNMLCAGYFDCKSDACQGDSGGPLACEKNGVAYLYGIISWGDGCGRLHKPGVYTRVANYVDWINDRIRPPRRLVAPS

SEQ ID NO: 6464 - protein, 662 aa, Homo Sapiens
MGRWAWVPSPWPPPGLGPFLLLLLLLLLLPRGFQPQPGGNRTESPEPNATATPAIPTILVTSVTSETPATSAPEAEGPQSGGLPPPPRAVPSSSSPQAQALTEDGRPCRFPFRYGGRMLHACTSEGSAHRKWCATTHNYDRDRAWGYCVEATPPPGGPAALDPCASGPCLNGGSCSNTQDPQSYHCSCPRAFTGKDCGTEKCFDETRYEYLEGGDRWARVRQGHVEQCECFGGRTWCEGTRHTACLSSPCLNGGTCHLIVATGTTVCACPPGFAGRLCNIEPDERCFLGNGTGYRGVASTSASGLSCLAWNSDLLYQELHVDSVGAAALLGLGPHAYCRNPDNDERPWCYVVKDSALSWEYCRLEACDLETEGRESLTRVQLSPDLLATLPEPASPGRQACGRRHKKRTFLRPRIIGGSSSLPGSHPWLAAIYIGDSFCAGSLVHTCWVVSAAHCFSHSPPRDSVSVVLGQHFFNRTTDVTQTFGIEKYIPYTLYSVFNPSDHDLVLIRLKKKGDRCATRSQFVQPICLPEPGSTFPAGHKCQIAGWGHLDENVSGYSSSLREALVPLVADHKCSSPEVYGADISPNMLCAGYFDCKSDACQGDSGGPLACEKNGVAYLYGIISWGDGCGRLHKPGVYTRVANYVDWINDRIRPPRRLVAPS

SEQ ID NO: 6465 - protein, 700 aa, Homo Sapiens
MLKMLSFKLLLLAVALGFFEGDAKFGERNEGSGARRRRCLNGNPPKRLKRRDRRMMSQLELLSGGEMLCGGFYPRLSCCLRSDSPGLGRLENKIFSVTNNTECGKLLEEIKCALCSPHSQSLFHSPEREVLERDLVLPLLCKDYCKEFFYTCRGHIPGFLQTTADEFCFYYARKDGGLCFPDFPRKQVRGPASNYLDQMEEYDKVEEISRKHKHNCFCIQEVVSGLRQPVGALHSGDGSQRLFILEKEGYVKILTPEGEIFKEPYLDIHKLVQSGIKGGDERGLLSLAFHPNYKKNGKLYVSYTTNQERWAIGPHDHILRVVEYTVSRKNPHQVDLRTARVFLEVAELHRKHLGGQLLFGPDGFLYIILGDGMITLDDMEEMDGLSDFTGSVLRLDVDTDMCNVPYSIPRSNPHFNSTNQPPEVFAHGLHDPGRCAVDRHPTDININLTILCSDSNGKNRSSARILQIIKGKDYESEPSLLEFKPFSNGPLVGGFVYRGCQSERLYGSYVFGDRNGNFLTLQQSPVTKQWQEKPLCLGTSGSCRGYFSGHILGFGEDELGEVYILSSSKSMTQTHNGKLYKIVDPKRPLMPEECRATVQPAQTLTSECSRLCRNGYCTPTGKCCCSPGWEGDFCRTAKCEPACRHGGVCVRPNKCLCKKGYLGPQCEQVDRNIRRVTRAGILDQIIDMTSYLLDLTSYIV

SEQ ID NO: 6466 - protein, 320 aa, Homo Sapiens
MLKMLSFKLLLLAVALGFFEGDAKFGERNEGSGARRRRCLNGNPPKRLKRRDRRMMSQLELLSGGEMLCGGFYPRLSCCLRSDSPGLGRLENKIFSVTNNTECGKLLEEIKCALCSPHSQSLFHSPEREVLERDLVLPLLCKDYCKEFFYTCRGHIPGFLQTTADEFCFYYARKDGGLCFPDFPRKQVRGPASNYLDQMEEYDKVEEISRKHKHNCFCIQEVVSGLRQPVGALHSGDGSQRLFILEKEGYVKILTPEGEIFKEPYLDIHKLVQSGIKVGFLNFIYFCAGYVNFILVLPSSLKVFLCNKRKNLAGENKGAT

SEQ ID NO: 6467 - protein, 782 aa, Homo Sapiens
MARARAGALLALWVLGAAAHPQCLDFRPPFRPTQPLRLCAQYSDFGCCDEGRDAELTRRFWALASRVDAAEWAACAGYARDLLCQECSPYAAHLYDAEDPFTPLRTVPGLCQDYCLDMWHKCRGLFRHLSTDQELWALEGNLARFCRYLSLDDTDYCFPYLLVNKNLNSNLGHVVADAKGCLQLCLEEVANGLRNPVAMVHARDGTHRFFVAEQVGLVWAYLPDRSRLGKPFLNISRVVLTSPWEGDERGFLGIAFHPSFQHNRRLYVYYSVGIRSSEWIRISEFRVSEDDENAVDHSSERIILEVKEPASNHNGGQLLFGDDGYLYIFTGDGGMAGDPFGTFGNAQNKSALLGKVLRIDVDRKERGLPYGIPPDNPFVGDPAAQPEVYALGVRNMWRCSFDRGDPSSGTGRGRLFCGDVGQNKFEEVDVVERGGNYGWRAREGFECYDRSLCANTSLNDLLPIFAYPHTVGKSVTGGYVYRGCEYPNLNGLYIFGDFMSGRLMSLQENPGTGQWQYSEICMGHGQTCEFPGLINNYYPYIISFGEDEAGELYFMSTGEPSATAPRGVVYKIIDASRRAPPGKCQIQPAQVKIRSRLIPFVPKEKFIPKTRSTPRPTARAPTRAPRRGRPTAAPPAPTPRPARPTQQPGSRRGGGRRRGRLNSASRAFRDGEVRLVRPAGLSSGSGRVEVFVGGRWGTVCDDSWNISGAAVVCRQLGFAYAVRAVKRAEFGQGGSLPILLDDVRCAGWERNLLECQHNGVGTHNCEHDEDAGVVCSHQNPDL

SEQ ID NO: 6468 - protein, 608 aa, Homo Sapiens
MARARAGALLALWVLGAAAHPQCLDFRPPFRPTQPLRLCAQYSDFGCCDEGRDAELTRRFWALASRVDAAEWAACAGYARDLLCQECSPYAAHLYDAEDPFTPLRTVPGLCQDYCLDMWHKCRGLFRHLSTDQELWALEGNLARFCRYLSLDDTDYCFPYLLVNKNLNSNLGHVVADAKGCLQLCLEEVANGLRNPVAMVHARDGTHRFFVAEQVGLVWAYLPDRSRLGKPFLNISRVVLTSPWEGDERGFLGIAFHPSFQHNRRLYVYYSVGIRSSEWIRISEFRVSEDDENAVDHSSERIILEVKEPASNHNGGQLLFGDDGYLYIFTGDGGMAGDPFGTFGNAQNKSALLGKVLRIDVDRKERGLPYGIPPDNPFVGDPAAQPEVYALGVRNMWRCSFDRGDPSSGTGRGRLFCGDVGQNKFEEVDVVERGGNYGWRAREGFECYDRSLCANTSLNDLLPIFAYPHTVGKSVTGGYVYRGCEYPNLNGLYIFGDFMSGRLMSLQENPGTGQWQYSEICMGHGQTCEFPGLINNYYPYIISFGEDEAGELYFMSTGEPSATAPRGVVYKIIDASSCKARSAMPGYVPAPSVCSSLTSQPFILQWWK

SEQ ID NO: 6469 - protein, 724 aa, Homo Sapiens
MLRTSTPNLCGGLHCRAPWLSSGILCLCLIFLLGQVGLLQGHPQCLDYGPPFQPPLHLEFCSDYESFGCCDQHKDRRIAARYWDIMEYFDLKRHELCGDYIKDILCQECSPYAAHLYDAENTQTPLRNLPGLCSDYCSAFHSNCHSAISLLTNDRGLQESHGRDGTRFCHLLDLPDKDYCFPNVLRNDYLNRHLGMVAQDPQGCLQLCLSEVANGLRNPVSMVHAGDGTHRFFVAEQVGVVWVYLPDGSRLEQPFLDLKNIVLTTPWIGDERGFLGLAFHPKFRHNRKFYIYYSCLDKKKVEKIRISEMKVSRADPNKADLKSERVILEIEEPASNHNGGQLLFGLDGYMYIFTGDGGQAGDPFGLFGNAQNKSSLLGKVLRIDVNRAGSHGKRYRVPSDNPFVSEPGAHPAIYAYGIRNMWRCAVDRGDPITRQGRGRIFCGDVGQNRFEEVDLILKGGNYGWRAKEGFACYDKKLCHNASLDDVLPIYAYGHAVGKSVTGGYVYRGCESPNLNGLYIFGDFMSGRLMALQEDRKNKKWKKQDLCLGSTTSCAFPGLISTHSKFIISFAEDEAGELYFLATSYPSAYAPRGSIYKFVDPSRRAPPGKCKYKPVPVRTKSKRIPFRPLAKTVLDLLKEQSEKAARKSSSATLASGPAQGLSEKGSSKKLASPTSSKNTLRGPGTKKKARVGPHVRQGKRRKSLKSHSGRMRPSAEQKRAGRSLP

SEQ ID NO: 6470 - protein, 543 aa, Homo Sapiens
MLGFLSRGPSMKLCMGLACVLSLWNTVSGIKGEAKKEKGMTFLPTTGKWVIRAPFQLTCLEIKMLRRKKMGHSRAALNPDLLLSGLREEERKEKGVAFLATTELPARSIDLSALNLTELVNGMLSRALKDSKKFFSLLSVTSYSSFAFHKFSVAVYNISNLKTVDPAKFPTRYCYCLNNRTNDLSDFTALLVDIIGNSTSYLTEIFKSTSILSVNQSNESDCIFICVMTGKSGRNLSDFWEIEEKYPIINYTFTSGLSGVLGAATRGTARTSKPTTKSQKTLPSTSPGHWTQSTPWASALRSSPWTETAAPSETEETLNTGRPPELPARATATWFSASHTLPALATRRVARTQWLTADRQTWASISSVPWAQTISEKKPGGSLWETRSSPPTTAGTEEAMNTTSLLAPAAEIMATPGSPSQASPTLGAFTHGTQTPSPTKATAPRYPQTGDLSAEWPFTAGEEPVLVPRPHQVSRCPQPLFKVGAMAAAPLTLAIQRLNPCLMELCQFFQQCLCMSQRSPRTEDMSSFINPYQSSTSKISWKT

SEQ ID NO: 6471 - protein, 531 aa, Homo Sapiens
MLGFLSRGPSMKLCMGLACVLSLWNTVSGIKGEAKKEKGMTFLPTTVSGLREEERKEKGVAFLATTELPARSIDLSALNLTELVNGMLSRALKDSKKFFSLLSVTSYSSFAFHKFSVAVYNISNLKTVDPAKFPTRYCYCLNNRTNDLSDFTALLVDIIGNSTSYLTEIFKSTSILSVNQSNESDCIFICVMTGKSGRNLSDFWEIEEKYPIINYTFTSGLSGVLGAATRGTARTSKPTTKSQKTLPSTSPGHWTQSTPWASALRSSPWTETAAPSETEETLNTGRPPELPARATATWFSASHTLPALATRRVARTQWLTADRQTWASISSVPWAQTISEKKPGGSLWETRSSPPTTAGTEEAMNTTSLLAPAAEIMATPGSPSQASPTLGAFTHGTQTPSPTKATAPRYPQTGDLSAEWPFTAGEEPVLVPRPHQVSRCPQPLFKVGAMAAAPLTLAIQRLNPCLMELCQFFQQCLCMSQRSPRTEDMRYCLEYYSWFLKNATYICQRVKRVSHSHTLKQKCLENICKSV

SEQ ID NO: 6472 - protein, 97 aa, Homo Sapiens
MKAQTALSFFLILITSLSGSQGIFPLAFFIYVPMNEQIVIGRLDEDIILPSSFERGSEVVIHWKYQDSYKVHSYYKGSDHLESQDPRYANRTSLFYN

SEQ ID NO: 6473 - protein, 136 aa, Homo Sapiens
MKAQTALSFFLILITSLSGSQGIFPLAFFIYVPMNEQIVIGRLDEDIILPSSFERGSEVVIHWKYQDSYKVHSYYKGSDHLESQDPRYANRTSLFYNEIQNGNASLFFRRVSLLDEGIYTCYVGTAIQVITNKVVL

SEQ ID NO: 6474 - protein, 145 aa, Homo Sapiens
MKAQTALSFFLILITSLSGSQGIFPLAFFIYVPMNEQIVIGRLDEDIILPSSFERGSEVVIHWKYQDSYKVHSYYKGSDHLESQDPRYANRTSLFYNEIQNGNASLFFRRVSLLDEGIYTCYVGTAIQVITNKVVLKVGVFLTPV

SEQ ID NO: 6475 - protein, 414 aa, Homo Sapiens
MKAQTALSFFLILITSLSGSQGIFPLAFFIYVPMNEQIVIGRLDEDIILPSSFERGSEVVIHWKYQDSYKVHSYYKGSDHLESQDPRYANRTSLFYNEIQNGNASLFFRRVSLLDEGIYTCYVGTAIQVITNKVVLKVGVFLTPVMKYEKRNTNSFLICSVLSVYPRPIITWKMDNTPISENNMEETGSLDSFSINSPLNITGSNSSYECTIENSLLKQTWTGRWTMKDGLHKMQSEHVSLSCQPVNDYFSPNQDFKVTWSRMKSGTFSVLAYYLSSSQNTIINESRFSWNKELINQSDFSMNLMDLNLSDSGEYLCNISSDEYTLLTIHTVHVEPSQETASHNKGLWILVPSAILAAFLLIWSVKCCRAQLEARRSRHPADGAQQERCCVPPGERCPSAPDNGEENVPLSGKV

SEQ ID NO: 6476 - protein, 414 aa, Homo Sapiens; identical to SEQ ID NO: 6475

SEQ ID NO: 6477 - protein, 397 aa, Homo Sapiens
MKAQTALSFFLILITSLSGSQGIFPLAFFIYVPMNEQIVIGRLDEDIILPSSFERGSEVVIHWKYQDSYKVHSYYKGSDHLESQDPRYANRTSLFYNEIQNGNASLFFRRVSLLDEGIYTCYVGTAIQVITNKVVLKVGVFLTPVMKYEKRNTNSFLICSVLSVYPRPIITWKMDNTPISENNMEETGSLDSFSINSPLNITGSNSSYECTIENSLLKQTWTGRWTMKDGLHKMQSEHVSLSCQPVNDYFSPNQDFKVTWSRMKSGTFSVLAYYLSSSQNTIINESRFSWNKELINQSDFSMNLMDLNLSDSGEYLCNISSDEYTLLTIHTVHVEPSQETASHNKGLWILVPSAILAAFLLIWSVKCCRERCCVPPGERCPSAPDNGEENVPLSGKV

SEQ ID NO: 6478 - protein, 414 aa, Homo Sapiens; identical to SEQ ID NO: 6475

SEQ ID NO: 6479 - protein, 414 aa, Homo Sapiens; identical to SEQ ID NO: 6475

SEQ ID NO: 6480 - protein, 128 aa, Homo Sapiens
MNEQIVIGRLDEDIILPSSFERGSEVVIHWKYQDSYKVHSYYKGSDHLESQDPRYANRTSLFYNEIQNGNASLFFRRVSLLDEGIYTCYVGTAIQVITNKVVLKVGVFLTPVMKYEKRNTNSFLICSV

SEQ ID NO: 6481 - protein, 350 aa, Homo Sapiens
MVMWNILKPRTHLLCMTNMFCTRHEGTDSTVFLPHSHNISEWISRRVSLLDEGIYTCYVGTAIQVITNKVVLKVGVFLTPVMKYEKRNTNSFLICSVLSVYPRPIITWKMDNTPISENNMEETGSLDSFSINSPLNITGSNSSYECTIENSLLKQTWTGRWTMKDGLHKMQSEHVSLSCQPVNDYFSPNQDFKVTWSRMKSGTFSVLAYYLSSSQNTIINESRFSWNKELINQSDFSMNLMDLNLSDSGEYLCNISSDEYTLLTIHTVHVEPSQETASHNKGLWILVPSAILAAFLLIWSVKCCRAQLEARRSRHPADGAQQERCCVPPGERCPSAPDNGEENVPLSGKV

SEQ ID NO: 6482 - protein, 328 aa, Homo Sapiens
  misc_feature (1)..(1): Xaa can be any naturally occurring amino acid
XIQNGNASLFFRRVSLLDEGIYTCYVGTAIQVITNKVVLKVGVFLTPVMKYEKRNTNSFLICSVLSVYPRPIITWKMDNTPISENNMEETGSLDSFSINSPLNITGSNSSYECTIENSLLKQTWTGRWTMKDGLHKMQSEHVSLSCQPVNDYFSPNQDFKVTWSRMKSGTFSVLAYYLSSSQNTIINESRFSWNKELINQSDFSMNLMDLNLSDSGEYLCNISSDEYTLLTIHTVHVEPSQETASHNKGLWILVPSAILAAFLLIWSVKCCRAQLEARRSRHPADGAQQERCCVPPGERCPSAPDNGEENVVRHYFLYQTIYSIKMLL

SEQ ID NO: 6483 - protein, 39 aa, Homo Sapiens
MAASLRLLGAASGLRYWSRRLRPAAGSFAAGSIFPSRCC

SEQ ID NO: 6484 - protein, 336 aa, Homo Sapiens
MAASLRLLGAASGLRYWSRRLRPAAGSFAAVCSRSVASKTPVGFIGLGNMGNPMAKNLMKHGYPLIIYDVFPDACKEFQDAGEQVVSSPADVAEKADRIITMLPTSINAIEAYSGANGILKKVKKGSLLIDSSTIDPAVSKELAKEVEKMGAVFMDAPVSGGVGAARSGNLTFMVGGVEDEFAAAQELLGCMGSNVVYCGAVGTGQAAKICNNMLLAISMIGTAEAMNLGIRLGLDPKLLAKILNMSSGRCWSSDTYNPVPGVMDGVPSANNYQGGFGTTLMAKDLGLAQDSATSTKSPILLGSLAHQIYRMMCAKGYSKKDFSSVFQFLREEETF

SEQ ID NO: 6485 - protein, 206 aa, Homo Sapiens
  misc_feature (1)..(1): Xaa can be any naturally occurring amino acid
XELPHTLKLPGLPLFPNKFLISLVLLILVSSPADVAEKADRIITMLPTSINAIEAYSGANGILKKVKKGSLLIDSSTIDPAVSKELAKEVEKMGAVFMDAPVSGGVGAARSGNLTFMVGGVEDEFAAAQELLGCMGSNVVYCGAVGTGQAAKICNNMLLAISMIGTAEAMNLGIRLGLDPKLLAKILNMSSGRCWSSDTYNPVPGV

SEQ ID NO: 6486 - protein, 163 aa, Homo Sapiens
MAAAVVLAAGLRAARRAVAATGVRGGQVRGAAGVTDGNEVAKAQQATPGGAAPTIFSRILDKSLPADILYEDQQCLVFRDVAPQAPVHFLVIPKKPIPRISQAEEEDQQLLGHLLLVAKQTAKAEGLGDGYRLVINDGKLGAQSVYHLHIHVLGGRQLQWPPG

SEQ ID NO: 6487 - protein, 365 aa, Homo Sapiens
MAVMAPRTLLLLLSGALALTQTWAGSHSMRYFFTSVSRPGRGEPRFIAVGYVDDTQFVRFDSDAASQRMEPRAPWIEQEGPEYWDQETRNVKAQSQTDRVDLGTLRGYYNQSEAGSHTIQIMYGCDVGSDGRFLRGYRQDAYDGKDYIALNEDLRSWTAADMAAQITKRKWEAAHEAEQLRAYLDGTCVEWLRRYLENGKETLQRTDPPKTHMTHHPISDHEATLRCWALGFYPAEITLTWQRDGEDQTQDTELVETRPAGDGTFQKWAAVVVPSGEEQRYTCHVQHEGLPKPLTLRWELSSQPTIPIVGIIAGLVLLGAVITGAVVAAVMWRRKSSDRKGGSYTQAASSDSAQGSDVSLTACKV

SEQ ID NO: 6488 - protein, 299 aa, Homo Sapiens
MAVMAPRTLLLLLSGALALTQTWAGSHSMRYFFTSVSRPGRGEPRFIAVGYVDDTQFVRFDSDAASQRMEPRAPWIEQEGPEYWDQETRNVKAQSQTDRVDLGTLRGYYNQSEAGSHTIQIMYGCDVGSDGRFLRGYRQDAYDGKDYIALNEDLRSWTAADMAAQITKRKWEAAHEAEQLRAYLDGTCVEWLRRYLENGKETLQRTDPPKTHMTHHPISDHEATLRCWALGFYPAEITLTWQRDGEDQTQDTELVETRPAGDGTFQKWAAVVVPSGEEQRYTCHVQHEGLPKPLTLRWV

SEQ ID NO: 6489 - protein, 365 aa, Homo Sapiens; identical to SEQ ID NO: 6487

SEQ ID NO: 6490 - protein, 371 aa, Homo Sapiens
MAVMAPRTLLLLLSGALALTQTWAGSHSMRYFFTSVSRPGRGEPRFIAVGYVDDTQFVRFDSDAASQRMEPRAPWIEQEGPEYWDQETRNVKAQSQTDRVDLGTLRGYYNQSEAGSHTIQIMYGCDVGSDGRFLRGYRQDAYDGKDYIALNEDLRSWTAADMAAQITKRKWEAAHEAEQLRAYLDGTCVEWLRRYLENGKETLQRTDPPKTHMTHHPISDHEATLRCWALGFYPAEITLTWQRDGEDQTQDTELVETRPAGDGTFQKWAAVVVPSGEEQRYTCHVQHEGLPKPLTLRWELSSQPTIPIVGIIAGLVLLGAVITGAVVAAVMWRRKSSGGEGVKDRKGGSYTQAASSDSAQGSDVSLTACKV

SEQ ID NO: 6491 - protein, 325 aa, Homo Sapiens
MAVMAPRTLLLLLSGALALTQTWAGSHSMRYFFTSVSRPGRGEPRFIAVGYVDDTQFVRFDSDAASQRMEPRAPWIEQEGPEYWDQETRNVKAQSQTDRVDLGTLRGYYNQSEAGSHTIQIMYGCDVGSDGRFLRGYRQDAYDGKDYIALNEDLRSWTAADMAAQITKRKWEAAHEAEQLRAYLDGTCVEWLRRYLENGKETLQRTDPPKTHMTHHPISDHEATLRCWALGFYPAEITLTWQRDGEDQTQDTELVETRPAGDGTFQKWAAVVVPSGEEQRYTCHVQHEGLPKPLTLRWDRKGGSYTQAASSDSAQGSDVSLTACK

SEQ ID NO: 6492 - protein, 131 aa, Homo Sapiens
MRVMAPRALLLLLSGGLALTETWACSHSMRYFDTAVSRPGRGEPRFISVGYVDDTQFVRFDSDAASPRGEPRAPWVEQEGPEYWDRETQKYKRQAQADRVSLRNLRGYYNQSEDEDVWLRPGARRAPPPRV

SEQ ID NO: 6493 - protein, 366 aa, Homo Sapiens
MRVMAPRALLLLLSGGLALTETWACSHSMRYFDTAVSRPGRGEPRFISVGYVDDTQFVRFDSDAASPRGEPRAPWVEQEGPEYWDRETQKYKRQAQADRVSLRNLRGYYNQSEDGSHTLQRMSGCDLGPDGRLLRGYDQSAYDGKDYIALNEDLRSWTAADTAAQITQRKLEAARAAEQLRAYLEGTCVEWLRRYLENGKETLQRAEPPKTHVTHHPLSDHEATLRCWALGFYPAEITLTWQRDGEDQTQDTELVETRPAGDGTFQKWAAVVVPSGQEQRYTCHMQHEGLQEPLTLSWEPSSQPTIPIMGIVAGLAVLVVLAVLGAVVTAMMCRRKSSGGKGGSCSQAACSNSAQGSDESLITCKA

SEQ ID NO: 6494 - protein, 372 aa, Homo Sapiens
MRVMAPRALLLLLSGGLALTETWACSHSMRYFDTAVSRPGRGEPRFISVGYVDDTQFVRFDSDAASPRGEPRAPWVEQEGPEYWDRETQKYKRQAQADRVSLRNLRGYYNQSEDGSHTLQRMSGCDLGPDGRLLRGYDQSAYDGKDYIALNEDLRSWTAADTAAQITQRKLEAARAAEQLRAYLEGTCVEWLRRYLENGKETLQRAEPPKTHVTHHPLSDHEATLRCWALGFYPAEITLTWQRDGEDQTQDTELVETRPAGDGTFQKWAAVVVPSGQEQRYTCHMQHEGLQEPLTLSWEPSSQPTIPIMGIVAGLAVLVVLAVLGAVVTAMMCRRKSSGHFLPTGGKGGSCSQAACSNSAQGSDESLITCKA

SEQ ID NO: 6495 - protein, 244 aa, Homo Sapiens
MSGCDLGPDGRLLRGYDQSAYDGKDYIALNEDLRSWTAADTAAQITQRKLEAARAAEQLRAYLEGTCVEWLRRYLENGKETLQRAEPPKTHVTHHPLSDHEATLRCWALGFYPAEITLTWQRDGEDQTQDTELVETRPAGDGTFQKWAAVVVPSGQEQRYTCHMQHEGLQEPLTLSWEPSSQPTIPIMGIVAGLAVLVVLAVLGAVVTAMMCRRKSSGGKGGSCSQAACSNSAQGSDESLITCK

SEQ ID NO: 6496 - protein, 261 aa, Homo Sapiens
  misc_feature (1)..(1): Xaa can be any naturally occurring amino acid
XRVMAPRALLLLLSGGLALTETWACSHSMRYFDTAVSRPGRGEPRFISVGYVDDTQFVRFDSDAASPRGEPRAPWVEQEGPEYWDRETQKYKRQAQADRVSLRNLRGYYNQSEDGSHTLQRMSGCDLGPDGRLLRGYDQSAYDGKDYIALNEDLRSWTAADTAAQITQRKLEAARAAEQLRAYLEGTCVEWLRRYLENGKETLQRAEPPKTHVTHHPLSDHEASRRWNLPEVGSCGGAFWTRAEIHVPYAARGAARAPHPE

SEQ ID NO: 6497 - protein, 250 aa, Homo Sapiens
MALRAGLVLGFHTLMTLLSPQEAGATKADHMGSYGPAFYQSYGASGQFTHEFDEEQLFSVDLKKSEAVWRLPEFGDFARFDPQGGLAGIAAIKAHLDILVERSNRSRAINVPPRVTVLPKSRVELGQPNILICIVDNIFPPVINITWLRNGQTVTEGVAQTSFYSQPDHLFRKFHYLPFVPSAEDVYDCQVEHWGLDAPLLRHWELQVPIPPPDAMETLVCALGLAIGLVGFLVGTVLIIMGTYVSSVPR

SEQ ID NO: 6498 - protein, 86 aa, Homo Sapiens
MALRAGLVLGFHTLMTLLSPQEAGATKGRAGRHRRNQSPSGHPGGALQPQQSHQRASTGDRAPQVSGGAGPAQHPHLHRGQHLPPC

SEQ ID NO: 6499 - protein, 23 aa, Homo Sapiens
MRPEDRMFHIRAVILRALSLAFL

SEQ ID NO: 6500 - protein, 209 aa, Homo Sapiens
MRPEDRMFHIRAVILRALSLAFLLSLRGAGAIKADHVSTYAAFVQTHRPTGEFMFEFDEDEMFYVDLDKKETVWHLEEFGQAFSFEAQGGLANIAILNNNLNTLIQRSNHTQATNDPPEVTVFPKEPVELGQPNTLICHIDKFFPPVLNVTWLCNGELVTEGVAESLFLPRTDYSFHKFHYLTFVPSAEDFYDCRVEHWGLDQPLLKHW

SEQ ID NO: 6501 - protein, 260 aa, Homo Sapiens
MRPEDRMFHIRAVILRALSLAFLLSLRGAGAIKADHVSTYAAFVQTHRPTGEFMFEFDEDEMFYVDLDKKETVWHLEEFGQAFSFEAQGGLANIAILNNNLNTLIQRSNHTQATNDPPEVTVFPKEPVELGQPNTLICHIDKFFPPVLNVTWLCNGELVTEGVAESLFLPRTDYSFHKFHYLTFVPSAEDFYDCRVEHWGLDQPLLKHWEAQEPIQMPETTETVLCALGLVLGLVGIIVGTVLIIKSLRSGHDPRAQGTL

SEQ ID NO: 6502 - protein, 128 aa, Homo Sapiens
  misc_feature (1)..(1): Xaa can be any naturally occurring amino acid
XNTLICHIDKFFPPVLNVTWLCNGELVTEGVAESLFLPRTDYSFHKFHYLTFVPSAEDFYDCRVEHWGLDQPLLKHWEAQEPIQMPETTETVLCALGLVLGLVGIIVGTVLIIKSLRSGHDPRAQGTL

SEQ ID NO: 6503 - protein, 24 aa, Homo Sapiens
MILNKALLLGALALTTVMSPCGGE

SEQ ID NO: 6504 - protein, 255 aa, Homo Sapiens
MILNKALLLGALALTTVMSPCGGEDIVADHVASCGVNLYQFYGPSGQYTHEFDGDEQFYVDLERKETAWRWPEFSKFGGFDPQGALRNMAVAKHNLNIMIKRYNSTAATNEVPEVTVFSKSPVTLGQPNTLICLVDNIFPPVVNITWLSNGQSVTEGVSETSFLSKSDHSFFKISYLTFLPSADEIYDCKVEHWGLDQPLLKHWEPEIPAPMSELTETVVCALGLSVGLMGIVVGTVFIIQGLRSVGASRHQGPL

SEQ ID NO: 6505 - protein, 255 aa, Homo Sapiens; identical to SEQ ID NO: 6504

SEQ ID NO: 6506 - protein, 255 aa, Homo Sapiens; identical to SEQ ID NO: 6504

SEQ ID NO: 6507 - protein, 214 aa, Homo Sapiens
MILNKALLLGALALTTVMSPCGGEDIVADHVASCGVNLYQFYGPSGQYTHEFDGDEQFYVDLERKETAWRWPEFSKFGGFDPQGALRNMAVAKHNLNIMIKRYNSTAATNEVPEVTVFSKSPVTLGQPNTLICLVDNIFPPVVNITWLSNGQSVTEGVSETSFLSKSDHSFFKISYLTFLPSADEIYDCKVEHWGLDQPLLKHWGASPSTGAEE

SEQ ID NO: 6508 - protein, 53 aa, Homo Sapiens
MILNKALLLGALALTTVMSPCGGEDIVGSISDSLLLYRDGQWVCKTKVEKSDS

SEQ ID NO: 6509 - protein, 136 aa, Homo Sapiens
MSWKKALRIPGDLRVATVTLMLAMLSSLLAEGRDSPEDFVFQFKGMCYFTNGTERVRLVTRYIYNREEYARFDSDVGVYRAVTPQGRPDAEYWNSQKEVLEGTRAELDTVCRHNYEVAFRGILQRRGMVTGLSRSW

SEQ ID NO: 6510 - protein, 269 aa, Homo Sapiens
MSWKKALRIPGDLRVATVTLMLAMLSSLLAEGRDSPEDFVFQFKGMCYFTNGTERVRLVTRYIYNREEYARFDSDVGVYRAVTPQGRPDAEYWNSQKEVLEGTRAELDTVCRHNYEVAFRGILQRRVEPTVTISPSRTEALNHHNLLVCSVTDFYPGQIKVRWFRNDQEETAGVVSTPLIRNGDWTFQILVMLEMTPQRGDVYTCHVEHPSLQSPITVEWRAQSESAQSKMLSGVGGFVLGLIFLGLGLIIRQRSQKGPQGPPPAGLLH

SEQ ID NO: 6511 - protein, 261 aa, Homo Sapiens
MSWKKALRIPGDLRVATVTLMLAMLSSLLAEGRDSPEDFVFQFKGMCYFTNGTERVRLVTRYIYNREEYARFDSDVGVYRAVTPQGRPDAEYWNSQKEVLEGTRAELDTVCRHNYEVAFRGILQRRVEPTVTISPSRTEALNHHNLLVCSVTDFYPGQIKVRWFRNDQEETAGVVSTPLIRNGDWTFQILVMLEMTPQRGDVYTCHVEHPSLQSPITVEWRAQSESAQSKMLSGVGGFVLGLIFLGLGLIIRQRSQKGLLH

SEQ ID NO: 6512 - protein, 261 aa, Homo Sapiens; identical to SEQ ID NO: 6511

SEQ ID NO: 6513 - protein, 224 aa, Homo Sapiens
MSWKKALRIPGDLRVATVTLMLAMLSSLLAEGRDSPEDFVFQFKGMCYFTNGTERVRLVTRYIYNREEYARFDSDVGVYRAVTPQGRPDAEYWNSQKEVLEGTRAELDTVCRHNYEVAFRGILQRRVEPTVTISPSRTEALNHHNLLVCSVTDFYPGQIKVRWFRNDQEETAGVVSTPLIRNGDWTFQILVMLEMTPQRGDVYTCHVEHPSLQSPITVEWRLLH

SEQ ID NO: 6514 - protein, 134 aa, Homo Sapiens
MSWKKALRIPGDLRVATVTLMLAMLSSLLAEGRDSPVEPTVTISPSRTEALNHHNLLVCSVTDFYPGQIKVRWFRNDQEETAGVVSTPLIRNGDWTFQILVMLEMTPQRGDVYTCHVEHPSLQSPITVEWRLLH

SEQ ID NO: 6515 - protein, 275 aa, Homo Sapiens
MALQIPGGFWAAAVTVMLVMLSTPVAEARDFPKDFLVQFKGMCYFTNGTERVRGVARYIYNREEYGRFDSDVGEFQAVTELGRSIEDWNNYKDFLEQERAAVDKVCRHNYEAELRTTLQRQVEPTVTISPSRTEALNHHNLLVCSVTDFYPAQIKVRWFRNDQEETAGVVSTSLIRNGDWTFQILVMLEITPQRGDIYTCQVEHPSLQSPITVEWRAQSESAQSKMLSGIGGFVLGLIFLGLGLIIRHRGQKGPRGPPPAGNISAMIQSGERAQA

SEQ ID NO: 6516 - protein, 264 aa, Homo Sapiens
MALQIPGGFWAAAVTVMLVMLSTPVAEARDFPKDFLVQFKGMCYFTNGTERVRGVARYIYNREEYGRFDSDVGEFQAVTELGRSIEDWNNYKDFLEQERAAVDKVCRHNYEAELRTTLQRQVEPTVTISPSRTEALNHHNLLVCSVTDFYPAQIKVRWFRNDQEETAGVVSTSLIRNGDWTFQILVMLEITPQRGDIYTCQVEHPSLQSPITVEWRAQSESAQSKMLSGIGGFVLGLIFLGLGLIIRHRGQKGPRGPPPAGLLH

SEQ ID NO: 6517 - protein, 227 aa, Homo Sapiens
MALQIPGGFWAAAVTVMLVMLSTPVAEARDFPKDFLVQFKGMCYFTNGTERVRGVARYIYNREEYGRFDSDVGEFQAVTELGRSIEDWNNYKDFLEQERAAVDKVCRHNYEAELRTTLQRQVEPTVTISPSRTEALNHHNLLVCSVTDFYPAQIKVRWFRNDQEETAGVVSTSLIRNGDWTFQILVMLEITPQRGDIYTCQVEHPSLQSPITVEWRPRGPPPAGLLH

SEQ ID NO: 6518 - protein, 218 aa, Homo Sapiens
  misc_feature (1)..(1): Xaa can be any naturally occurring amino acid
XLQIPGGFWAAAVTVMLVMLSTPVAEARDFPKDFLVQFKGMCYFTNGTERVRGVARYIYNREEYGRFDSDVGEFQAVTELGRSIEDWNNYKDFLEQERAAVDKVCRHNYEAELRTTLQRQVEPTVTISPSRTEALNHHNLLVCSVTDFYPAQIKVRWFRNDQEETAGVVSTSLIRNGDWTFQILVMLEITPQRGDIYTCQVEHPSLQSPITVEWRLLH

SEQ ID NO: 6519 - protein, 240 aa, Homo Sapiens
AIGSFHCGCEPGYQLKGRKCMDVNECRQNVCRPDQHCKNTRGGYKCIDLCPNGMTKAENGTCIDIDECKDGTHQCRYNQICENTRGSYRCVCPRGYRSQGVGRPCMDIDECENTDACQHECKNTFGSYQCICPPGYQLTHNGKTCQDIDECLEQNVHCGPNRMCFNMRGSYQCIDTPCPPNYQRDPVSGFCLKNCPPNDLECALSPYALEYKLVSLPFGIATNQDLIRLVAYTQDGVMHP

SEQ ID NO: 6520 - protein, 5635 aa, Homo Sapiens
MISWEVVHTVFLFALLYSSLAQDASPQSEIRAEEIPEGASTLAFVFDVTGSMYDDLVQVIEGASKILETSLKRPKRPLFNFALVPFHDPEIGPVTITTDPKKFQYELRELYVQGGGDCPEMSIGAIKIALEISLPGSFIYVFTDARSKDYRLTHEVLQLIQQKQSQVVFVLTGDCDDRTHIGYKVYEEIASTSSGQVFHLDKKQVNEVLKWVEEAVQASKVHLLSTDHLEQAVNTWRIPFDPSLKEVTVSLSGPSPMIEIRNPLGKLIKKGFGLHELLNIHNSAKVVNVKEPEAGMWTVKTSSSGRHSVRITGLSTIDFRAGFSRKPTLDFKKTVSRPVQGIPTYVLLNTSGISTPARIDLLELLSISGSSLKTIPVKYYPHRKPYGIWNISDFVPPNEAFFLKVTGYDKDDYLFQRVSSVSFSSIVPDAPKVTMPEKTPGYYLQPGQIPCSVDSLLPFTLSFVRNGVTLGVDQYLKESASVNLDIAKVTLSDEGFYECIAVSSAGTGRAQTFFDVSEPPPVIQVPNNVTVTPGERAVLTCLIISAVDYNLTWQRNDRDVRLAEPARIRTLANLSLELKSVKFNDAGEYHCMVSSEGGSSAASVFLTVQEPPKVTVMPKNQSFTGGSEVSIMCSATGYPKPKIAWTVNDMFIVGSHRYRMTSDGTLFIKNAAPKDAGIYGCLASNSAGTDKQNSTLRYIEAPKLMVVQSELLVALGDITVMECKTSGIPPPQVKWFKGDLELRPSTFLIIDPLLGLLKIQETQDLDAGDYTCVAINEAGRATGKITLDVGSPPVFIQEPADVSMEIGSNVTLPCYVQGYPEPTIKWRRLDNMPIFSRPFSVSSISQLRTGALFILNLWASDKGTYICEAENQFGKIQSETTVTVTGLVAPLIGISPSVANVIEGQQLTLPCTLLAGNPIPERRWIKNSAMLLQNPYITVRSDGSLHIERVQLQDGGEYTCVASNVAGTNNKTTSVVVHVLPTIQHGQQILSTIEGIPVTLPCKASGNPKPSVIWSKKGELISTSSAKFSAGADGSLYVVSPGGEESGEYVCTATNTAGYAKRKVQLTVYVRPRVFGDQRGLSQDKPVEISVLAGEEVTLPCEVKSLPPPIITWAKETQLISPFSPRHTFLPSGSMKITETRTSDSGMYLCVATNIAGNVTQAVKLNVHVPPKIQRGPKHLKVQVGQRVDIPCNAQGTPLPVITWSKGGSTMLVDGEHHVSNPDGTLSIDQATPSDAGIYTCVATNIAGTDETEITLHVQEPPTVEDLEPPYNTTFQERVANQRIEFPCPAKGTPKPTIKWLHNGRELTGREPGISILEDGTLLVIASVTPYDNGEYICVAVNEAGTTERKYNLKVHVPPVIKDKEQVTNVSVLLNQLTNLFCEVEGTPSPIIMWYKDNVQVTESSTIQTVNNGKILKLFRATPEDAGRYSCKAINIAGTSQKYFNIDVLVPPTIIGTNFPNEVSVVLNRDVALECQVKGTPFPDIHWFKDGKPLFLGDPNVELLDRGQVLHLKNARRNDKGRYQCTVSNAAGKQAKDIKLTIYIPPSIKGGNVTTDISVLINSLIKLECETRGLPMPAITWYKDGQPIMSSSQALYIDKGQYLHIPRAQVSDSATYTCHVANVAGTAEKSFHVDVYVPPMIEGNLATPLNKQVVIAHSLTLECKAAGNPSPILTWLKDGVPVKANDNIRIEAGGKKLEIMSAQEIDRGQYICVATSVAGEKEIKYEVDVLVPPAIEGGDETSYFIVMVNNLLELDCHVTGSPPPTIMWLKDGQLIDERDGFKILLNGRKLVIAQAQVSNTGLYRCMAANTAGDHKKEFEVTVHVPPTIKSSGLSERVVVKYKPVALQCIANGIPNPSITWLKDDQPVNTAQGNLKIQSSGRVLQIAKTLLEDAGRYTCVATNAAGETQQHIQLHVHEPPSLEDAGKMLNETVLVSNPVQLECKAAGNPVPVITWYKDNRLLSGSTSMTFLNRGQIIDIESAQISDAGIYKCVAINSAGATELFYSLQVHVAPSISGSNNMVAVVVNNPVRLECEARGIPAPSLTWLKDGSPVSSFSNGLQVLSGGRILALTSAQISDTGRYTCVAVNAAGEKQRDIDLRVYVPPNIMGEEQNVSVLISQAVELLCQSDAIPPPTLTWLKDGHPLLKKPGLSISENRSVLKIEDAQVQDTGRYTCEATNVAGKTEKNYNVNIWVPPNIGGSDELTQLTVIEGNLISLLCESSGIPPPNLIWKKKGSPVLTDSMGRVRILSGGRQLQISIAEKSDAALYSCVASNVAGTAKKEYNLQVYIRPTITNSGSHPTEIIVTRGKSISLECEVQGIPPPTVTWMKDGHPLIKAKGVEILDEGHILQLKNIHVSDTGRYVCVAVNVAGMTDKKYDLSVHAPPSIIGNHRSPENISVVEKNSVSLTCEASGIPLPSITWFKDGWPVSLSNSVRILSGGRMLRLMQTTMEDAGQYTCVVRNAAGEERKIFGLSVLVPPHIVGENTLEDVKVKEKQSVTLTCEVTGNPVPEITWHKDGQPLQEDEAHHIISGGRFLQITNVQVPHTGRYTCLASSPAGHKSRSFSLNVFVSPTIAGVGSDGNPEDVTVILNSPTSLVCEAYSYPPATITWFKDGTPLESNRNIRILPGGRTLQILNAQEDNAGRYSCVATNEAGEMIKHYEVKVYIPPIINKGDLWGPGLSPKEVKIKVNNTLTLECEAYAIPSASLSWYKDGQPLKSDDHVNIAANGHTLQIKEAQISDTGRYTCVASNIAGEDELDFDVNIQVPPSFQKLWEIGNMLDTGRNGEAKDVIINNPISLYCETNAAPPPTLTWYKDGHPLTSSDKVLILPGGRVLQIPRAKVEDAGRYTCVAVNEAGEDSLQYDVRVLVPPIIKGANSDLPEEVTVLVNKSALIECLSSGSPAPRNSWQKDGQPLLEDDHHKFLSNGRILQILNTQITDIGRYVCVAENTAGSAKKYFNLNVHVPPSVIGPKSENLTVVVNNFISLTCEVSGFPPPDLSWLKNEQPIKLNTNTLIVPGGRTLQIIRAKVSDGGEYTCIAINQAGESKKKFSLTVYVPPSIKDHDSESLSVVNVREGTSVSLECESNAVPPPVITWYKNGRMITESTHVEILADGQMLHIKKAEVSDTGQYVCRAINVAGRDDKNFHLNVYVPPSIEGPEREVIVETISNPVTLTCDATGIPPPTIAWLKNHKRIENSDSLEVRILSGGSKLQIARSQHSDSGNYTCIASNMEGKAQKYYFLSIQVPPSVAGAEIPSDVSVLLGENVELVCNANGIPTPLIQWLKDGKPIASGETERIRVSANGSTLNIYGALTSDTGKYTCVATNPAGEEDRIFNLNVYVTPTIRGNKDEAEKLMTLVDTSINIECRATGTPPPQINWLKNGLPLPLSSHIRLLAAGQVIRIVRAQVSDVAVYTCVASNRAGVDNKHYNLQVFAPPNMDNSMGTEEITVLKGSSTSMACITDGTPAPSMAWLRDGQPLGLDAHLTVSTHGMVLQLLKAETEDSGKYTCIASNEAGEVSKHFILKVLEPPHINGSEEHEEISVIVNNPLELTCIASGIPAPKMTWMKDGRPLPQTDQVQTLGGGEVLRISTAQVEDTGRYTCLASSPAGDDDKEYLVRVHVPPNIAGTDEPRDITVLRNRQVTLECKSDAVPPPVITWLRNGERLQATPRVRILSGGRYLQINNADLGDTANYTCVASNIAGKTTREFILTVNVPPNIKGGPQSLVILLNKSTVLECIAEGVPTPRITWRKDGAVLAGNHARYSILENGFLHIQSAHVTDTGRYLCMATNAAGTDRRRIDLQVHVPPSIAPGPTNMTVIVNVQTTLACEATGIPKPSINWRKNGHLLNVDQNQNSYRLLSSGSLVIISPSVDDTATYECTVTNGAGDDKRTVDLTVQVPPSIADEPTDFLVTKHAPAVITCTASGVPFPSIHWTKNGIRLLPRGDGYRILSSGAIEILATQLNHAGRYTCVARNAAGSAHRHVTLHVHEPPVIQPQPSELHVILNNPILLPCEATGTPSPFITWQKEGINVNTSGRNHAVLPSGGLQISRAVREDAGTYMCVAQNPAGTALGKIKLNVQVPPVISPHLKEYVIAVDKPITLSCEADGLPPPDITWHKDGRAIVESIRQRVLSSGSLQIAFVQPGDAGHYTCMAANVAGSSSTSTKLTVHVPPRIRSTEGHYTVNENSQAILPCVADGIPTPAINWKKDNVLLANLLGKYTAEPYGELILENVVLEDSGFYTCVANNAAGEDTHTVSLTVHVLPTFTELPGDVSLNKGEQLRLSCKATGIPLPKLTWTFNNNIIPAHFDSVNGHSELVIERVSKEDSGTYVCTAENSVGFVKAIGFVYVKEPPVFKGDYPSNWIEPLGGNAILNCEVKGDPTPTIQWNRKGVDIEISHRIRQLGNGSLAIYGTVNEDAGDYTCVATNEAGVVERSMSLTLQSPPIITLEPVETVINAGGKIILNCQATGEPQPTITWSRQGHSISWDDRVNVLSNNSLYIADAQKEDTSEFECVARNLMGSVLVRVPVIVQVHGGFSQWSAWRACSVTCGKGIQKRSRLCNQPLPANGGKPCQGSDLEMRNCQNKPCPVDGSWSEWSLWEECTRSCGRGNQTRTRTCNNPSVQHGGRPCEGNAVEIIMCNIRPCPVHGAWSAWQPWGTCSESCGKGTQTRARLCNNPPPAFGGSYCDGAETQMQVCNERNCPIHGKWATWASWSACSVSCGGGARQRTRGCSDPVPQYGGRKCEGSDVQSDFCNSDPCPTHGNWSPWSGWGTCSRTCNGGQMRRYRTCDNPPPSNGGRACGGPDSQIQRCNTDMCPVDGSWGSWHSWSQCSASCGGGEKTRKRLCDHPVPVKGGRPCPGDTTQVTRCNVQACPGGPQRARGSVIGNINDVEFGIAFLNATITDSPNSDTRIIRAKITNVPRSLGSAMRKIVSILNPIYWTTAKEIGEAVNGFTLTNAVFKRETQVEFATGEILQMSHIARGLDSDGSLLLDIVVSGYVLQLQSPAEVTVKDYTEDYIQTGPGQLYAYSTRLFTIDGISIPYTWNHTVFYDQAQGRMPFLVETLHASSVESDYNQIEETLGFKIHASISKGDRSNQCPSGFTLDSVGPFCADEDECAAGNPCSHSCHNAMGTYYCSCPKGLTIAADGRTCQDIDECALGRHTCHAGQDCDNTIGSYRCVVRCGSGFRRTSDGLSCQDINECQESSPCHQRCFNAIGSFHCGCEPGYQLKGRKCMDVNECRQNVCRPDQHCKNTRGGYKCIDLCPNGMTKAENGTCIDIDECKDGTHQCRYNQICENTRGSYRCVCPRGYRSQGVGRPCMDINECEQVPKPCAHQCSNTPGSFKCICPPGQHLLGDGKSCAGLERLPNYGTQYSSYNLARFSPVRNNYQPQQHYRQYSHLYSSYSEYRNSRTSLSRTRRTIRKTCPEGSEASHDTCVDIDECENTDACQHECKNTFGSYQCICPPGYQLTHNGKTCQDIDECLEQNVHCGPNRMCFNMRGSYQCIDTPCPPNYQRDPVSGFCLKNCPPNDLECALSPYALEYKLVSLPFGIATNQDLIRLVAYTQDGVMHPRTTFLMVDEEQTVPFALRDENLKGVVYTTRPLREAETYRMRVRASSYSANGTIEYQTTFIVYIAVSAYPY

SEQ ID NO: 6521 - protein, 595 aa, Homo Sapiens
MILAPEGSSSGKLRIPAAQERDAGTYTCRAVNELGDASAEIQLAVGHAPQLTELPRDVTVELGRSALLACRATGRPPPTVTWRRGDGQPLGLRLGAGRGSRSRQPDSGVLFFESVAPEDQAPYVCEARNVFGKVQAEARLIVTGHAPPQIASSAPTVRVLEGQPVSLPCIVLAGRPLPERHWLKDGRPLPPGSRHSIRADGSLHLDRALQEHAGRYSCVATNTAGSQHRDVELVVQVPPRIHPTATHHITNEGVAASLPCVASGVPAPTITWTKETNALTSRGPHYNVSKEGTLLIAQPSAQDAGAYVCTATNTVGFSSQEMRLSVNTKPRIHMNGSRNADVPLQVTAKAGEEVTLDCEAKGSPPPLVTWTKDSRPVPPITNRYGLLPSGSLRLAQVQVGDSGHYECTASNPAGSASHRYVLGVQGRTSWQPQSLPVPHHPACLSGLSVPLLQPTPRSVRLCHLSLRAPLPPPFATPTSCLSQACLSSSTLSLHLSPYPLRGPGDAVQRPPTTQGRAQWGLGFGRTGVRGEPMKVGLRGSLPGTRGPAGSPGCGDGKRPVRCHRAPPAGSILMPPRGPSEPLLPPLPSTRHFVHL

SEQ ID NO: 6522 - protein, 5059 aa, Homo Sapiens
MPGAPLLRLLTAVSAAVAVAVAGAPGTVMPPTTGDATLAFVFDVTGSMWDELMQVIDGASRILERSLSRRSQAIANYALVPFHDPDIGPVTLTADPTVFQRELRELYVQGGGDCPEMSVGAIKAAVEVANPGSFIYVFSDARAKDYHKKEELLRLLQLKQSQVVFVLTGDCGDRTHPGYLAYEEIAATSSGQVFHLDKQQVTEVLKWVESAIQASKVHLLSTDHEEEGEHTWRLPFDPSLKEVTISLSGPGPEIEVQDPLGRILQEDEGLNVLLNIPDSAKVVAFKPEHPGLWSIKVYSSGRHSVRITGVSNIDFRAGFSTQPLLDLNHTLEWPLQGVPISLVINSTGLKAPGRLDSVELAQSSGKPLLTLPTKPLSNGSTHQLWGGPPFHTPKERFYLKVKGKDHEGNPLLRVSGVSYSGVAPGAPLVSMAPRIHGYLHQPLLVSCSVHSALPFRLQLRRGEARLGEERHFQESGNSSWEILRASKAEEGTYECTAVSRAGTGRAKAQIVVTDPPPQLVPAPNVTVSPGETAVLSCRVLGEAPYNLTWVRDWRVLPASTGRVAQLADLSLEISGIIPTDGGRYQCVASNANGVTRASVWLLVREAPQVSIHTSSQHFSQGVEVKVSCSASGYPTPHISWSRESQALQEDSRIHVDAQGTLIIQGVAPEDAGNYSCQATNEVGTDQETVTLYYTDPPSVSAVNAVVLVAVGEEAVLVCEASGVPPPRVIWYRGGLEMILAPEGSSSGKLRIPAAQERDAGTYTCRAVNELGDASAEIQLAVGHAPQLTELPRDVTVELGRSALLACRATGRPPPTVTWRRGDGQPLGLRLGAGRGSRSRQPDSGVLFFESVAPEDQAPYVCEARNVFGKVQAEARLIVTGHAPPQIASSAPTVRVLEGQPVSLPCIVLAGRPLPERHWLKDGRPLPPGSRHSIRADGSLHLDRALQEHAGRYSCVATNTAGSQHRDVELVVQVPPRIHPTATHHITNEGVAASLPCVASGVPAPTITWTKETNALTSRGPHYNVSKEGTLLIAQPSAQDAGAYVCTATNTVGFSSQEMRLSVNTKPRIHMNGSRNADVPLQVTAKAGEEVTLDCEAKGSPPPLVTWTKDSRPVPPITNRYGLLPSGSLRLAQVQVGDSGHYECTASNPAGSASHRYVLGVQVPPQVQPGPRVLKVLVGEALDLNCVAEGNPEPQLSWSKDGVVLQGRGPQGSVHFAAIRTSDAGRYRCEASNSAGVDAWEVELRVLEPPHWGADETSGLLERVAGENASLPCPARGTPKPQVTWRKGPSSEPLHGQPGVAVLEEGSLFLASVSPADSGDYECQATNEVGSTSRRAKLVVYVPPSIREDGRKANVSGMAGQSLTLECDANGFPVPEIVWLKDAQLIPKVGGHRLLDEGQSLHFPRIQEGDSGLYSCRAENQAGTAQRDFHLLVLTPPSVLGAGAAQEVLGLAGADVELQCWTSGVPTPQVEWTKDRQPVLPGGPHLQVQEDGQVLRITGSHVGDEGRYQCVAFSPAGQQARDFQLRVHAPPTIWGSNETGEVAVMEDHLVQLLCEARGVPTPNITWFKDGALLPTSTKVVYTRGGRQLQLGRAQSSDAGVYTCKASNAVGAAEKATRLDVYVPPTIEGAGGRPYVVKAVAGRPVALECVARGHPSPTLSWHHEGLPVAESNESRLETDGSVLRLESPGEASSGLYSCVASSPAGEAVLQYSVEVQVPPQLLVAEGLGQVTTIVGQPLELPCQASGSPVPTIQWLQNGRPAEELAGVQVASQGTTLHIDHVELDHSGLFACQATNEAGTAGAEVEVSVHEFPSVSIIGGENITAPFLQPVTLQCIGDGVPTPSLRWWKDGVALAAFGGNLQIEKVDLRDEGIYTCAATNLAGESKREVALKVLVPPNIEPGPVNKAVLENASVTLECLASGVPPPDVSWFKGHQPVSSWMGVTVSVDGRVLRIEQAQLSDAGSYRCVASNVAGSTELRYGLRVNVPPRITLPPSLPGPVLVNTPVRLTCNATGAPSPTLMWLKDGNPVSPAGTPGLQVFPGGRVLTLASARASDSGRYSCVAVSAVGEDRQDVVLQVHMPPSILGEELNVSVVANESVALECQSHAMPPPVLSWWKDGRPLEPRPGVHLSADKALLQVDRADVWDAGHYTCEALNQAGHSEKHYNLNVWVAPVFPLRESHTLTVREGHPTRLSCECRGVPFPKISWRKDGQPLPGEGAGLQHVSAVGRLLYLGQAQLAQEGTYTCECSNVVGNSSQDLQLEVHVPPQIAGPREPPTQVSVVQDGVATLECNATGKPPPTVTWERDGQPVGAELGLQLQNQGQSLHVERAQAAHTGRYSCVAENLAGRAERKFELSVLVPPELIGDLDPLTNITAALHSPLTLLCEAMGIPPPAIRWFRGEEPVSPGEDTYLLAGGWMLKMTQTQEQDSGLYSCLASNEAGEARRNFSVEVLVPPSIENEDLEEVIKVLDGQTAHLMCNVTGHPQPKLTWFKDGRPLARGDAHHISPDGVLLQVLQANLSSAGHYSCIAANAVGEKTKHFQLSVLLAPTILGGAEDSADEEVTVTVNNPISLICEALAFPSPNITWMKDGAPFEASRNIQLLPGTHGLQILNAQKEDAGQYTCVVTNELGEAVKNYHVEVLIPPSISKDDPLAEVGVKEVKTKVNSTLTLECESWAVPPPTIRWYKDGQPVTPSSRLQVLGEGRLLQIQPTQVSDSGRYLCVATNVAGEDDQDFNVLIQVPPMFQKVGDFSAAFEILSREEEARGGVTEYREIVENNPAYLYCDTNAIPPPDLTWYREDQPLSAGDEVSVLQGGRVLQIPLVRAENAGRYSCKASNEVGEDWLHYELLVLTPPVILGDTEELVEEVTVNASSTVSLQCPALGNPVPTISWLQNGLPFSPSPRLQVLEDGQVLQVSTAEVADAASYMCVAENQAGSAEKLFTLRVQVPPRIAGLDLEQVTAILNSSVSLPCDVHAHPNPEVTWYKDSQALSLGEEVFLLPGTHTLQLGRARLSDSGMYTCEALNAAGRDQKLVQLSVLVPPAFRQAPRGPQDAVLVRVGDKAVLSCETDALPEPTVTWYKDGQPLVLAQRTQALRGGQRLEIQEAQVSDKGLYSCKVSNVAGEAVRTFTLTVQVPPTFENPKTETVSQVAGSPLVLTCDVSGVPAPTVTWLKDRMPVESSAVHGVVSRGGRLQLSRLQPAQAGTYTCVAENTQAEARKDFVVAVLVAPRIRSSGVAREHHVLEGQEVRLDCEADGQPPPDVAWLKDGSPLGQDMGPHLRFYLDGGSLVLKGLRASDAGAYTCVAHNPAGEDARLHTVNVLVPPTIKQGADGSGTLVSRPGELVTMVCPVRGSPPIHVSWLKDGLPLPLSQRTLLHGSGHTLRISKVQLADAGIFTCVAASPAGVADRNFTLQVQVPPVLEPVEFQNDVVVVRGSLVELPCEARGVPLPLVSWMKDGEPLLSQSLEQGPSLQLEAVGAGDSGTYSCVAVSEAGEARRHFQLTVMEPPHIEDSGQPTELSLTPGAPMELLCDAQGTPQPNITWHKDGQALTRLENNSRATRVLRVENVQVRDAGLYTCLAESPAGAIEKSFRVRVQAPPNIVGPRGPRFVVGLAPGQLVLECSVEAEPAPKITWHRDGIVLQEDAHTQFPERGRFLQLQALSTADSGDYSCTARNAAGSTSVAFRVEIHTVPTIRSGPPAVNVSVNQTALLPCQADGVPAPLVSWRKDRVPLDPRSPRFEILPEGSLRIQPVLAQDAGHYLCLASNSAGSDRQGRDLRVLALLPCEASGSPKPLVVWWKDGQKLDFRLQQGAYRLLPSNALLLTAPGPQDSAQFECVVSNEVGEAHRLYQVTVHVPPTIADDQTDFTVTMMAPVVLTCHSTGIPAPTVSWSKAGAQLGARGSGYRVSPSGALEIGQALPIHAGRYTCSARNSAGVAHKHVFLTVQASPVVKPLPSVVRAVAEEEVLLPCEASGIPRPTITWQKEGLNVATGVSTQVLPGGQLRIAHASPEDAGNYLCIAKNSAGSAMGKTRLVVQVPPVIENGLPDLSTTEGSHAFLPCKARGSPEPNITWDKDGQPVSGAEGKFTIQPSGELLVKNLEGQDAGTYTCTAENAVGRARRRVHLTILVLPVFTTLPGDRSLRLGDRLWLRCAARGSPTPRIGWTVNDRPVTEGVSEQDGGSTLQRAAVSREDSGTYVCWAENRVGRTQAVSFVHVKEAPVLQGEAFSYLVEPVGGSIQLDCVVRGDPVPDIHWIKDGLPLRGSHLRHQLQNGSLTIRRTERDDAGRYQCLAENEMGVAKKVVILVLQSAPVFQVEPQDMTVRSGDDVALRCQATGEPTPTIEWLQAGQPLRASRRLRTLPDGSLWLENVETGDAGTYDCVAHNLLGSATARAFLVVRGEPQGSWGSMTGVINGRKFGVATLNTSVMQEAHSGVSSIHSSIRHVPANVGPLMRVLVVTIAPIYWALARESGEALNGHSLTGGRFRQESHVEFATGELLTMTQVARGLDPDGLLLLDVVVNGVVPESLADADLQVQDFEEHYVQTGPGQLFVGSTQRFFQGGLPSFLRCNHSIQYNAARGPQPQLVQHLRASAISSAFDPEAEALRFQLATALQAEENEVGCPEGFELDSQGAFCVDRDECSGGPSPCSHACLNAPGRFSCTCPTGFALAWDDRNCRDVDECAWDAHLCREGQRCVNLLGSYRCLPDCGPGFRVADGAGCEDVDECLEGLDDCHYNQLCENTPGGHRCSCPRGYRMQGPSLPCLDVNECLQLPKACAYQCHNLQGSYRCLCPPGQTLLRDGKACTSLERNGQNVTTVSHRGPLLPWLRPWASIPGTSYHAWVSLRPGPMALSSVGRAWCPPGFIRQNGVCTDLDECRVRNLCQHACRNTEGSYQCLCPAGYRLLPSGKNCQDINECEEESIECGPGQMCFNTRGSYQCVDTPCPATYRQGPSPGTCFRRCSQDCGTGGPSTLQYRLLPLPLGVRAHHDVARLTAFSEVGVPANRTELSMLEPDPRSPFALRPLRAGLGAVYTRRALTRAGLYRLTVRAAAPRHQSVFVLLIAVSPYPY

SEQ ID NO: 6523 - protein, 309 aa, Homo Sapiens
  misc_feature (1)..(1): Xaa can be any naturally occurring amino acid
XPGQLFVGSTQRFFQGGLPSFLRCNHSIQYNAARGPQPQLVQHLRASAISSAFDPEAEALRFQLATALQAEENEVGCPEGFELDSQGAFCVDVDECAWDAHLCREGQRCVNLLGSYRCLPDCGPGFRVADGAGCEDVDECLEGLDDCHYNQLCENTPGGHRCSCPRGYRMQGPSLPCLDVNECLQLPKACAYQCHNLQGSYRCLCPPGQTLLRDGKACTSLERNGQNVTTVSHRGPLLPWLRPWASIPGTSYHAWVSLRPGPMALSSVGRAWCPPGFIRQNGVCTDLDECRVRNLCQHACRNTEGSYQC

SEQ ID NO: 6524 - protein, 479 aa, Homo Sapiens
  misc_feature (1)..(1): Xaa can be any naturally occurring amino acid
XVHAHPNPEVTWYKDSQALSLGEEVFLLPGTHTLQLGRARLSDSGMYTCEALNAAGRDQKLVQLSVLVPPAFRQAPRGPQDAVLVRVGDKAVLSCETDALPEPTVTWYKDGQPLVLAQRTQALRGGQRLEIQEAQVSDKGLYSCKVSNVAGEAVRTFTLTVQVPPTFENPKTETVSQVAGSPLVLTCDVSGVPAPTVTWLKDRMPVESSAVHGVVSRGGRLQLSRLQPAQAGTYTCVAENTQAEARKDFVVAVLVAPRIRSSGVAREHHVLEGQEVRLDCEADGQPPPDVAWLKDGSPLGQDMGPHLRFYLDGGSLVLKGLRASDAGAYTCVAHNPAGEDARLHTVNVLVPPTIKQGADGSGTLVSRPGELVTMVCPVRGSPPIHVSWLKDGLPLPLSQRTLLHGSGHTLRISKVQLADAGIFTCVAASPAGVADRNFTLQCPLSWSRWSSRMTWWWFVAPWWNSRARPGAFPCLSCRG

SEQ ID NO: 6525 - protein, 325 aa, Homo Sapiens
MAAMRKALPRRLVGLASLRAVSTSSMGTLPKRVKIVEVGPRDGLQNEKNIVSTPVKIKLIDMLSEAGLSVIETTSFVSPKWVPQMGDHTEVLKGIQKFPGINYPVLTPNLKGFEAAVAAGAKEVVIFGAASELFTKKNINCSIEESFQRFDAILKAAQSANISVRGYVSCALGCPYEGKISPAKVAEVTKKFYSMGCYEISLGDTIGVGTPGIMKDMLSAVMQEVPLAALAVHCHDTYGQALANTLMALQMGVSVVDSSVAGLGGCPYAQGASGNLATEDLVYMLEGLGIHTGVNLQKLLEAGNFICQALNRKTSSKVAQATCKL

SEQ ID NO: 6526 - protein, 254 aa, Homo Sapiens
MAAMRKALPRRLVGLASLRAVSTSSMGTLPKRVKIVEVGPRDGLQNEKNIVSTPVKIKLIDMLSEAGLSVIETTSFVSPKWVPQMGDHTEVLKGIQKFPGINYPVLTPNLKGFEAAVTKKFYSMGCYEISLGDTIGVGTPGIMKDMLSAVMQEVPLAALAVHCHDTYGQALANTLMALQMGVSVVDSSVAGLGGCPYAQGASGNLATEDLVYMLEGLGIHTGVNLQKLLEAGNFICQALNRKTSSKVAQATCKL

SEQ ID NO: 6527 - protein, 77 aa, Homo Sapiens
MLEARREWSRKVFPWSGATQQPGTPFHSPSQTLRRSAGQRPAGVPVPADVLLWTSSRLCVPPLMCSSPCPATCVSAC

SEQ ID NO: 6528 - protein, 182 aa, Homo Sapiens
  misc_feature (1)..(1): Xaa can be any naturally occurring amino acid
XKALPRRLVGLASLRAVSTSSMGTLPKRVKIVEVGPRDGLQNEKVTKKFYSMGCYEISLGDTIGVGTPGIMKDMLSAVMQEVPLAALAVHCHDTYGQALANTLMALQMGVSVVDSSVAGLGGCPYAQGASGNLATEDLVYMLEGLGIHTGVNLQKLLEAGNFICQALNRKTSSKVAQATCKL

SEQ ID NO: 6529 - protein, 53 aa, Homo Sapiens
MEIFIEVFSHFLLQLTELTLNMCLELPTGSLEKSLMISSQVLQIPVANSTKQR

SEQ ID NO: 6530 - protein, 139 aa, Homo Sapiens
MSISSALAMVFMGAKGNTAAQMSQALCFSKIGGEDGDIHRGFQSLLVAINRTDTEYVLRTANGLFGEKSYDFLTGFTDSCGKFYQATIKQLDFVNDTEKSTTRVNSWVADKTKGENILLFYFDNILNSFIVSSLQNCQI

SEQ ID NO: 6531 - protein, 442 aa, Homo Sapiens
MSALGAVIALLLWGQLFAVDSGNDVTDIADDGCPKPPEIAHGYVEHSVRYQCKNYYKLRTEGDGVYTLNDKKQWINKAVGDKLPECEADDGCPKPPEIAHGYVEHSVRYQCKNYYKLRTEGDGEAMPCSLPHVNLRVTFTSPADVGKEGMLMMMSPSPRVYTLNNEKQWINKAVGDKLPECEAVCGKPKNPANPVQRILGGHLDAKGSFPWQAKMVSHHNLTTGATLINEQWLLTTAKNLFLNHSENATAKDIAPTLTLYVGKKQLVEIEKVVLHPNYSQVDIGLIKLKQKVSVNERVMPICLPSKDYAEVGRVGYVSGWGRNANFKFTDHLKYVMLPVADQDQCIRHYEGSTVPEKKTPKSPVGVQPILNEHTFCAGMSKYQEDTCYGDAGSAFAVHDLEEDTWYATGILSFDKSCAVAEYGVYVKVTSIQDWVQKTIAEN

SEQ ID NO: 6532 - protein, 406 aa, Homo Sapiens
MSALGAVIALLLWGQLFAVDSGNDVTDIADDGCPKPPEIAHGYVEHSVRYQCKNYYKLRTEGDGVYTLNDKKQWINKAVGDKLPECEADDGCPKPPEIAHGYVEHSVRYQCKNYYKLRTEGDGVYTLNNEKQWINKAVGDKLPECEAVCGKPKNPANPVQRILGGHLDAKGSFPWQAKMVSHHNLTTGATLINEQWLLTTAKNLFLNHSENATAKDIAPTLTLYVGKKQLVEIEKVVLHPNYSQVDIGLIKLKQKVSVNERVMPICLPSKDYAEVGRVGYVSGWGRNANFKFTDHLKYVMLPVADQDQCIRHYEGSTVPEKKTPKSPVGVQPILNEHTFCAGMSKYQEDTCYGDAGSAFAVHDLEEDTWYATGILSFDKSCAVAEYGVYVKVTSIQDWVQKTIAEN

SEQ ID NO: 6533 - protein, 347 aa, Homo Sapiens
MSALGAVIALLLWGQLFAVDSGNDVTDIADDGCPKPPEIAHGYVEHSVRYQCKNYYKLRTEGDGVYTLNDKKQWINKAVGDKLPECEAVCGKPKNPANPVQRILGGHLDAKGSFPWQAKMVSHHNLTTGATLINEQWLLTTAKNLFLNHSENATAKDIAPTLTLYVGKKQLVEIEKVVLHPNYSQVDIGLIKLKQKVSVNERVMPICLPSKDYAEVGRVGYVSGWGRNANFKFTDHLKYVMLPVADQDQCIRHYEGSTVPEKKTPKSPVGVQPILNEHTFCAGMSKYQEDTCYGDAGSAFAVHDLEEDTWYATGILSFDKSCAVAEYGVYVKVTSIQDWVQKTIAEN

SEQ ID NO: 6534 - protein, 88 aa, Homo Sapiens
MSALGAVIALLLWGQLFAVDSGNDVTDIADDGCPKPPEIAHGYVEHSVRYQCKNYYKLRTEGDGVYTLNNEKQWINKAVGDKLPECEA

SEQ ID NO: 6535 - protein, 92 aa, Homo Sapiens
MSALGAVIALLLWGQLFAVDSGNDVTDIADDGCPKPPEIAHGYVEHSVRYQCKNYYKLRTEGDGVYTLNNEKQWINKAVGDKLPECEAAHTE

SEQ ID NO: 6536 - protein, 222 aa, Homo Sapiens
MSALGAVIALLLWGQLFAVDSGNDVTDIADDGCPKPPEIAHGYVEHSVRYQCKNYYKLRTEGDGVYTLNNEKQWINKAVGDKLPECEAGATLINEQWLLTTAKNLFLNHSENATAKDIAPTLTLYVGKKQLVEIEKVVLHPNYSQVDIGLIKLKQKVSVNERVMPICLPSKDYAEVGRVGYVSGWGRNANFKFTDHLKYVMLPVADQDQCIRHYEGSTVPEK

SEQ ID NO: 6537 - protein, 91 aa, Homo Sapiens
MSALGAVIALLLWGQLFAVDSGNDVTDIADDGCPKPPEIAHGYVEHSVRYQCKNYYKLRTEGDGVYTLNNEKQWINKAVGDKLPECEAGGC

SEQ ID NO: 6538 - protein, 347 aa, Homo Sapiens
MSALGAVIALLLWGQLFAVDSGNDVTDIADDGCPKPPEIAHGYVEHSVRYQCKNYYKLRTEGDGVYTLNNEKQWINKAVGDKLPECEAVCGKPKNPANPVQRILGGHLDAKGSFPWQAKMVSHHNLTTGATLINEQWLLTTAKNLFLNHSENATAKDIAPTLTLYVGKKQLVEIEKVVLHPNYSQVDIGLIKLKQKVSVNERVMPICLPSKDYAEVGRVGYVSGWGRNANFKFTDHLKYVMLPVADQDQCIRHYEGSTVPEKKTPKSPVGVQPILNEHTFCAGMSKYQEDTCYGDAGSAFAVHDLEEDTWYATGILSFDKSCAVAEYGVYVKVTSIQDWVQKTIAEN

SEQ ID NO: 6539 - protein, 347 aa, Homo Sapiens; identical to SEQ ID NO: 6538

SEQ ID NO: 6540 - protein, 281 aa, Homo Sapiens
MSRISQMTAARSPPRLHMAMWSTRFATSVRTNPVQRILGGHLDAKGSFPWQAKMVSHHNLTTGATLINEQWLLTTAKNLFLNHSENATAKDIAPTLTLYVGKKQLVEIEKVVLHPNYSQVDIGLIKLKQKVSVNERVMPICLPSKDYAEVGRVGYVSGWGRNANFKFTDHLKYVMLPVADQDQCIRHYEGSTVPEKKTPKSPVGVQPILNEHTFCAGMSKYQEDTCYGDAGSAFAVHDLEEDTWYATGILSFDKSCAVAEYGVYVKVTSIQDWVQKTIAEN

SEQ ID NO: 6541 - protein, 281 aa, Homo Sapiens; identical to SEQ ID NO: 6540

SEQ ID NO: 6542 - protein, 365 aa, Homo Sapiens
  misc_feature (1)..(1): Xaa can be any naturally occurring amino acid
XALGAVIALLLWGQLFAVDSGNDVTDIADDGCPKPPEIAHGYVEHSVRYQCKNYYKLRTEGDGVYTLNDKKQWINKAVGDKLPECEADDGCPKPPEIAHGYVEHSVRYQCKNYYKLRTEGDGVYTLNNEKQWINKAVGDKLPECEAGATLINEQWLLTTAKNLFLNHSENATAKDIAPTLTLYVGKKQLVEIEKVVLHPNYSQVDIGLIKLKQKVSVNERVMPICLPSKDYAEVGRVGYVSGWGRNANFKFTDHLKYVMLPVADQDQCIRHYEGSTVPEKKTPKSPVGVQPILNEHTFCAGMSKYQEDTCYGDAGSAFAVHDLEEDTWYATGILSFDKSCAVAEYGVYVKVTSIQDWVQKTIAEN

SEQ ID NO: 6543 - protein, 149 aa, Homo Sapiens
  misc_feature (1)..(1): Xaa can be any naturally occurring amino acid
XALGAVIALLLWGQLFAVDSGNDVTDIADDGCPKPPEIAHGYVEHSVRYQCKNYYKLRTEGDGVYTLNDKKQWINKAVGDKLPECEADDGCPKPPEIAHGYVEHSVRYQCKNYYKLRTEGDGVYTLNNEKQWINKAVGDKLPECEAGGC

SEQ ID NO: 6544 - protein, 404 aa, Homo Sapiens
  misc_feature (1)..(1): Xaa can be any naturally occurring amino acid
XALGAVIALLLWGQLFAVDSGNDVTDIADDGCPKPPEIAHGYVEHSVRYQCKNYYKLRTEGDGVYTLNDKKQWINKAVGDKLPECEADDGCPKPPEIAHGYVEHSVRYQCKNYYKLRTEGDVYTLNNEKQWINKAVGDKLPECEAVCGKPKNPANPVQRILGGHLDAKGSFPWQAKMVSHHNLTTGATLINEQWLLTTAKNLFLNHSENATAKDIAPTLTLYVGKKQLVEIEKVVLHPNYSQVDIGLIKLKQKVSVNERVMPICLPSKDYAEVGRVGYVSGWGRNANFKFTDHLKYVMLPVADQDQCIRHYEGSTVPEKKTPKSPVGVQPILNEHTFCAGMSKYQEDTCYGDAGSAFAVHDLEEDTWYATGILSFDKSCAVAEYGVYVKVTSIQDWVQKTIAEN

SEQ ID NO: 6545 - protein, 348 aa, Homo Sapiens
MSDLGAVISLLLWGRQLFALYSGNDVTDISDDRFPKPPEIANGYVEHLFRYQCKNYYRLRTEGDGVYTLNDKKQWINKAVGDKLPECEAVCGKPKNPANPVQRILGGHLDAKGSFPWQAKMVSHHNLTTGATLINEQWLLTTAKNLFLNHSENATAKDIAPTLTLYVGKKQLVEIEKVVLHPNYHQVDIGLIKLKQKVLVNERVMPICLPSKNYAEVGRVGYVSGWGQSDNFKLTDHLKYVMLPVADQYDCITHYEGSTCPKWKAPKSPVGVQPILNEHTFCVGMSKYQEDTCYGDAGSAFAVHDLEEDTWYAAGILSFDKSCAVAEYGVYVKVTSIQHWVQKTIAEN

SEQ ID NO: 6546 - protein, 117 aa, Homo Sapiens
MSDLGAVISLLLWGRQLFALYSGNDVTDISDDRFPKPPEIANGYVEHLFRYQCKNYYRLRTEGDGVYTLNDKKQWINKAVGDKLPECEAVCGKPKNPANPVQRILGGHLVRGWDPKL

SEQ ID NO: 6547 - protein, 281 aa, Homo Sapiens
MSRIFQMTASRSPLRLQMAMWSTCFATSVRTNPVQRILGGHLDAKGSFPWQAKMVSHHNLTTGATLINEQWLLTTAKNLFLNHSENATAKDIAPTLTLYVGKKQLVEIEKVVLHPNYHQVDIGLIKLKQKVLVNERVMPICLPSKNYAEVGRVGYVSGWGQSDNFKLTDHLKYVMLPVADQYDCITHYEGSTCPKWKAPKSPVGVQPILNEHTFCVGMSKYQEDTCYGDAGSAFAVHDLEEDTWYAAGILSFDKSCAVAEYGVYVKVTSIQHWVQKTIAEN

SEQ ID NO: 6548 - protein, 485 aa, Homo Sapiens
MLLRSKPALPPPLMLLLLGPLGPLSPGALPRPAQAQDVVDLDFFTQEPLHLVSPSFLSVTIDANLATDPRFLILLGSPKLRTLARGLSPAYLRFGGTKTDFLIFDPKKESTFEERSYWQSQVNQDICKYGSIPPDVEEKLRLEWPYQEQLLLREHYQKKFKNSTYSKPNSFLKKADIFINGSQLGEDFIQLHKLLRKSTFKNAKLYGPDVGQPRRKTAKMLKSFLKAGGEVIDSVTWHHYYLNGRTATKEDFLNPDVLDIFISSVQKVFQVVESTRPGKKVWLGETSSAYGGGAPLLSDTFAAGFMWLDKLGLSARMGIEVVMRQVFFGAGNYHLVDENFDPLPDYWLSLLFKKLVGTKVLMASVQGSKRRKLRVYLHCTNTDNPRYKEGDLTLYAINLHNVTKYLRLPYPFSNKQVDKYLLRPLGPHGLLSKSVQLNGLTLKMVDDQTLPPLMEKPLRPGSSLGLPAFSYSFFVIRNAKVAACI

SEQ ID NO: 6549 - protein, 226 aa, Homo Sapiens
MLLRSKPALPPPLMLLLLGPLGPLSPGALPRPAQAQDVVDLDFFTQEPLHLVSPSFLSVTIDANLATDPRFLILLGSPKLRTLARGLSPAYLRFGGTKTDFLIFDPKKESTFEERSYWQSQVNQDICKYGSIPPDVEEKLRLEWPYQEQLLLREHYQKKFKNSTYSRSSVDVLYTFANCSGLDLIFGLNALLRTADLQWNSSNAQLLLDYCSSKGYNISWELGNAS

SEQ ID NO: 6550 - protein, 543 aa, Homo Sapiens
MLLRSKPALPPPLMLLLLGPLGPLSPGALPRPAQAQDVVDLDFFTQEPLHLVSPSFLSVTIDANLATDPRFLILLGSPKLRTLARGLSPAYLRFGGTKTDFLIFDPKKESTFEERSYWQSQVNQDICKYGSIPPDVEEKLRLEWPYQEQLLLREHYQKKFKNSTYSRSSVDVLYTFANCSGLDLIFGLNALLRTADLQWNSSNAQLLLDYCSSKGYNISWELGNEPNSFLKKADIFINGSQLGEDFIQLHKLLRKSTFKNAKLYGPDVGQPRRKTAKMLKSFLKAGGEVIDSVTWHHYYLNGRTATKEDFLNPDVLDIFISSVQKVFQVVESTRPGKKVWLGETSSAYGGGAPLLSDTFAAGFMWLDKLGLSARMGIEVVMRQVFFGAGNYHLVDENFDPLPDYWLSLLFKKLVGTKVLMASVQGSKRRKLRVYLHCTNTDNPRYKEGDLTLYAINLHNVTKYLRLPYPFSNKQVDKYLLRPLGPHGLLSKSVQLNGLTLKMVDDQTLPPLMEKPLRPGSSLGLPAFSYSFFVIRNAKVAACI

SEQ ID NO: 6551 - protein, 543 aa, Homo Sapiens; identical to SEQ ID NO: 6550

SEQ ID NO: 6552 - protein, 380 aa, Homo Sapiens
MLLRSKPALPPPLMLLLLGPLGPLSPGALPRPAQAQDVVDLDFFTQEPLHLVSPSFLSVTIDANLATDPRFLILLGSPKLRTLARGLSPAYLRFGGTKTDFLIFDPKKESTFEERSYWQSQVNQDICKYGSIPPDVEEKLRLEWPYQEQLLLREHYQKKFKNSTYSRSSVDVLYTFANCSGLDLIFGLNALLRTADLQWNSSNAQLLLDYCSSKGYNISWELGNEPNSFLKKADIFINGSQLGEDFIQLHKLLRKSTFKNAKLYGPDVGQPRRKTAKMLKSFLKAGGEVIDSVTWHHYYLNGRTATKEDFLNPDVLDIFISSVQKVFQVVESTRPGKKVWLGETSSAYGGGAPLLSDTFAAGFMIIGYLFCSRNWWAPRC

SEQ ID NO: 6553 - protein, 469 aa, Homo Sapiens
MLLRSKPALPPPLMLLLLGPLGPLSPGALPRPAQAQDVVDLDFFTQEPLHLVSPSFLSVTIDANLATDPRFLILLGSPKLRTLARGLSPAYLRFGGTKTDFLIFDPKKESTFEERSYWQSQVNQDICKYGSIPPDVEEKLRLEWPYQEQLLLREHYQKKFKNSTYSRSSVDVLYTFANCSGLDLIFGLNALLRTADLQWNSSNAQLLLDYCSSKGYNISWELGNEPNSFLKKADIFINGSQLGEDFIQLHKLLRKSTFKNAKLYGPDVGQPRRKTAKMLKSFLKAGGEVIDSVTWHHYYLNGRTATKEDFLNPDVLDIFISSVQKVFQDYWLSLLFKKLVGTKVLMASVQGSKRRKLRVYLHCTNTDNPRYKEGDLTLYAINLHNVTKYLRLPYPFSNKQVDKYLLRPLGPHGLLSKSVQLNGLTLKMVDDQTLPPLMEKPLRPGSSLGLPAFSYSFFVIRNAKVAACI

SEQ ID NO: 6554 - protein, 168 aa, Homo Sapiens
MLLRSKPALPPPLMLLLLGPLGPLSPGALPRPAQAQDVVDLDFFTQEPLHLVSPSFLSVTIDANLATDPRFLILLGSPKLRTLARGLSPAYLRFGGTKTDFLIFDPKKESTFEERSYWQSQVNQDICKYGSIPPDVEEKLRLEWPYQEQLLLREHYQKKFKNSTYSTS

SEQ ID NO: 6555 - protein, 389 aa, Homo Sapiens
ARSLDKLYNFADCSGLHLIFALNALRRNPNNSWNSSSALSLLKYSASKKYNISWELGNEPNNYRTMHGRAVNGSQLGKDYIQLKSLLQPIRIYSRASLYGPNIGRPRKNVIALLDGFMKVAGSTVDAVTWQHCYIDGRVVKVMDFLKTRLLDTLSDQIRKIQKVVNTYTPGKKIWLEGVVTTSAGGTNNLSDSYAAGFLWLNTLGMLANQGIDVVIRHSFFDHGYNHLVDQNFNPLPDYWLSLLYKRLIGPKVLAVHVAGLQRKPRPGRVIRDKLRIYAHCTNHHNHNYVRGSITLFIINLHRSRKKIKLAGTLRDKLVHQYLLQPYGQEGLKSKSVQLNGQPLVMVDDGTLPELKPRPLRAGRTLVIPPVTMGFYVVKNVNALACRYR

SEQ ID NO: 6556 - protein, 149 aa, Homo Sapiens
MRVLCAFPEAMPSSNSRPPACLAPGALYLALLLHLSLSSQAGDRRPLPVDRAAGLKEKTLILLDVSTKNPVRTVNENFLSLQLDPSIIHDGWLDFLSSKRLVTLARGLSPAFLRFGGKRTDFLQFQNLRNPAKSRGGPGPDYYLKNYED

SEQ ID NO: 6557 - protein, 592 aa, Homo Sapiens
MRVLCAFPEAMPSSNSRPPACLAPGALYLALLLHLSLSSQAGDRRPLPVDRAAGLKEKTLILLDVSTKNPVRTVNENFLSLQLDPSIIHDGWLDFLSSKRLVTLARGLSPAFLRFGGKRTDFLQFQNLRNPAKSRGGPGPDYYLKNYEDDIVRSDVALDKQKGCKIAQHPDVMLELQREKAAQMHLVLLKEQFSNTYSNLILTARSLDKLYNFADCSGLHLIFALNALRRNPNNSWNSSSALSLLKYSASKKYNISWELGNEPNNYRTMHGRAVNGSQLGKDYIQLKSLLQPIRIYSRASLYGPNIGRPRKNVIALLDGFMKVAGSTVDAVTWQHCYIDGRVVKVMDFLKTRLLDTLSDQIRKIQKVVNTYTPGKKIWLEGVVTTSAGGTNNLSDSYAAGFLWLNTLGMLANQGIDVVIRHSFFDHGYNHLVDQNFNPLPDYWLSLLYKRLIGPKVLAVHVAGLQRKPRPGRVIRDKLRIYAHCTNHHNHNYVRGSITLFIINLHRSRKKIKLAGTLRDKLVHQYLLQPYGQEGLKSKSVQLNGQPLVMVDDGTLPELKPRPLRAGRTLVIPPVTMGFYVVKNVNALACRYR

SEQ ID NO: 6558 - protein, 548 aa, Homo Sapiens
MRVLCAFPEAMPSSNSRPPACLAPGALYLALLLHLSLSSQAGDRRPLPVDRAAGLKEKTLILLDVSTKNPVRTVNENFLSLQLDPSIIHDGWLDFLSSKRLVTLARGLSPAFLRFGGKRTDFLQFQNLRNPAKSRGGPGPDYYLKNYEDDIVRSDVALDKQKGCKIAQHPDVMLELQREKAAQMHLVLLKEQFSNTYSNLILTARSLDKLYNFADCSGLHLIFALNALRRNPNNSWNSSSALSLLKYSASKKYNISWELGNEPNNYRTMHGRAVNGSQLGKDYIQLKSLLQPIRIYSRASLYGPNIGRPRKNVIALLDGFMKVAGSTVDAVTWQHCYIDGRVVKVMDFLKTRLLDTLSDQIRKIQKVVNTYTPGKKIWLEGVVTTSAGGTNNLSDSYAAGFLWLNTLGMLANQGIDVVIRHSFFDHGYNHLVDQNFNPLPDYWLSLLYKRLIGPKVLAVHVAGLQRKPRPGRVIRDKLRIYAHCTNHHNHNYVRGSITLFIINLHRSRKKIKLAGTLRDKLVHQYLLQPYGQEGLKSKTQRCQYCGII

SEQ ID NO: 6559 - protein, 534 aa, Homo Sapiens
MRVLCAFPEAMPSSNSRPPACLAPGALYLALLLHLSLSSQAGDRRPLPVDRAAGLKEKTLILLDVSTKNPVRTVNENFLSLQLDPSIIHDGWLDFLSSKRLVTLARGLSPAFLRFGGKRTDFLQFQNLRNPAKSRGGPGPDYYLKNYEDDIVRSDVALDKQKGCKIAQHPDVMLELQREKAAQMHLVLLKEQFSNTYSNLILTEPNNYRTMHGRAVNGSQLGKDYIQLKSLLQPIRIYSRASLYGPNIGRPRKNVIALLDGFMKVAGSTVDAVTWQHCYIDGRVVKVMDFLKTRLLDTLSDQIRKIQKVVNTYTPGKKIWLEGVVTTSAGGTNNLSDSYAAGFLWLNTLGMLANQGIDVVIRHSFFDHGYNHLVDQNFNPLPDYWLSLLYKRLIGPKVLAVHVAGLQRKPRPGRVIRDKLRIYAHCTNHHNHNYVRGSITLFIINLHRSRKKIKLAGTLRDKLVHQYLLQPYGQEGLKSKSVQLNGQPLVMVDDGTLPELKPRPLRAGRTLVIPPVTMGFYVVKNVNALACRYR

SEQ ID NO: 6560 - protein, 480 aa, Homo Sapiens
MRVLCAFPEAMPSSNSRPPACLAPGALYLALLLHLSLSSQAGDRRPLPVDRAAGLKEKTLILLDVSTKNPVRTVNENFLSLQLDPSIIHDGWLDFLSSKRLVTLARGLSPAFLRFGGKRTDFLQFQNLRNPAKSRGGPGPDYYLKNYEDEPNNYRTMHGRAVNGSQLGKDYIQLKSLLQPIRIYSRASLYGPNIGRPRKNVIALLDGFMKVAGSTVDAVTWQHCYIDGRVVKVMDFLKTRLLDTLSDQIRKIQKVVNTYTPGKKIWLEGVVTTSAGGTNNLSDSYAAGFLWLNTLGMLANQGIDVVIRHSFFDHGYNHLVDQNFNPLPDYWLSLLYKRLIGPKVLAVHVAGLQRKPRPGRVIRDKLRIYAHCTNHHNHNYVRGSITLFIINLHRSRKKIKLAGTLRDKLVHQYLLQPYGQEGLKSKSVQLNGQPLVMVDDGTLPELKPRPLRAGRTLVIPPVTMGFYVVKNVNALACRYR

SEQ ID NO: 6561 - protein, 254 aa, Homo Sapiens [sequence omitted]

SEQ ID NO: 6562 - protein, 462 aa, Homo Sapiens
MARVLGAPVALGLWSLCWSLAIATPLPPTSAHGNVAEGETKPDPDVTERCSDGWSFDATTLDDNGTMLFFKGEFVWKSHKWDRELISERWKNFPSPVDAAFRQGHNSVFLIKGDKVWVYPPEKKEKGYPKLLQDEFPGIPSPLDAAVECHRGECQAEGVLFFQGDREWFWDLATGTMKERSWPAVGNCSSALRWLGRYYCFQGNQFLRFDPVRGEVPPRYPRDVRDYFMPCPGRGHGHRNGTGHGNSTHHGPEYMRCSPHLVLSALTSDNHGATYAFSGTHYWRLDTSRDGWHSWPIAHQWPQGPSAVDAAFSWEEKLYLVQGTQVYVFLTKGGYTLVSGYPKRLEKEVGTPHGIILDSVDAAFICPGSSRLHIMAGRRLWWLDLKSGAQATWTELPWPHEKVDGALCMEKSLGPNSCSANGPGLYLIHGPNLYCYSDVEKLNAAKALPQPQNVTSLLGCTH

SEQ ID NO: 6563 - protein, 699 aa, Homo Sapiens
MGHHRPWLHASVLWAGVASLLLPPAMTQQLRGDGLGFRNRNNSTGVAGLSEEASAELRHHLHSPRDHPDENKDVSTENGHHFWSHPDREKEDEDVSKEYGHLLPGHRSQDHKVGDEGVSGEEVFAEHGGQARGHRGHGSEDTEDSAEHRHHLPSHRSHSHQDEDEDEVVSSEHHHHILRHGHRGHDGEDDEGEEEEEEEEEEEEASTEYGHQAHRHRGHGSEEDEDVSDGHHHHGPSHRHQGHEEDDDDDDDDDDDDDDDDVSIEYRHQAHRHQGHGIEEDEDVSDGHHHRDPSHRHRSHEEDDNDDDDVSTEYGHQAHRHQDHRKEEVEAVSGEHHHHVPDHRHQGHRDEEEDEDVSTERWHQGPQHVHHGLVDEEEEEEEITVQFGHYVASHQPRGHKSDEEDFQDEYKTEVPHHHHHRVPREEDEEVSAELGHQAPSHRQSHQDEETGHGQRGSIKEMSHHPPGHTVVKDRSHLRKDDSEEEKEKEEDPGSHEEDDESSEQGEKGTHHGSRDQEDEEDEEEGHGLSLNQEEEEEEDKEEEEEEEDEERREERAEVGAPLSPDHSEEEEEEEEGLEEDEPRFTIIPNPLDRREEAGGASSEEESGEDTGPQDAQEYGNYQPGSLCGYCSFCNRCTECESCHCDEENMGEHCDQCQHCQFCYLCPLVCETVCAPGSYVDYFSSSLYQALADMLETPEP

SEQ ID NO: 6564 - protein, 676 aa, Homo Sapiens
MGHHRPWLHASVLWAGVASLLLPPAMTQQLRGDGLGFRNRNNSTGVAGLSEEASAELRHHLHSPRDHPDENKDVSTENGHHFWSHPDREKEDEDVSKEYGHLLPGHRSQDHKVGDEGVSGEEVFAEHGGQARGHRGHGSEDTEDSAEHRHHLPSHRSHSHQDEDEDEVVSSEHHHHILRHGHRGHDGEDDEGEEEEEEEEEEEEASTEYGHQAHRHRGHGSEEDEDVSDGHHHHGPSHRHQGHEEDDDDDDDDDDDDDDDDVSIEYRHQAHRHQGHGIEEDEDVSDGHHHRDPSHRHRSHEEDDNDDDDVSTEYGHQAHRHQDHRKEEVEAVSGEHHHHVPDHRHQGHRDEEEDEDVSTERWHQGPQHVHHGLVDEEEEEEEITVQFGHYVASHQPRGHKSDEEDFQDEYKTEVPHHHHHRVPREEDEEVSAELGHQAPSHRQSHQDEETGHGQRGSIKEMSHHPPGHTVVKDRSHLRKDDSEEEKEKEEDPGSHEEDDESSEQGEKGTHHGSRDQEDEEDEEEGHGLSLNQEEEEEEDKEEEEEEEDEERREERAEVGAPLSPDHSEEEEEEEEGLEEDEPRFTIIPNPLDRREEAGGASSEEESGEDTGPQDAQEYGNYQPGSLCGYCSFCNHCQFCYLCPLVCETVCAPGSYVDYFSSSLYQALADMLETPEP

SEQ ID NO: 6565 - protein, 96 aa, Homo Sapiens
  misc_feature (1)..(1): Xaa can be any naturally occurring amino acid
XSEEESGEDTGPQDAQEYGNYQPGSLCGYCSFCNRCTECESCHCDEENMGEHCDQCQGPGRHAGNAGTLTQSLDCDAGVPPPAFQPLSTSYIYFSE

SEQ ID NO: 6566 - protein, 525 aa, Homo Sapiens
MKALIAALLLITLQYSCAVSPTDCSAVEPEAEKALDLINKRRRDGYLFQLLRIADAHLDRVENTTVYYLVLDVQESDCSVLSRKYWNDCEPPDSRRPSEIVIGQCKVIATRHSHESQDLRVIDFNCTTSSVSSALANTKDSPVLIDFFEDTERYRKQANKALEKYKEENDDFASFRVDRIERVARVRGGEGTGYFVDFSVRNCPRHHFPRHPNVFGFCRADLFYDVEALDLESPKNLVINCEVFDPQEHENINGVPPHLGHPFHWGGHERSSTTKPPFKPHGSRDHHHPHKPHEHGPPPPPDERDHSHGPPLPQGPPPLLPMSCSSCQHATFGTNGAQRHSHNNNSSDLHPHKHHSHEQHPHGHHPHAHHPHEHDTHRQHPHGHHPHGHHPHGHHPHGHHPHGHHPHCHDFQDYGPCDPPPHNQGHCCHGHGPPPGHLRRRGPGKGPRPFHCRQIGSVYRLPPLRKGEVLPLPEANFPSFPLPHHKHPLKPDNQPFPQSVSESCPGKFKSGFPQVSMFFTHTFPK

SEQ ID NO: 6567 - protein, 111 aa, Homo Sapiens
MDGPRQDATLDEEEDMVIIYNRVPKTASTSFTNIAYDLCAKNKYHVLHINTTKNNPVMSLQDQVRFVKNITSWKEMKPGFYHGHVSYLDFAKFGVKKKPIYINVIRDPIER

SEQ ID NO: 6568 - protein, 229 aa, Homo Sapiens
MGLLRIMMPPKLQLLAVVAFAVAMLFLENQIQKLEESRSKLERAIARHEVREIEQRHTMDGPRQDATLDEEEDMVIIYNRVPKTASTSFTNIAYDLCAKNKYHVLHINTTKNNPVMSLQDQVRFVKNITSWKEMKPGFYHGHVSYLDFAKFGVKKKPIYINVIRDPIERLVSYYYFLRFGDDYRPGLRRRKQGDKKTFDECVAEGGSDCAPEKLWLQIPFFCGHSSECW

SEQ ID NO: 6569 - protein, 356 aa, Homo Sapiens
MGLLRIMMPPKLQLLAVVAFAVAMLFLENQIQKLEESRSKLERAIARHEVREIEQRHTMDGPRQDATLDEEEDMVIIYNRVPKTASTSFTNIAYDLCAKNKYHVLHINTTKNNPVMSLQDQVRFVKNITSWKEMKPGFYHGHVSYLDFAKFGVKKKPIYINVIRDPIERLVSYYYFLRFGDDYRPGLRRRKQGDKKTFDECVAEGGSDCAPEKLWLQIPFFCGHSSECWNVGSRWAMDQAKYNLINEYFLVGVTEELEDFIMLLEAALPRFFRGATELYRTGKKSHLRKTTEKKLPTKQTIAKLQQSDIWKMENEFYEFALEQFQFIRAHAVREKDGDLYILAQNFFYEKIYPKSN

SEQ ID NO: 6570 - protein, 83 aa, Homo Sapiens
MAALLLGAVLLVAQPQLVPSRPAELGQQELLRKAGTLQDDVRDGVAPNGSAQQLPQTIIIGVRKGGTRALLEMLSLHPDVAAA

SEQ ID NO: 6571 - protein, 83 aa, Homo Sapiens; identical to SEQ ID NO: 6570

SEQ ID NO: 6572 - protein, 307 aa, Homo Sapiens
MAALLLGAVLLVAQPQLVPSRPAELGQQELLRKAGTLQDDVRDGVAPNGSAQQLPQTIIIGVRKGGTRALLEMLSLHPDVAAAENEVHFFDWEEHYSHGLGWYLSQMPFSWPHQLTVEKTPAYFTSPKVPERVYSMNPSIRLLLILRDPSERVLSDYTQVFYNHMQKHKPYPSIEEFLVRDGRLNVDYKALNRSLYHVHMQNWLRFFPLRHIHIVDGDRLIRDPFPEIQKVERFLKLSPQINASNFYFNKTKGFYCLRDSGRDRCLHESKGRAHPQVDPKLLNKLHEYFHEPNKKFFELVGRTFDWH

SEQ ID NO: 6573 - protein, 411 aa, Homo Sapiens
MRRRRAGGRTMVERASKFVLVVAGSVCFMLILYQYAGPGLSLGAPGGRAPPDDLDLFPTPDPHYEKKYYFPVRELERSLRFDMKGDDVIVFLHIQKTGGTTFGRHLVQNVRLEVPCDCRPGQKKCTCYRPNRRETWLFSRFSTGWSCGLHADWTELTNCVPGVLDRRDSAALRTPRKFYYITLLRDPVSRYLSEWRHVQRGATWKTSLHMCDGRTPTPEELPPCYEGTDWSGCTLQEFMDCPYNLANNRQVRMLADLSLVGCYNLSFIPEGKRAQLLLESAKKNLRGMAFFGLTEFQRKTQYLFERTFNLKFIRPFMQYNSTRAGGVEVDEDTIRRIEELNDLDMQLYDYAKDLFQQRYQYKRQLERREQRLRSREERLLHRAKEALPREDADEPGRVPTEDYMSHIIEKW

SEQ ID NO: 6574 - protein, 471 aa, Homo Sapiens
MDERFNKWLLTPVLTLLFVVIMYQYVSPSCTSSCTNFGEQPRAGEAGPPAVPGPARRAQAPPEEWERRPQLPPPPRGPPEGPRGAAAPEEEDEEPGDPREGEEEEEEDEPDPEAPENGSLPRFVPRFNFSLKDLTRFVDFNIKGRDVIVFLHIQKTGGTTFGRHLVKNIRLEQPCSCKAGQKKCTCHRPGKKETWLFSRFSTGWSCGLHADWTELTNCVPAIMEKKDCPRNHSHTRNFYYITMLRDPVSRYLSEWKHVQRGATWKTSLHMCDGRSPTPDELPTCYPGDDWSGVSLREFMDCTYNLANNRQVRMLADLSLVGCYNLTFMNESERNTILLQSAKNNLKNMAFFGLTEFQRKTQFLFERTFNLKFISPFTQFNITRASNVEINEGARQRIEDLNFLDMQLYEYAKDLFQQRYHHTKQLEHQRDRQKRREERRLQREHRDHQWPKEDGAAEGTVTEDYNSQVVRW

SEQ ID NO: 6575 - protein, 236 aa, Homo Sapiens
RNFYYITMLRDPVSRYLSEWKHVQRGATWKTSLHMCDGRSPTPDELPTCYPGDDWSGVSLREFMDCTYNLANNRQVRMLADLSLVGCYNLTFMNESERNTILLQSAKNNLKNMAFFGLTEFQRKTQFLFERTFNLKFISPFTQFNITRASNVEINEGARQRIEDLNFLDMQLYEYAKDLFQQRYHHTKQLEHQRDRQKRREERRLQREHRDHQWPKEDGAAEGTVTEDYNSQVVRW

SEQ ID NO: 6576 - protein, 333 aa, Homo Sapiens
MANLGTLQLLPPRFKRFSCLSLPNIWITGMPVPATSVPCPSAGPHRTMKVLLLTGLGALFFAYYWDDNFDPASLQGARVLLTGANAGVGEELAYHYARLGSHLVLTAHTEALLQKVVGNCRKLGAPKVFYIAADMASPEAPESVVQFALDKLGGLDYLVLNHIGGAPAGTRARSPQATRWLMQVNFVSYVQLTSRALPSLTDSKGSLVVVSSLLGRVPTSFSTPYSAAKFALDGFFGSLRRELDVQDVNVAITMCVLGLRDRASAAEAVRGVTRVKAAPGPKAALAVIRGGATRAAGVFYPWRFRLLCLLRRWLPRPRAWFIRQELNVTAAAA

SEQ ID NO: 6577 - protein, 199 aa, Homo Sapiens
MASPEAPESVVQFALDKLGGLDYLVLNHIGGAPAGTRARSPQATRWLMQVNFVSYVQLTSRALPSLTDSKGSLVVVSSLLGRVPTSFSTPYSAAKFALDGFFGSLRRELDVQDVNVAITMCVLGLRDRASAAEAVRGVTRVKAAPGPKAALAVIRGGATRAAGVFYPWRFRLLCLLRRWLPRPRAWFIRQELNVTAAAA

SEQ ID NO: 6578 - protein, 75 aa, Homo Sapiens
MKVLLLTGLGALFFAYYWDDNFDPASLQGARVLLTGANAGVGEELAYHYARLGSHLVLTAHTEALLQKAGWTTSC

SEQ ID NO: 6579 - protein, 75 aa, Homo Sapiens; identical to SEQ ID NO: 6578

SEQ ID NO: 6580 - protein, 87 aa, Homo Sapiens
MKVLLLTGLGALFFAYYWDDNFDPASLQGARVLLTGANAGVGEELAYHYARLGSHLVLTAHTEALLQKARWLTLVVSTLGGRGKWIT

SEQ ID NO: 6581 - protein, 143 aa, Homo Sapiens
MKVLLLTGLGALFFAYYWDDNFDPASLQGARVLLTGANAGVGEELAYHYARLGSHLVLTAHTEALLQKVVGNCRKLGAPKVFYIAADMASPEAPESVVQFALDKLGGLDYLVLNHIGGAPAGTRARSPQATRWLMQVNFVSYV

SEQ ID NO: 6582 - protein, 286 aa, Homo Sapiens
MKVLLLTGLGALFFAYYWDDNFDPASLQGARVLLTGANAGVGEELAYHYARLGSHLVLTAHTEALLQKVVGNCRKLGAPKVFYIAADMASPEAPESVVQFALDKLGGLDYLVLNHIGGAPAGTRARSPQATRWLMQVNFVSYVQLTSRALPSLTDSKGSLVVVSSLLGRVPTSFSTPYSAAKFALDGFFGSLRRELDVQDVNVAITMCVLGLRDRASAAEAVRGVTRVKAAPGPKAALAVIRGGATRAAGVFYPWRFRLLCLLRRWLPRPRAWFIRQELNVTAAAA

SEQ ID NO: 6583 - protein, 286 aa, Homo Sapiens; identical to SEQ ID NO: 6582

SEQ ID NO: 6584 - protein, 286 aa, Homo Sapiens; identical to SEQ ID NO: 6582

SEQ ID NO: 6585 - protein, 315 aa, Homo Sapiens
MKVLLLTGLGALFFAYYWDDNFDPASLQGARVLLTGANAGVGEELAYHYARLGSHLVLTAHTEALLQKVVGNCRKLGAPKVFYIAADMASPEAPESVVQFALDKLGGLDYLVLNHIGGAPAGTRARSPQATRWLMQVNFVSYVQLTSRALPSLTDSKGSLVVVSSLLGRVPTSFSTPYSAAKFALDGFFGSLRRELDVQDVNVAITMCVLGLRDRASAAEAVRSSTSRPRQPEHRGVPLQSQTAMFLPPTVPGARTLTETPLRGWPQPKMKSSRQKSKTEKNDGHLEPVTAWEVQVPRVRRLCRGLARPHLFGHD

SEQ ID NO: 6586 - protein, 32 aa, Homo Sapiens
MKVLLLTGLGALFFAYYWDDNFDPASRERECC

SEQ ID NO: 6587 - protein, 205 aa, Homo Sapiens
MKVLLLTGLGALFFAYYWDDNFDPGGLDYLVLNHIGGAPAGTRARSPQATRWLMQVNFVSYVQLTSRALPSLTDSKGSLVVVSSLLGRVPTSFSTPYSAAKFALDGFFGSLRRELDVQDVNVAITMCVLGLRDRASAAEAVRGVTRVKAAPGPKAALAVIRGGATRAAGVFYPWRFRLLCLLRRWLPRPRAWFIRQELNVTAAAA

SEQ ID NO: 6588 - protein, 234 aa, Homo Sapiens
MKVLLLTGLGALFFAYYWDDNFDPGGLDYLVLNHIGGAPAGTRARSPQATRWLMQVNFVSYVQLTSRALPSLTDSKGSLVVVSSLLGRVPTSFSTPYSAAKFALDGFFGSLRRELDVQDVNVAITMCVLGLRDRASAAEAVRSSTSRPRQPEHRGVPLQSQTAMFLPPTVPGARTLTETPLRGWPQPKMKSSRQKSKTEKNDGHLEPVTAWEVQVPRVRRLCRGLARPHLFGHD

SEQ ID NO: 6589 - protein, 47 aa, Homo Sapiens
MKVLLLTGLGALFFAYYWDDNFDPGGRELPEAGRPQGLLHRGGHGLP

SEQ ID NO: 6590 - protein, 189 aa, Homo Sapiens
MKVLLLTGLGALFFAYYWDDNFDPGKLCELRATDVAGAAQPDGQQGLPGGGVLAARPRAHVVLHSLLGGQVCAGRLLRLPAAGAGRAGRERGHHHVRPGPPRSRLRRRGSQGSHEGQGGPGAQGSPGRDPRRRHARGRRLLPVAFPPAVLAPALATAPAGLVYPPGAQRHGRGSLSTGGCPSSPRRQCS

SEQ ID NO: 6591 - protein, 152 aa, Homo Sapiens
MQVNFVSYVQLTSRALPSLTDSKGSLVVVSSLLGRVPTSFSTPYSAAKFALDGFFGSLRRELDVQDVNVAITMCVLGLRDRASAAEAVRGVTRVKAAPGPKAALAVIRGGATRAAGVFYPWRFRLLCLLRRWLPRPRAWFIRQELNVTAAAA

SEQ ID NO: 6592 - protein, 152 aa, Homo Sapiens; identical to SEQ ID NO: 6591

SEQ ID NO: 6593 - protein, 181 aa, Homo Sapiens
MQVNFVSYVQLTSRALPSLTDSKGSLVVVSSLLGRVPTSFSTPYSAAKFALDGFFGSLRRELDVQDVNVAITMCVLGLRDRASAAEAVRSSTSRPRQPEHRGVPLQSQTAMFLPPTVPGARTLTETPLRGWPQPKMKSSRQKSKTEKNDGHLEPVTAWEVQVPRVRRLCRGLARPHLFGHD

SEQ ID NO: 6594 - protein, 135 aa, Homo Sapiens
  misc_feature (1)..(1): Xaa can be any naturally occurring amino acid
XLGALFFAYYWDDNFDPGGLDYLVLNHIGGAPAGTRARSPQATRWLMQVNFVSYVQLTSRALPSLTDSKGSLVVVSSLLGRVPTSFSTPYSAAKFALDGFFGSLRRELDVQDVNVAITMCVLGLRDRASAAEAVR

SEQ ID NO: 6595 - protein, 256 aa, Homo Sapiens
MKFLLDILLLLPLLIVCSLESFVKLFIPKRRKSVTGEIVLITGAGHGIGRLTAYEFAKLKSKLVLWDINKHGLEETAAKCKGLGAKVHTFVVDCSNREDIYSSAKKTTKAFLPAMTKNNHGHIVTVASAAGHVSVPFLLAYCSSKFAAVGFHKTLTDELAALQITGVKTTCLCPNFVNTGFIKNPSTSLGPTLEPEEVVNRLMHGILTEQKMIFIPSSIAFLTTLERILPERFLAVLKRKISVKFDAVIGYKMKAQ

SEQ ID NO: 6596 - protein, 300 aa, Homo Sapiens
MKFLLDILLLLPLLIVCSLESFVKLFIPKRRKSVTGEIVLITGAGHGIGRLTAYEFAKLKSKLVLWDINKHGLEETAAKCKGLGAKVHTFVVDCSNREDIYSSAKKVKAEIGDVSILVNNAGVVYTSDLFATQDPQIEKTFEVNVLAHFWTTKAFLPAMTKNNHGHIVTVASAAGHVSVPFLLAYCSSKFAAVGFHKTLTDELAALQITGVKTTCLCPNFVNTGFIKNPSTSLGPTLEPEEVVNRLMHGILTEQKMIFIPSSIAFLTTLERILPERFLAVLKRKISVKFDAVIGYKMKAQ

SEQ ID NO: 6597 - protein, 341 aa, Homo Sapiens
MRKVVLITGASSGIGLALCKRLLAEDDELHLCLACRNMSKAEAVCAALLASHPTAEVTIVQVDVSNLQSVFRASKELKQRFQRLDCIYLNAGIMPNPQLNIKALFFGLFSRKVIHMFSTAEGLLTQGDKITADGLQEVFETNVFGHFILIRELEPLLCHSDNPSQLIWTSSRSARKSNFSLEDFQHSKGKEPYSSSKYATDLLSVALNRNFNQQGLYSNVACPGTALTNLTYGILPPFIWTLLMPAILLLRFFANAFTLTPYNGTEALVWLFHQKPESLNPLIKYLSATTGFGRNYIMTQKMDLDEDTAEKFYQKLLELEKHIRVTIQKTDNQARLSGSCL

SEQ ID NO: 6598 - protein, 111 aa, Homo Sapiens
MRKVVLITGASSGIGLALCKRLLAEDDELHLCLACRNMSKAEAVCAALLASHPTAEVTIVQVDVSNLQSVFRASKELKQRFQRLDCIYLNAGIMPNPQLNIKALFFGLFSS

SEQ ID NO: 6599 - protein, 109 aa, Homo Sapiens
MRKVVLITGASSGIGLALCKRLLAEDDELHLCLACRNMSKAEAVCAALLASHPTAEVTIVQVDVSNLQSVFRASKELKQRMIKKWLYVICVEDHVSEIRLYISKCWDHA

SEQ ID NO: 6600 - protein, 84 aa, Homo Sapiens
MRKVVLITGASSGIGLALCKRLLAEDDELHLCLACRNMSKAEAVCAALLASHPTAEVTIVQVDVSNLQSVFRASKELKQRYISC

SEQ ID NO: 6601 - protein, 62 aa, Homo Sapiens
  misc_feature (1)..(1): Xaa can be any naturally occurring amino acid
XSLEDFQHSKGKEPYSSSKYATDLLSVALNRNFNQQVLYSSVYVIKYLPHYMEVGLSITIFR

SEQ ID NO: 6602 - protein, 49 aa, Homo Sapiens
MMKLIINSLYKNKEIFLRELISNASDALDKIRLISLTDENALSGNEELT

SEQ ID NO: 6603 - protein, 803 aa, Homo Sapiens
MRALWVLGLCCVLLTFGSVRADDEVDVDGTVEEDLGKSREGSRTDDEVVQREEEAIQLDGLNASQIRELREKSEKFAFQAEVNRMMKLIINSLYKNKEIFLRELISNASDALDKIRLISLTDENALSGNEELTVKIKCDKEKNLLHVTDTGVGMTREELVKNLGTIAKSGTSEFLNKMTEAQEDGQSTSELIGQFGVGFYSAFLVADKVIVTSKHNNDTQHIWESDSNEFSVIADPRGNTLGRGTTITLVLKEEASDYLELDTIKNLVKKYSQFINFPIYVWSSKTETVEEPMEEEEAAKEEKEESDDEAAVEEEEEEKKPKTKKVEKTVWDWELMNDIKPIWQRPSKEVEEDEYKAFYKSFSKESDDPMAYIHFTAEGEVTFKSILFVPTSAPRGLFDEYGSKKSDYIKLYVRRVFITDDFHDMMPKYLNFVKGVVDSDDLPLNVSRETLQQHKLLKVIRKKLVRKTLDMIKKIADDKYNDTFWKEFGTNIKLGVIEDHSNRTRLAKLLRFQSSHHPTDITSLDQYVERMKEKQDKIYFMAGSSRKEAESSPFVERLLKKGYEVIYLTEPVDEYCIQALPEFDGKRFQNVAKEGVKFDESEKTKESREAVEKEFEPLLNWMKDKALKDKIEKAVVSQRLTESPCALVASQYGWSGNMERIMKAQAYQTGKDISTNYYASQKKTFEINPRHPLIRDMLRRIKEDEDDKTVLDLAVVLFETATLRSGYLLPDTKAYGDRIERMLRLSLNIDPDAKVEEEPEEEPEETAEDTTEDTEQDEDEEMDVGTDEEEETAKESTAEKDEL

SEQ ID NO: 6604 - protein, 315 aa, Homo Sapiens [sequence omitted]

SEQ ID NO: 6605 - protein, 315 aa, Homo Sapiens [sequence omitted]

SEQ ID NO: 6606 - protein, 53 aa, Homo Sapiens
MRALWVLGLCCVLLTFGSVRADDEVDVDGTVEEDLGKSREGSRTDDEVVQRSR

SEQ ID NO: 6607 - protein, 147 aa, Homo Sapiens
  misc_feature (1)..(1): Xaa can be any naturally occurring amino acid
XQYGWSGNMERIMKAQAYQTGKDISTNYYASQKKTFEINPRHPLIRDMLRRIKEDEDDKTVLDLAVVLFETATLRSGYLLPDTKAYGDRIERMLRLSLNIDPDAKVEEEPEEEPEETAEDTTEDTEQDEDEEMDVGTDEEEETAKMS

SEQ ID NO: 6608 - protein, 471 aa, Homo Sapiens
MAREMTILGSAVLTLLLAGYLAQQYLPLPTPKVIGIDLGTTYCSVGVFFPGTGKVKVIPDENGHISIPSMVSFTDNDVYVGYESVELADSNPQNTIYDAKRFIGKIFTAEELEAEIGRYPFKVLNKNGMVEFSVTSNETITVSPEYVGSRLLLKLKEMAEAYLGMPVANAVISVPAEFDLKQRNSTIEAANLAGLKILRVINEPTAAAMAYGLHKADVFHVLVIDLGGGTLDVSLLNKQGGMFLTRAMSGNNKLGGQDFNQRLLQYLYKQIYQTYGFVPSRKEEIHRLRQAVEMVKLNLTLHQSAQLSVLLTVEEQDRKEPHSSDTELPKDKLSSADDHRVNSGFGRGLSDKKSGESQVLFETEISRKLFDTLNEDLFQKILVPIQQVLKEGHLEKTEIDEVVLVGGSTRIPRIRQVIQEFFGKDPNTSVDPDLAVVTGVAIQAGIDGGSWPLQVSALEIPNKHLQKTNFN

SEQ ID NO: 6609 - protein, 654 aa, Homo Sapiens
MKLSLVAAMLLLLSAARAEEEDKKEDVGTVVGIDLGTTYSCVGVFKNGRVEIIANDQGNRITPSYVAFTPEGERLIGDAAKNQLTSNPENTVFDAKRLIGRTWNDPSVQQDIKFLPFKVVEKKTKPYIQVDIGGGQTKTFAPEEISAMVLTKMKETAEAYLGKKVTHAVVTVPAYFNDAQRQATKDAGTIAGLNVMRIINEPTAAAIAYGLDKREGEKNILVFDLGGGTFDVSLLTIDNGVFEVVATNGDTHLGGEDFDQRVMEHFIKLYKKKTGKDVRKDNRAVQKLRREVEKAKRALSSQHQARIEIESFYEGEDFSETLTRAKFEELNMDLFRSTMKPVQKVLEDSDLKKSDIDEIVLVGGSTRIPKIQQLVKEFFNGKEPSRGINPDEAVAYGAAVQAGVLSGDQDTGDLVLLDVCPLTLGIETVGGVMTKLIPRNTVVPTKKSQIFSTASDNQPTVTIKVYEGERPLTKDNHLLGTFDLTGIPPAPRGVPQIEVTFEIDVNGILRVTAEDKGTGNKNKITITNDQNRLTPEEIERMVNDAEKFAEEDKKLKERIDTRNELESYAYSLKNQIGDKEKLGGKLSSEDKETMEKAVEEKIEWLESHQDADIEDFKAKKKELEEIVQPIISKLYGSAGPPPTGEEDTAEKDEL

SEQ ID NO: 6610 - protein, 236 aa, Homo Sapiens
ISTHFAPGDFQGFALVNPQRNSRLTGEFTVEPVPEGAQLSFGNFAQLGHESFYWQLPETYQGDKGEAYFARMRRAHQNRTSLSEEQLRAAVTAGRIPEPPEGRDWAQRASQVDEAQRRMDAEIWQLLSSFAAQPQPPPQGLSPHPQPAAALRAAPPPSSSSSSSSSSASLSFSPGSQFSLSYEGFSLLPGSLYYWQLPRAFLGDKVAAYGGKLRYTLSYTAGPQGSPLSDPDVQIT

SEQ ID NO: 6611 - protein, 4391 aa, Homo Sapiens
MGWRAAGALLLALLLHGRLLAVTHGLRAYDGLSLPEDIETVTASQMRWTHSYLSDDEDMLADSISGDDLGSGDLGSGDFQMVYFRALVNFTRSIEYSPQLEDAGSREFREVSEAVVDTLESEYLKIPGDQVVSVVFIKELDGWVFVELDVGSEGNADGAQIQEMLLRVISSGSVASYVTSPQGFQFRRLGTVPQFPRACTEAEFACHSYNECVALEYRCDRRPDCRDMSDELNCEEPVLGISPTFSLLVETTSLPPRPETTIMRQPPVTHAPQPLLPGSVRPLPCGPQEAACRNGHCIPRDYLCDGQEDCEDGSDELDCGPPPPCEPNEFPCGNGHCALKLWRCDGDFDCEDRTDEANCPTKRPEEVCGPTQFRCVSTNMCIPASFHCDEESDCPDRSDEFGCMPPQVVTPPRESIQASRGQTVTFTCVAIGVPTPIINWRLNWGHIPSHPRVTVTSEGGRGTLIIRDVKESDQGAYTCEAMNARGMVFGIPDGVLELVPQRGPCPDGHFYLEHSAACLPCFCFGITSVCQSTRRFRDQIRLRFDQPDDFKGVNVTMPAQPGTPPLSSTQLQIDPSLHEFQLVDLSRRFLVHDSFWALPEQFLGNKVDSYGGSLRYNVRYELARGMLEPVQRPDVVLMGAGYRLLSRGHTPTQPGALNQRQVQFSEEHWVHESGRPVQRAELLQVLQSLEAVLIQTVYNTKMASVGLSDIAMDTTVTHATSHGRAHSVEECRCPIGYSGLSCESCDAHFTRVPGGPYLGTCSGCNCNGHASSCDPVYGHCLNCQHNTEGPQCNKCKAGFFGDAMKATATSCRPCPCPYIDASRRFSDTCFLDTDGQATCDACAPGYTGRRCESCAPGYEGNPIQPGGKCRPVNQEIVRCDERGSMGTSGEACRCKNNVVGRLCNECADGSFHLSTRNPDGCLKCFCMGVSRHCTSSSWSRAQLHGASEEPGHFSLTNAASTHTTNEGIFSPTPGELGFSSFHRLLSGPYFWSLPSRFLGDKVTSYGGELRFTVTQRSQPGSTPLHGQPLVVLQGNNIILEHHVAQEPSPGQPSTFIVPFREQAWQRPDGQPATREHLLMALAGIDTLLIRASYAQQPAESRVSGISMDVAVPEETGQDPALEVEQCSCPPGYRGPSCQDCDTGYTRTPSGLYLGTCERCSCHGHSEACEPETGACQGCQHHTEGPRCEQCQPGYYGDAQRGTPQDCQLCPCYGDPAAGQAAHTCFLDTDGHPTCDACSPGHSGRHCERCAPGYYGNPSQGQPCQRDSQVPGPIGCNCDPQGSVSSQCDAAGQCQCKAQVEGLTCSHCRPHHFHLSASNPDGCLPCFCMGITQQCASSAYTRHLISTHFAPGDFQGFALVNPQRNSRLTGEFTVEPVPEGAQLSFGNFAQLGHESFYWQLPETYQGDKVAAYGGKLRYTLSYTAGPQGSPLSDPDVQITGNNIMLVASQPALQGPERRSYEIMFREEFWRRPDGQPATREHLLMALADLDELLIRATFSSVPLAASISAVSLEVAQPGPSNRPRALEVEECRCPPGYIGLSCQDCAPGYTRTGSGLYLGHCELCECNGHSDLCHPETGACSQCQHNAAGEFCELCAPGYYGDATAGTPEDCQPCACPLTNPENMFSRTCESLGAGGYRCTACEPGYTGQYCEQCGPGYVGNPSVQGGQCLPETNQAPLVVEVHPARSIVPQGGSHSLRCQVSGSPPHYFYWSREDGRPVPSGTQQRHQGSELHFPSVQPSDAGVYICTCRNLHQSNTSRAELLVTEAPSKPITVTVEEQRSQSVRPGADVTFICTAKSKSPAYTLVWTRLHNGKLPTRAMDFNGILTIRNVQLSDAGTYVCTGSNMFAMDQGTATLHVQASGTLSAPVVSIHPPQLTVQPGQLAEFRCSATGSPTPTLEWTGGPGGQLPAKAQIHGGILRLPAVEPTDQAQYLCRAHSSAGQQVARAVLHVHGGGGPRVQVSPERTQVHAGRTVRLYCRAAGVPSATITWRKEGGSLPPQARSERTDIATLLIPAITTADAGFYLCVATSPAGTAQARIQVVVLSASDASPPPVKIESSSPSVTEGQTLDLNCVVAGSAHAQVTWYRRGGSLPPHTQVHGSRLRLPQVSPADSGEYVCRVENGSGPKEASITVSVLHGTHSGPSYTPVPGSTRPIRIEPSSSHVAEGQTLDLNCVVPGQAHAQVTWHKRGGSLPARHQTHGSLLRLHQVTPADSGEYVCHVVGTSGPLEASVLVTIEASVIPGPIPPVRIESSSSTVAEGQTLDLSCVVAGQAHAQVTWYKRGGSLPARHQVRGSRLYIFQASPADAGQYVCRASNGMEASITVTVTGTQGANLAYPAGSTQPIRIEPSSSQVAEGQTLDLNCVVPGQSHAQVTWHKRGGSLPVRHQTHGSLLRLYQASPADSGEYVCRVLGSSVPLEASVLVTIEPAGSVPALGVTPTVRIESSSSQVAEGQTLDLNCLVAGQAHAQVTWHKRGGSLPARHQVHGSRLRLLQVTPADSGEYVCRVVGSSGTQEASVLVTIQQRLSGSHSQGVAYPVRIESSSASLANGHTLDLNCLVASQAPHTITWYKRGGSLPSRHQIVGSRLRIPQVTPADSGEYVCHVSNGAGSRETSLIVTIQGSGSSHVPSVSPPIRIESSSPTVVEGQTLDLNCVVARQPQAIITWYKRGGSLPSRHQTHGSHLRLHQMSVADSGEYVCRANNNIDALEASIVISVSPSAGSPSAPGSSMPIRIESSSSHVAEGETLDLNCVVPGQAHAQVTWHKRGGSLPSHHQTRGSRLRLHHVSPADSGEYVCRVMGSSGPLEASVLVTIEASGSSAVHVPAPGGAPPIRIEPSSSRVAEGQTLDLKCVVPGQAHAQVTWHKRGGNLPARHQVHGPLLRLNQVSPADSGEYSCQVTGSSGTLEASVLVTIEPSSPGPIPAPGLAQPIYIEASSSHVTEGQTLDLNCVVPGQAHAQVTWYKRGGSLPARHQTHGSQLRLHLVSPADSGEYVCRAASGPGPEQEASFTVTVPPSEGSSYRLRSPVISIDPPSSTVQQGQDASFKCLIHDGAAPISLEWKTRNQELEDNVHISPNGSIITIVGTRPSNHGTYRCVASNAYGVAQSVVNLSVHGPPTVSVLPEGPVWVKVGKAVTLECVSAGEPRSSARWTRISSTPAKLEQRTYGLMDSHAVLQISSAKPSDAGTYVCLAQNALGTAQKQVEVIVDTGAMAPGAPQVQAEEAELTVEAGHTATLRCSATGSPAPTIHWSKLRSPLPWQHRLEGDTLIIPRVAQQDSGQYICNATSPAGHAEATIILHVESPPYATTVPEHASVQAGETVQLQCLAHGTPPLTFQWSRVGSSLPGRATARNELLHFERAAPEDSGRYRCRVTNKVGSAEAFAQLLVQGPPGSLPATSIPAGSTPTVQVTPQLETKSIGASVEFHCAVPSDRGTQLRWFKEGGQLPPGHSVQDGVLRIQNLDQSCQGTYICQAHGPWGKAQASAQLVIQALPSVLINIRTSVQTVVVGHAVEFECLALGDPKPQVTWSKVGGHLRPGIVQSGGVVRIAHVELADAGQYRCTATNAAGTTQSHVLLLVQALPQISMPQEVRVPAGSAAVFPCIASGYPTPDISWSKLDGSLPPDSRLENNMLMLPSVRPQDAGTYVCTATNRQGKVKAFAHLQVPERVVPYFTQTPYSFLPLPTIKDAYRKFEIKITFRPDSADGMLLYNGQKRVPGSPTNLANRQPDFISFGLVGGRPEFRFDAGSGMATIRHPTPLALGHFHTVTLLRSLTQGSLIVGDLAPVNGTSQGKFQGLDLNEELYLGGYPDYGAIPKAGLSSGFIGCVRELRIQGEEIVFHDLNLTAHGISHCPTCRDRPCQNGGQCHDSESSSYVCVCPAGFTGSRCEHSQALHCHPEACGPDATCVNRPDGRGYTCRCHLGRSGLRCEEGVTVTTPSLSGAGSYLALPALTNTHHELRLDVEFKPLAPDGVLLFSGGKSGPVEDFVSLAMVGGHLEFRYELGSGLAVLRSAEPLALGRWHRVSAERLNKDGSLRVNGGRPVLRSSPGKSQGLNLHTLLYLGGVEPSVPLSPATNMSAHFRGCVGEVSVNGKRLDLTYSFLGSQGIGQCYDSSPCERQPCQHGATCMPAGEYEFQCLCRDGFKGDLCEHEENPCQLREPCLHGGTCQGTRCLCLPGFSGPRCQQGSGHGIAESDWHLEGSGGNDAPGQYGAYFHDDGFLAFPGHVFSRSLPEVPETIELEVRTSTASGLLLWQGVEVGEAGQGKDFISLGLQDGHLVFRYQLGSGEARLVSEDPINDGEWHRVTALREGRRGSIQVDGEELVSGRSPGPNVAVNAKGSVYIGGAPDVATLTGGRFSSGITGCVKNLVLHSARPGAPPPQPLDLQHRAQAGANTRPCPS

SEQ ID NO: 6612 - protein, 109 aa, Homo Sapiens
  misc_feature (1)..(1): Xaa can be any naturally occurring amino acid
XGTPPLTFQWSRVGSSLPGRATARNELLHFERAAPEDSGRYRCRVTNKVGSAEAFAQLLVQESRTWTRAAKGRIYARPMDLGGRPRPVPSWLSKVGGWLQASAKSREQR

SEQ ID NO: 6613 - protein, 307 aa, Homo Sapiens
  misc_feature (1)..(1): Xaa can be any naturally occurring amino acid
XNMLMLPSVRPQDAGTYVCTATNRQGKVKAFAHLQVPERVVPYFTQTPYSFLPLPTIKDAYRKFEIKITFRPDSADGLLLYSGMLLYNGQKRVPGSPTNLANRQPDFISFGLVGGRPEFRFDAGSGMATIRHPTPLALGHFHTVTLLRSLTQGSLIVGDLAPVNGTSQGKFQGLDLNEELYLGGYPDYGAIPKAGLSSGFIGCVRELRIQGEEIVFHDLNLTAHGISHCPTCRDRPCQNGGQCHDSESSSYVCVCPAGFTGSRCEHSQALHCHPEACGPDATCVNRPDGRGYTCRCHLGRSGLRCEE

SEQ ID NO: 6614 - protein, 197 aa, Homo Sapiens
  misc_feature (1)..(1): Xaa can be any naturally occurring amino acid
XTPSGLYLGTCERCSCHGHSEACEPETGACQGCQHHTEGPRCEQCQPGYYGDAQRGTPQDCQLCPCYGDPAAGQAAHTCFLDTDGHPTCDACSPGHSGRHCERCAPGYYGNPSQGQPCQRDSQVPGPIGCNCDPQGSVSSQCDAAGQCQCKVSPNPCPCGACSAPLPRPCGEIRQHLVEAETWAWGAGHGGQGRGCP

SEQ ID NO: 6615 - protein, 242 aa, Homo Sapiens
MAETEALSKLREDFRMQNKSVFILGASGETGRVLLKEILEQGLFSKVTLIGRRKLTFDEEAYKNVNQEVVDFEKLDDYASAFQGHDVGFCCLGTTRGKAGAEGFVRVDRDYVLKSAELAKAGGCKHFNLLSSKGADKSSNFLYLQVKGEVEAKVEELKFDRYSVFRPGVLLCDRQESRPGEWLVRKFFGSLPDSWASGHSVPVVTVVRAMLNNVVRPRDKQMELLENKAIHDLGKAHGSLKP

SEQ ID NO: 6616 - protein, 242 aa, Homo Sapiens; identical to SEQ ID NO: 6615

SEQ ID NO: 6617 - protein, 242 aa, Homo Sapiens; identical to SEQ ID NO: 6615

SEQ ID NO: 6618 - protein, 196 aa, Homo Sapiens
MAETEALSKLREDFRMQNKSVFILGASGETGRVLLKEILEQGLFSKVTLIGRRKLTFDEEAYKNVNQEVVDFEKLDDYASAFQGHDVGFCCLGTTRGKAGAGEVEAKVEELKFDRYSVFRPGVLLCDRQESRPGEWLVRKFFGSLPDSWASGHSVPVVTVVRAMLNNVVRPRDKQMELLENKAIHDLGKAHGSLKP

SEQ ID NO: 6619 - protein, 133 aa, Homo Sapiens
MAETEALSKLREDFRMQNKSVFILGASGETGRVLLKEILEQGLFSKVTLIGRRKLTFDEEAYKNVNQEVVDFEKLDDYASAFQGHDVGFCCLGTTRGKAGAVRKAYALFPFCWPVISRILFLLTLFLCACCNA

SEQ ID NO: 6620 - protein, 133 aa, Homo Sapiens; identical to SEQ ID NO: 6619

SEQ ID NO: 6621 - protein, 133 aa, Homo Sapiens; identical to SEQ ID NO: 6619

SEQ ID NO: 6622 - protein, 276 aa, Homo Sapiens
MAGPAALSAAAAAALAAALLLLRREDPGPGAGPSMAETEALSKLREDFRMQNKSVFILGASGETGRVLLKEILEQGLFSKVTLIGRRKLTFDEEAYKNVNQEVVDFEKLDDYASAFQGHDVGFCCLGTTRGKAGAEGFVRVDRDYVLKSAELAKAGGCKHFNLLSSKGADKSSNFLYLQVKGEVEAKVEELKFDRYSVFRPGVLLCDRQESRPGEWLVRKFFGSLPDSWASGHSVPVVTVVRAMLNNVVRPRDKQMELLENKAIHDLGKAHGSLKP

SEQ ID NO: 6623 - protein, 57 aa, Homo Sapiens
MKFFVFALVLALMISMISADSHEKRHHGYRRKFHEKHHSHREFPFYGDYGSNYLYDN

SEQ ID NO: 6624 - protein, 57 aa, Homo Sapiens; identical to SEQ ID NO: 6623

SEQ ID NO: 6625 - protein, 57 aa, Homo Sapiens; identical to SEQ ID NO: 6623

SEQ ID NO: 6626 - protein, 41 aa, Homo Sapiens
MKFFVFALILALMLSMTGADSHAKEKHHSHRGYRSNYLYDN

SEQ ID NO: 6627 - protein, 51 aa, Homo Sapiens
MKFFVFALILALMLSMTGADSHAKRHHGYKRKFHEKHHSHRGYRSNYLYDN

SEQ ID NO: 6628 - protein, 51 aa, Homo Sapiens; identical to SEQ ID NO: 6627

SEQ ID NO: 6629 - protein, 221 aa, Homo Sapiens
GKLPVLLLGRSSELRPGEFVVAIGSPFSLQNTVTTGIVSTTQRGGKELGLRNSDMDYIQTDAIINYGNSGGPLVNLDGEVIGINTLKVTAGISFAIPSDKIKKFLTESHDRQAKGKAITKKKYIGIRMMSLTSSKAKELKDRHRDFPDVISGAYIIEVIPDTPAEAGGLKENDVIISINGQSVVSANDVSDVIKRESTLNMVVRRGNEDIMITVIPEEIDP

SEQ ID NO: 6630 - protein, 480 aa, Homo Sapiens
MQIPRAALLPLLLLLLAAPASAQLSRAGRSAPLAAGCPDRCEPARCPPQPEHCEGGRARDACGCCEVCGAPEGAACGLQEGPCGEGLQCVVPFGVPASATVRRRAQAGLCVCASSEPVCGSDANTYANLCQLRAASRRSERLHRPPVIVLQRGACGQGQEDPNSLRHKYNFIADVVEKIAPAVVHIELFRKLPFSKREVPVASGSGFIVSEDGLIVTNAHVVTNKHRVKVELKNGATYEAKIKDVDEKADIALIKIDHQGKLPVLLLGRSSELRPGEFVVAIGSPFSLQNTVTTGIVSTTQRGGKELGLRNSDMDYIQTDAIINYGNSGGPLVNLDGEVIGINTLKVTAGISFAIPSDKIKKFLTESHDRQAKGKAITKKKYIGIRMMSLTSSKAKELKDRHRDFPDVISGAYIIEVIPDTPAEAGGLKENDVIISINGQSVVSANDVSDVIKRESTLNMVVRRGNEDIMITVIPEEIDP

SEQ ID NO: 6631 - protein, 453 aa, Homo Sapiens
MQARALLLAALAALALAREPPAAPCPARCDVSRCPSPRCPGGYVPDLCNCCLVCAASEGEPCGGPLDSPCGESLECVRGLCRCRWSHAVCGTDGHTYANVCALQAASRRALQLSGTPVRQLQKGACPLGLHQLSSPRYKFNFIADVVEKIAPAVVHIELFLRHPLFGRNVPLSSGSGFIMSEAGLIITNAHVVSSNSAAPGRQQLKVQLQNGDSYEATIKDIDKKSDIATIKIHPKKKLPVLLLGHSADLRPGEFVVAIGSPFALQNTVTTGIVSTAQREGRELGLRDSDMDYIQTDAIINYGNSGGPLVNLDGEVIGINTLKVTAGISFAIPSDRITRFLTEFQDKQIKDWKKRFIGIRMRTITPSLVDELKASNPDFPEVSSGIYVQEVAPNSPSQRGGIQDGDIIVKVNGRPLVDSSELQEAVLTESPLLLEVRRGNDDLLFSIAPEVVM

SEQ ID NO: 6632 - protein, 357 aa, Homo Sapiens
MQARALLLAALAALALAREPPAAPCPARCDVSRCPSPRCPGGYVPDLCNCCLVCAASEGEPCGGPLDSPCGESLECVRGLCRCRWSHAVCGTDGHTYANVCALQAASRRALQLSGTPVRQLQKGACPLGLHQLSSPRYKFNFIADVVEKIAPAVVHIELFLRHPLFGRNVPLSSGSGFIMSEAGLIITNAHVVSSNSAAPGRQQLKVQLQNGDSYEATIKDIDKKSDIATIKIHPKKKLPVLLLGHSADLRPGEFVVAIGSPFALQNTVTTGIVSTAQREGRELGLRDSDMDYIQTDAIINYGNSGGPLVNLDGEVIGINTLKVTAGISFAIPSDRITRFLTEFQDKQIKAPSLAVH

SEQ ID NO: 6633 - protein, 476 aa, Homo Sapiens
MIRPQLRTAGLGRCLLPGLLLLLVPVLWAGAEKLHTQPSCPAVCQPTRCPALPTCALGTTPVFDLCRCCRVCPAAEREVCGGAQGQPCAPGLQCLQPLRPGFPSTCGCPTLGGAVCGSDRRTYPSMCALRAENRAARRLGKVPAVPVQWGNCGDTGTRSAGPLRRNYNFIAAVVEKVAPSVVHVQLWGRLLHGSRLVPVYSGSGFIVSEDGLIITNAHVVRNQQWIEVVLQNGARYEAVVKDIDLKLDLAVIKIESNAELPVLMLGRSSDLRAGEFVVALGSPFSLQNTATAGIVSTKQRGGKELGMKDSDMDYVQIDATINYGNSGGPLVNLDGDVIGVNSLRVTDGISFAIPSDRVRQFLAEYHEHQMKGKAFSNKKYLGLQMLSLTVPLSEELKMHYPDFPDVSSGVYVCKVVEGTAAQSSGLRDHDVIVNINGKPITTTTDVVKALDSDSLSMAVLRGKDNLLLTVIPETIN

SEQ ID NO: 6634 - protein, 69 aa, Homo Sapiens
MAAHLLPICALFLTLLDMAQGFRGPLLPNRPFTTVWNANTQWCLERHGVDVDVSVFDVVANPGQTFRGP

SEQ ID NO: 6635 - protein, 103 aa, Homo Sapiens
MAAHLLPICALFLTLLDMAQGFRGPLLPNRPFTTVWNANTQWCLERHGVDVDVSVFDVVANPGQTFRGPDMTIFYSSQLGTYPYYTPTGEPVFGGLPQNASLI

SEQ ID NO: 6636 - protein, 435 aa, Homo Sapiens
MAAHLLPICALFLTLLDMAQGFRGPLLPNRPFTTVWNANTQWCLERHGVDVDVSVFDVVANPGQTFRGPDMTIFYSSQLGTYPYYTPTGEPVFGGLPQNASLIAHLARTFQDILAAIPAPDFSGLAVIDWEAWRPRWAFNWDTKDIYRQRSRALVQAQHPDWPAPQVEAVAQDQFQGAARAWMAGTLQLGRALRPRGLWGFYGFPDCYNYDFLSPNYTGQCPSGIRAQNDQLGWLWGQSRALYPSIYMPAVLEGTGKSQMYVQHRVAEAFRVAVAAGDPNLPVLPYVQIFYDTTNHFLPLDELEHSLGESAAQGAAGVVLWVSWENTRTKESCQAIKEYMDTTLGPFILNVTSGALLCSQALCSGHGRCVRRTSHPKALLLLNPASFSIQLTPGGGPLSLRGALSLEDQAQMAVEFKCRCYPGWQAPWCERKSMW

SEQ ID NO: 6637 - protein, 435 aa, Homo Sapiens; identical to SEQ ID NO: 6636

SEQ ID NO: 6638 - protein, 405 aa, Homo Sapiens
MAAHLLPICALFLTLLDMAQGFRGPLLPNRPFTTVWNANTQWCLERHGVDVDVSVFDVVANPGQTFRGPDMTIFYSSQLGTYPYYTPTGEPVFGGLPQNASLIAHLARTFQDILAAIPAPDFSGLAVIDWEAWRPRWAFNWDTKDIYRQRSRALVQAQHPDWPAPQVEAVAQDQFQGAARAWMAGTLQLGRALRPRGLWGFYGFPDCYNYDFLSPNYTGQCPSGIRAQNDQLGWLWGQSRALYPSIYMPAVLEGTGKSQMYVQHRVAEAFRVAVAAGDPNLPVLPYVQIFYDTTNHFLPLESCQAIKEYMDTTLGPFILNVTSGALLCSQALCSGHGRCVRRTSHPKALLLLNPASFSIQLTPGGGPLSLRGALSLEDQAQMAVEFKCRCYPGWQAPWCERKSMW

SEQ ID NO: 6639 - protein, 435 aa, Homo Sapiens; identical to SEQ ID NO: 6636

SEQ ID NO: 6640 - protein, 435 aa, Homo Sapiens; identical to SEQ ID NO: 6636

SEQ ID NO: 6641 - protein, 253 aa, Homo Sapiens
MAGTLQLGRALRPRGLWGFYGFPDCYNYDFLSPNYTGQCPSGIRAQNDQLGWLWGQSRALYPSIYMPAVLEGTGKSQMYVQHRVAEAFRVAVAAGDPNLPVLPYVQIFYDTTNHFLPLDELEHSLGESAAQGAAGVVLWVSWENTRTKESCQAIKEYMDTTLGPFILNVTSGALLCSQALCSGHGRCVRRTSHPKALLLLNPASFSIQLTPGGGPLSLRGALSLEDQAQMAVEFKCRCYPGWQAPWCERKSMW

SEQ ID NO: 6642 - protein, 176 aa, Homo Sapiens
MYVQHRVAEAFRVAVAAGDPNLPVLPYVQIFYDTTNHFLPLDELEHSLGESAAQGAAGVVLWVSWENTRTKESCQAIKEYMDTTLGPFILNVTSGALLCSQALCSGHGRCVRRTSHPKALLLLNPASFSIQLTPGGGPLSLRGALSLEDQAQMAVEFKCRCYPGWQAPWCERKSMW

SEQ ID NO: 6643 - protein, 48 aa, Homo Sapiens
MRAGPGPTVTLALVLAVSWAMELKPTAPPIFTGRPFVVAWDVPTQDCG

SEQ ID NO: 6644 - protein, 76 aa, Homo Sapiens
MRAGPGPTVTLALVLAVSWAMELKPTAPPIFTGRPFVVAWDVPTQDCGPRLKVPLDLNAFDVQASPNEGFVNQNIT

SEQ ID NO: 6645 - protein, 81 aa, Homo Sapiens
MRAGPGPTVTLALVLAVSWAMELKPTAPPIFTGRPFVVAWDVPTQDCGPRLKVPLDLNAFDVQASPNEGFVNQNITIFYRD

SEQ ID NO: 6646 - protein, 117 aa, Homo Sapiens
MRAGPGPTVTLALVLAVSWAMELKPTAPPIFTGRPFVVAWDVPTQDCGPRLKVPLDLNAFDVQASPNEGFVNQNITIFYRDRLGLYPRFDSAGRSVHGGVPQNVSLWAHRKMLQKRV

SEQ ID NO: 6647 - protein, 121 aa, Homo Sapiens
MRAGPGPTVTLALVLAVSWAMELKPTAPPIFTGRPFVVAWDVPTQDCGPRLKVPLDLNAFDVQASPNEGFVNQNITIFYRDRLGLYPRFDSAGRSVHGGVPQNVSLWAHRKMLQKRVEHYI

SEQ ID NO: 6648 - protein, 473 aa, Homo Sapiens
MRAGPGPTVTLALVLAVSWAMELKPTAPPIFTGRPFVVAWDVPTQDCGPRLKVPLDLNAFDVQASPNEGFVNQNITIFYRDRLGLYPRFDSAGRSVHGGVPQNVSLWAHRKMLQKRVEHYIRTQESAGLAVIDWEDWRPVWVRNWQDKDVYRRLSRQLVASRHPDWPPDRIVKQAQYEFEFAAQQFMLETLRYVKAVRPRHLWGFYLFPDCYNHDYVQNWESYTGRCPDVEVARNDQLAWLWAESTALFPSVYLDETLASSRHGRNFVSFRVQEALRVARTHHANHALPVYVFTRPTYSRRLTGLSEMDLISTIGESAALGAAGVILWGDAGYTTSTETCQYLKDYLTRLLVPYVVNVSWATQYCSRAQCHGHGRCVRRNPSASTFLHLSTNSFRLVPGHAPGEPQLRPVGELSWADIDHLQTHFRCQCYLGWSGEQCQWDHRQAAGGASEAWAGSHLTSLLALAALAFTWTL

SEQ ID NO: 6649 - protein, 473 aa, Homo Sapiens; identical to SEQ ID NO: 6648

SEQ ID NO: 6650 - protein, 473 aa, Homo Sapiens; identical to SEQ ID NO: 6648

SEQ ID NO: 6651 - protein, 473 aa, Homo Sapiens; identical to SEQ ID NO: 6648

SEQ ID NO: 6652 - protein, 168 aa, Homo Sapiens
MLPPAHHQAFVRHRLEEAFRVALVGHRHPLPVLAYVRLTHRRSGRFLSQDDLVQSIGVSAALGAAGVVLWGDLSLSSSEEECWHLHDYLVDTLGPYVINVTRAAMACSHQRCHGHGRCARRDPGQMEAFLHLWPDGSLGDWKSFSCHCYWGWAGPTCQEPRPGPKEAV

SEQ ID NO: 6653 - protein, 138 aa, Homo Sapiens
MLPPAHHQAFVRHRLEEAFRVALVGHRHPLPVLAYVRLTHRRSGRFLSQEECWHLHDYLVDTLGPYVINVTRAAMACSHQRCHGHGRCARRDPGQMEAFLHLWPDGSLGDWKSFSCHCYWGWAGPTCQEPRPGPKEAV

SEQ ID NO: 6654 - protein, 160 aa, Homo Sapiens
MTTQLGPALVLGVALCLGCGQPLPQVPERPFSVLWNVPSAHCEARFGVHLPLNALGIIANRGQHFHGQNMTIFYKNQLGLYPYFGPRGTAHNGGIPQALPLDRHLALAAYQIHHSLRPGFAGPAVLDWEEWCPLWAGNWGRRRAYQAASWAWAQQVFPDL

SEQ ID NO: 6655 - protein, 417 aa, Homo Sapiens
MTTQLGPALVLGVALCLGCGQPLPQVPERPFSVLWNVPSAHCEARFGVHLPLNALGIIANRGQHFHGQNMTIFYKNQLGLYPYFGPRGTAHNGGIPQALPLDRHLALAAYQIHHSLRPGFAGPAVLDWEEWCPLWAGNWGRRRAYQAASWAWAQQVFPDLDPQEQLYKAYTGFEQAARALMEDTLRVAQALRPHGLWGFYHYPACGNGWHSMASNYTGRCHAATLARNTQLHWLWAASSALFPSIYLPPRLPPAHHQAFVRHRLEEAFRVALVGHRHPLPVLAYVRLTHRRSGRFLSQDDLVQSIGVSAALGAAGVVLWGDLSLSSSEEECWHLHDYLVDTLGPYVINVTRAAMACSHQRCHGHGRCARRDPGQMEAFLHLWPDGSLGDWKSFSCHCYWGWAGPTCQEPRPGPKEAV

SEQ ID NO: 6656 - protein, 387 aa, Homo Sapiens
MTTQLGPALVLGVALCLGCGQPLPQVPERPFSVLWNVPSAHCEARFGVHLPLNALGIIANRGQHFHGQNMTIFYKNQLGLYPYFGPRGTAHNGGIPQALPLDRHLALAAYQIHHSLRPGFAGPAVLDWEEWCPLWAGNWGRRRAYQAASWAWAQQVFPDLDPQEQLYKAYTGFEQAARALMEDTLRVAQALRPHGLWGFYHYPACGNGWHSMASNYTGRCHAATLARNTQLHWLWAASSALFPSIYLPPRLPPAHHQAFVRHRLEEAFRVALVGHRHPLPVLAYVRLTHRRSGRFLSQEECWHLHDYLVDTLGPYVINVTRAAMACSHQRCHGHGRCARRDPGQMEAFLHLWPDGSLGDWKSFSCHCYWGWAGPTCQEPRPGPKEAV

SEQ ID NO: 6657 - protein, 387 aa, Homo Sapiens; identical to SEQ ID NO: 6656

SEQ ID NO: 6658 - protein, 417 aa, Homo Sapiens; identical to SEQ ID NO: 6655

SEQ ID NO: 6659 - protein, 92 aa, Homo Sapiens
MADKVRRQRPRRRVCWALVAVLLADLLALSDTLAVMSVDLGSESMKVAIVKPGVPMEIVLNKESRRKTPVIVTLKENERFFGDSAASMAIKN

SEQ ID NO: 6660 - protein, 103 aa, Homo Sapiens
MADKVRRQRPRRRVCWALVAVLLADLLALSDTLAVMSVDLGSESMKVAIVKPGVPMEIVLNKESRRKTPVIVTLKENERFFGDSAASMAIKNPKATLRYFQHL

SEQ ID NO: 6661 - protein, 149 aa, Homo Sapiens
MADKVRRQRPRRRVCWALVAVLLADLLALSDTLAVMSVDLGSESMKVAIVKPGVPMEIVLNKESRRKTPVIVTLKENERFFGDSAASMAIKNPKATLRYFQHLLGKQADNPHVALYQARFPEHELTFDPQRQTVHFQISSQLQFSPEEV

SEQ ID NO: 6662 - protein, 154 aa, Homo Sapiens
MADKVRRQRPRRRVCWALVAVLLADLLALSDTLAVMSVDLGSESMKVAIVKPGVPMEIVLNKESRRKTPVIVTLKENERFFGDSAASMAIKNPKATLRYFQHLLGKQADNPHVALYQARFPEHELTFDPQRQTVHFQISSQLQFSPEEVLGMVL

SEQ ID NO: 6663 - protein, 211 aa, Homo Sapiens
MADKVRRQRPRRRVCWALVAVLLADLLALSDTLAVMSVDLGSESMKVAIVKPGVPMEIVLNKESRRKTPVIVTLKENERFFGDSAASMAIKNPKATLRYFQHLLGKQADNPHVALYQARFPEHELTFDPQRQTVHFQISSQLQFSPEEVLGMVLNYSRSLAEDFAEQPIKDAVITVPVFFNQAERRAVLQAARMAGLKVLQLINDNTATAL

SEQ ID NO: 6664 - protein, 224 aa, Homo Sapiens
MADKVRRQRPRRRVCWALVAVLLADLLALSDTLAVMSVDLGSESMKVAIVKPGVPMEIVLNKESRRKTPVIVTLKENERFFGDSAASMAIKNPKATLRYFQHLLGKQADNPHVALYQARFPEHELTFDPQRQTVHFQISSQLQFSPEEVLGMVLNYSRSLAEDFAEQPIKDAVITVPVFFNQAERRAVLQAARMAGLKVLQLINDNTATALSYGVFRRKDINTT

SEQ ID NO: 6665 - protein, 656 aa, Homo Sapiens
MADKVRRQRPRRRVCWALVAVLLADLLALSDTLAVMSVDLGSESMKVAIVKPGVPMEIVLNKESRRKTPVIVTLKENERFFGDSAASMAIKNPKATLRYFQHLLGKQADNPHVALYQARFPEHELTFDPQRQTVHFQISSQLQFSPEEVLGMVLNYSRSLAEDFAEQPIKDAVITVPVFFNQAERRAVLQAARMAGLKVLQLINDNTATALSYGVFRRKDINTTAQNIMFYDMGSGSTVCTIVTYQMVKTKEAGMQPQLQIRGVGFDRTLGGLEMELRLRERLAGLFNEQRKGQRAKDVRENPRAMAKLLREANRLKTVLSANADHMAQIEGLMDDVDFKAKVTRVEFEELCADLFERVPGPVQQALQSAEMSLDEIEQVILVGGATRVPRVQEVLLKAVGKEELGKNINADEAAAMGAVYQAAALSKAFKVKPFVVRDAVVYPILVEFTREVEEEPGIHSLKHNKRVLFSRMGPYPQRKVITFNRYSHDFNFHINYGDLGFLGPEDLRVFGSQNLTTVKLKGVGDSFKKYPDYESKGIKAHFNLDESGVLSLDRVESVFETLVEDSAEEESTLTKLGNTISSLFGGGTTPDAKENGTDTVQEEEESPAEGSKDEPGEQVELKEEAEAPVEDGSQPPPPEPKGDATPEGEKATEKE

SEQ ID NO: 6666 - protein, 937 aa, Homo Sapiens
MADKVRRQRPRRRVCWALVAVLLADLLALSDTLAVMSVDLGSESMKVAIVKPGVPMEIVLNKESRRKTPVIVTLKENERFFGDSAASMAIKNPKATLRYFQHLLGKQADNPHVALYQARFPEHELTFDPQRQTVHFQISSQLQFSPEEVLGMVLNYSRSLAEDFAEQPIKDAVITVPVFFNQAERRAVLQAARMAGLKVLQLINDNTATALSYGVFRRKDINTTAQNIMFYDMGSGSTVCTIVTYQMVKTKEAGMQPQLQIRGVGFDRTLGGLEMELRLRERLAGLFNEQRKGQRAKDVRENPRAMAKLLREANRLKTVLSANADHMAQIEGLMDDVDFKAKVTRVEFEELCADLFERVPGPVQQALQSAEMSLDEIEQVILVGGATRVPRVQEVLLKAVGKEELGKNINADEAAAMGAVYQAAALSKAFKVKPFVVRDAVVYPILVEFTREVEEEPGIHSLKHNKRVLFSRMGPYPQRKVITFNRYSHDFNFHINYGDLGFLGPEDLRVFGSQNLTTVKLKGVGDSFKKYPDYESKGIKAHFNLDESGVLSLDRVESVFETLVEDSAEEESTLTKLGNTISSLFGGGTTPDAKENGTDTVQKPSEKAEAGPEGVAPAPEGEKKQKPARKRRMVEEIGVELVVLDLPDLPEDKLAQSVQKLQDLTLRDLEKQEREKAANSLEAFIFETQDKLYQPEYQEVSTEEQREEISGKLSAASTWLEDEGVGATTVMLKEKLAELRKLCQGLFFRVEERKKWPERLSALDNLLNHSSMFLKGARLIPEMDQIFTEVEMTTLEKVINETWAWKNATLAEQAKLPATEKPVLLSKDIEAKMMALDREVQYLLNKAKFTKPRPRPKDKNGTRAEPPLNASASDQGEKVIPPAGQTEDAEPISEPEKVETGSEPGDTEPLELGGPGAEPEQKEQSTGQKRPLKNDEL

SEQ ID NO: 6667 - protein, 678 aa, Homo Sapiens
MADKVRRQRPRRRVCWALVAVLLADLLALSDTLAVMSVDLGSESMKVAIVKPGVPMEIVLNKESRRKTPVIVTLKENERFFGDSAASMAIKNPKATLRYFQHLLGKQADNPHVALYQARFPEHELTFDPQRQTVHFQISSQLQFSPEEVLGMVLNYSRSLAEDFAEQPIKDAVITVPVFFNQAERRAVLQAARMAGLKVLQLINDNTATALSYGVFRRKDINTTAQNIMFYDMGSGSTVCTIVTYQMVKTKEAGMQPQLQIRGVGFDRTLGGLEMELRLRERLAGLFNEQRKGQRAKDVRENPRAMAKLLREANRLKTVLSANADHMAQIEGLMDDVDFKAKVTRVEFEELCADLFERVPGPVQQALQSAEMSLDEIEQVILVGGATRVPRVQEVLLKAVGKEELGKNINADEAAAMGAVYQAAALSKAFKVKPFVVRDAVVYPILVEFTREVEEEPGIHSLKHNKRVLFSRMGPYPQRKVITFNRYSHDFNFHINYGDLGFLGPEDLRVFGSQNLTTVKLKGVGDSFKKYPDYESKGIKAHFNLDESGVLSLDRVESVFETLVEDSAEEESTLTKLGNTISSLFGGGTTPDAKENGTDTVQEEEESPAEGSKDEPGEQVELKEEAEAPVEDGSQPPPPEPKGDATPEGEKATEKENGDKSEAQKPVVCRASVTRFGF

SEQ ID NO: 6668 - protein, 677 aa, Homo Sapiens
MADKVRRQRPRRRVCWALVAVLLADLLALSDTLAVMSVDLGSESMKVAIVKPGVPMEIVLNKESRRKTPVIVTLKENERFFGDSAASMAIKNPKATLRYFQHLLGKQADNPHVALYQARFPEHELTFDPQRQTVHFQISSQLQFSPEEVLGMVLNYSRSLAEDFAEQPIKDAVITVPVFFNQAERRAVLQAARMAGLKVLQLINDNTATALSYGVFRRKDINTTAQNIMFYDMGSGSTVCTIVTYQMVKTKEAGMQPQLQIRGVGFDRTLGGLEMELRLRERLAGLFNEQRKGQRAKDVRENPRAMAKLLREANRLKTVLSANADHMAQIEGLMDDVDFKAKVTRVEFEELCADLFERVPGPVQQALQSAEMSLDEIEQVILVGGATRVPRVQEVLLKAVGKEELGKNINADEAAAMGAVYQAAALSKAFKVKPFVVRDAVVYPILVEFTREVEEEPGIHSLKHNKRVLFSRMGPYPQRKVITFNRYSHDFNFHINYGDLGFLGPEDLRVFGSQNLTTVKLKGVGDSFKKYPDYESKGIKAHFNLDESGVLSLDRVESVFETLVEDSAEEESTLTKLGNTISSLFGGGTTPDAKENGTDTVQEEEESPAEGSKDEPGEQVELKEEAEAPVEDGSQPPPPEPKGDATPEGEKATEKENGDKSEAQASVCRASVTRFGF

SEQ ID NO: 6669 - protein, 999 aa, Homo Sapiens
MADKVRRQRPRRRVCWALVAVLLADLLALSDTLAVMSVDLGSESMKVAIVKPGVPMEIVLNKESRRKTPVIVTLKENERFFGDSAASMAIKNPKATLRYFQHLLGKQADNPHVALYQARFPEHELTFDPQRQTVHFQISSQLQFSPEEVLGMVLNYSRSLAEDFAEQPIKDAVITVPVFFNQAERRAVLQAARMAGLKVLQLINDNTATALSYGVFRRKDINTTAQNIMFYDMGSGSTVCTIVTYQMVKTKEAGMQPQLQIRGVGFDRTLGGLEMELRLRERLAGLFNEQRKGQRAKDVRENPRAMAKLLREANRLKTVLSANADHMAQIEGLMDDVDFKAKVTRVEFEELCADLFERVPGPVQQALQSAEMSLDEIEQVILVGGATRVPRVQEVLLKAVGKEELGKNINADEAAAMGAVYQAAALSKAFKVKPFVVRDAVVYPILVEFTREVEEEPGIHSLKHNKRVLFSRMGPYPQRKVITFNRYSHDFNFHINYGDLGFLGPEDLRVFGSQNLTTVKLKGVGDSFKKYPDYESKGIKAHFNLDESGVLSLDRVESVFETLVEDSAEEESTLTKLGNTISSLFGGGTTPDAKENGTDTVQEEEESPAEGSKDEPGEQVELKEEAEAPVEDGSQPPPPEPKGDATPEGEKATEKENGDKSEAQKPSEKAEAGPEGVAPAPEGEKKQKPARKRRMVEEIGVELVVLDLPDLPEDKLAQSVQKLQDLTLRDLEKQEREKAANSLEAFIFETQDKLYQPEYQEVSTEEQREEISGKLSAASTWLEDEGVGATTVMLKEKLAELRKLCQGLFFRVEERKKWPERLSALDNLLNHSSMFLKGARLIPEMDQIFTEVEMTTLEKVINETWAWKNATLAEQAKLPATEKPVLLSKDIEAKMMALDREVQYLLNKAKFTKPRPRPKDKNGTRAEPPLNASASDQGEKVIPPAGQTEDAEPISEPEKVETGSEPGDTEPLELGGPGAEPEQKEQSTGQKRPLKNDEL

SEQ ID NO: 6670 - protein, 937 aa, Homo Sapiens; identical to SEQ ID NO: 6666

SEQ ID NO: 6671 - protein, 147 aa, Homo Sapiens
MADKVRRQRPRRRVCWALVAVLLADLLALSDTLAVMSVDLGSESMKVAIVKPGVPMEIVLNKESRRKTPVIVTLKENERFFGDSAASMAIKNPKATLRYFQHLLGKQADNPHVALYQARFPEHELTFDPQRQTVHFQISSQLQFSPL

SEQ ID NO: 6672 - protein, 38 aa, Homo Sapiens
MADKVRRQRPRRRVCWALVAVLLADLLALSGNLGGKHR

SEQ ID NO: 6673 - protein, 38 aa, Homo Sapiens; identical to SEQ ID NO: 6672

SEQ ID NO: 6674 - protein, 79 aa, Homo Sapiens
MGILKLQVFLIVLSVALNHLKATPIERQEWIIPVLSRNILLELRGAKPEHEAGKKSKVIRWKSGNATLPHVQRSAWQIF

SEQ ID NO: 6675 - protein, 79 aa, Homo Sapiens
MGILKLQVFLIVLSVALNHLKATPIESHQVEKRKCNTATCATQRLANFLVHSSNNFGAILSSTNVGSNTYGKRNAVEVL

SEQ ID NO: 6676 - protein, 89 aa, Homo Sapiens
MGILKLQVFLIVLSVALNHLKATPIESHQVEKRKCNTATCATQRLANFLVHSSNNFGAILSSTNVGSNTYGKRNAVEVLKREPLNYLPL

SEQ ID NO: 6677 - protein, 89 aa, Homo Sapiens; identical to SEQ ID NO: 6676

SEQ ID NO: 6678 - protein, 85 aa, Homo Sapiens
  misc_feature (1)..(1): Xaa can be any naturally occurring amino acid
XLKATPIERCLDQIPIFTVFQENHQVEKRKCNTATCATQRLANFLVHSSNNFGAILSSTNVGSNTYGKRNAVEVLKREPLNYLPL

SEQ ID NO: 6679 - protein, 317 aa, Homo Sapiens
MKTALILLSILGMACAFSMKNLHRRVKIEDSEENGVFKYRPRYYLYKHAYFYPHLKRFPVQGSSDSSEENGDDSSEEEEEEEETSNEGENNEESNEDEDSEAENTTLSATTLGYGEDATPGTGYTGLAAIQLPKKAGDITNKATKEKESDEEEEEEEEGNENEESEAEVDENEQGINGTSTNSTEAENGNGSSGGDNGEEGEEESVTGANAEDTTETGRQGKGTSKTTTSPNGGFEPTTPPQVYRTTSPPFGKTTTVEYEGEYEYTGANEYDNGYEIYESENGEPRGDNYRAYEDEYSYFKGQGYDGYDGQNYYHHQ

SEQ ID NO: 6680 - protein, 180 aa, Homo Sapiens
MAPSSPRPALPALLVLLGALFPGPGNAQTSVSPSKVILPRGGSVLVTCSTSCDQPKLLGIETPLPKKELLLPGNNRKVYELSNVQEDSQPMCYSNCPDGQSTAKTFLTVYWTPERVEGGAPRANLTVVLLRGEKELKREPAVGEPAEVTTTVLVRRDHHGANFSCRTELDLRPQGLELFE

SEQ ID NO: 6681 - protein, 532 aa, Homo Sapiens
MAPSSPRPALPALLVLLGALFPGPGNAQTSVSPSKVILPRGGSVLVTCSTSCDQPKLLGIETPLPKKELLLPGNNRKVYELSNVQEDSQPMCYSNCPDGQSTAKTFLTVYWTPERVELAPLPSWQPVGKNLTLRCQVEGGAPRANLTVVLLRGEKELKREPAVGEPAEVTTTVLVRRDHHGANFSCRTELDLRPQGLELFENTSAPYQLQTFVLPATPPQLVSPRVLEVDTQGTVVCSLDGLFPVSEAQVHLALGDQRLNPTVTYGNDSFSAKASVSVTAEDEGTQRLTCAVILGNQSQETLQTVTIYSFPAPNVILTKPEVSEGTEVTVKCEAHPRAKVTLNGVPAQPLGPRAQLLLKATPEDNGRSFSCSATLEVAGQLIHKNQTRELRVLYGPRLDERDCPGNWTWPENSQQTPMCQAWGNPLPELKCLKDGTFPLPIGESVTVTRDLEGTYLCRARSTQGEVTRKVTVNVLSPRYEIVIITVVAAAVIMGTAGLSTYLYNRQRKIKKYRLQQAQKGTPMKPNTQATPP

SEQ ID NO: 6682 - protein, 310 aa, Homo Sapiens
MAPSSPRPALPALLVLLGALFPVSEAQVHLALGDQRLNPTVTYGNDSFSAKASVSVTAEDEGTQRLTCAVILGNQSQETLQTVTIYSFPAPNVILTKPEVSEGTEVTVKCEAHPRAKVTLNGVPAQPLGPRAQLLLKATPEDNGRSFSCSATLEVAGQLIHKNQTRELRVLYGPRLDERDCPGNWTWPENSQQTPMCQAWGNPLPELKCLKDGTFPLPIGESVTVTRDLEGTYLCRARSTQGEVTRKVTVNVLSPRYEIVIITVVAAAVIMGTAGLSTYLYNRQRKIKKYRLQQAQKGTPMKPNTQATPP

SEQ ID NO: 6683 - protein, 174 aa, Homo Sapiens
MNSNVSVYQPPRQVILTLQPTLVAVGKSFTIECRVPTVEPLDSLTLFLFRGNETLHYETFGKAAPAPQEATATFNSTADREDGHRNFSCLAVLDLMSRGGNIFHKHSAPKMLEIYEPVSDSQMVIIVTVVSVLLSLFVTSVLLCFIFGQHLRQQRMGTYGVRAAWRRLPQAFRP

SEQ ID NO: 6684 - protein, 251 aa, Homo Sapiens
MSSFGYRTLTVALFTLICCPGSDEKVFEVHVRPKKLATSLDKILLDEQAQWKHYLVSNISHDTVLQCHFTCSGKQESMNSNVSVYQPPRQVILTLQPTLVAVGKSFTIECRVPTVEPLDSLTLFLFRGNETLHYETFGKAAPAPQEATATFNSTADREDGHRNFSCLAVLDLMSRGGNIFHKHSAPKMLEIYEPVSDSQMVIIVTVVSVLLSLFVTSVLLCFIFGQHLRQQRMGTYGVRAAWRRLPQAFRP

SEQ ID NO: 6685 - protein, 167 aa, Homo Sapiens
MSSFGYRTLTVALFTLICCPGSDEKVFEVHVRPKKLAVEPKGSLEVNCSTTCNQPEVGGLETSLDKILLDEQAQWKHYLVSNISHDTVLQCHFTCSGKQESMNSNVSVYQPPRQVILTLQPTLVAVGKSFTIECRVPTVEPLDSLTLFLFRGNETLHYETFGKAAPA

SEQ ID NO: 6686 - protein, 214 aa, Homo Sapiens
MSSFGYRTLTVALFTLICCPGSDEKVFEVHVRPKKLAVEPKGSLEVNCSTTCNQPEVGGLETSLDKILLDEQAQWKHYLVSNISHDTVLQCHFTCSGKQESMNSNVSVYQPPRQVILTLQPTLVAVGKSFTIECRVPTVEPLDSLTLFLFRGNETLHYETFGKAAPAPQEATATFNSTADREDGHRNFSCLAVLDLMSRGGNIFHKHSAPKMLE

SEQ ID NO: 6687 - protein, 216 aa, Homo Sapiens
MSSFGYRTLTVALFTLICCPGSDEKVFEVHVRPKKLAVEPKGSLEVNCSTTCNQPEVGGLETSLDKILLDEQAQWKHYLVSNISHDTVLQCHFTCSGKQESMNSNVSVYQPPRQVILTLQPTLVAVGKSFTIECRVPTVEPLDSLTLFLFRGNETLHYETFGKAAPAPQEATATFNSTADREDGHRNFSCLAVLDLMSRGGNIFHKHSAPKMLEIY

SEQ ID NO: 6688 - protein, 275 aa, Homo Sapiens
MSSFGYRTLTVALFTLICCPGSDEKVFEVHVRPKKLAVEPKGSLEVNCSTTCNQPEVGGLETSLDKILLDEQAQWKHYLVSNISHDTVLQCHFTCSGKQESMNSNVSVYQPPRQVILTLQPTLVAVGKSFTIECRVPTVEPLDSLTLFLFRGNETLHYETFGKAAPAPQEATATFNSTADREDGHRNFSCLAVLDLMSRGGNIFHKHSAPKMLEIYEPVSDSQMVIIVTVVSVLLSLFVTSVLLCFIFGQHLRQQRMGTYGVRAAWRRLPQAFRP

SEQ ID NO: 6689 - protein, 275 aa, Homo Sapiens; identical to SEQ ID NO: 6688

SEQ ID NO: 6690 - protein, 275 aa, Homo Sapiens; identical to SEQ ID NO: 6688

SEQ ID NO: 6691 - protein, 275 aa, Homo Sapiens; identical to SEQ ID NO: 6688

SEQ ID NO: 6692 - protein, 275 aa, Homo Sapiens; identical to SEQ ID NO: 6688

SEQ ID NO: 6693 - protein, 53 aa, Homo Sapiens
MSSFGYRTLTVALFTLICCPGVNEFQRQRVPASKAGHPDTATHFGGCGQVLHH

SEQ ID NO: 6694 - protein, 271 aa, Homo Sapiens
MGSLFPLSLLFFLAAAYPGVGSALGRRTKRAQSPKGSPLAPSGTSVPFWVRMSPEFVAVQPGKSVQLNCSNSCPQPQNSSLRTPLRQGKTLRGPGWVSYQLLDVRAWSSLAHCLVTCAGKTRWATSRITAYKPPHSVILEPPVLKGRKYTLRCHVTQVFPVGYLVVTLRHGSRVIYSESLERFTGLDLANVTLTYEFAAGPRDFWQPVICHARLNLDGLVVRNSSAPITLMLAWSPAPTALASGSIAALVGILLTVGAAYLCKCLAMKSQA

SEQ ID NO: 6695 - protein, 237 aa, Homo Sapiens
MGSLFPLSLLFFLAAAYPGVGSALGRRTKRAQSPKGSPLAPSGTSVPFWVRMSPEFVAVQPGKSVQLNCSNSCPQPQNSSLRTPLRQGKTLRGPGWVSYQLLDVRAWSSLAHCLVTCAGKTRWATSRITAYKPPHSVILEPPVLKGRKYTLRCHVTQVFPVGYLVVTLRHGSRVIYSESLERFTGLDLANVTLTYEFAAGPRDFWQPVICHARLNLDGLVVRNSSAPITLMLGEAPL

SEQ ID NO: 6696 - protein, 272 aa, Homo Sapiens
MGSLFPLSLLFFLAAAYPGVGSALGRRTKRAQSPKGSPLAPSGTSVPFWVRMSPEFVAVQPGKSVQLNCSNSCPQPQNSSLRTPLRQGKTLRGPGWVSYQLLDVRAWSSLAHCLVTCAGKTRWATSRITAYSVPGGLLGGDPEAWKPGHLFRKPGALHRPGSGQRDLDLRVCCWTPRLLAARDLPRAPQSRRPGGPQQLGTHYTDARLEPRAHSFGLRFHRCPCRDPPHCGRCVPMQVPSYEVPGVKGDVLCRLSEKKRNMKQSGEMAIHGG

SEQ ID NO: 6697 - protein, 155 aa, Homo Sapiens
MKVASGSTATAAAGPSCALKAGKTASGAGEVVRCLSEQSVAISRCAGGAGARLPALLDEQQVNVLLYDMNGCYSRLKELVPTLPQNRKVSKVEILQHVIDYIRDLQLELNSESEVGTPGGRGLPVRAPLSTLNGEISALTAEAACVPADDRILCR

SEQ ID NO: 6698 - protein, 149 aa, Homo Sapiens
MKVASGSTATAAAGPSCALKAGKTASGAGEVVRCLSEQSVAISRCAGGAGARLPALLDEQQVNVLLYDMNGCYSRLKELVPTLPQNRKVSKVEILQHVIDYIRDLQLELNSESEVGTPGGRGLPVRAPLSTLNGEISALTAEVRSRSDH

SEQ ID NO: 6699 - protein, 257 aa, Homo Sapiens
EFIIRGGRVPSHCLHFSRSFQKKTYSKMNNPAIKRIGNHITKSPEDKREYRGLELANGIKVLLISDPTTDKSSAALDVHIGSLSDPPNIAGLSHFCEHMLFLGTKKYPKENEYSQFLSEHAGSSNAFTSGEHTNYYFDVSHEHLEGALDRFAQFFLCPLFDESCKDREVNAVDSEHEKNVMNDAWRLFQLEKATGNPKHPFSKFGTGNKYTLETRPNQEGIDVRQELLKFHSAYYSSNLMAVCVLGRESLDDLTNLV

SEQ ID NO: 6700 - protein, 1019 aa, Homo Sapiens [sequence omitted]

SEQ ID NO: 6701 - protein, 61 aa, Homo Sapiens
MRYRLAWLLHPALPSTFRSVLGARLPPPERLCGNYQVVFQSSGTILHFHQQCVKIPISLYP

SEQ ID NO: 6702 - protein, 464 aa, Homo Sapiens
MSKLWFKQDDKFFLPKACLNFEFFSPFAYVDPLHCNMAYLYLELLKDSLNEYAYAAELAGLSYDLQNTIYGMYLSVKGYNDKQPILLKKIIEKMATFEIDEKRFEIIKEAYMRSLNNFRAEQPHQHAMYYLRLLMTEVAWTKDELKEALDDVTLPRLKAFIPQLLSRLHIEALLHGNITKQAALGIMQMVEDTLIEHAHTKPLLPSQLVRYREVQLPDRGWFVYQQRNEVHNNCGIEIYYQTDMQSTSENMFLELFCQIISEPCFNTLRTKEQLGYIVFSGPRRANGIQGLRFIIQSEKPPHYLESRVEAFLITMEKSIEDMTEEAFQKHIQALAIRRLDKPKKLSAECAKYWGEIISQQYNFDRDNTEVAYLKTLTKEDIIKFYKEMLAVDAPRRHKVSVHVLAREMDSCPVVGEFPCQNDINLSQAPALPQPEVIQNMTEFKRGLPLFPLVKPHINFMAAKL

SEQ ID NO: 6703 - protein, 106 aa, Homo Sapiens
MAAPGALLVMGTLTLSPRLEYSGVISAHCNLCLLSSSDCHASASGVTGVTGVHHHTQLSFVFLVETGFCHVGRASPELLASSDPPASASQSAGIIGVSQGLNLTWS

SEQ ID NO: 6704 - protein, 187 aa, Homo Sapiens
MAAPGALLVMGVSGSGKSTVGALLASELGWKFYDADDYHPEENRRKMGKGIPLNDQDRIPWLCNLHDILLRDVASGQRVVLACSALKKTYRDILTQGKDGVALKCEESGKEAKQAEMQLLVVHLSGSFEVISGRLLKREGHFMPPELLQSQFETLEPPAAPENFIQISVDKNVSEIIATIMETLKMK

SEQ ID NO: 6705 - protein, 90 aa, Homo Sapiens
MAAPGALLVMGVSGSGKSTVGALLASELGWKFYDADDYHPEENRRKMGKGIPLNDQRCSLGTACGSSLFSPEENVQRHINTRKRWCSSEV

SEQ ID NO: 6706 - protein, 59 aa, Homo Sapiens
MAAPGALLVMGVSGSGNWDGNSMMLMIITRRKIEGRWEKAYRSMTRTGFHGSVTCMTFY

SEQ ID NO: 6707 - protein, 90 aa, Homo Sapiens
MGKGIPLNDQDRIPWLCNLHDILLRDVASGQRVVLACSALKKTYRDILTQGKDGVALKCEESGKEAKQAEMQLLVVHLSGSFEVISGRLL

SEQ ID NO: 6708 - protein, 141 aa, Homo Sapiens
MGKGIPLNDQDRIPWLCNLHDILLRDVASGQRVVLACSALKKTYRDILTQGKDGVALKCEESGKEAKQAEMQLLVVHLSGSFEVISGRLLKREGHFMPPELLQSQFETLEPPAAPENFIQISVDKNVSEIIATIMETLKMK

SEQ ID NO: 6709 - protein, 86 aa, Homo Sapiens
MPPPRTGRGLLWLGLVLSSVCVALGSETQANSTTDALNVLLIIVDDLRPSLGCYGDKLVRSPNIDQLASHSLLFQNAFAQQAVCAP

SEQ ID NO: 6710 - protein, 550 aa, Homo Sapiens
MPPPRTGRGLLWLGLVLSSVCVALGSETQANSTTDALNVLLIIVDDLRPSLGCYGDKLVRSPNIDQLASHSLLFQNAFAQQAVCAPSRVSFLTGRRPDTTRLYDFNSYWRVHAGNFSTIPQYFKENGYVTMSVGKVFHPGISSNHTDDSPYSWSFPPYHPSSEKYENTKTCRGPDGELHANLLCPVDVLDVPEGTLPDKQSTEQAIQLLEKMKTSASPFFLAVGYHKPHIPFRYPKEFQKLYPLENITLAPDPEVPDGLPPVAYNPWMDIRQREDVQALNISVPYGPIPVDFQRKIRQSYFASVSYLDTQVGRLLSALDDLQLANSTIIAFTSDHGWALGEHGEWAKYSNFDVATHVPLIFYVPGRTASLPEAGEKLFPYLDPFDSASQLMEPGRQSMDLVELVSLFPTLAGLAGLQVPPRCPVPSFHVELCREGKNLLKHFRFRDLEEDPYLPGNPRELIAYSQYPRPSDIPQWNSDKPSLKDIKIMGYSIRTIDYRYTVWVGFNPDEFLANFSDIHAGELYFVDSDPLQDHNMYNDSQGGDLFQLLMP

SEQ ID NO: 6711 - protein, 343 aa, Homo Sapiens
MPPPRTGRGLLWLGLVLSSVCVALGSETQANSTTDALNVLLIIVDDLRPSLGCYGDKLVRSPNIDQLASHSLLFQNAFAQQAVCAPSRVSFLTGRRPDTTRLYDFNSYWRVHAGNFSTIPQYFKENGYVTMSVGKVFHPGISSNHTDDSPYSWSFPPYHPSSEKYENTKTCRGPDGELHANLLCPVDVLDVPEGTLPDKQSTEQAIQLLEKMKTSASPFFLAVGYHKPHIPFRYPKEFQKLYPLENITLAPDPEVPDGLPPVAYNPWMDIRQREDVQALNISVPYGPIPVDFQRKIRQSYFASVSYLDTQVGRLLSALDDLQLANSTIIAFTSDHGFLMRTNT

SEQ ID NO: 6712 - protein, 312 aa, Homo Sapiens
MPPPRTGRGLLWLGLVLSSVCVALGSETQANSTTDALNVLLIIVDDLRPSLGCYGDKLVRSPNIDQLASHSLLFQNAFAQQAVCAPSRVSFLTGRRPDTTRLYDFNSYWRVHAGNFSTIPQYFKENGYVTMSVGKVFHPGISSNHTDDSPYSWSFPPYHPSSEKYENTKTCRGPDGELHANLLCPVDVLDVPEGTLPDKQSTEQAIQLLEKMKTSASPFFLAVGYHKPHIPFRYPKEFQKLYPLENITLAPDPEVPDGLPPVAYNPWMDIRQREDVQALNISVPYGPIPVDFQEDQSSTGFRLKTSSTRKYK

SEQ ID NO: 6713 - protein, 179 aa, Homo Sapiens
MPPPRTGRGLLWLGLVLSSVCVALGSETQANSTTDALNVLLIIVDDLRPSLGCYGDKLVRSPNIDQLASHSLLFQNAFAQQAVCAPSRVSFLTGRRPDTTRLYDFNSYWRVHAGNFSTIPQYFKENGYVTMSVGKVFHPGTAPCPESGFSWFVVSESSIPILGMGLSLQSPLLAGRVPR

SEQ ID NO: 6714 - protein, 106 aa, Homo Sapiens
RSPNIDQLASHSLLFQNAFAQQAVCAPSRVSFLTGRRPDTTRLYDFNSYWRVHAGNFSTIPQYFKENGYVTMSVGKVFHPALVGTHFSAESLFSRPFSVSIGPASR

SEQ ID NO: 6715 - protein, 232 aa, Homo Sapiens
LAHPGPGIGAGPSPGSAGPSPLPGMDGRWALLDPESIVRGSTGRGLSYNFTHLDGYLDLLRENQLLPGFELMGSASGHFTDFEDKQQVFEWKDLVSSLARRYIGRYGLAHVSKWNFETWNEPDHHDFDNVSMTMQGFLNYYDACSEGLRAASPALRLGGPGDSFHTPPRSPLSWGLLRHCHDGTNFFTGEAGVRLDYISLHRKGARSSISILEQEKVVAQQIRQLFPKFADT

SEQ ID NO: 6716 - protein, 176 aa, Homo Sapiens
MCLPSECHSHWTQVQASLSPAAPCPPPWLPRGSTGRGLSYNFTHLDGYLDLLRENQLLPGFELMGSASGHFTDFEDKQQVFEWKDLVSSLARRYIGRYGLAHVSKWNFETWNEPDHHDFDNVSMTMQGFLNYYDACSEGLRAASPALRLGGPGDSFHTPPRSPLSWGLLRHCHDGT

SEQ ID NO: 6717 - protein, 521 aa, Homo Sapiens
MGSASGHFTDFEDKQQVFEWKDLVSSLARRYIGRYGLAHVSKWNFETWNEPDHHDFDNVSMTMQGFLNYYDACSEGLRAASPALRLGGPGDSFHTPPRSPLSWGLLRHCHDGTNFFTGEAGVRLDYISLHRKGARSSISILEQEKVVAQQIRQLFPKFADTPIYNDEADPLVGWSLPQPWRADVTYAAMVVKVIAQHQNLLLANTTSAFPYALLSNDNAFLSYHPHPFAQRTLTARFQVNNTRPPHVQLLRKPVLTAMGLLALLDEEQLWAEVSQAGTVLDSNHTVGVLASAHRPQGPADAWRAAVLIYASDDTRAHPNRSVAVTLRLRGVPPGPGLVYVTRYLDNGLCSPDGEWRRLGRPVFPTAEQFRRMRAAEDPVAAAPRPLPAGGRLTLRPALRLPSLLLVHVCARPEKPPGQVTRLRALPLTQGQLVLVWSDEHVGSKCLWTYEIQFSQDGKAYTPVSRKPSTFNLFVFSPDTGAVSGSYRVRALDYWARPGPFSDPVPYLEVPVPRGPPSPGNP

SEQ ID NO: 6718 - protein, 653 aa, Homo Sapiens
MRPLRPRAALLALLASLLAAPPVAPAEAPHLVHVDAARALWPLRRFWRSTGFCPPLPHSQADQYVLSWDQQLNLAYVGAVPHRGIKQVRTHWLLELVTTRGSTGRGLSYNFTHLDGYLDLLRENQLLPGFELMGSASGHFTDFEDKQQVFEWKDLVSSLARRYIGRYGLAHVSKWNFETWNEPDHHDFDNVSMTMQGFLNYYDACSEGLRAASPALRLGGPGDSFHTPPRSPLSWGLLRHCHDGTNFFTGEAGVRLDYISLHRKGARSSISILEQEKVVAQQIRQLFPKFADTPIYNDEADPLVGWSLPQPWRADVTYAAMVVKVIAQHQNLLLANTTSAFPYALLSNDNAFLSYHPHPFAQRTLTARFQVNNTRPPHVQLLRKPVLTAMGLLALLDEEQLWAEVSQAGTVLDSNHTVGVLASAHRPQGPADAWRAAVLIYASDDTRAHPNRSVAVTLRLRGVPPGPGLVYVTRYLDNGLCSPDGEWRRLGRPVFPTAEQFRRMRAAEDPVAAAPRPLPAGGRLTLRPALRLPSLLLVHVCARPEKPPGQVTRLRALPLTQGQLVLVWSDEHVGSKCLWTYEIQFSQDGKAYTPVSRKPSTFNLFVFSPDTGAVSGSYRVRALDYWARPGPFSDPVPYLEVPVPRGPPSPGNP

SEQ ID NO: 6719 - protein, 224 aa, Homo Sapiens
MRPLRPRAALLALLASLLAAPPVAPAEAPHLVHVDAARALWPLRRFWRSTGFWGSTGRGLSYNFTHLDGYLDLLRENQLLPGFELMGSASGHFTDFEDKQQVFEWKDLVSSLARRYIGRYGLAHVSKWNFETWNEPDHHDFDNVSMTMQGFLNYYDACSEGLRAASPALRLGGPGDSFHTPPRSPLSWGLLRHCHDGTNFFTGEAGVRLDYISLHRKGARSSIS

SEQ ID NO: 6720 - protein, 196 aa, Homo Sapiens
  misc_feature (1)..(1): Xaa can be any naturally occurring amino acid
XVPCAPAPRCWRSWPRSWPRPRWPRPRPRTWCMWTRPARCGPCGASGGAQASAPRCHTARLTSTSSAGTSSSTSPMWAPSLTAASSRGSTGRGLSYNFTHLDGYLDLLRENQLLPGFELMGSASGHFTDFEDKQQVFEWKDLVSSLARRYIGRYGLAHVSKWNFETWNEPDHHDFDNVSMTMQGFLNYYDACSEGL

SEQ ID NO: 6721 - protein, 105 aa, Homo Sapiens
MGFTGAGIAASSIAAKMMSAAAIANGGGVSAGSLVATLQSVGAAGLSTSSNILLASVGSVLGACLGNSPSSSLPAEPEAKEDEARENVPQGEPPKPPLKSEKHEE

SEQ ID NO: 6722 - protein, 130 aa, Homo Sapiens
MMKRAAAAAVGGALAVGAVPVVLSAMGFTGAGIAASSIAAKMMSAAAIANGGGVSAGSLVATLQSVGAAGLSTSSNILLASVGSVLGACLGNSPSSSLPAEPEAKEDEARENVPQGEPPKPPLKSEKHEE

SEQ ID NO: 6723 - protein, 105 aa, Homo Sapiens
MTLSPLLLFLPPLLLLLDVPTAAVQASPLQALDFFGNGPPVNYKTGNLYLRGPLKKSNAPLVNVTLYYEALCGGCRAFLIRELFPTWLLVMEILNVTLVPYGNAQ

SEQ ID NO: 6724 - protein, 250 aa, Homo Sapiens
MTLSPLLLFLPPLLLLLDVPTAAVQASPLQALDFFGNGPPVNYKTGNLYLRGPLKKSNAPLVNVTLYYEALCGGCRAFLIRELFPTWLLVMEILNVTLVPYGNAQEQNVSGRWEFKCQHGEEECKFNKVEACVLDELDMELAFLTIVCMEEFEDMERSLPLCLQLYAPGLSPDTIMECAMGDRGMQLMHANAQRTDALQPPHEYVPWVTVNGKPLEDQTQLLTLVCQLYQGKKPDVCPSSTSSLRSVCFK

SEQ ID NO: 6725 - protein, 189 aa, Homo Sapiens
MASPFALLMVLVVLSCKSSCSLGCDLPETHSLDNRRTLMLLAQMSRISPSSCLMDRHDFGFPQEEFDGNQFQKAPAISVLHELIQQIFNLFTTKDSSAAWDEDLLDKFCTELYQQLNDLEACVMQEERVGETPLMNADSILAVKKYFRRITLYLTEKKYSPCAWEVVRAEIMRSLSLSTNLQERLRRKE

SEQ ID NO: 6726 - protein, 189 aa, Homo Sapiens
MALSFSLLMAVLVLSYKSICSLGCDLPQTHSLGNRRALILLGQMGRISPFSCLKDRHDFRIPQEEFDGNQFQKAQAISVLHEMIQQTFNLFSTEDSSAAWEQSLLEKFSTELYQQLNDLEACVIQEVGVEETPLMNEDSILAVRKYFQRITLYLIERKYSPCAWEVVRAEIMRSLSFSTNLQKRLRRKD

SEQ ID NO: 6727 - protein, 189 aa, Homo Sapiens
MASPFALLMALVVLSCKSSCSLGCDLPETHSLDNRRTLMLLAQMSRISPSSCLMDRHDFGFPQEEFDGNQFQKAPAISVLHELIQQIFNLFTTKDSSAAWDEDLLDKFCTELYQQLNDLEACVMQEERVGETPLMNADSILAVKKYFRRITLYLTEKKYSPCAWEVVRAEIMRSLSLSTNLQERLRRKE

SEQ ID NO: 6728 - protein, 190 aa, Homo Sapiens
MMASPFALLMALVVLSCKSSCSLGCDLPETHSLDNRRTLMLLAQMSRISPSSCLMDRHDFGFPQEEFDGNQFQKAPAISVLHELIQQIFNLFTTKDSSAAWDEDLLDKFCTELYQQLNDLEACVMQEERVGETPLMNADSILAVKKYFRRITLYLTEKKYSPCAWEVVRAEIMRSLSLSTNLQERLRRKE

SEQ ID NO: 6729 - protein, 189 aa, Homo Sapiens
MALPFALMMALVVLSCKSSCSLGCNLSQTHSLNNRRTLMLMAQMRRISPFSCLKDRHDFEFPQEEFDGNQFQKAQAISVLHEMMQQTFNLFSTKNSSAAWDETLLEKFYIELFQQMNDLEACVIQEVGVEETPLMNEDSILAVKKYFQRITLYLMEKKYSPCAWEVVRAEIMRSLSFSTNLQKRLRRKD

SEQ ID NO: 6730 - protein, 189 aa, Homo Sapiens
MALSFSLLMAVLVLSYKSICSLGCDLPQTHSLGNRRALILLAQMGRISHFSCLKDRYDFGFPQEVFDGNQFQKAQAISAFHEMIQQTFNLFSTKDSSAAWDETLLDKFYIELFQQLNDLEACVTQEVGVEEIALMNEDSILAVRKYFQRITLYLMGKKYSPCAWEVVRAEIMRSFSFSTNLQKGLRRKD

SEQ ID NO: 6731 - protein, 189 aa, Homo Sapiens
MALSFSLLMAVLVLSYKSICSLGCDLPQTHSLGNRRALILLAQMGRISPFSCLKDRHDFGLPQEEFDGNQFQKTQAISVLHEMIQQTFNLFSTEDSSAAWEQSLLEKFSTELYQQLNNLEACVIQEVGMEETPLMNEDSILAVRKYFQRITLYLTEKKYSPCAWEVVRAEIMRSLSFSTNLQKILRRKD

SEQ ID NO: 6732 - protein, 188 aa, Homo Sapiens
MALTFALLVALLVLSCKSSCSVGCDLPQTHSLGSRRTLMLLAQMRRISLFSCLKDRHDFGFPQEEFGNQFQKAETIPVLHEMIQQIFNLFSTKDSSAAWDETLLDKFYTELYQQLNDLEACVIQGVGVTETPLMKEDSILAVRKYFQRITLYLKEKKYSPCAWEVVRAEIMRSFSLSTNLQESLRSKE

SEQ ID NO: 6733 - protein, 189 aa, Homo Sapiens
MALSFSLLMAVLVLSYKSICSLGCDLPQTHSLGNRRALILLAQMGRISPFSCLKDRHDFGFPQEEFDGNQFQKAQAISVLHEMIQQTFNLFSTKDSSATWEQSLLEKFSTELNQQLNDLEACVIQEVGVEETPLMNVDSILAVKKYFQRITLYLTEKKYSPCAWEVVRAEIMRSFSLSKIFQERLRRKE

SEQ ID NO: 6734 - protein, 189 aa, Homo Sapiens
MALSFSLLMAVLVLSYKSICSLGCDLPQTHSLGNRRALILLAQMGRISHFSCLKDRHDFGFPEEEFDGHQFQKAQAISVLHEMIQQTFNLFSTEDSSAAWEQSLLEKFSTELYQQLNDLEACVIQEVGVEETPLMNEDSILAVRKYFQRITLYLTEKKYSPCAWEVVRAEIMRSLSFSTNLQKRLRRKD

SEQ ID NO: 6735 - protein, 189 aa, Homo Sapiens
MALPFVLLMALVVLNCKSICSLGCDLPQTHSLSNRRTLMIMAQMGRISPFSCLKDRHDFGFPQEEFDGNQFQKAQAISVLHEMIQQTFNLFSTKDSSATWDETLLDKFYTELYQQLNDLEACMMQEVGVEDTPLMNVDSILTVRKYFQRITLYLTEKKYSPCAWEVVRAEIMRSFSLSANLQERLRRKE

SEQ ID NO: 6736 - protein, 189 aa, Homo Sapiens
MALPFALLMALVVLSCKSSCSLDCDLPQTHSLGHRRTMMLLAQMRRISLFSCLKDRHDFRFPQEEFDGNQFQKAEAISVLHEVIQQTFNLFSTKDSSVAWDERLLDKLYTELYQQLNDLEACVMQEVWVGGTPLMNEDSILAVRKYFQRITLYLTEKKYSPCAWEVVRAEIMRSFSSSRNLQERLRRKE

SEQ ID NO: 6737 - protein, 190 aa, Homo Sapiens
TMALPFALLMALVVLSCKSSCSLDCDLPQTHSLGHRRTMMLLAQMRRISLFSCLKDRHDFRFPQEEFDGNQFQKAEAISVLHEVIQQTFNLFSTKDSSVAWDERLLDKLYTELYQQLNDLEACVMQEVWVGGTPLMNEDSILAVRKYFQRITLYLTEKKYSPCAWEVVRAEIMRSFSSSRNLQERLRRKE

SEQ ID NO: 6738 - protein, 189 aa, Homo Sapiens
MARSFSLLMVVLVLSYKSICSLGCDLPQTHSLRNRRALILLAQMGRISPFSCLKDRHEFRFPEEEFDGHQFQKTQAISVLHEMIQQTFNLFSTEDSSAAWEQSLLEKFSTELYQQLNDLEACVIQEVGVEETPLMNEDFILAVRKYFQRITLYLMEKKYSPCAWEVVRAEIMRSFSFSTNLKKGLRRKD

SEQ ID NO: 6739 - protein, 189 aa, Homo Sapiens
MALTFYLLVALVVLSYKSFSSLGCDLPQTHSLGNRRALILLAQMRRISPFSCLKDRHDFEFPQEEFDDKQFQKAQAISVLHEMIQQTFNLFSTKDSSAALDETLLDEFYIELDQQLNDLESCVMQEVGVIESPLMYEDSILAVRKYFQRITLYLTEKKYSSCAWEVVRAEIMRSFSLSINLQKRLKSKE

SEQ ID NO: 6740 - protein, 557 aa, Homo Sapiens
MMVVLLGATTLVLVAVAPWVLSAAAGGKNLKSPQKVEVDIIDDNFILRWNRSDESVGNVTFSFDYQKTGMDNWIKLSGCQNITSTKCNFSSLKLNVYEEIKLRIRAEKENTSSWYEVDSFTPFRKAQIGPPEVHLEAEDKAIVIHISPGTKDSVMWALDGLSFTYSLVIWKNSSGVEERIENIYSRHKIYKLSPETTYCLKVKAALLTSWKIGVYSPVHCIKTTVENELPPPENIEVSVQNQNYVLKWDYTYANMTFQVQWLHAFLKRNPGNHLYKWKQIPDCENVKTTQCVFPQNVFQKGIYLLRVQASDGNNTSFWSEEIKFDTEIQAFLLPPVFNIRSLSDSFHIYIGAPKQSGNTPVIQDYPLIYEIIFWENTSNAERKIIEKKTDVTVPNLKPLTVYCVKARAHTMDEKLNKSSVFSDAVCEKTKPGNTSKIWLIVGICIALFALPFVIYAAKVFLRCINYVFFPSLKPSSSIDEYFSEQPLKNLLLSTSEEQIEKCFIIENISTIATVEETNQTDEDHKKYSSQTSQDSGNYSNEDESESKTSEELQQDFV

SEQ ID NO: 6741 - protein, 136 aa, Homo Sapiens
MMVVLLGATTLVLVAVAPWVLSAAAGGKNLKSPQKVEVDIIDDNFILRWNRSDESVGNVTFSFDYQKTGMDNWIKLSGCQNITSTKCNFSSLKLNVYEEIKLRIRAEKENTSSWYEVDSFTPFRKVENELPPPENI

SEQ ID NO: 6742 - protein, 187 aa, Homo Sapiens
MTNKCLLQIALLLCFSTTALSMSYNLLGFLQRSSNFQCQKLLWQLNGRLEYCLKDRMNFDIPEEIKQLQQFQKEDAALTIYEMLQNIFAIFRQDSSSTGWNETIVENLLANVYHQINHLKTVLEEKLEKEDFTRGKLMSSLHLKRYYGRILHYLKAKEYSHCAWTIVRVEILRNFYFINRLTGYLRN

SEQ ID NO: 6743 - protein, 208 aa, Homo Sapiens
MIIKHFFGTVLVLLASTTIFSLDLKLIIFQQRQVNQESLKLLNKLQTLSIQQCLPHRKNFLLPQKSLSPQQYQKGHTLAILHEMLQQIFSLFRANISLDGWEENHTEKFLIQLHQQLEYLEALMGLEAEKLSGTLGSDNLRLQVKMYFRRIHDYLENQDYSTCAWAIVQVEISRCLFFVFSLTEKLSKQGRPLNDMKQELTTEFRSPR

SEQ ID NO: 6744 - protein, 166 aa, Homo Sapiens
MKYTSYILAFQLCIVLGSLGCYCQDPYVKEAENLKKYFNAGHSDVADNGTLFLGILKNWKEESDRKIMQSQIVSFYFKLFKNFKDDQSIQKSVETIKEDMNVKFFNSNKKKRDDFEKLTNYSVTDLNVQRKAIHELIQVMAELSPAAKTGKRKRSQMLFRGRRASQ

SEQ ID NO: 6745 - protein, 30 aa, Homo Sapiens
LLPLVMQGVSRAEMGTADLGPSSVLSTDVF

SEQ ID NO: 6746 - protein, 210 aa, Homo Sapiens
MALLFLLPLVMQGVSRAEMGTADLGPSSVPTPTNVTIESYNMNPIVYWEYQIMPQVPVFTVEVKNYGVKARVGQKESAYAKSEEFAVCRDGKIGPPKLDIRKEEKQIMIDIFHPSVFVNGDEQEVDYDPETTCYIRVYNVYVRMNGSEIQYKILTQKEDDCDEIQCQLAIPVSSLNSQYCVSAEGVLHVWGVTTEKSKEVCITIFNSSIK

SEQ ID NO: 6747 - protein, 489 aa, Homo Sapiens
MALLFLLPLVMQGVSRAEMGTADLGPSSVPTPTNVTIESYNMNPIVYWEYQIMPQVPVFTVEVKNYGVKNSEWIDACINISHHYCNISDHVGDPSNSLWVRVKARVGQKESAYAKSEEFAVCRDGKIGPPKLDIRKEEKQIMIDIFHPSVFVNGDEQEVDYDPETTCYIRVYNVYVRMNGSEIQYKILTQKEDDCDEIQCQLAIPVSSLNSQYCVSAEGVLHVWGVTTEKSKEVCITIFNSSIKGSLWIPVVAALLLFLVLSLVFICFYIKKINPLKEKSIILPKSLISVVRSATLETKPESKYVSLITSYQPFSLEKEVVCEEPLSPATVPGMHTEDNPGKVEHTEELSSITEVVTTEENIPDVVPGSHLTPIERESSSPLSSNQSEPGSIALNSYHSRNCSESDHSRNGFDTDSSCLESHSSLSDSEFPPNNKGEIKTEGQELITVIKAPTSFGYDKPHVLVDLLVDDSGKESLIGYRPTEDSKEFS

SEQ ID NO: 6748 - protein, 470 aa, Homo Sapiens
MCGSIVQSLVPTPTNVTIESYNMNPIVYWEYQIMPQVPVFTVEVKNYGVKNSEWIDACINISHHYCNISDHVGDPSNSLWVRVKARVGQKESAYAKSEEFAVCRDGKIGPPKLDIRKEEKQIMIDIFHPSVFVNGDEQEVDYDPETTCYIRVYNVYVRMNGSEIQYKILTQKEDDCDEIQCQLAIPVSSLNSQYCVSAEGVLHVWGVTTEKSKEVCITIFNSSIKGSLWIPVVAALLLFLVLSLVFICFYIKKINPLKEKSIILPKSLISVVRSATLETKPESKYVSLITSYQPFSLEKEVVCEEPLSPATVPGMHTEDNPGKVEHTEELSSITEVVTTEENIPDVVPGSHLTPIERESSSPLSSNQSEPGSIALNSYHSRNCSESDHSRNGFDTDSSCLESHSSLSDSEFPPNNKGEIKTEGQELITVIKAPTSFGYDKPHVLVDLLVDDSGKESLIGYRPTEDSKEFS

SEQ ID NO: 6749 - protein, 161 aa, Homo Sapiens
MLLKSPENSLLQFQFKYGVPTPTNVTIESYNMNPIVYWEYQIMPQVPVFTVEVKNYGVKNSEWIDACINISHHYCNISDHVGDPSNSLWVRVKARVGQKESAYAKSEEFAVCRDGKIGPPKLDIRKEEKQIMIDIFHPSVFVNGDEQEVDYDPETTCYIRV

SEQ ID NO: 6750 - protein, 479 aa, Homo Sapiens
MLLKSPENSLLQFQFKYGVPTPTNVTIESYNMNPIVYWEYQIMPQVPVFTVEVKNYGVKNSEWIDACINISHHYCNISDHVGDPSNSLWVRVKARVGQKESAYAKSEEFAVCRDGKIGPPKLDIRKEEKQIMIDIFHPSVFVNGDEQEVDYDPETTCYIRVYNVYVRMNGSEIQYKILTQKEDDCDEIQCQLAIPVSSLNSQYCVSAEGVLHVWGVTTEKSKEVCITIFNSSIKGSLWIPVVAALLLFLVLSLVFICFYIKKINPLKEKSIILPKSLISVVRSATLETKPESKYVSLITSYQPFSLEKEVVCEEPLSPATVPGMHTEDNPGKVEHTEELSSITEVVTTEENIPDVVPGSHLTPIERESSSPLSSNQSEPGSIALNSYHSRNCSESDHSRNGFDTDSSCLESHSSLSDSEFPPNNKGEIKTEGQELITVIKAPTSFGYDKPHVLVDLLVDDSGKESLIGYRPTEDSKEFS

SEQ ID NO: 6751 - protein, 479 aa, Homo Sapiens; identical to SEQ ID NO: 6750

SEQ ID NO: 6752 - protein, 448 aa, Homo Sapiens
MNPIVYWEYQIMPQVPVFTVEVKNYGVKNSEWIDACINISHHYCNISDHVGDPSNSLWVRVKARVGQKESAYAKSEEFAVCRDGKIGPPKLDIRKEEKQIMIDIFHPSVFVNGDEQEVDYDPETTCYIRVYNVYVRMNGSEIQYKILTQKEDDCDEIQCQLAIPVSSLNSQYCVSAEGVLHVWGVTTEKSKEVCITIFNSSIKGSLWIPVVAALLLFLVLSLVFICFYIKKINPLKEKSIILPKSLISVVRSATLETKPESKYVSLITSYQPFSLEKEVVCEEPLSPATVPGMHTEDNPGKVEHTEELSSITEVVTTEENIPDVVPGSHLTPIERESSSPLSSNQSEPGSIALNSYHSRNCSESDHSRNGFDTDSSCLESHSSLSDSEFPPNNKGEIKTEGQELITVIKAPTSFGYDKPHVLVDLLVDDSGKESLIGYRPTEDSKEFS

SEQ ID NO: 6753 - protein, 448 aa, Homo Sapiens; identical to SEQ ID NO: 6752

SEQ ID NO: 6754 - protein, 448 aa, Homo Sapiens; identical to SEQ ID NO: 6752

SEQ ID NO: 6755 - protein, 27 aa, Homo Sapiens
  misc_feature (1)..(1): Xaa can be any naturally occurring amino acid
XLLPLVMQGVSRAEMGTADLGPSSDVF

SEQ ID NO: 6756 - protein, 200 aa, Homo Sapiens
MAAAWTVVLVTLVLGLAVAGPVPTSKPTTTGKGCHIGRFKSLSPQELASFKKARDALEESLKLKNWSCSSPVFPGNWDLRLLQVRERPVALEAELALTLKVLEAAAGPALEDVLDQPLHTLHHILSQLQACIQPQPTAGPRPRGRLHHWLHRLQEAPKKESAGCLEASVTFNLFRLLTRDLKYVADGNLCLRTSTHPEST

SEQ ID NO: 6757 - protein, 200 aa, Homo Sapiens
MKLDMTGDCTPVLVLMAAVLTVTGAVPVARLHGALPDARGCHIAQFKSLSPQELQAFKRAKDALEESLLLKDCRCHSRLFPRTWDLRQLQVRERPMALEAELALTLKVLEATADTDPALVDVLDQPLHTLHHILSQFRACIQPQPTAGPRTRGRLHHWLYRLQEAPKKESPGCLEASVTFNLFRLLTRDLNCVASGDLCV

SEQ ID NO: 6758 - protein, 200 aa, Homo Sapiens
MKLDMTGDCMPVLVLMAAVLTVTGAVPVARLRGALPDARGCHIAQFKSLSPQELQAFKRAKDALEESLLLKDCKCRSRLFPRTWDLRQLQVRERPVALEAELALTLKVLEATADTDPALGDVLDQPLHTLHHILSQLRACIQPQPTAGPRTRGRLHHWLHRLQEAPKKESPGCLEASVTFNLFRLLTRDLNCVASGDLCV

SEQ ID NO: 6759 - protein, 196 aa, Homo Sapiens
MTGDCMPVLVLMAAVLTVTGAVPVARLRGALPDARGCHIAQFKSLSPQELQAFKRAKDALEESLLLKDCKCRSRLFPRTWDLRQLQVRERPVALEAELALTLKVLEATADTDPALGDVLDQPLHTLHHILSQLRACIQPQPTAGPRTRGRLHHWLHRLQEAPKKESPGCLEASVTFNLFRLLTRDLNCVASGDLCV

SEQ ID NO: 6760 - protein, 520 aa, Homo Sapiens
MAGPERWGPLLLCLLQAAPGRPRLAPPQNVTLLSQNFSVYLTWLPGLGNPQDVTYFVAYQSSPTRRRWREVEECAGTKELLCSMMCLKKQDLYNKFKGRVRTVSPSSKSPWVESEYLDYLFEVEPAPPVLVLTQTEEILSANATYQLPPCMPPLDLKYEVAFWKEGAGNKTLFPVTPHGQPVQITLQPAASEHHCLSARTIYTFSVPKYSKFSKPTCFLLEVPEANWAFLVLPSLLILLLVIAAGGVIWKTLMGNPWFQRAKMPRALDFSGHTHPVATFQPSRPESVNDLFLCPQKELTRGVRPTPRVRAPATQQTRWKKDLAEDEEEEDEEDTEDGVSFQPYIEPPSFLGQEHQAPGHSEAGGVDSGRPRAPLVPSEGSSAWDSSDRSWASTVDSSWDRAGSSGYLAEKGPGQGPGGDGHQESLPPPEFSKDSGFLEELPEDNLSSWATWGTLPPEPNLVPGGPPVSLQTLTFCWESSPEEEEEARESEIEDSDAGSWGAESTQRTEDRGRTLGHYMAR

SEQ ID NO: 6761 - protein, 491 aa, Homo Sapiens
MAGPERWGPLLLCLLQAAPGRPRLAPPQNVTLLSQNFSVYLTWLPGLGNPQDVTYFVAYQSSPTRRRWREVEECAGTKELLCSMMCLKKQDLYNKFKGRVRTVSPSSKSPWVESEYLDYLFEVEPAPPVLVLTQTEEILSANATYQLPPCMPPLDLKYEVAFWKEGAGNKTLFPVTPHGQPVQITLQPAASEHHCLSARTIYTFSVPKYSKFSKPTCFLLEVPEANWAFLVLPSLLILLLVIAAGGVIWKTLMGNPWFQRAKMPRALELTRGVRPTPRVRAPATQQTRWKKDLAEDEEEEDEEDTEDGVSFQPYIEPPSFLGQEHQAPGHSEAGGVDSGRPRAPLVPSEGSSAWDSSDRSWASTVDSSWDRAGSSGYLAEKGPGQGPGGDGHQESLPPPEFSKDSGFLEELPEDNLSSWATWGTLPPEPNLVPGGPPVSLQTLTFCWESSPEEEEEARESEIEDSDAGSWGAESTQRTEDRGRTLGHYMAR

SEQ ID NO: 6762 - protein, 244 aa, Homo Sapiens
MAGPERWGPLLLCLLQAAPGRPRLAPPQNVTLLSQNFSVYLTWLPGLGNPQDVTYFVAYQSSPTRRRWREVEECAGTKELLCSMMCLKKQDLYNKFKGRVRTVSPSSKSPWVESEYLDYLFEVEPAPPVLVLTQTEEILSANATYQLPPCMPPLDLKYEVAFWKEGAGNKTLFPVTPHGQPVQITLQPAASEHHCLSARTIYTFSVPKYSKFSKPTCFLLEVPGLFWTHTPCGNLSAQQTRVRE

SEQ ID NO: 6763 - protein, 211 aa, Homo Sapiens
MAGPERWGPLLLCLLQAAPGRPRLAPPQNVTLLSQNFSVYLTWLPGLGNPQDVTYFVAYQSSPTRRRWREVEECAGTKELLCSMMCLKKQDLYNKFKGRVRTVSPSSKSPWVESEYLDYLFEVEPAPPVLVLTQTEEILSANATYQLPPCMPPLDLKYEVAFWKEGAGNKVGSSFPAPRLGPLLHPFLLRFFSPSQPAPAPLLQEVFPVHS

SEQ ID NO: 6764 - protein, 185 aa, Homo Sapiens
MMCLKKQDLYNKFKGRVRTVSPSSKSPWVESEYLDYLFEVEPAPPVLVLTQTEEILSANATYQLPPCMPPLDLKYEVAFWKEGAGNKTLFPVTPHGQPVQITLQPAASEHHCLSARTIYTFSVPKYSKFSKPTCFLLEVPEANWAFLVLPSLLILLLVIAAGGVIWKTLMGNPWFQRAKMPRALV

SEQ ID NO: 6765 - protein, 195 aa, Homo Sapiens
MALLFPLLAALVMTSYSPVGSLGCDLPQNHGLLSRNTLVLLHQMRRISPFLCLKDRRDFRFPQEMVKGSQLQKAHVMSVLHEMLQQIFSLFHTERSSAAWNMTLLDQLHTGLHQQLQHLETCLLQVVGEGESAGAISSPALTLRRYFQGIRVYLKEKKYSDCAWEVVRMEIMKSLFLSTNMQERLRSKDRDLGSS

SEQ ID NO: 6766 - protein, 153 aa, Homo Sapiens
MGKISSLPTQLFKCCFCDFLKVKMHTMSSSHLFYLALCLLTFTSSATAGPETLCGAELVDALQFVCGDRGFYFNKPTGYGSSSRRAPQTGIVDECCFRSCDLRRLEMYCAPLKPAKSARSVRAQRHTDMPKTQKEVHLKNASRGSAGNKNYRM

SEQ ID NO: 6767 - protein, 153 aa, Homo Sapiens; identical to SEQ ID NO: 6766

SEQ ID NO: 6768 - protein, 158 aa, Homo Sapiens
MGKISSLPTQLFKCCFCDFLKVKMHTMSSSHLFYLALCLLTFTSSATAGPETLCGAELVDALQFVCGDRGFYFNKPTGYGSSSRRAPQTGIVDECCFRSCDLRRLEMYCAPLKPAKSARSVRAQRHTDMPKTQKYQPPSTNKNTKSQRRKGSTFEERK

SEQ ID NO: 6769 - protein, 158 aa, Homo Sapiens; identical to SEQ ID NO: 6768

SEQ ID NO: 6770 - protein, 195 aa, Homo Sapiens
MGKISSLPTQLFKCCFCDFLKVKMHTMSSSHLFYLALCLLTFTSSATAGPETLCGAELVDALQFVCGDRGFYFNKPTGYGSSSRRAPQTGIVDECCFRSCDLRRLEMYCAPLKPAKSARSVRAQRHTDMPKTQKYQPPSTNKNTKSQRRKGWPKTHPGGEQKEGTEASLQIRGKKKEQRREIGSRNAECRGKKGK

SEQ ID NO: 6771 - protein, 137 aa, Homo Sapiens
MITPTVKMHTMSSSHLFYLALCLLTFTSSATAGPETLCGAELVDALQFVCGDRGFYFNKPTGYGSSSRRAPQTGIVDECCFRSCDLRRLEMYCAPLKPAKSARSVRAQRHTDMPKTQKEVHLKNASRGSAGNKNYRM

SEQ ID NO: 6772 - protein, 183 aa, Homo Sapiens
MGIPMGKSMLVLLTFLAFASCCIAAYRPSETLCGGELVDTLQFVCGDRGFYFRLPGRPASRVSRRSRGIVEECCFRSCDLALLETYCATPAKSERDVSTPPTVLPDNFPRYPVGKFFQYDTWKQSTQRLRRGLPALLRARRGHVLAKELEAFREAKRHRPLIALPTQDPAHGGAPPEMASNRK

SEQ ID NO: 6773 - protein, 183 aa, Homo Sapiens; identical to SEQ ID NO: 6772

SEQ ID NO: 6774 - protein, 180 aa, Homo Sapiens
MGIPMGKSMLVLLTFLAFASCCIAAYRPSETLCGGELVDTLQFVCGDRGFYFSRPASRVSRRSRGIVEECCFRSCDLALLETYCATPAKSERDVSTPPTVLPDNFPRYPVGKFFQYDTWKQSTQRLRRGLPALLRARRGHVLAKELEAFREAKRHRPLIALPTQDPAHGGAPPEMASNRK

SEQ ID NO: 6775 - protein, 180 aa, Homo Sapiens; identical to SEQ ID NO: 6774

SEQ ID NO: 6776 - protein, 180 aa, Homo Sapiens; identical to SEQ ID NO: 6774

SEQ ID NO: 6777 - protein, 180 aa, Homo Sapiens; identical to SEQ ID NO: 6774

SEQ ID NO: 6778 - protein, 180 aa, Homo Sapiens; identical to SEQ ID NO: 6774

SEQ ID NO: 6779 - protein, 236 aa, Homo Sapiens
MVSPDPQIIVVAPETELASMQVQRTEDGVTIIQIFWVGRKGELLRRTPVSSAMQTPMGIPMGKSMLVLLTFLAFASCCIAAYRPSETLCGGELVDTLQFVCGDRGFYFSRPASRVSRRSRGIVEECCFRSCDLALLETYCATPAKSERDVSTPPTVLPDNFPRYPVGKFFQYDTWKQSTQRLRRGLPALLRARRGHVLAKELEAFREAKRHRPLIALPTQDPAHGGAPPEMASNRK

SEQ ID NO: 6780 - protein, 643 aa, Homo Sapiens
MALRKAGDLEPQFTPERRFRLCWYQAHSGRALLGPPPQASPPAGGLALALLLLSWVALGPRSLEGADPGTPGEAEGPACPAACVCSYDDDADELSVFCSSRNLTRLPDGVPGGTQALWLDGNNLSSVPPAAFQNLSSLGFLNLQGGQLGSLEPQALLGLENLCHLHLERNQLRSLALGTFAHTPALASLGLSNNRLSRLEDGLFEGLGSLWDLNLGWNSLAVLPDAAFRGLGSLRELVLAGNRLAYLQPALFSGLAELRELDLSRNALRAIKANVFVQLPRLQKLYLDRNLIAAVAPGAFLGLKALRWLDLSHNRVAGLLEDTFPGLLGLRVLRLSHNAIASLRPRTFKDLHFLEELQLGHNRIRQLAERSFEGLGQLEVLTLDHNQLQEVKAGAFLGLTNVAVMNLSGNCLRNLPEQVFRGLGKLHSLHLEGSCLGRIRPHTFTGLSGLRRLFLKDNGLVGIEEQSLWGLAELLELDLTSNQLTHLPHRLFQGLGKLEYLLLSRNRLAELPADALGPLQRAFWLDVSHNRLEALPNSLLAPLGRLRYLSLRNNSLRTFTPQPPGLERLWLEGNPWDCGCPLKALRDFALQNPSAVPRFVQAICEGDDCQPPAYTYNNITCASPPEVVGLDLRDLSEAHFAPC

SEQ ID NO: 6781 - protein, 605 aa, Homo Sapiens
MALRKGGLALALLLLSWVALGPRSLEGADPGTPGEAEGPACPAACVCSYDDDADELSVFCSSRNLTRLPDGVPGGTQALWLDGNNLSSVPPAAFQNLSSLGFLNLQGGQLGSLEPQALLGLENLCHLHLERNQLRSLALGTFAHTPALASLGLSNNRLSRLEDGLFEGLGSLWDLNLGWNSLAVLPDAAFRGLGSLRELVLAGNRLAYLQPALFSGLAELRELDLSRNALRAIKANVFVQLPRLQKLYLDRNLIAAVAPGAFLGLKALRWLDLSHNRVAGLLEDTFPGLLGLRVLRLSHNAIASLRPRTFKDLHFLEELQLGHNRIRQLAERSFEGLGQLEVLTLDHNQLQEVKAGAFLGLTNVAVMNLSGNCLRNLPEQVFRGLGKLHSLHLEGSCLGRIRPHTFTGLSGLRRLFLKDNGLVGIEEQSLWGLAELLELDLTSNQLTHLPHRLFQGLGKLEYLLLSRNRLAELPADALGPLQRAFWLDVSHNRLEALPNSLLAPLGRLRYLSLRNNSLRTFTPQPPGLERLWLEGNPWDCGCPLKALRDFALQNPSAVPRFVQAICEGDDCQPPAYTYNNITCASPPEVVGLDLRDLSEAHFAPC

SEQ ID NO: 6782 - protein, 131 aa, Homo Sapiens
MTVGRRLPTALHGACQEAWPWRCCCCPGWHWAPAAWREQTPERRGKPRAQRARPPVSAATMTTRMSSASSAAPGTSRACLMESRAAPKPCGWTATTSRPSPRQPSRTSPAWASSTCRAASWAAWSHRRCWA

SEQ ID NO: 6783 - protein, 216 aa, Homo Sapiens
MSEVPVARVWLVLLLLTVQVGVTAGAPWQCAPCSAEKLALCPPVSASCSEVTRSAGCGCCPMCALPLGAACGVATARCARGLSCRALPGEQQPLHALTRGQGACVQESDASAPHAAEAGSPESPESTEITEEELLDNFHLMAPSEEDHSILWDAISTYDGSKALHVTNIKKWKCETSMDGEAGLCWCVYPWNGKRIPGSPEIRGDPNCQIYFNVQN

SEQ ID NO: 6784 - protein, 259 aa, Homo Sapiens
MSEVPVARVWLVLLLLTVQVGVTAGAPWQCAPCSAEKLALCPPVSASCSEVTRSAGCGCCPMCALPLGAACGVATARCARGLSCRALPGEQQPLHALTRGQGACVQESDASAPHAAEAGSPESPESTEITEEELLDNFHLMAPSEEDHSILWDAISTYDGSKALHVTNIKKWKEPCRIELYRVVESLAKAQETSGEEISKFYLPNCNKNGFYHSRQCETSMDGEAGLCWCVYPWNGKRIPGSPEIRGDPNCQIYFNVQN

SEQ ID NO: 6785 - protein, 257 aa, Homo Sapiens
MSEVPVARVWLVLLLLTVQVGVTAGAPWQCAPCSAEKLALCPPVSASCSEVTRSAGCGCCPMCALPLGAACGVATARCARGLSCRALPGEQQPLHALTRGQGACVQESDASAPHAAEAGSPESPESTEITEEELLDNFHLMAPSEEDHSILWDAISTYDGSKALHVTNIKKWKEPCRIELYRVVESLAKAQETSGEEISKFYLPNCNKNGFYHSRQTSMDGEAGLCWCVYPWNGKRIPGSPEIRGDPNCQIYFNVQN

SEQ ID NO: 6786 - protein, 98 aa, Homo Sapiens
KHHLGLEEPKKLRPPPARQLLAELASGACFVGLLSSLRASPAVCACRLPANRNWTRSWSGSPPCAFRMSGALWSTSTPCTSPTVTSMACTTSNSARCL

SEQ ID NO: 6787 - protein, 325 aa, Homo Sapiens
MLPRVGCPALPLPPPPLLPLLLLLLGASGGGGGARAEVLFRCPPCTPERLAACGPPPVAPPAAVAAVAGGARMPCAELVREPGCGCCSVCARLEGEACGVYTPRCGQGLRCYPHPGSELPLQALVMGEGTCEKRRDAEYGASPEQVADNGDDHSEGGLVENHVDSTMNMLGGGGSAGRKPLKSGMKELAVFREKVTEQHRQMGKGGKHHLGLEEPKKLRPPPARTPCQQELDQVLERISTMRLPDERGPLEHLYSLHIPNCDKHGLYNLKQCKMSLNGQRGECWCVNPNTGKLIQGAPTIRGDPECHLFYNEQQEARGVHTQRMQ

SEQ ID NO: 6788 - protein, 78 aa, Homo Sapiens
MNMLGGGGSAGRKPLKSGMKELAVFREKVTEQHRQMGKGGKHHLGLEEPKKLRPPPARTPCQQELDQVLERISTMRLP

SEQ ID NO: 6789 - protein, 181 aa, Homo Sapiens
MPCNNGDDHSEGGLVENHVDSTMNMLGGGGSAGRKPLKSGMKELAVFREKVTEQHRQMGKGGKHHLGLEEPKKLRPPPARTPCQQELDQVLERISTMRLPDERGPLEHLYSLHIPNCDKHGLYNLKQCKMSLNGQRGECWCVNPNTGKLIQGAPTIRGDPECHLFYNEQQEARGVHTQRMQ

SEQ ID NO: 6790 - protein, 194 aa, Homo Sapiens
MQRARPLQALLDGRGLCVNASAVSRLRAYLLPAPPAPGNASESEEDRSAGSVESPSVSSTHRVSDPKFHPLHSKIIIIKKGHAKDSQRYKVDYESQSTDTQNFSSESKRETEYGPCRREMEDTLNHLKFLNVLSPRGVHIPNCDKKGFYKKKQCRPSKGRKRGFCWCVDKYGQPLPGYTTKGKEDVHCYSMQSK

SEQ ID NO: 6791 - protein, 297 aa, Homo Sapiens
MQRARPTLWAAALTLLVLLRGPPVARAGASSAGLGPVVRCEPCDARALAQCAPPPAVCAELVREPGCGCCLTCALSEGQPCGIYTERCGSGLRCQPSPDEARPLQALLDGRGLCVNASAVSRLRAYLLPAPPAPGEPPAPGNASESEEDRSAGSVESPSVSSTHRVSDPKFHPLHSKIIIIKKGHAKDSQRYKVDYESQSTDTQNFSSESKRETEYGPCRREMEDTLNHLKFLNVLSPRGVHIPNCDKKGFYKKKQCRPSKGRKRGFCWCVDKYGQPLPGYTTKGKEDVHCYSMQSK

SEQ ID NO: 6792 - protein, 291 aa, Homo Sapiens
MQRARPTLWAAALTLLVLLRGPPVARAGASSAGLGPVVRCEPCDARALAQCAPPPAVCAELVREPGCGCCLTCALSEGQPCGIYTERCGSGLRCQPSPDEARPLQALLDGRGLCVNASAVSRLRAYLLPAPPAPGNASESEEDRSAGSVESPSVSSTHRVSDPKFHPLHSKIIIIKKGHAKDSQRYKVDYESQSTDTQNFSSESKRETEYGPCRREMEDTLNHLKFLNVLSPRGVHIPNCDKKGFYKKKQCRPSKGRKRGFCWCVDKYGQPLPGYTTKGKEDVHCYSMQSK

SEQ ID NO: 6793 - protein, 270 aa, Homo Sapiens
MQRARPTLWAAALTLLVRCEPCDARALAQCAPPPAVCAELVREPGCGCCLTCALSEGQPCGIYTERCGSGLRCQPSPDEARPLQALLDGRGLCVNASAVSRLRAYLLPAPPAPGNASESEEDRSAGSVESPSVSSTHRVSDPKFHPLHSKIIIIKKGHAKDSQRYKVDYESQSTDTQNFSSESKRETEYGPCRREMEDTLNHLKFLNVLSPRGVHIPNCDKKGFYKKKQCRPSKGRKRGFCWCVDKYGQPLPGYTTKGKEDVHCYSMQSK

SEQ ID NO: 6794 - protein, 263 aa, Homo Sapiens
MQRARPTLWAACEPCDARALAQCAPPPAVCAELVREPGCGCCLTCALSEGQPCGIYTERCGSGLRCQPSPDEARPLQALLDGRGLCVNASAVSRLRAYLLPAPPAPGNASESEEDRSAGSVESPSVSSTHRVSDPKFHPLHSKIIIIKKGHAKDSQRYKVDYESQSTDTQNFSSESKRETEYGPCRREMEDTLNHLKFLNVLSPRGVHIPNCDKKGFYKKKQCRPSKGRKRGFCWCVDKYGQPLPGYTTKGKEDVHCYSMQSK

SEQ ID NO: 6795 - protein, 132 aa, Homo Sapiens
MRSAVCQFPRHRLAAGRPHPESGRGNASESEEDRSAGSVESPSVSSTHRVSDPKFHPLHSKIIIIKKGHAKDSQRYKVDYESQSTDTQNFSSESKRETEYGPCRREMEDTLNHLKFLNVLSPRGVHIPNCDK

SEQ ID NO: 6796 - protein, 143 aa, Homo Sapiens
  misc_feature (1)..(1): Xaa can be any naturally occurring amino acid
XESPSVSSTHRVSDPKFHPLHSKIIIIKKGHAKDSQRYKVDYESQSTDTQNFSSESKRETEYGPCRREMEDTLNHLKFLNVLSPRGVHIPNCDKKGFYKKKQCRPSKGRKRGFCWCVDKYGQPLPGYTTKGKEDVHCYSMQSK

SEQ ID NO: 6797 - protein, 153 aa, Homo Sapiens
  misc_feature (1)..(1): Xaa can be any naturally occurring amino acid
XSEEDRSAGSVESPSVSSTHRVSDPKFHPLHSKIIIIKKGHAKDSQRYKVDYESQSTDTQNFSSESKRETEYGPCRREMEDTLNHLKFLNVLSPRGVHIPNCDKKGFYKKKQCRPSKGRKRGFCWCVDKYGQPLPGYTTKGKEDVHCYSMQSK

SEQ ID NO: 6798 - protein, 258 aa, Homo Sapiens
MLPLCLVAALLLAAGPGPSLGDEAIHCPPCSEEKLARCRPPVGCEELVREPGCGCCATCALGLGMPCGVYTPRCGSGLRCYPPRGVEKPLHTLMHGQGVCMELAEIEAIQESLQPSDKDEGDHPNNSFSPCSAHDRRCLQKHFAKIRDRSTSGGKMKVNGAPREDARPVPQGSCQSELHRALERLAASQSRTHEDLYIIPIPNCDRNGNFHPKQCHPALDGQRGKCWCVDRKTGVKLPGGLEPKGELDCHQLADSFRE

SEQ ID NO: 6799 - protein, 272 aa, Homo Sapiens
MVLLTAVLLLLAAYAGPAQSLGSFVHCEPCDEKALSMCPPSPLGCELVKEPGCGCCMTCALAEGQSCGVYTERCAQGLRCLPRQDEEKPLHALLHGRGVCLNEKSYREQVKIERDSREHEEPTTSEMAEETYSPKIFRPKHTRISELKAEAVKKDRRKKLTQSKFVGGAENTAHPRIISAPEMRQESEQGPCRRHMEASLQELKASPRMVPRAVYLPNCDRKGFYKRKQCKPSRGRKRGICWCVDKYGMKLPGMEYVDGDFQCHTFDSSNVE

SEQ ID NO: 6800 - protein, 233 aa, Homo Sapiens
MVLLTAVLLLLAAYAGPAQSLGSFVHCEPCDEKALSMCPPSPLGCELVKEPGCGCCMTCALAEGQSCGVYTERCAQGLRCLPRQDEEKPLHALLHGRGVCLNEKSYREQVKIGCAPGGQRHICFSLYYSPHPKLPSPGLWPCAPWPTGADPPAPSPAERDSREHEEPTTSEMAEETYSPKIFRPKHTRISELKAEAVKKDRRKKLTQSKFVGGAENTAHPRIISAPEMRQESE

SEQ ID NO: 6801 - protein, 238 aa, Homo Sapiens
MTPHRLLPPLLLLLALLLAASPGGALARCPGCGQGVQAGCPGGCVEEEDGGSPAEGCAEAEGCLRREGQECGVYTPNCAPGLQCHPPKDDEAPLRALLLGRGRCLPARAPAEENPKESKPQAGTARPQDVNRRDQQRNPGTSTTPSQPNSAGVQDTEMGPCRRHLDSVLQQLQTEVYRGAQTLYVPNCDHRGFYRKRQCRSSQGQRRGPCWCVDRMGKSLPGSPDGNGSSSCPTGSSG

SEQ ID NO: 6802 - protein, 240 aa, Homo Sapiens
MTPHRLLPPLLLLLALLLAASPGGALARCPGCGQGVQAGCPGGCVEEEDGGSPAEGCAEAEGCLRREGQECGVYTPNCAPGLQCHPPKDDEAPLRALLLGRGRCLPARAPAVAEENPKESKPQAGTARPQDVNRRDQQRNPGTSTTPSQPNSAGVQDTEMGPCRRHLDSVLQQLQTEVYRGAQTLYVPNCDHRGFYRKRQCRSSQGQRRGPCWCVDRMGKSLPGSPDGNGSSSCPTGSSG

SEQ ID NO: 6803 - protein, 136 aa, Homo Sapiens
MTPHRLLPPLLLLLALLLAASPGGALARCPGCGQGVQAGCPGGCVEEEDGGSPAEGCAEAEGCLRREGQECGVYTPNCAPGLQCHPPKDDEAPLRALLLGRGRCLPARAPAVLSSPRTLRKLSPEPGATCSCRGES

SEQ ID NO: 6804 - protein, 282 aa, Homo Sapiens
MERPSLRALLLGAAGLLLLLLPLSSSSSSDTCGPCEPASCPPLPPLGCLLGETRDACGCCPMCARGEGEPCGGGGAGRGYCAPGMECVKSRKRRKGKAGAAAGGPGVSGVCVCKSRYPVCGSDGTTYPSGCQLRAASQRAESRGEKAITQVSKGTCEQGPSIVTPPKDIWNVTGAQVYLSCEVIGIPTPVLIWNKVKRGHYGVQRTELLPGDRDNLAIQTRGGPEKHEVTGWVLVSPLSKEDAGEYECHASNSQGQASASAKITVVDALHEIPVKKGEGAEL

SEQ ID NO: 6805 - protein, 279 aa, Homo Sapiens
MERPSLRALLLGAAGLLLLLLPLSSSSSSDTCGPCEPASCPPLPPLGCLLGETRDACGCCPMCARGEGEPCGGGGAGRGYCAPGMECVKSRKRRKGKAGAAAGGPGVSGVCVCKSRYPVCGSDGTTYPSGCQLRAASQRAESRGEKAITQVSKGTCEQGPSIVTPPKDIWNVTGAQVYLSCEVIGIPTPVLIWNKVKRGHYGVQRTELLPGDRDNLAIQTRGGPEKHEVTGWVLVSPLSKEDAGEYECHASNSQGQASASAKITVVDALHEIPVKKGTQ

SEQ ID NO: 6806 - protein, 278 aa, Homo Sapiens
MPRLSLLLPLLLLLLLPLLPPLSPSLGIRDVGGRRPKCGPCRPEGCPAPAPCPAPGISALDECGCCARCLGAEGASCGGRAGGRCGPGLVCASQAAGAAPEGTGLCVCAQRGTVCGSDGRSYPSVCALRLRARHTPRAHPGHLHKARDGPCEFAPVVVVPPRSVHNVTGAQVGLSCEVRAVPTPVITWRKVTKSPEGTQALEELPGDHVNIAVQVRGGPSDHEATAWILINPLRKEDEGVYQCHAANMVGEAESHSTVTVLDLSKYRSFHFPAPDDRM

SEQ ID NO: 6807 - protein, 110 aa, Homo Sapiens
MAPRGCIVAVFAIFCISRLLCSHGAPVAPMTPYLMLCQPHKRCGDKFYDPLQHCCYDDAVVPLARTQTCGNCTFRVCFEQCCPWTFMVKLINQNCDSARTSDDRLCRSVS

SEQ ID NO: 6808 - protein, 130 aa, Homo Sapiens
MRFSVSGMRTDYPRSVLAPAYVSVCLLLLCPREVIAPAGSEPWLCQPAPRCGDKIYNPLEQCCYNDAIVSLSETRQCGPPCTFWPCFELCCLDSFGLTNDFVVKLKVQGVNSQCHSSPISSKCESRRRFP

SEQ ID NO: 6809 - protein, 119 aa, Homo Sapiens
MVPRIFAPAYVSVCLLLLCPREVIAPAGSEPWLCQPAPRCGDKIYNPLEQCCYNDAIVSLSETRQCGPPCTFWPCFELCCLDSFGLTNDFVVKLKVQGVNSQCHSSPISSKCESRRRFP

SEQ ID NO: 6810 - protein, 84 aa, Homo Sapiens
QPAPRCGDKIYNPLEQCCYNDAIVSLSETRQCGPPCTFWPCFELCCLDSFGLTNDFVVKLKVQGVNSQCHSSPISSKCERRRFP

SEQ ID NO: 6811 - protein, 125 aa, Homo Sapiens
MRPRCCILALVCWITVFLLQCSKGTTDAPVGSGLWLCQPTPRCGNKIYNPSEQCCYDDAILSLKETRRCGSTCTFWPCFELCCPESFGPQQKFLVKLRVLGMKSQCHLSPISRSCTRNRRHVLYP

SEQ ID NO: 6812 - protein, 16 aa, Homo Sapiens
MGPGRCLLTALLLLAL

SEQ ID NO: 6813 - protein, 132 aa, Homo Sapiens
MGPGRCLLTALLLLALAPPPEASQYCGRLEYWNPDNKCCSSCLQRFGPPPCPDYEFRENCGLNDHGDFVTPPFRKCSSGQCNPDGAELCSPCGGGAVTPTPAAGGGRTPWRCREAGPCQGALPPHTWKPRRP

SEQ ID NO: 6814 - protein, 138 aa, Homo Sapiens
MGPGRCLLTALLLLALAPPPEASQYCGRLEYWNPDNKCCSSCLQRFGPPPCPDYEFRENCGLNDHGDFVTPPFRKCSSGQCNPDGAELCSPCGGGAVTPTPAAGGGRTPWRCRERPVPAKGHCPLTPGNPGAPSSQER

SEQ ID NO: 6815 - protein, 355 aa, Homo Sapiens
MGPGRCLLTALLLLALAPPPEASQYCGRLEYWNPDNKCCSSCLQRFGPPPCPDYEFRENCGLNDHGDFVTPPFRKCSSGQCNPDGAELCSPCGGGAVTPTPAAGGGRTPWRCRERPVPAKGHCPLTPGNPGAPSSQERSSPASSIAWRTPEPVPQQAWPNFLPLVVLVLLLTLAVIAILLFILLWHLCWPKEKADPYPYPGLVCGVPNTHTPSSSHLSSPGALETGDTWKEASLLPLLSRELSSLASQPLSRLLDELEVLEELIVLLDPEPGPGGGMAHGTTRHLAARYGLPAAWSTFAYSLRPSRSPLRALIEMVVAREPSASLGQLGTHLAQLGRADALRVLSKLGSSGVCWA

SEQ ID NO: 6816 - protein, 355 aa, Homo Sapiens; identical to SEQ ID NO: 6815

SEQ ID NO: 6817 - protein, 167 aa, Homo Sapiens
MGPGRCLLTALLLLALAPPPEASQYCGRLEYWNPDNKCCSSCLQRFGPPPCPELSSLASQPLSRLLDELEVLEELIVLLDPEPGPGGGMAHGTTRHLAARYGLPAAWSTFAYSLRPSRSPLRALIEMVVAREPSASLGQLGTHLAQLGRADALRVLSKLGSSGVCWA

SEQ ID NO: 6818 - protein, 187 aa, Homo Sapiens
MGPGRCLLTALLLLALAPPPEASQYCGRLEYWNPDNKCCSSCLQRFGPPPCPGALETGDTWKEASLLPLLSRELSSLASQPLSRLLDELEVLEELIVLLDPEPGPGGGMAHGTTRHLAARYGLPAAWSTFAYSLRPSRSPLRALIEMVVAREPSASLGQLGTHLAQLGRADALRVLSKLGSSGVCWA

SEQ ID NO: 6819 - protein, 60 aa, Homo Sapiens
  misc_feature (1)..(1): Xaa can be any naturally occurring amino acid
XGRLEYWNPDNKCCSSCLQRFGPPPCPGENPRPSLAWAELAEAGPCQGALPPHTWKPRRP

SEQ ID NO: 6820 - protein, 74 aa, Homo Sapiens
  misc_feature (1)..(1): Xaa can be any naturally occurring amino acid
XNCGLNDHGDFVTPPFRKCSSGQCNPDGAELCSPCGGGAVTPTPAAGGGRTPWRCREAPWRQGTHGRRPHYFHS

SEQ ID NO: 6821 - protein, 53 aa, Homo Sapiens
MCSYYHMKKRSVSGCNITIFAVMFSHLSAGKSPCGNQANVLCISRLEFVQYQS

SEQ ID NO: 6822 - protein, 336 aa, Homo Sapiens
MPPPAPGARLRLLAAAALAGLAVISRGLLSQSLEFNSPADNYTVCEGDNATLSCFIDEHVTRVAWLNRSNILYAGNDRWTSDPRVRLLINTPEEFSILITEVGLGDEGLYTCSFQTRHQPYTTQVYLIVHVPARIVNISSPVTVNEGGNVNLLCLAVGRPEPTVTWRQLRDGFTSEGEILEISDIQRGQAGEYECVTHNGVNSAPDSRRVLVTVNYPPTITDVTSARTALGRAALLRCEAMAVPPADFQWYKDDRLLSSGTAEGLKVQTERTRSMLLFANVSARHYGNYTCRAANRLGASSASMRLLRPGSLENSAPRPPGLLALLSALGWLWWRM

SEQ ID NO: 6823 - protein, 1327 aa, Homo Sapiens
MTLDRPGEGATMLKTFTVLLFCILMDPQPELWIESNYPQAPWENITLWCRSPSRISSKFLLLKDKTQMTWIRPSHKTFQVSFLIGALTESNAGLYRCCYWKETGWSKPSKVLELEAPGQLPKPIFWIQAETPALPGCNVNILCHGWLQDLVFMLFKEGYAEPVDYQVPTGTMAIFSIDNLTPEDEGVYICRTHIQMLPTLWSEPSNPLKLVVAGLYPKPTLTAHPGPIMAPGESLNLRCQGPIYGMTFALMRVEDLEKSFYHKKTIKNEANFFFQSLKIQDTGHYLCFYYDASYRGSLLSDVLKIWVTDTFPKTWLLARPSAVVQMGQNVSLRCRGPVDGVGLALYKKGEDKPLQFLDATSIDDNTSFFLNNVTYSDTGIYSCHYLLTWKTSIRMPSHNTVELMVVDKPPKPSLSAWPSTVFKLGKAITLQCRVSHPVLEFSLEWEERETFQKFSVNGDFIISNVDGKGTGTYSCSYRVETHPNIWSHRSEPLKLMGPAGYLTWNYVLNEAIRLSLIMQLVALLLVVLWIRWKCRRLRIREAWLLGTAQGVTMLFIVTALLCCGLCNGVLIEETEIVMPTPKPELWAETNFPLAPWKNLTLWCRSPSGSTKEFVLLKDGTGWIATRPASEQVRAAFPLGALTQSHTGSYHCHSWEEMAVSEPSEALELVGTDILPKPVISASPTIRGQELQLRCKGWLAGMGFALYKEGEQEPVQQLGAVGREAFFTIQRMEDKDEGNYSCRTHTEKRPFKWSEPSEPLELVIKEMYPKPFFKTWASPVVTPGARVTFNCSTPHQHMSFILYKDGSEIASSDRSWASPGASAAHFLIISVGIGDGGNYSCRYYDFSIWSEPSDPVELVVTEFYPKPTLLAQPGPVVFPGKSVILRCQGTFQGMRFALLQEGAHVPLQFRSVSGNSADFLLHTVGAEDSGNYSCIYYETTMSNRGSYLSMPLMIWVTDTFPKPWLFAEPSSVVPMGQNVTLWCRGPVHGVGYILHKEGEATSMQLWGSTSNDGAFPITNISGTSMGRYSCCYHPDWTSSIKIQPSNTLELLVTGLLPKPSLLAQPGPMVAPGENMTLQCQGELPDSTFVLLKEGAQEPLEQQRPSGYRADFWMPAVRGEDSGIYSCVYYLDSTPFAASNHSDSLEIWVTDKPPKPSLSAWPSTMFKLGKDITLQCRGPLPGVEFVLEHDGEEAPQQFSEDGDFVINNVEGKGIGNYSCSYRLQAYPDIWSEPSDPLELVGAAGPVAQECTVGNIVRSSLIVVVVVALGVVLAIEWKKWPRLRTRGSETDGRDQTIALEECNQEGEPGTPANSPSSTSQRISVELPVPI

SEQ ID NO: 6824 - protein, 1327 aa, Homo Sapiens; identical to SEQ ID NO: 6823

SEQ ID NO: 6825 - protein, 242 aa, Homo Sapiens
MTLDRPGEGATMLKTFTVLLFCIRMSLGMTSIVMDPQPELWIESNYPQAPWENITLWCRSPSRISSKFLLLKDKTQMTWIRPSHKTFQVSFLIGALTESNAGLYRCCYWKETGWSKPSKVLELEAPGQLPKPIFWIQAETPALPGCNVNILCHGWLQDLVFMLFKEGYAEPVDYQVPTGTMAIFSIDNLTPEDEGVYICRTHIQMLPTLWSEPSNPLKLVVAGGCGYGCWHLAIVVPGIMAG

SEQ ID NO: 6826 - protein, 242 aa, Homo Sapiens; identical to SEQ ID NO: 6825

SEQ ID NO: 6827 - protein, 1341 aa, Homo Sapiens
MTLDRPGEGATMLKTFTVLLFCIRMSLGMTSIVMDPQPELWIESNYPQAPWENITLWCRSPSRISSKFLLLKDKTQMTWIRPSHKTFQVSFLIGALTESNAGLYRCCYWKETGWSKPSKVLELEAPGQLPKPIFWIQAETPALPGCNVNILCHGWLQDLVFMLFKEGYAEPVDYQVPTGTMAIFSIDNLTPEDEGVYICRTHIQMLPTLWSEPSNPLKLVVAGLYPKPTLTAHPGPIMAPGESLNLRCQGPIYGMTFALMRVEDLEKSFYHKKTIKNEANFFFQSLKIQDTGHYLCFYYDASYRGSLLSDVLKIWVTDTFPKTWLLARPSAVVQMGQNVSLRCRGPVDGVGLALYKKGEDKPLQFLDATSIDDNTSFFLNNVTYSDTGIYSCHYLLTWKTSIRMPSHNTVELMVVDKPPKPSLSAWPSTVFKLGKAITLQCRVSHPVLEFSLEWEERETFQKFSVNGDFIISNVDGKGTGTYSCSYRVETHPNIWSHRSEPLKLMGPAGYLTWNYVLNEAIRLSLIMQLVALLLVVLWIRWKCRRLRIREAWLLGTAQGVTMLFIVTALLCCAISFAGLCNGVLIEETEIVMPTPKPELWAETNFPLAPWKNLTLWCRSPSGSTKEFVLLKDGTGWIATRPASEQVRAAFPLGALTQSHTGSYHCHSWEEMAVSEPSEALELVGTDILPKPVISASPTIRGQELQLRCKGWLAGMGFALYKEGEQEPVQQLGAVGREAFFTIQRMEDKDEGNYSCRTHTEKRPFKWSEPSEPLELVIKEMYPKPFFKTWASPVVTPGARVTFNCSTPHQHMSFILYKDGSEIASSDRSWASPGASAAHFLIISVGIGDGGNYSCRYYDFSIWSEPSDPVELVVTEFYPKPTLLAQPGPVVFPGKSVILRCQGTFQGMRFALLQEGAHVPLQFRSVSGNSADFLLHTVGAEDSGNYSCIYYETTMSNRGSYLSMPLMIWVTDTFPKPWLFAEPSSVVPMGQNVTLWCRGPVHGVGYILHKEGEATSMQLWGSTSNDGAFPITNISGTSMGRYSCCYHPDWTSSIKIQPSNTLELLVTGLLPKPSLLAQPGPMVAPGENMTLQCQGELPDSTFVLLKEGAQEPLEQQRPSGYRADFWMPAVRGEDSGIYSCVYYLDSTPFAASNHSDSLEIWVTDKPPKPSLSAWPSTMFKLGKDITLQCRGPLPGVEFVLEHDGEEAPQQFSEDGDFVINNVEGKGIGNYSCSYRLQAYPDIWSEPSDPLELVGAAGPVAQECTVGNIVRSSLIVVVVVALGVVLAIEWKKWPRLRTRGSETDGRDQTIALEECNQEGEPGTPANSPSSTSQRISVELPVPI

SEQ ID NO: 6828 - protein, 1336 aa, Homo Sapiens
MTLDRPGEGATMLKTFTVLLFCIRMSLGMTSIVMDPQPELWIESNYPQAPWENITLWCRSPSRISSKFLLLKDKTQMTWIRPSHKTFQVSFLIGALTESNAGLYRCCYWKETGWSKPSKVLELEAPGQLPKPIFWIQAETPALPGCNVNILCHGWLQDLVFMLFKEGYAEPVDYQVPTGTMAIFSIDNLTPEDEGVYICRTHIQMLPTLWSEPSNPLKLVVAGLYPKPTLTAHPGPIMAPGESLNLRCQGPIYGMTFALMRVEDLEKSFYHKKTIKNEANFFFQSLKIQDTGHYLCFYYDASYRGSLLSDVLKIWVTDTFPKTWLLARPSAVVQMGQNVSLRCRGPVDGVGLALYKKGEDKPLQFLDATSIDDNTSFFLNNVTYSDTGIYSCHYLLTWKTSIRMPSHNTVELMVVDKPPKPSLSAWPSTVFKLGKAITLQCRVSHPVLEFSLEWEERETFQKFSVNGDFIISNVDGKGTGTYSCSYRVETHPNIWSHRSEPLKLMGPAGYLTWNYVLNEAIRLSLIMQLVALLLVVLWIRWKCRRLRIREAWLLGTAQGVTMLFIVTALLCCGLCNGVLIEETEIVMPTPKPELWAETNFPLAPWKNLTLWCRSPSGSTKEFVLLKDGTGWIATRPASEQVRAAFPLGALTQSHTGSYHCHSWEEMAVSEPSEALELVGTDILPKPVISASPTIRGQELQLRCKGWLAGMGFALYKEGEQEPVQQLGAVGREAFFTIQRMEDKDEGNYSCRTHTEKRPFKWSEPSEPLELVIKEMYPKPFFKTWASPVVTPGARVTFNCSTPHQHMSFILYKDGSEIASSDRSWASPGASAAHFLIISVGIGDGGNYSCRYYDFSIWSEPSDPVELVVTEFYPKPTLLAQPGPVVFPGKSVILRCQGTFQGMRFALLQEGAHVPLQFRSVSGNSADFLLHTVGAEDSGNYSCIYYETTMSNRGSYLSMPLMIWVTDTFPKPWLFAEPSSVVPMGQNVTLWCRGPVHGVGYILHKEGEATSMQLWGSTSNDGAFPITNISGTSMGRYSCCYHPDWTSSIKIQPSNTLELLVTGLLPKPSLLAQPGPMVAPGENMTLQCQGELPDSTFVLLKEGAQEPLEQQRPSGYRADFWMPAVRGEDSGIYSCVYYLDSTPFAASNHSDSLEIWVTDKPPKPSLSAWPSTMFKLGKDITLQCRGPLPGVEFVLEHDGEEAPQQFSEDGDFVINNVEGKGIGNYSCSYRLQAYPDIWSEPSDPLELVGAAGPVAQECTVGNIVRSSLIVVVVVALGVVLAIEWKKWPRLRTRGSETDGRDQTIALEECNQEGEPGTPANSPSSTSQRISVELPVPI

SEQ ID NO: 6829 - protein, 2623 aa, Homo Sapiens
MKVKGRGITCLLVSFAVICLVATPGGKACPRRCACYMPTEVHCTFRYLTSIPDSIPPNVERINLGYNSLVRLMETDFSGLTKLELLMLHSNGIHTIPDKTFSDLQALQVLKMSYNKVRKLQKDTFYGLRSLTRLHMDHNNIEFINPEVFYGLNFLRLVHLEGNQLTKLHPDTFVSLSYLQIFKISFIKFLYLSDNFLTSLPQEMVSYMPDLDSLYLHGNPWTCDCHLKWLSDWIQEKPDVIKCKKDRSPSSAQQCPLCMNPRTSKGKPLAMVSAAAFQCAKPTIDSSLKSKSLTILEDSSSAFISPQGFMAPFGSLTLNMTDQSGNEANMVCSIQKPSRTSPIAFTEENDYIVLNTSFSTFLVCNIDYGHIQPVWQILALYSDSPLILERSHLLSETPQLYYKYKQVAPKPEDIFTNIEADLRADPSWLMQDQISLQLNRTATTFSTLQIQYSSDAQITLPRAEMRPVKHKWTMISRDNNTKLEHTVLVGGTVGLNCPGQGDPTPHVDWLLADGSKVRAPYVSEDGRILIDKSGKLELQMADSFDTGVYHCISSNYDDADILTYRITVVEPLVEAYQENGIHHTVFIGETLDLPCHSTGIPDASISWVIPGNNVLYQSSRDKKVLNNGTLRILQVTPKDQGYYRCVAANPSGVDFLIFQVSVKMKGQRPLEHDGETEGSGLDESNPIAHLKEPPGAQLRTSALMEAEVGKHTSSTSKRHNYRELTLQRRGDSTHRRFRENRRHFPPSARRIDPQHWAALLEKAKKNAMPDKRENTTVSPPPVVTQLPNIPGEEDDSSGMLALHEEFMVPATKALNLPARTVTADSRTISDSPMTNINYGTEFSPVVNSQILPPEEPTDFKLSTAIKTTAMSKNINPTMSSQIQGTTNQHSSTVFPLLLGATEFQDSDQMGRGREHFQSRPPITVRTMIKDVNVKMLSSTTNKLLLESVNTTNSHQTSVREVSEPRHNHFYSHTTQILSTSTFPSDPHTAAHSQFPIPRNSTVNIPLFRRFGRQRKIGGRGRIISPYRTPVLRRHRYSIFRSTTRGSSEKSTTAFSATVLNVTCLSCLPRERLTTATAALSFPSAAPITFPKADIARVPSEESTTLVQNPLLLLENKPSVEKTTPTIKYFRTEISQVTPTGAVMTYAPTSIPMEKTHKVNASYPRVSSTNEAKRDSVITSSLSGAITKPPMTIIAITRFSRRKIPWQQNFVNNHNPKGRLRNQHKVSLQKSTAVMLPKTSPALPRDKVSPFHFTTLSTSVMQIPSNTLTTAHHTTTKTHNPGSLPTKKELPFPPLNPMLPSIISKDSSTKSIISTQTAIPATTPTFPASVITYETQTERSRAQTIQREQEPQKKNRTDPNISPDQSSGFTTPTAMTPPVLTTAETSVKPSVSAFTHSPPENTTGISSTISFHSRTLNLTDVIEELAQASTQTLKSTIASETTLSSKSHQSTTTRKAIIRHSTIPPFLSSSATLMPVPISPPFTQRAVTDNVATPISGLMTNTVVKLHESSRHNAKPQQLVAEVATSPKVHPNAKFTIGTTHFIYSNLLHSTPMPALTTVKSQNSKLTPSPWAENQFWHKPYSEIAEKGKKPEVSMLATTGLSEATTLVSDWDGQKNTKKSDFDKKPVQEATTSKLLPFDSLSRYIFEKPRIVGGKAASFTIPANSDAFLPCEAVGNPLPTIHWTRVPSGLDLSKRKQNSRVQVLPNGTLSIQRVEIQDRGQYLCSASNLFGTDHLHVTLSVVSYPPRILERRTKEITVHSGSTVELKCRAEGRPSPTVTWILANQTVVSESSQGSRQAVVTVDGTLVLHNLSIYDRGFYKCVASNPGGQDSLLVKIQVIAAPPVILEQRRQVIVGTWGESLKLPCTAKGTPQPSVYWVLSDGTEVKPLQFTNSKLFLFSNGTLYIRNLASSDRGTYECIATSSTGSERRVVMLTMEERVTSPRIEAASQKRTEVNFGDKLLLNCSATGEPKPQIMWRLPSKAVVDQQHRVGSWIHVYPNGSLFIGSVTEKDSGVYLCVARNKMGDDLILMHVSLRLKPAKIDHKQYFRKQVLHGKDFQVDCKASGSPVPEISWSLPDGTMINNAMQADDSGHRTRRYTLFNNGTLYFNKVGVAEEGDYTCYAQNTLGKDEMKVHLTVITAAPRIRQSNKTNKRIKAGDTAVLDCEVTGDPKPKIFWLLPSNDMISFSIDRYTFHANGSLTINKVKLLDSGEYVCVARNPSGDDTKMYKLDVVSKPPLINGLYTNRTVIKATAVRHSKKHFDCRAEGTPSPEVMWIMPDNIFLTAPYYGSRITVHKNGTLEIRNVRLSDSADFICVARNEGGESVLVVQLEVLEMLRRPTFRNPFNEKIVAQLGKSTALNCSVDGNPPPEIIWILPNGTRFSNGPQSYQYLIASNGSFIISKTTREDAGKYRCAARNKVGYIEKLVILEIGQKPVILTYAPGTVKGISGESLSLHCVSDGIPKPNIKWTMPSGYVVDRPQINGKYILHDNGTLVIKEATAYDRGNYICKAQNSVGHTLITVPVMIVAYPPRITNRPPRSIVTRTGAAFQLHCVALGVPKPEITWEMPDHSLLSTASKERTHGSEQLHLQGTLVIQNPQTSDSGIYKCTAKNPLGSDYAATYIQVI

SEQ ID NO: 6830 - protein, 86 aa, Homo Sapiens
TMEERVTSPRIEAASQKRTEVNFGDKLLLNCSATGEPKPQIMWRLPSKAVVDQQHRILDFYFSEAEAMPCSCCNHKTEYPAYYCQV

SEQ ID NO: 6831 - protein, 406 aa, Homo Sapiens
MSLVELLLWWNCFSRTGVAASLEVSESPGSIQVARGQPAVLPCTFTTSAALINLNVIWMVTPLSNANQPEQVILYQGGQMFDGAPRFHGRVGFTGTMPATNVSIFINNTQLSDTGTYQCLVNNLPDIGGRNIGVTGLTVLVPPSAPHCQIQGSQDIGSDVILLCSSEEGIPRPTYLWEKLDNTLKLPPTATQDQVQGTVTIRNISALSSAQPRNIGLIAGAIGTGAVIIIFCIALILGAFFYWRSKNKEEEEEEIPNEIREDDLPPKCSSAKAFHTEISSSDNNTLTSSNAYNSRYWSNNPKVHRNTESVSHFSDLGQSFSFHSGNANIPSIYANGTHLVPGQHKTLVVTANRGSSPQVMSRSNGSVSRKPRPPHTHSYTISHATLERIGAVPVMVPAQSRAGSLV

SEQ ID NO: 6832 - protein, 430 aa, Homo Sapiens
MSLVELLLWWNCFSRTGVAASLEVSESPGSIQVARGQPAVLPCTFTTSAALINLNVIWMVTPLSNANQPEQVILYQGGQMFDGAPRFHGRVGFTGTMPATNVSIFINNTQLSDTGTYQCLVNNLPDIGGRNIGVTGLTVLVPPSAPHCQIQGSQDIGSDVILLCSSEEGIPRPTYLWEKLDNTLKLPPTATQDQVQGTVTIRNISALSSGLYQCVASNAIGTSTCLLDLQVISPQPRNIGLIAGAIGTGAVIIIFCIALILGAFFYWRSKNKEEEEEEIPNEIREDDLPPKCSSAKAFHTEISSSDNNTLTSSNAYNSRYWSNNPKVHRNTESVSHFSDLGQSFSFHSGNANIPSIYANGTHLVPGQHKTLVVTANRGSSPQVMSRSNGSVSRKPRPPHTHSYTISHATLERIGAVPVMVPAQSRAGSLV

SEQ ID NO: 6833 - protein, 430 aa, Homo Sapiens; identical to SEQ ID NO: 6832

SEQ ID NO: 6834 - protein, 407 aa, Homo Sapiens
MTSQRSPLAPLLLLSLHGVAASLEVSESPGSIQVARGQPAVLPCTFTTSAALINLNVIWMVTPLSNANQPEQVILYQGGQMFDGAPRFHGRVGFTGTMPATNVSIFINNTQLSDTGTYQCLVNNLPDIGGRNIGVTGLTVLVPPSAPHCQIQGSQDIGSDVILLCSSEEGIPRPTYLWEKLDNTLKLPPTATQDQVQGTVTIRNISALSSAQPRNIGLIAGAIGTGAVIIIFCIALILGAFFYWRSKNKEEEEEEIPNEIREDDLPPKCSSAKAFHTEISSSDNNTLTSSNAYNSRYWSNNPKVHRNTESVSHFSDLGQSFSFHSGNANIPSIYANGTHLVPGQHKTLVVTANRGSSPQVMSRSNGSVSRKPRPPHTHSYTISHATLERIGAVPVMVPAQSRAGSLV

SEQ ID NO: 6835 - protein, 431 aa, Homo Sapiens
MTSQRSPLAPLLLLSLHGVAASLEVSESPGSIQVARGQPAVLPCTFTTSAALINLNVIWMVTPLSNANQPEQVILYQGGQMFDGAPRFHGRVGFTGTMPATNVSIFINNTQLSDTGTYQCLVNNLPDIGGRNIGVTGLTVLVPPSAPHCQIQGSQDIGSDVILLCSSEEGIPRPTYLWEKLDNTLKLPPTATQDQVQGTVTIRNISALSSGLYQCVASNAIGTSTCLLDLQVISPQPRNIGLIAGAIGTGAVIIIFCIALILGAFFYWRSKNKEEEEEEIPNEIREDDLPPKCSSAKAFHTEISSSDNNTLTSSNAYNSRYWSNNPKVHRNTESVSHFSDLGQSFSFHSGNANIPSIYANGTHLVPGQHKTLVVTANRGSSPQVMSRSNGSVSRKPRPPHTHSYTISHATLERIGAVPVMVPAQSRAGSLV

SEQ ID NO: 6836 - protein, 403 aa, Homo Sapiens
MTSQRSPLAPLLLLSLHGVAASLEVSESPGSIQVARGQPAVLPCTFTTSAALINLNVIWMVTPLSNANQPEQVILYQGGQMFDGAPRFHGRVGFTGTMPATNVSIFINNTQLSDTGTYQCLVNNLPDIGGRNIGVTGLTVLVPPSAPHCQIQGSQDIGSDVILLCSSEEGIPRPTYLWEKLDNTLKLPPTATQDQVQGTVTIRNISALSSGLYQCVASNAIGTSTCLLDLQVISRAFFYWRSKNKEEEEEEIPNEIREDDLPPKCSSAKAFHTEISSSDNNTLTSSNAYNSRYWSNNPKVHRNTESVSHFSDLGQSFSFHSGNANIPSIYANGTHLVPGQHKTLVVTANRGSSPQVMSRSNGSVSRKPRPPHTHSYTISHATLERIGAVPVMVPAQSRAGSLV

SEQ ID NO: 6837 - protein, 33 aa, Homo Sapiens
MVTPLSNANQPEQVILYQGGQMFDGAPRFHGRV

SEQ ID NO: 6838 - protein, 59 aa, Homo Sapiens
MVTPLSNANQPEQVILYQGGQMFDGAPRFHGRVGFTGTMPATNVSIFINNTQLSDTGTY

SEQ ID NO: 6839 - protein, 467 aa, Homo Sapiens
MRTAPSLRRCVCLLLAAILDLARGYLTVNIEPLPPVVAGDAVTLKCNFKTDGRMREIVWYRVTDGGTIKQKIFTFDAMFSTNYSHMENYRKREDLVYQSTVRLPEVRISDNGPYECHVGIYDRATREKVVLASGNIFLNVMAPPTSIEVVAADTPAPFSRYQAQNFTLVCIVSGGKPAPMVYFKRDGEPIDAVPLSEPPAASSGPLQDSRPFRSLLHRDLDDTKMQKSLSLLDAENRGGRPYTERPSRGLTPDPNILLQPTTENIPETVVSREFPRWVHSAEPTYFLRHSRTPSSDGTVEVRALLTWTLNPQIDNEALFSCEVKHPALSMPMQAEVTLVAPKGPKIVMTPSRARVGDTVRILVHGFQNEVFPEPMFTWTRVGSRLLDGSAEFDGKELVLERVPAELNGSMYRCTAQNPLGSTDTHTRLIVFENPNIPRGTEDSNGSIGPTGARLTLVLALTVILELT

SEQ ID NO: 6840 - protein, 613 aa, Homo Sapiens
MGALRPTLLPPSLPLLLLLMLGMGCWAREVLVPEGPLYRVAGTAVSISCNVTGYEGPAQQNFEWFLYRPEAPDTALGIVSTKDTQFSYAVFKSRVVAGEVQVQRLQGDAVVLKIARLQAQDAGIYECHTPSTDTRYLGSYSGKVELRVLPDVLQVSAAPPGPRGRQAPTSPPRMTVHEGQELALGCLARTSTQKHTHLAVSFGRSVPEAPVGRSTLQEVVGIRSDLAVEAGAPYAERLAAGELRLGKEGTDRYRMVVGGAQAGDAGTYHCTAAEWIQDPDGSWAQIAEKRAVLAHVDVQTLSSQLAVTVGPGERRIGPGEPLELLCNVSGALPPAGRHAAYSVGWEMAPAGAPGPGRLVAQLDTEGVGSLGPGYEGRHIAMEKVASRTYRLRLEAARPGDAGTYRCLAKAYVRGSGTRLREAASARSRPLPVHVREEGVVLEAVAWLAGGTVYRGETASLLCNISVRGGPPGLRLAASWWVERPEDGELSSVPAQLVGGVGQDGVAELGVRPGGGPVSVELVGPRSHRLRLHSLGPEDEGVYHCAPSAWVQHADYSWYQAGSARSGPVTVYPYMHALDTLFVPLLVGTGVALVTGATVLGTITCCFMKRLRKR

SEQ ID NO: 6841 - protein, 613 aa, Homo Sapiens; identical to SEQ ID NO: 6840

SEQ ID NO: 6842 - protein, 301 aa, Homo Sapiens
MGALRPTLLPPSLPLLLLLMLGMGCWAREVLVPEGPLYRVAGTAVSISCNVTGYEGPAQQNFEWFLYRPEAPDTALGIVSTKDTQFSYAVFKSRVVAGEVQVQRLQGDAVVLKIARLQAQDAGIYECHTPSTDTRYLGSYSGKVELRVLPDVLQVSAAPPGPRGRQAPTSPPRMTVHEGQELALGCLARTSTQKHTHLAVSFGRSVPEAPVGRSTLQEVVGIRSDLAVEAGAPYAERLAAGELRLGKEGTDRYRMVVGGAQAGDAGTYHCTAAEWIQDPDGSWAQIAEKRAVLAHVDVQTL

SEQ ID NO: 6843 - protein, 613 aa, Homo Sapiens; identical to SEQ ID NO: 6840

SEQ ID NO: 6844 - protein, 1163 aa, Homo Sapiens
MVWCLGLAVLSLVISQGADGRGKPEVVSVVGRAGESVVLGCDLLPPAGRPPLHVIEWLRFGFLLPIFIQFGLYSPRIDPDYVGRVRLQKGASLQIEGLRVEDQGWYECRVFFLDQHIPEDDFANGSWVHLTVNSPPQFQETPPAVLEVQELEPVTLRCVARGSPLPHVTWKLRGKDLGQGQGQVQVQNGTLRIRRVERGSSGVYTCQASSTEGSATHATQLLVLGPPVIVVPPKNSTVNASQDVSLACHAEAYPANLTYSWFQDNINVFHISRLQPRVRILVDGSLRLLATQPDDAGCYTCVPSNGLLHPPSASAYLTVLCMPGVIRCPVRANPPLLFVSWTKDGKALQLDKFPGWSQGTEGSLIIALGNEDALGEYSCTPYNSLGTAGPSPVTRVLLKAPPAFIERPKEEYFQEVGRELLIPCSAQGDPPPVVSWTKVGRGLQGQAQVDSNSSLILRPLTKEAHGHWECSASNAVARVATSTNVYVLGTSPHVVTNVSVVALPKGANVSWEPGFDGGYLQRFSVWYTPLAKRPDRMHHDWVSLAVPVGAAHLLVPGLQPHTQYQFSVLAQNKLGSGPFSEIVLSAPEGLPTTPAAPGLPPTEIPPPLSPPRGLVAVRTPRGVLLHWDPPELVPKRLDGYVLEGRQGSQGWEVLDPAVAGTETELLVPGLIKDVLYEFRLVAFAGSFVSDPSNTANVSTSGLEVYPSRTQLPGLLPQPVLAGVVGGVCFLGVAVLVSILAGCLLNRRRAARRRRKRLRQDPPLIFSPTGKSAAPSALGSGSPDSVAKLKLQGSPVPSLRQSLLWGDPAGTPSPHPDPPSSRGPLPLEPICRGPDGRFVMGPTVAAPQERSGREQAEPRTPAQRLARSFDCSSSSPSGAPQPLCIEDISPVAPPPAAPPSPLPGPGPLLQYLSLPFFREMNVDGDWPPLEEPSPAAPPDYMDTRRCPTSSFLRSPETPPVSPRESLPGAVVGAGATAEPPYTALADWTLRERLLPGLLPAAPRGSLTSQSSGRGSASFLRPPSTAPSAGGSYLSPAPGDTSSWASGPERWPRREHVVTVSKRRNTSVDENYEWDSEFPGDMELLETLHLGLASSRLRPEAEPELGVKTPEEGCLLNTAHVTGPEARCAALREEFLAFRRRRDATRARLPAYRQPVPHPEQATLL

SEQ ID NO: 6845 - protein, 1179 aa, Homo Sapiens
MVWCLGLAVLSLVISQGADGRGKPEVVSVVGRAGESVVLGCDLLPPAGRPPLHVIEWLRFGFLLPIFIQFGLYSPRIDPDYVGRVRLQKGASLQIEGLRVEDQGWYECRVFFLDQHIPEDDFANGSWVHLTVNSPPQFQETPPAVLEVQELEPVTLRCVARGSPLPHVTWKLRGKDLGQGQGQVQVQNGTLRIRRVERGSSGVYTCQASSTEGSATHATQLLVLGPPVIVVPPKNSTVNASQDVSLACHAEAYPANLTYSWFQDNINVFHISRLQPRVRILVDGSLRLLATQPDDAGCYTCVPSNGLLHPPSASAYLTVLYPAQVTAMPPETPLPIGMPGVIRCPVRANPPLLFVSWTKDGKALQLDKFPGWSQGTEGSLIIALGNEDALGEYSCTPYNSLGTAGPSPVTRVLLKAPPAFIERPKEEYFQEVGRELLIPCSAQGDPPPVVSWTKVGRGLQGQAQVDSNSSLILRPLTKEAHGHWECSASNAVARVATSTNVYVLGTSPHVVTNVSVVALPKGANVSWEPGFDGGYLQRFSVWYTPLAKRPDRMHHDWVSLAVPVGAAHLLVPGLQPHTQYQFSVLAQNKLGSGPFSEIVLSAPEGLPTTPAAPGLPPTEIPPPLSPPRGLVAVRTPRGVLLHWDPPELVPKRLDGYVLEGRQGSQGWEVLDPAVAGTETELLVPGLIKDVLYEFRLVAFAGSFVSDPSNTANVSTSGLEVYPSRTQLPGLLPQPVLAGVVGGVCFLGVAVLVSILAGCLLNRRRAARRRRKRLRQDPPLIFSPTGKSAAPSALGSGSPDSVAKLKLQGSPVPSLRQSLLWGDPAGTPSPHPDPPSSRGPLPLEPICRGPDGRFVMGPTVAAPQERSGREQAEPRTPAQRLARSFDCSSSSPSGAPQPLCIEDISPVAPPPAAPPSPLPGPGPLLQYLSLPFFREMNVDGDWPPLEEPSPAAPPDYMDTRRCPTSSFLRSPETPPVSPRESLPGAVVGAGATAEPPYTALADWTLRERLLPGLLPAAPRGSLTSQSSGRGSASFLRPPSTAPSAGGSYLSPAPGDTSSWASGPERWPRREHVVTVSKRRNTSVDENYEWDSEFPGDMELLETLHLGLASSRLRPEAEPELGVKTPEEGCLLNTAHVTGPEARCAALREEFLAFRRRRDATRARLPAYRQPVPHPEQATLL

SEQ ID NO: 6846 - protein, 717 aa, Homo Sapiens
MVWCLGLAVLSLVISQGADGRGKPEVVSVVGRAGESVVLGCDLLPPAGRPPLHVIEWLRFGFLLPIFIQFGLYSPRIDPDYVGRVRLQKGASLQIEGLRVEDQGWYECRVFFLDQHIPEDDFANGSWVHLTVNSPPQFQETPPAVLEVQELEPVTLRCVARGSPLPHVTWKLRGKDLGQGQGQVQVQNGTLRIRRVERGSSGVYTCQASSTEGSATHATQLLVLGPPVIVVPPKNSTVNASQDVSLACHAEAYPANLTYSWFQDNINVFHISRLQPRVRILVDGSLRLLATQPDDAGCYTCVPSNGLLHPPSASAYLTVLYPAQVTAMPPETPLPIGMPGVIRCPVRANPPLLFVSWTKDGKALQLDKFPGWSQGTEGSLIIALGNEDALGEYSCTPYNSLGTAGPSPVTRVLLKAPPAFIERPKEEYFQEVGRELLIPCSAQGDPPPAAPPSPLPGPGPLLQYLSLPFFREMNVDGDWPPLEEPSPAAPPDYMDTRRCPTSSFLRSPETPPVSPRESLPGAVVGAGATAEPPYTALADWTLRERLLPGLLPAAPRGSLTSQSSGRGSASFLRPPSTAPSAGGSYLSPAPGDTSSWASGPERWPRREHVVTVSKRRNTSVDENYEWDSEFPGDMELLETLHLGLASSRLRPEAEPELGVKTPEEGCLLNTAHVTGPEARCAALREEFLAFRRRRDATRARLPAYRQPVPHPEQATLL

SEQ ID NO: 6847 - protein, 411 aa, Homo Sapiens
MSPARLRPRLHFCLVLLLLLVVPAAWGCGPGRVVGSRRRPPRKLVPLAYKQFSPNVPEKTLGASGRYEGKIARSSERFKELTPNYNPDIIFKDEENTGADRLMTQRCKDRLNSLAISVMNQWPGVKLRVTEGWDEDGHHSEESLHYEGRAVDITTSDRDRNKYGLLARLAVEAGFDWVYYESKAHVHCSVKSEHSAAAKTGGCFPAGAQVRLESGARVALSAVRPGDRVLAMGEDGSPTFSDVLIFLDREPHRLRAFQVIETQDPPRRLALTPAHLLFTADNHTEPAARFRATFASHVQPGQYVLVAGVPGLQPARVAAVSTHVALGAYAPLTKHGTLVVEDVVASCFAAVADHHLAQLAFWPLRLFHSLAWGSWTPGEGVHWYPQLLYRLGRLLLEEGSFHPLGMSGAGS

SEQ ID NO: 6848 - protein, 178 aa, Homo Sapiens
MHSSALLCCLVLLTGVRASPGQGTQSENSCTHFPGNLPNMLRDLRDAFSRVKTFFQMKDQLDNLLLKESLLEDFKGYLGCQALSEMIQFYLEEVMPQAENQDPDIKAHVNSLGENLKTLRLRLRRCHRFLPCENKSKAVEQVKNAFNKLQEKGIYKAMSEFDIFINYIEAYMTMKIRN

SEQ ID NO: 6849 - protein, 74 aa, Homo Sapiens
MIQFYLEEVMPQAENQDPDIKAHVNSLGENLKTLRLRLRRCHRFLPCENKSKAVEQVKNAFNKLQEKGIYKAMS

SEQ ID NO: 6850 - protein, 199 aa, Homo Sapiens
MNCVCRLVLVVLSLWPDTAVAPGPPPGPPRVSPDPRAELDSTVLLTRSLLADTRQLAAQLRDKFPADGDHNLDSLPTLAMSAGALGALQLPGVLTRLRADLLSYLRHVQWLRRAGGSSLKTLEPELGTLQARLDRLLRRLQLLMSRLALPQPPPDPPAPPLAPPSSAWGGIRAAHAILGGLHLTLDWAVRGLLLLKTRL

SEQ ID NO: 6851 - protein, 199 aa, Homo Sapiens; identical to SEQ ID NO: 6850

SEQ ID NO: 6852 - protein, 40 aa, Homo Sapiens
MSAGALGALQLPGVLTRLRADLLSYLRHVQWLRRAGGSSL

SEQ ID NO: 6853 - protein, 120 aa, Homo Sapiens
MSAGALGALQLPGVLTRLRADLLSYLRHVQWLRRAGGSSLKTLEPELGTLQARLDRLLRRLQLLMSRLALPQPPPDPPAPPLAPPSSAWGGIRAAHAILGGLHLTLDWAVRGLLLLKTRL

SEQ ID NO: 6854 - protein, 152 aa, Homo Sapiens
MSSSCSGLSRVLVAVATALVSASSPCPQAWGPPDPPARPVVSCQAADYENFSCTWSPSQISGLPTRYLTSYRKKTVLGADSQRRSPSTGPWPCPQDPLGAARCVVHGAEFWSQYRINVTEVNPLGASTRLLDVSLQSILRPDPPQGLRVESV

SEQ ID NO: 6855 - protein, 54 aa, Homo Sapiens
MSSSCSGLSRVLVAVATALVSASSPCPQAWGPPGTQCPGFGMGSQSCSRDLTLG

SEQ ID NO: 6856 - protein, 139 aa, Homo Sapiens
MSSSCSGLSRVLVAVATALVSASSPCPQAWGPPGVQYGQPGRSVKLCCPGVTAGDPVSWFRDGEPKLLQGPDSGLGHELVLAQADSTDEGTYICQTLDGALGGTVTLQLGYPPARPVVSCQAADYENFSCTWSPSQISG

SEQ ID NO: 6857 - protein, 167 aa, Homo Sapiens
MSSSCSGLSRVLVAVATALVSASSPCPQAWGPPGVQYGQPGRSVKLCCPGVTAGDPVSWFRDGEPKLLQGPDSGLGHELVLAQADSTDEGTYICQTLDGALGGTVTLQLGYPPARPVVSCQAADYENFSCTWSPSQISGLPTRYLTSYRKKTVLGADSQRRSPSTGP

SEQ ID NO: 6858 - protein, 422 aa, Homo Sapiens
MSSSCSGLSRVLVAVATALVSASSPCPQAWGPPGVQYGQPGRSVKLCCPGVTAGDPVSWFRDGEPKLLQGPDSGLGHELVLAQADSTDEGTYICQTLDGALGGTVTLQLGYPPARPVVSCQAADYENFSCTWSPSQISGLPTRYLTSYRKKTVLGADSQRRSPSTGPWPCPQDPLGAARCVVHGAEFWSQYRINVTEVNPLGASTRLLDVSLQSILRPDPPQGLRVESVPGYPRRLRASWTYPASWPCQPHFLLKFRLQYRPAQHPAWSTVEPAGLEEVITDAVAGLPHAVRVSARDFLDAGTWSTWSPEAWGTPSTGTIPKEIPAWGQLHTQPEVEPQVDSPAPPRPSLQPHPRLLDHRDSVEQVAVLASLGILSFLGLVAGALALGLWLRLRRGGKDGSPKPGFLASVIPVDRRPGAPNL

SEQ ID NO: 6859 - protein, 422 aa, Homo Sapiens; identical to SEQ ID NO: 6858

SEQ ID NO: 6860 - protein, 270 aa, Homo Sapiens
MSSSCSGLSRVLVAVATALVSASSPCPQAWGPPGVQYGQPGRSVKLCCPGVTAGDPVSWFRDGEPKLLQGPDSGLGHELVLAQADSTDEGTYICQTLDGALGGTVTLQLGYPPARPVVSCQAADYENFSCTWSPSQISGLPTRYLTSYRKKTVLGADSQRRSPSTGPWPCPQDPLGAARCVVHGAEFWSQYRINVTEVNPLGASTRLLDVSLQSILRPDPPQGLRVESVPGYPRRLRASWTYPASWPCQPHFLLKFRLQYRPAQHPAWST

SEQ ID NO: 6861 - protein, 390 aa, Homo Sapiens
MSSSCSGLSRVLVAVATALVSASSPCPQAWGPPGVQYGQPGRSVKLCCPGVTAGDPVSWFRDGEPKLLQGPDSGLGHELVLAQADSTDEGTYICQTLDGALGGTVTLQLGYPPARPVVSCQAADYENFSCTWSPSQISGLPTRYLTSYRKKTVLGADSQRRSPSTGPWPCPQDPLGAARCVVHGAEFWSQYRINVTEVNPLGASTRLLDVSLQSILRPDPPQGLRVESVPGYPRRLRASWTYPASWPCQPHFLLKFRLQYRPAQHPAWSTVEPAGLEEVITDAVAGLPHAVRVSARDFLDAGTWSTWSPEAWGTPSTGTIPKEIPAWGQLHTQPEVEPQVDSPAPPRPSLQPHPRLLDHRDSVEQVAVLASLGILSFLGLVAGALALGLW

SEQ ID NO: 6862 - protein, 422 aa, Homo Sapiens; identical to SEQ ID NO: 6858

SEQ ID NO: 6863 - protein, 68 aa, Homo Sapiens
MSSSCSGLSRVLVAVATALVSASSPCPQAWGPPGVQYGQPGRSVKLCCPGVTAGPSSPPCCLLPSSRL

SEQ ID NO: 6864 - protein, 77 aa, Homo Sapiens
  misc_feature (1)..(1): Xaa can be any naturally occurring amino acid
XTPSTGTIPKEIPAWGQLHTQPEVEPQVDSPAPPRPSLQPHPRLLDHRDSVEQVAVLASLGILSFLGLVAGALALGL

SEQ ID NO: 6865 - protein, 328 aa, Homo Sapiens
MCHQQLVISWFSLVFLASPLVAIWELKKDVYVVELDWYPDAPGEMVVLTCDTPEEDGITWTLDQSSEVLGSGKTLTIQVKEFGDAGQYTCHKGGEVLSHSLLLLHKKEDGIWSTDILKDQKEPKNKTFLRCEAKNYSGRFTCWWLTTISTDLTFSVKSSRGSSDPQGVTCGAATLSAERVRGDNKEYEYSVECQEDSACPAAEESLPIEVMVDAVHKLKYENYTSSFFIRDIIKPDPPKNLQLKPLKNSRQVEVSWEYPDTWSTPHSYFSLTFCVQVQGKSKREKKDRVFTDKTSATVICRKNASISVRAQDRYYSSSWSEWASVPCS

SEQ ID NO: 6866 - protein, 51 aa, Homo Sapiens
MEPLVTWVVPLLFLFLLSRQGAACRTSECCFQDPPYPDADSGSASGPRDLR

SEQ ID NO: 6867 - protein, 67 aa, Homo Sapiens
MEPLVTWVVPLLFLFLLSRQGAACRTSECCFQDPPYPDADSGSASGPRDLRCYRISSDRYECSWQYE

SEQ ID NO: 6868 - protein, 381 aa, Homo Sapiens
MEPLVTWVVPLLFLFLLSRQGAACRTSECCFQDPPYPDADSGSASGPRDLRCYRISSDRYECSWQYEGPTAGVSHFLRCCLSSGRCCYFAAGSATRLQFSDQAGVSVLYTVTLWVESWARNQTEKSPEVTLQLYNSVKYEPPLGDIKVSKLAGQLRMEWETPDNQVGAEVQFRHRTPSSPWKLGDCGPQDDDTESCLCPLEMNVAQEFQLRRRQLGSQGSSWSKWSSPVCVPPENPPQPQVRFSVEQLGQDGRRRLTLKEQPTQLELPEGCQGLAPGTEVTYRLQLHMLSCPCKAKATRTLHLGKMPYLSGAAYNVAVISSNQFGPGLNQTWHIPADTHTDGMISAHCNLRLPDSRDSPASASRVAGITGICHHTRLILYF

SEQ ID NO: 6869 - protein, 662 aa, Homo Sapiens
MEPLVTWVVPLLFLFLLSRQGAACRTSECCFQDPPYPDADSGSASGPRDLRCYRISSDRYECSWQYEGPTAGVSHFLRCCLSSGRCCYFAAGSATRLQFSDQAGVSVLYTVTLWVESWARNQTEKSPEVTLQLYNSVKYEPPLGDIKVSKLAGQLRMEWETPDNQVGAEVQFRHRTPSSPWKLGDCGPQDDDTESCLCPLEMNVAQEFQLRRRQLGSQGSSWSKWSSPVCVPPENPPQPQVRFSVEQLGQDGRRRLTLKEQPTQLELPEGCQGLAPGTEVTYRLQLHMLSCPCKAKATRTLHLGKMPYLSGAAYNVAVISSNQFGPGLNQTWHIPADTHTEPVALNISVGTNGTTMYWPARAQSMTYCIEWQPVGQDGGLATCSLTAPQDPDPAGMATYSWSRESGAMGQEKCYYITIFASAHPEKLTLWSTVLSTYHFGGNASAAGTPHHVSVKNHSLDSVSVDWAPSLLSTCPGVLKEYVVRCRDEDSKQVSEHPVQPTETQVTLSGLRAGVAYTVQVRADTAWLRGVWSQPQRFSIEVQVSDWLIFFASLGSFLSILLVGVLGYLGLNRAARHLCPPLPTPCASSAIEFPGGKETWQWINPVDFQEEASLQEALVVEMSWDKGERTEPLEKTELPEGAPELALDTELSLEDGDRCKAKM

SEQ ID NO: 6870 - protein, 662 aa, Homo Sapiens; identical to SEQ ID NO: 6869

SEQ ID NO: 6871 - protein, 118 aa, Homo Sapiens
MEPLVTWVVPLLFLFLLSRQGAACRTSECCFQDPPYPDADSGSLPGSASGPRDLRCYRISSDRYECSWQYEGPTAGVSHFLRCCLSSGRCCYFAAGSATRLQFSDQAGVSVLYTVTLW

SEQ ID NO: 6872 - protein, 862 aa, Homo Sapiens
MAHTFRGCSLAFMFIITWLLIKAKIDACKRGDVTVKPSHVILLGSTVNITCSLKPRQGCFHYSRRNKLILYKFDRRINFHHGHSLNSQVTGLPLGTTLFVCKLACINSDEIQICGAEIFVGVAPEQPQNLSCIQKGEQGTVACTWERGRDTHLYTEYTLQLSGPKNLTWQKQCKDIYCDYLDFGINLTPESPESNFTAKVTAVNSLGSSSSLPSTFTFLDIVRPLPPWDIRIKFQKASVSRCTLYWRDEGLVLLNRLRYRPSNSRLWNMVNVTKAKGRHDLLDLKPFTEYEFQISSKLHLYKGSWSDWSESLRAQTPEEEPTGMLDVWYMKRHIDYSRQQISLFWKNLSVSEARGKILHYQVTLQELTGGKAMTQNITGHTSWTTVIPRTGNWAVAVSAANSKGSSLPTRINIMNLCEAGLLAPRQVSANSEGMDNILVTWQPPRKDPSAVQEYVVEWRELHPGGDTQVPLNWLRSRPYNVSALISENIKSYICYEIRVYALSGDQGGCSSILGNSKHKAPLSGPHINAITEEKGSILISWNSIPVQEQMGCLLHYRIYWKERDSNSQPQLCEIPYRVSQNSHPINSLQPRVTYVLWMTALTAAGESSHGNEREFCLQGKANWMAFVAPSICIAIIMVGIFSTHYFQQKVFVLLAALRPQWCSREIPDPANSTCAKKYPIAEEKTQLPLDRLLIDWPTPEDPEPLVISEVLHQVTPVFRHPPCSNWPQREKGIQGHQASEKDMMHSASSPPPPRALQAESRQLVDLYKVLESRGSDPKPENPACPWTVLPAGDLPTHDGYLPSNIDDLPSHEAPLADSLEELEPQHISLSVFPSSSLHPLTFSCGDKLTLDQLKMRCDSLML

SEQ ID NO: 6873 - protein, 659 aa, Homo Sapiens
MAHTFRGCSLAFMFIITWLLIKAKIDACKRGDVTVKPSHVILLGSTVNITCSLKPRQGCFHYSRRNKLILYKFDRRINFHHGHSLNSQVTGLPLGTTLFVCKLACINSDEIQICGAEIFVGVAPEQPQNLSCIQKGEQGTVACTWERGRDTHLYTEYTLQLSGPKNLTWQKQCKDIYCDYLDFGINLTPESPESNFTAKVTAVNSLGSSSSLPSTFTFLDIVRPLPPWDIRIKFQKASVSRCTLYWRDEGLVLLNRLRYRPSNSRLWNMVNVTKAKGRHDLLDLKPFTEYEFQISSKLHLYKGSWSDWSESLRAQTPEEEPTGMLDVWYMKRHIDYSRQQISLFWKNLSVSEARGKILHYQVTLQELTGGKAMTQNITGHTSWTTVIPRTGNWAVAVSAANSKGSSLPTRINIMNLCEAGLLAPRQVSANSEGMDNILVTWQPPRKDPSAVQEYVVEWRELHPGGDTQVPLNWLRSRPYNVSALISENIKSYICYEIRVYALSGDQGGCSSILGNSKHKAPLSGPHINAITEEKGSILISWNSIPVQEQMGCLLHYRIYWKERDSNSQPQLCEIPYRVSQNSHPINSLQPRVTYVLWMTALTAAGESSHGNEREFCLQGKANWMAFVAPSICIAIIMVGIFSTHYFQQKRRHSCPWTGS

SEQ ID NO: 6874 - protein, 635 aa, Homo Sapiens
MAHTFRGCSLAFMFIITWLLIKAKIDACKRGDVTVKPSHVILLGSTVNITCSLKPRQGCFHYSRRNKLILYKFDRRINFHHGHSLNSQVTGLPLGTTLFVCKLACINSDEIQICGAEIFVGVAPEQPQNLSCIQKGEQGTVACTWERGRDTHLYTEYTLQLSGPKNLTWQKQCKDIYCDYLDFGINLTPESPESNFTAKVTAVNSLGSSSSLPSTFTFLDIVRPLPPWDIRIKFQKASVSRCTLYWRDEGLVLLNRLRYRPSNSRLWNMVNVTKAKGRHDLLDLKPFTEYEFQISSKLHLYKGSWSDWSESLRAQTPEEEPTGMLDVWYMKRHIDYSRQQISLFWKNLSVSEARGKILHYQVTLQELTGGKAMTQNITGHTSWTTVIPRTGNWAVAVSAANSKGSSLPTRINIMNLCEAGLLAPRQVSANSEGMDNILVTWQPPRKDPSAVQEYVVEWRELHPGGDTQVPLNWLRSRPYNVSALISENIKSYICYEIRVYALSGDQGGCSSILGNSKHKAPLSGPHINAITEEKGSILISWNSIPVQEQMGCLLHYRIYWKERDSNSQPQLCEIPYRVSQNSHPINSLQPRVTYVLWMTALTAAGESSHGNEREFCLQGEDTAALGQAPDRLAHA

SEQ ID NO: 6875 - protein, 776 aa, Homo Sapiens
MAHTFRGCSLAFMFIITWLLIKAKIDACKRGDVTVKPSHVILLGSTVNITCSLKPRQGCFHYSRRNKLILYKFDRRINFHHGHSLNSQVTGLPLGTTLFVCKLACINSDEIQICGAEIFVGVAPEQPQNLSCIQKGEQGTVACTWERGRDTHLYTEYTLQLSGPKNLTWQKQCKDIYCDYLDFGINLTPESPESNFTAKVTAVNSLGSSSSLPSTFTFLDIVRPLPPWDIRIKFQKASVSRCTLYWRDEGLVLLNRLRYRPSNSRLWNMVNVTKAKGRHDLLDLKPFTEYEFQISSKLHLYKGSWSDWSESLRAQTPEEEPTGMLDVWYMKRHIDYSRQQISLFWKNLSVSEARGKILHYQVTLQELTGGKAMTQNITGHTSWTTVIPRTGNWAVAVSAANSKGSSLPTRINIMNLCEAGLLAPRQVSANSEGMDNILVTWQPPRKDPSAVQEYVVEWRELHPGGDTQVPLNWLRSRPYNVSALISEIPYRVSQNSHPINSLQPRVTYVLWMTALTAAGESSHGNEREFCLQGKANWMAFVAPSICIAIIMVGIFSTHYFQQKVFVLLAALRPQWCSREIPDPANSTCAKKYPIAEEKTQLPLDRLLIDWPTPEDPEPLVISEVLHQVTPVFRHPPCSNWPQREKGIQGHQASEKDMMHSASSPPPPRALQAESRQLVDLYKVLESRGSDPKPENPACPWTVLPAGDLPTHDGYLPSNIDDLPSHEAPLADSLEELEPQHISLSVFPSSSLHPLTFSCGDKLTLDQLKMRCDSLML

SEQ ID NO: 6876 - protein, 230 aa, Homo Sapiens
  misc_feature (1)..(1): Xaa can be any naturally occurring amino acid
XQKGEQGTVACTWERGRDTHLYTEYTLQLSGPKNLTWQKQCKDIYCDYLDFGINLTPESPESNFTAKVTAVNSLGSSSSLPSTFTFLDIVRPLPPWDIRIKFQKASVSRCTLYWRDEGLVLLNRLRYRPSNSRLWNMVNVTKAKGRHDLLDLKPFTEYEFQISSKLHLYKGSWSDWSESLRAQTPEEEPTGMLDVWYMKRHIDYSRQQISLFWKVSFKRQLKTQGNKTEG

SEQ ID NO: 6877 - protein, 144 aa, Homo Sapiens
MALLLTTVIALTCLGGFASPGPVPPSTALRELIEELVNITQNQKAPLCNGSMVWSINLTAGMYCAALESLINVSGCSAIEKTQRMLSGFCPHKVSAGQFSSLHVRDTKIEVAQFVKDLLLHLKKLFREGQFNNFESIIICRDRT

SEQ ID NO: 6878 - protein, 146 aa, Homo Sapiens
MHPLLNPLLLALGLMALLLTTVIALTCLGGFASPGPVPPSTALRELIEELVNITQNQKAPLCNGSMVWSINLTAGMYCAALESLINVSGCSAIEKTQRMLSGFCPHKVSAGQFSSLHVRDTKIEVAQFVKDLLLHLKKLFREGQFN

SEQ ID NO: 6879 - protein, 279 aa, Homo Sapiens
MEWPARLCGLWALLLCAGGGGGGGGAAPTETQPPVTNLSVSVENLCTVIWTWNPPEGASSNCSLWYFSHFGDKQDKKIAPETRRSIEVPLNERICLQVGSQCSTNESEKPSILVEKCISPPEGDPESAVTELQCIWHNLSYMKCSWLPGRNTSPDTNYTLYYWHRSLEKIHQCENIFREGQYFGCSFDLTKVKDSSFEQHSVQIMVKDNAGKIKPSFNIVPLTSRVKPDPPHIKNLSFHNDDLYVQWENPQNFISRCLFYEVEVNNSQTETHNVFYVRF

SEQ ID NO: 6880 - protein, 427 aa, Homo Sapiens
MEWPARLCGLWALLLCAGGGGGGGGAAPTETQPPVTNLSVSVENLCTVIWTWNPPEGASSNCSLWYFSHFGDKQDKKIAPETRRSIEVPLNERICLQVGSQCSTNESEKPSILVEKCISPPEGDPESAVTELQCIWHNLSYMKCSWLPGRNTSPDTNYTLYYWHRSLEKIHQCENIFREGQYFGCSFDLTKVKDSSFEQHSVQIMVKDNAGKIKPSFNIVPLTSRVKPDPPHIKNLSFHNDDLYVQWENPQNFISRCLFYEVEVNNSQTETHNVFYVQEAKCENPEFERNVENTSCFMVPGVLPDTLNTVRIRVKTNKLCYEDDKLWSNWSQEMSIGKKRNSTLYITMLLIVPVIVAGAIIVLLLYLKRLKIIIFPPIPDPGKIFKEMFGDQNDDTLHWKKYDIYEKQTKEETDSVVLIENLKKASQ

SEQ ID NO: 6881 - protein, 308 aa, Homo Sapiens
MAPRRARGCRTLGLPALLLLLLLRPPATRDARDRLAVLAGRSRISESFNHEVQTHEACVRLRTMENCPQCHHHRTSRQQAGITCPPPMSVEHADIWVKSYSLYSRERYICNSGFKRKAGTSSLTECVLNKATNVAHWTTPSLKCIRDPALVHQRPAPPSTVTTAGVTPQPESLSPSGKEPAASSPSSNNTAATTAAIVPGSQLMPSKSPSTGTTEISSHESSHGTPSQTTAKNWELTASASHQPPGVYPQGHSDTTVAISTSTVLLCGLSAVSLLACYLKSSLDAFIKIRGGFSTWLLGLPHSTVGSG

SEQ ID NO: 6882 - protein, 346 aa, Homo Sapiens
MAPRRARGCRTLGLPALLLLLLLRPPATRDARDRLAVLAGRSRISESFNHEVQTHEACVRLRTMENCPQCHHHRTSRQQAGITCPPPMSVEHADIWVKSYSLYSRERYICNSGFKRKAGTSSLTECVLNKATNVAHWTTPSLKCIRDPALVHQRPAPPSTVTTAGVTPQPESLSPSGKEPAASSPSSNNTAATTAAIVPGSQLMPSKSPSTGTTEISSHESSHGTPSQTTAKNWELTASASHQPPGVYPQGHSDTTVAISTSTVLLCGLSAVSLLACYLKSSSHSRELTLLTLKWPKELLLLRRDISPALVEGAGQMPRASAPRQLQTGQPRMTSVLPRLCLSFGS

SEQ ID NO: 6883 - protein, 305 aa, Homo Sapiens
MAPRRARGCRTLGLPALLLLLLLRPPATRDARDRLAVLAGRSRISESFNHEVQTHEACVRLRTMENCPQCHHHRTSRQQAGITCPPPMSVEHADIWVKSYSLYSRERYICNSGFKRKAGTSSLTECVLNKATNVAHWTTPSLKCIRDPALVHQRPAPPSTVTTAGVTPQPESLSPSGKEPAASSPSSNNTAATTAAIVPGSQLMPSKSPSTGTTEISSHESSHGTPSQTTAKNWELTASASHQPPGVYPQGHSDTTGRKQHLLPDFQASFQRDCINKHIEDKECWTVASFLLFCTMFVSTCWYTL

SEQ ID NO: 6884 - protein, 331 aa, Homo Sapiens
MAPRRARGCRTLGLPALLLLLLLRPPATRDARDRLAVLAGRSRISESFNHEVQTHEACVRLRTMENCPQCHHHRTSRQQAGITCPPPMSVEHADIWVKSYSLYSRERYICNSGFKRKAGTSSLTECVLNKATNVAHWTTPSLKCIRDPALVHQRPAPPSTVTTAGVTPQPESLSPSGKEPAASSPSSNNTAATTAAIVPGSQLMPSKSPSTGTTEISSHESSHGTPSQTTAKNWELTASASHQPPGVYPQGHSDTTVAISTSTVLLCGLSAVSLLACYLKSRWLAKRSLPGDAEAPNMSRGGRNAWEQLSRAPATSLLRTPVESALSASRP

SEQ ID NO: 6885 - protein, 154 aa, Homo Sapiens
MAPRRARGCRTLGLPALLLLLLLRPPATREPAASSPSSNNTAATTAAIVPGSQLMPSKSPSTGTTEISSHESSHGTPSQTTAKNWELTASASHQPPGVYPQGHSDTTVAISTSTVLLCGLSAVSLLACYLKSRASVCSCHPRSAGHTCSVGSVC

SEQ ID NO: 6886 - protein, 169 aa, Homo Sapiens
MAPRRARGCRTLGLPALLLLLLLRPPATREPAASSPSSNNTAATTAAIVPGSQLMPSKSPSTGTTEISSHESSHGTPSQTTAKNWELTASASHQPPGVYPQGHSDTTVAISTSTVLLCGLSAVSLLACYLKSRQTPPLASVEMEAMEALPVTWGTSSRDEDLENCSHHL

SEQ ID NO: 6887 - protein, 172 aa, Homo Sapiens
MAPRRARGCRTLGLPALLLLLLLRPPATRGITCPPPMSVEHADIWVKSYSLYSRERYICNSGFKRKAGTSSLTECVLNKATNVAHWTTPSLKCIKPAASSPSSNNTAATTAAIVPGSQLMPSKSPSTGTTEISSHESSHGTPSQTTAKNWELTASASHQPPGVYPQGHSDTT

SEQ ID NO: 6888 - protein, 219 aa, Homo Sapiens
MAPRRARGCRTLGLPALLLLLLLRPPATRGITCPPPMSVEHADIWVKSYSLYSRERYICNSGFKRKAGTSSLTECVLNKATNVAHWTTPSLKCIKPAASSPSSNNTAATTAAIVPGSQLMPSKSPSTGTTEISSHESSHGTPSQTTAKNWELTASASHQPPGVYPQGHSDTTVAISTSTVLLCGLSAVSLLACYLKSRASVCSCHPRSAGHTCSVGSVC

SEQ ID NO: 6889 - protein, 234 aa, Homo Sapiens
MAPRRARGCRTLGLPALLLLLLLRPPATRGITCPPPMSVEHADIWVKSYSLYSRERYICNSGFKRKAGTSSLTECVLNKATNVAHWTTPSLKCIKPAASSPSSNNTAATTAAIVPGSQLMPSKSPSTGTTEISSHESSHGTPSQTTAKNWELTASASHQPPGVYPQGHSDTTVAISTSTVLLCGLSAVSLLACYLKSRQTPPLASVEMEAMEALPVTWGTSSRDEDLENCSHHL

SEQ ID NO: 6890 - protein, 252 aa, Homo Sapiens
MAPRRARGCRTLGLPALLLLLLLRPPATRGITCPPPMSVEHADIWVKSYSLYSRERYICNSGFKRKAGTSSLTECVLNKATNVAHWTTPSLKCIRDPALVHQRPAPPSTVTTAGVTPQPESLSPSGKEPAASSPSSNNTAATTAAIVPGSQLMPSKSPSTGTTEISSHESSHGTPSQTTAKNWELTASASHQPPGVYPQGHSDTTVAISTSTVLLCGLSAVSLLACYLKSRASVCSCHPRSAGHTCSVGSVC

SEQ ID NO: 6891 - protein, 267 aa, Homo Sapiens
MAPRRARGCRTLGLPALLLLLLLRPPATRGITCPPPMSVEHADIWVKSYSLYSRERYICNSGFKRKAGTSSLTECVLNKATNVAHWTTPSLKCIRDPALVHQRPAPPSTVTTAGVTPQPESLSPSGKEPAASSPSSNNTAATTAAIVPGSQLMPSKSPSTGTTEISSHESSHGTPSQTTAKNWELTASASHQPPGVYPQGHSDTTVAISTSTVLLCGLSAVSLLACYLKSRQTPPLASVEMEAMEALPVTWGTSSRDEDLENCSHHL

SEQ ID NO: 6892 - protein, 353 aa, Homo Sapiens
MRLAGRQVPEQRSPPPPGLGSARPGSPAVSCGAAAMAPRRARGCRTLGLPALLLLLLLRPPATRDARDRLAVLAGRSRISESFNHEVQTHEACVRLRTMENCPQCHHHRTSRQQAGITCPPPMSVEHADIWVKSYSLYSRERYICNSGFKRKAGTSSLTECVLNKATNVAHWTTPSLKCIRDPALVHQRPAPPSTVTTAGVTPQPESLSPSGKEPAASSPSSNNTAATTAAIVPGSQLMPSKSPSTGTTEISSHESSHGTPSQTTAKNWELTASASHQPPGVYPQGHSDTTVAISTSTVLLCGLSAVSLLACYLKSRQTPPLASVEMEAMEALPVTWGTSSRDEDLENCSHHL

SEQ ID NO: 6893 - protein, 172 aa, Homo Sapiens
MSVEHADIWVKSYSLYSRERYICNSGFKRKAGTSSLTECVLNKATNVAHWTTPSLKCIKPAASSPSSNNTAATTAAIVPGSQLMPSKSPSTGTTEISSHESSHGTPSQTTAKNWELTASASHQPPGVYPQGHSDTTVAISTSTVLLCGLSAVSLLACYLKSRQTPPLASVEM

SEQ ID NO: 6894 - protein, 148 aa, Homo Sapiens
MSVEHADIWVKSYSLYSRERYICNSGFKRKAGTSSLTECVLNKATNVAHWTTPSLKCINPALVHQRPAPPSTVTTAGVTPQPESLSPSGKEPAASSPSSNNTAATTAAIVPGSQLMPSKSPSTGTTEISSHESSHGTPSQTTAKNWEL

SEQ ID NO: 6895 - protein, 231 aa, Homo Sapiens
MSVEHADIWVKSYSLYSRERYICNSGFKRKAGTSSLTECVLNKATNVAHWTTPSLKCIRDPALVHQRPAPPSTVTTAGVTPQPESLSPSGKEPAASSPSSNNTAATTAAIVPGSQLMPSKSPSTGTTEISSHESSHGTPSQTTAKNWELTASASHQPPGVYPQGHSDTTVAISTSTVLLCGLSAVSLLACYLKSRQTPPLASVEMEAMEALPVTWGTSSRDEDLENCSHHL

SEQ ID NO: 6896 - protein, 209 aa, Homo Sapiens
  misc_feature (1)..(1): Xaa can be any naturally occurring amino acid
XITCPPPMSVEHADIWVKSYSLYSRERYICNSGFKRKAGTSSLTECVLNKATNVAHWTTPSLKCIRTTEISSHESSHGTPSQTTAKNWELTASASHQPPGVYPQGHSDTTGRKQHLLPDFQASFQRDCINKHIEDKECWTVASFLLFLAISTSTVLLCGLSAVSLLACYLKSRQTPPLASVEMEAMEALPVTWGTSSRDEDLENCSHHL

SEQ ID NO: 6897 - protein, 155 aa, Homo Sapiens
  misc_feature (1)..(1): Xaa can be any naturally occurring amino acid
XLVHQRPAPPSTVTTAGVTPQPESLSPSGKEPAASSPSSNNTAATTAAIVPGSQLMPSKSPSTGTTEISSHESSHGTPSQTTAKNWELTASASHQPPGVYPQGHSDTTVAISTSTVLLCGLSAVSLLACYLKSRASVCSCHPRSAGHTCSVGSVC

SEQ ID NO: 6898 - protein, 198 aa, Homo Sapiens
  misc_feature (1)..(1): Xaa can be any naturally occurring amino acid
XPAASSPSSNNTAATTAAIVPGSQLMPSKSPSTGTTEISSHESSHGTPSQTTAKNWELTASASHQPPGVYPQGHSDTTVAISTSTVLLCGLSAVSLLACYLKSSSQRKVTYLRLSVNYKAPPGVGDVYREDTSVWAPPNDPVSSCAARTDREPEKVEEMLSPVNPLHRRIQEEENSSQRHFTYICIYTSLSVISTHYI

SEQ ID NO: 6899 - protein, 155 aa, Homo Sapiens
MTPGKTSLVSLLLLLSLEAIVKAGITIPRNPGCPNSEDKNFPRTVMVNLNIHNRNTNTNPKRSSDYYNRSTSPWNLHRNEDPERYPSVIWEAKCRHLGCINADGNVDYHMNSVPIQQEILVLRREPPHCPNSFRLEKILVSVGCTCVTPIVHHVA

SEQ ID NO: 6900 - protein, 180 aa, Homo Sapiens
MDWPHNLLFLLTISIFLGLGQPRSPKSKRKGQGRPGPLAPGPHQVPLDLVSRMKPYARMEEYERNIEEMVAQLRNSSELAQRKCEVNLQLWMSNKRSLSPWGYSINHDPSRIPVDLPEARCLCLGCVNPFTMQEDRSMVSVPVFSQVPVRRRLCPPPPRTGPCRQRAVMETIAVGCTCIF

SEQ ID NO: 6901 - protein, 197 aa, Homo Sapiens
MTLLPGLLFLTWLHTCLAHHDPSLRGHPHSHGTPHCYSAEELPLGQAPPHLLARGAKWGQALPVALVSSLEAASHRGRHERPSATTQCPVLRPEEVLEADTHQRSISPWRYRVDTDEDRYPQKLAFAECLCRGCIDARTGRETAALNSVRLLQSLLVLRRRPCSRDGSGLPTPGAFAFHTEFIHVPVGCTCVLPRSV

SEQ ID NO: 6902 - protein, 35 aa, Homo Sapiens
MLGALVWMLVAGFLLALPPSWAAGAPRAGRRPARP

SEQ ID NO: 6903 - protein, 202 aa, Homo Sapiens
MLVAGFLLALPPSWAAGAPRAGRRPARPRGCADRPEELLEQLYGRLAAGVLSAFHHTLQLGPREQARNASCPAGGRPADRRFRPPTNLRSVSPWAYRISYDPARYPRYLPEAYCLCRGCLTGLFGEEDVRFRSAPVYMPTVVLRRTPACAGGRSVYTEAYVTIPVGCTCVPEPEKDADSINSSIDKQGAKLLLGPNDAPAGP

SEQ ID NO: 6904 - protein, 90 aa, Homo Sapiens
  misc_feature (1)..(1): Xaa can be any naturally occurring amino acid
XRPRGCADRPEELLEQLYGRLAAGVLSAFHHTLQLGPREQARNASCPAGGRPADRRFRPPTNLRSVSPWAYSSVSITSNHPWRTRPLFLD

SEQ ID NO: 6905 - protein, 163 aa, Homo Sapiens
MTVKTLHGPAMVKYLLLSILGLAFLSEAAARKIPKVGHTFFQKPESCPPVPGGSMKLDIGIINENQRVSMSRNIESRSTSPWNYTVTWDPNRYPSEVVQAQCRNLGCINAQGKEDISMNSVPIQQETLVVRRKHQGCSVSFQLEKVLVTVGCTCVTPVIHHVQ

SEQ ID NO: 6906 - protein, 866 aa, Homo Sapiens
MGAARSPPSAVPGPLLGLLLLLLGVLAPGGASLRLLDHRALVCSQPGLNCTVKNSTCLDDSWIHPRNLTPSSPKDLQIQLHFAHTQQGDLFPVAHIEWTLQTDASILYLEGAELSVLQLNTNERLCVRFEFLSKLRHHHRRWRFTFSHFVVDPDQEYEVTVHHLPKPIPDGDPNHQSKNFLVPDCEHARMKVTTPCMSSGSLWDPNITVETLEAHQLRVSFTLWNESTHYQILLTSFPHMENHSCFEHMHHIPAPRPEEFHQRSNVTLTLRNLKGCCRHQVQIQPFFSSCLNDCLRHSATVSCPEMPDTPEPIPDYMPLWVYWFITGISILLVGSVILLIVCMTWRLAGPGSEKYSDDTKYTDGLPAADLIPPPLKPRKVWIIYSADHPLYVDVVLKFAQFLLTACGTEVALDLLEEQAISEAGVMTWVGRQKQEMVESNSKIIVLCSRGTRAKWQALLGRGAPVRLRCDHGKPVGDLFTAAMNMILPDFKRPACFGTYVVCYFSEVSCDGDVPDLFGAAPRYPLMDRFEEVYFRIQDLEMFQPGRMHRVGELSGDNYLRSPGGRQLRAALDRFRDWQVRCPDWFECENLYSADDQDAPSLDEEVFEEPLLPPGTGIVKRAPLVREPGSQACLAIDPLVGEEGGAAVAKLEPHLQPRGQPAPQPLHTLVLAAEEGALVAAVEPGPLADGAAVRLALAGEGEACPLLGSPGAGRNSVLFLPVDPEDSPLGSSTPMASPDLLPEDVREHLEGLMLSLFEQSLSCQAQGGCSRPAMVLTDPHTPYEEEQRQSVQSDQGYISRSSPQPPEGLTEMEEEEEEEQDPGKPALPLSPEDLESLRSLQRQLLFRQLQKNSGWDTMGSESEGPSA

SEQ ID NO: 6907 - protein, 832 aa, Homo Sapiens
MGAARSPPSAVPGPLLGLLLLLLGVLAPGGASLRLLDHRALVCSQPGLNCTVKNSTCLDDSWIHPRNLTPSSPKDLQIQLHFAHTQQGDLFPVAHIEWTLQTDASILYLEGAELSVLQLNTNERLCVRFEFLSKLRHHHRRWRFTFSHFVVDPDQEYEVTVHHLPKPIPDGDPNHQSKNFLVPDCEHARMKVTTPCMSSGSLWDPNITVETLEAHQLRVSFTLWNESTHYQILLTSFPHMENHSCFEHMHHIPAPRPEEFHQRSNVTLTLRNLKGCCRHQVQIQPFFSSCLNDCLRHSATVSCPEMPDTPEPIPGPGSEKYSDDTKYTDGLPAADLIPPPLKPRKVWIIYSADHPLYVDVVLKFAQFLLTACGTEVALDLLEEQAISEAGVMTWVGRQKQEMVESNSKIIVLCSRGTRAKWQALLGRGAPVRLRCDHGKPVGDLFTAAMNMILPDFKRPACFGTYVVCYFSEVSCDGDVPDLFGAAPRYPLMDRFEEVYFRIQDLEMFQPGRMHRVGELSGDNYLRSPGGRQLRAALDRFRDWQVRCPDWFECENLYSADDQDAPSLDEEVFEEPLLPPGTGIVKRAPLVREPGSQACLAIDPLVGEEGGAAVAKLEPHLQPRGQPAPQPLHTLVLAAEEGALVAAVEPGPLADGAAVRLALAGEGEACPLLGSPGAGRNSVLFLPVDPEDSPLGSSTPMASPDLLPEDVREHLEGLMLSLFEQSLSCQAQGGCSRPAMVLTDPHTPYEEEQRQSVQSDQGYISRSSPQPPEGLTEMEEEEEEEQDPGKPALPLSPEDLESLRSLQRQLLFRQLQKNSGWDTMGSESEGPSA

SEQ ID NO: 6908 - protein, 330 aa, Homo Sapiens
MPVPWFLLSLALGRSPVVLSLERLVGPQDATHCSPGLSCRLWDSDILCLPGDIVPAPGPVLAPTHLQTELVLRCQKETDCDLCLRVAVHLAVHASLQAQVVLSFQAYPTARCVLLEVQVPAALVQFGQSVGSVVYDCFEAALGSEVRIWSYTQPRYEKELNHTQQLPALPWLNVSADGDNVHLVLNVSEEQHFGLSLYWNQVQGPPKPRWHKNLTGPQIITLNHTDLVPCLCIQVWPLEPDSVRTNICPFREDPRAHQNLWQAARLQLLTLQSWLLDAPCSLPAEAALCWRAPGGDPCQPLVPPLSWENVTVDKVLEFPLLKGHPNLCVQ

SEQ ID NO: 6909 - protein, 242 aa, Homo Sapiens
MPVPWFLLSLALGRSPVVLSLERLVGPQDATHCSPGLSCRLWDSDILCLPGDIVPAPGPVLAPTHLQTELVLRCQKETDCDLCLRVAVHLAVHASLQAQVVLSFQAYPTARCVLLEVQVPAALVQFGQSVGSVVYDCFEAALGSEVRIWSYTQPRYEKELNHTQQLPALPWLNVSADGDNVHLVLNVSEEQHFGLSLYWNQVQGPPKPRWHKNLVRPPPSQVHSHCRPMPVQRTQCHIREDP

SEQ ID NO: 6910 - protein, 416 aa, Homo Sapiens
MPVPWFLLSLALGRSPVVLSLERLVGPQDATHCSPGLSCRLWDSDILCLPGDIVPAPGPVLAPTHLQTELVLRCQKETDCDLCLRVAVHLAVHASLQAQVVLSFQAYPTARCVLLEVQVPAALVQFGQSVGSVVYDCFEAALGSEVRIWSYTQPRYEKELNHTQQLPDCRGLEVWNSIPSCWALPWLNVSADGDNVHLVLNVSEEQHFGLSLYWNQVQGPPKPRWHKNLTGPQIITLNHTDLVPCLCIQVWPLEPDSVRTNICPFREDPRAHQNLWQAARLQLLTLQSWLLDAPCSLPAEAALCWRAPGGDPCQPLVPPLSWENVTVDKVLEFPLLKGHPNLCVQVNSSEKLQLQECLWADSLGPLKDDVLLLETRGPQDNRSLCALEPSGCTSLPSKASTRAARLGEYLLQDLQS

SEQ ID NO: 6911 - protein, 99 aa, Homo Sapiens
MPVPWFLLSLALGRSPVVLSLERLVGPQDATHCSPGLSCRLWDSDILCLPGDIVPAPGPVLAPTHLQTELVLRCQKETDCDLCLRVAVHLAVHGEQVIL

SEQ ID NO: 6912 - protein, 156 aa, Homo Sapiens
MPVPWFLLSLALGRSPVVLSLERLVGPQDATHCSPGLSCRLWDSDILCLPGDIVPAPGPVLAPTHLQTELVLRCQKETDCDLCLRVAVHLAVHGHWEEPEDEEKFGGAADSGVEEPRNASLQAQVVLSFQAYPTARCVLLEVQVPAALVQFGLCGI

SEQ ID NO: 6913 - protein, 705 aa, Homo Sapiens
MPVPWFLLSLALGRSPVVLSLERLVGPQDATHCSPGLSCRLWDSDILCLPGDIVPAPGPVLAPTHLQTELVLRCQKETDCDLCLRVAVHLAVHGHWEEPEDEEKFGGAADSGVEEPRNASLQAQVVLSFQAYPTARCVLLEVQVPAALVQFGQSVGSVVYDCFEAALGSEVRIWSYTQPRYEKELNHTQQLPALPWLNVSADGDNVHLVLNVSEEQHFGLSLYWNQVQGPPKPRWHKNLTGPQIITLNHTDLVPCLCIQVWPLEPDSVRTNICPFREDPRAHQNLWQAARLQLLTLQSWLLDAPCSLPAEAALCWRAPGGDPCQPLVPPLSWENVTVDKVLEFPLLKGHPNLCVQVNSSEKLQLQECLWADSLGPLKDDVLLLETRGPQDNRSLCALEPSGCTSLPSKASTRAARLGEYLLQDLQSGQCLQLWDDDLGALWACPMDKYIHKRWALVWLACLLFAAALSLILLLKKDHAKGWLRLLKQDVRSGAAARGRAALLLYSADDSGFERLVGALASALCQLPLRVAVDLWSRRELSAQGPVAWFHAQRRQTLQEGGVVVLLFSPGAVALCSEWLQDGVSGPGAHGPHDAFRASLSCVLPDFLQGRAPGSYVGACFDRLLHPDAVPALFRTVPVFTLPSQLPDFLGALQQPRAPRSGRLQERAEQVSRALQPALDSYFHPPGTPAPGRGVGPGAGPGAGDGT

SEQ ID NO: 6914 - protein, 688 aa, Homo Sapiens
MPVPWFLLSLALGRSPVVLSLERLVGPQDATHCSPGLSCRLWDSDILCLPGDIVPAPGPVLAPTHLQTELVLRCQKETDCDLCLRVAVHLAVHGHWEEPEDEEKFGGAADSGVEEPRNASLQAQVVLSFQAYPTARCVLLEVQVPAALVQFGQSVGSVVYDCFEAALGSEVRIWSYTQPRYEKELNHTQQLPALPWLNVSADGDNVHLVLNVSEEQHFGLSLYWNQVQGPPKPRWHKNLTGPQIITLNHTDLVPCLCIQVWPLEPDSVRTNICPFREDPRAHQNLWQAARLQLLTLQSWLLDAPCSLPAEAALCWRAPGGDPCQPLVPPLSWENVTVDVNSSEKLQLQECLWADSLGPLKDDVLLLETRGPQDNRSLCALEPSGCTSLPSKASTRAARLGEYLLQDLQSGQCLQLWDDDLGALWACPMDKYIHKRWALVWLACLLFAAALSLILLLKKDHAKGWLRLLKQDVRSGAAARGRAALLLYSADDSGFERLVGALASALCQLPLRVAVDLWSRRELSAQGPVAWFHAQRRQTLQEGGVVVLLFSPGAVALCSEWLQDGVSGPGAHGPHDAFRASLSCVLPDFLQGRAPGSYVGACFDRLLHPDAVPALFRTVPVFTLPSQLPDFLGALQQPRAPRSGRLQERAEQVSRALQPALDSYFHPPGTPAPGRGVGPGAGPGAGDGT

SEQ ID NO: 6915 - protein, 690 aa, Homo Sapiens
MPVPWFLLSLALGRSPVVLSLERLVGPQDATHCSPGLSCRLWDSDILCLPGDIVPAPGPVLAPTHLQTELVLRCQKETDCDLCLRVAVHLAVHGHWEEPEDEEKFGGAADSGVEEPRNASLQAQVVLSFQAYPTARCVLLEVQVPAALVQFGQSVGSVVYDCFEAALGSEVRIWSYTQPRYEKELNHTQQLPDCRGLEVWNSIPSCWALPWLNVSADGDNVHLVLNVSEEQHFGLSLYWNQVQGPPKPRWHKNLTGPQIITLNHTDLVPCLCIQVWPLEPDSVRTNICPFREDPRAHQNLWQAARLQLLTLQSWLLDAPCSLPAEAALCWRAPGGDPCQPLVPPLSWENVTVDVNSSEKLQLQECLWADSLGPLKDDVLLLETRGPQDNRSLCALEPSGCTSLPSKASTRAARLGEYLLQDLQSGQCLQLWDDDLGALWACPMDKYIHKRWALVWLACLLFAAALSLILLLKKDHAKAAARGRAALLLYSADDSGFERLVGALASALCQLPLRVAVDLWSRRELSAQGPVAWFHAQRRQTLQEGGVVVLLFSPGAVALCSEWLQDGVSGPGAHGPHDAFRASLSCVLPDFLQGRAPGSYVGACFDRLLHPDAVPALFRTVPVFTLPSQLPDFLGALQQPRAPRSGRLQERAEQVSRALQPALDSYFHPPGTPAPGRGVGPGAGPGAGDGT

SEQ ID NO: 6916 - protein, 720 aa, Homo Sapiens
MPVPWFLLSLALGRSPVVLSLERLVGPQDATHCSPGLSCRLWDSDILCLPGDIVPAPGPVLAPTHLQTELVLRCQKETDCDLCLRVAVHLAVHGHWEEPEDEEKFGGAADSGVEEPRNASLQAQVVLSFQAYPTARCVLLEVQVPAALVQFGQSVGSVVYDCFEAALGSEVRIWSYTQPRYEKELNHTQQLPDCRGLEVWNSIPSCWALPWLNVSADGDNVHLVLNVSEEQHFGLSLYWNQVQGPPKPRWHKNLTGPQIITLNHTDLVPCLCIQVWPLEPDSVRTNICPFREDPRAHQNLWQAARLQLLTLQSWLLDAPCSLPAEAALCWRAPGGDPCQPLVPPLSWENVTVDKVLEFPLLKGHPNLCVQVNSSEKLQLQECLWADSLGPLKDDVLLLETRGPQDNRSLCALEPSGCTSLPSKASTRAARLGEYLLQDLQSGQCLQLWDDDLGALWACPMDKYIHKRWALVWLACLLFAAALSLILLLKKDHAKGWLRLLKQDVRSGAAARGRAALLLYSADDSGFERLVGALASALCQLPLRVAVDLWSRRELSAQGPVAWFHAQRRQTLQEGGVVVLLFSPGAVALCSEWLQDGVSGPGAHGPHDAFRASLSCVLPDFLQGRAPGSYVGACFDRLLHPDAVPALFRTVPVFTLPSQLPDFLGALQQPRAPRSGRLQERAEQVSRALQPALDSYFHPPGTPAPGRGVGPGAGPGAGDGT

SEQ ID NO: 6917 - protein, 707 aa, Homo Sapiens
MPVPWFLLSLALGRSPVVLSLERLVGPQDATHCSPGLSCRLWDSDILCLPGDIVPAPGPVLAPTHLQTELVLRCQKETDCDLCLRVAVHLAVHGHWEEPEDEEKFGGAADSGVEEPRNASLQAQVVLSFQAYPTARCVLLEVQVPAALVQFGQSVGSVVYDCFEAALGSEVRIWSYTQPRYEKELNHTQQLPDCRGLEVWNSIPSCWALPWLNVSADGDNVHLVLNVSEEQHFGLSLYWNQVQGPPKPRWHKNLTGPQIITLNHTDLVPCLCIQVWPLEPDSVRTNICPFREDPRAHQNLWQAARLQLLTLQSWLLDAPCSLPAEAALCWRAPGGDPCQPLVPPLSWENVTVDKVLEFPLLKGHPNLCVQVNSSEKLQLQECLWADSLGPLKDDVLLLETRGPQDNRSLCALEPSGCTSLPSKASTRAARLGEYLLQDLQSGQCLQLWDDDLGALWACPMDKYIHKRWALVWLACLLFAAALSLILLLKKDHAKAAARGRAALLLYSADDSGFERLVGALASALCQLPLRVAVDLWSRRELSAQGPVAWFHAQRRQTLQEGGVVVLLFSPGAVALCSEWLQDGVSGPGAHGPHDAFRASLSCVLPDFLQGRAPGSYVGACFDRLLHPDAVPALFRTVPVFTLPSQLPDFLGALQQPRAPRSGRLQERAEQVSRALQPALDSYFHPPGTPAPGRGVGPGAGPGAGDGT

SEQ ID NO: 6918 - protein, 98 aa, Homo Sapiens
MPVPWFLLSLALGRSPVVLSLERLVGPQDATHCSPGLSCRLWDSDILCLPGDIVPAPGPVLAPTHLQTELVLRCQKETDCDLCLRVAVHLAVHGLCGI

SEQ ID NO: 6919 - protein, 123 aa, Homo Sapiens
MPVPWFLLSLALGRSPVVLSLERLVGPQDATHCSPGLSCRLWDSDILCLPGDIVPAPGPVLAPTHLQTELVLRCQKETDCDLCLRVAVHLAVHGLPYCPLRPAGGASACCPCAVWSVCGLCGI

SEQ ID NO: 6920 - protein, 91 aa, Homo Sapiens
MPVPWFLLSLALGRSPVVLSLERLVGPQDATHCSPGLSCRLWGATKFWAWNSFSSHPLLHTQTVTYSACLGTSCLLRAPCWRLRTCRQSWC

SEQ ID NO: 6921 - protein, 70 aa, Homo Sapiens
MPVPWFLLSLALGRSPVVLSLERLVGPQDATHCSPGLSCRLWVTYSACLGTSCLLRAPCWRLRTCRQSWC

SEQ ID NO: 6922 - protein, 44 aa, Homo Sapiens
MPVPWFLLSLALGRSPVVLSLERLVGPQDATHCSPNCPVWSVWC

SEQ ID NO: 6923 - protein, 791 aa, Homo Sapiens
MPVPWFLLSLALGRSPVVLSLERLVGPQDATHCSPVSLEPWGDEERLRVQFLAQQSLSLAPVTAATARTALSGLSGADGRREERGRGKSWVCLSLGGSGNTEPQKKGLSCRLWDSDILCLPGDIVPAPGPVLAPTHLQTELVLRCQKETDCDLCLRVAVHLAVHGHWEEPEDEEKFGGAADSGVEEPRNASLQAQVVLSFQAYPTARCVLLEVQVPAALVQFGQSVGSVVYDCFEAALGSEVRIWSYTQPRYEKELNHTQQLPDCRGLEVWNSIPSCWALPWLNVSADGDNVHLVLNVSEEQHFGLSLYWNQVQGPPKPRWHKNLTGPQIITLNHTDLVPCLCIQVWPLEPDSVRTNICPFREDPRAHQNLWQAARLQLLTLQSWLLDAPCSLPAEAALCWRAPGGDPCQPLVPPLSWENVTVDKVLEFPLLKGHPNLCVQVNSSEKLQLQECLWADSLGPLKDDVLLLETRGPQDNRSLCALEPSGCTSLPSKASTRAARLGEYLLQDLQSGQCLQLWDDDLGALWACPMDKYIHKRWALVWLACLLFAAALSLILLLKKDHAKGWLRLLKQDVRSGAAARGRAALLLYSADDSGFERLVGALASALCQLPLRVAVDLWSRRELSAQGPVAWFHAQRRQTLQEGGVVVLLFSPGAVALCSEWLQDGVSGPGAHGPHDAFRASLSCVLPDFLQGRAPGSYVGACFDRLLHPDAVPALFRTVPVFTLPSQLPDFLGALQQPRAPRSGRLQERAEQVSRALQPALDSYFHPPGTPAPGRGVGPGAGPGAGDGT

SEQ ID NO: 6924 - protein, 173 aa, Homo Sapiens
MGSSRLAALLLPLLLIVIDLSDSAGIGFRHLPHWNTRCPLASHTDDSFTGLQRGLFHLLVQKSKKSSTFKFYRRHKMPAPAQRKLLPRRHLSEKSHHISIPSPDISHKGLRSKRTQPSDPETWESLPRLDSQRHGGPEFSFDLLPEARAIRVTISSGPEVSVRLCHQWALECE

SEQ ID NO: 6925 - protein, 667 aa, Homo Sapiens
MGSSRLAALLLPLLLIVIDLSDSAGIGFRHLPHWNTRCPLASHTDDSFTGSSAYIPCRTWWALFSTKPWCVRVWHCSRCLCQHLLSGGSGLQRGLFHLLVQKSKKSSTFKFYRRHKMPAPAQRKLLPRRHLSEKSHHISIPSPDISHKGLRSKRTQPSDPETWESLPRLDSQRHGGPEFSFDLLPEARAIRVTISSGPEVSVRLCHQWALECEELSSPYDVQKIVSGGHTVELPYEFLLPCLCIEASYLQEDTVRRKKCPFQSWPEAYGSDFWKSVHFTDYSQHTQMVMALTLRCPLKLEAALCQRHDWHTLCKDLPNATARESDGWYVLEKVDLHPQLCFKFSFGNSSHVECPHQTGSLTSWNVSMDTQAQQLILHFSSRMHATFSAAWSLPGLGQDTLVPPVYTVSQARGSSPVSLDLIIPFLRPGCCVLVWRSDVQFAWKHLLCPDVSYRHLGLLILALLALLTLLGVVLALTCRRPQSGPGPARPVLLLHAADSEAQRRLVGALAELLRAALGGGRDVIVDLWEGRHVARVGPLPWLWAARTRVAREQGTVLLLWSGADLRPVSGPDPRAAPLLALLHAAPRPLLLLAYFSRLCAKGDIPPPLRALPRYRLLRDLPRLLRALDARPFAEATSWGRLGARQRRQSRLELCSRLEREAARLADLG

SEQ ID NO: 6926 - protein, 533 aa, Homo Sapiens
MGSSRLAALLLPLLLIVIDLSDSAGIGFRHLPHWNTRCPLASHTDDSFTGSSAYIPCRTWWALFSTKPWCVRVWHCSRCLCQHLLSGGSGLQRGLFHLLVQKSKKSSTFKFYRRHKMPAPAQRKLLPRRHLSEKSHHISIPSPDISHKGLRSKRTQPSDPETWESLPRLDSQRHGGPEFSFDLLPEARAIRVTISSGPEVSVRLCHQWALECEELSSPYDVQKIVSGGHTVELPYEFLLPCLCIEASYLQEDTVRRKKCPFQSWPEAYGSDFWKSVHFTDYSQHTQMVMALTLRCPLKLEAALCQRHDWHTLCKDLPNATARESDGWYVLEKVDLHPQLCFKFSFGNSSHVECPHQTGSLTSWNVSMDTQAQQLILHFSSRMHATFSAAWSLPGLGQDTLVPPVYTVSQARGSSPVSLDLIIPFLRPGCCVLLHASLSSPGGEDAWLIGVGGSVPSGVAVRCPVCLEAPLVSGCLLQTPGALDPGTAGPPHPTGCCSGPHLPAPTVRPGPSAASAPPARGGLGGAAAPGGSAG

SEQ ID NO: 6927 - protein, 186 aa, Homo Sapiens
MGSSRLAALLLPLLLIVIDLSDSAGIGFRHLPHWNTRCPLASHTEVLPISLAAPGGPSSPQSLGVCESGTVPAVCASICCQVAQVFNGASSTSWCRNPKSLPHSSSIGDTRCQHLLRGSCCLVVTCLRRAITFPSPPQTSPTRDFALKGPNLRIQRHGKVFPDWTHKGMEDPSSPLICCLRPGLFG

SEQ ID NO: 6928 - protein, 190 aa, Homo Sapiens
MGSSRLAALLLPLLLIVIDLSDSAGIGFRHLPHWNTRCPLASHTRKLLPRRHLSEKSHHISIPSPDISHKGLRSKRTQPSDPETWESLPRLDSQRHGGPEFSFDLLPEARAIRVTISSGPEVSVRLCHQWALECEELSSPYDVQKIVSGGHTVELPYEFLLPCLCIEMARTSGSQCTSLTTASTLRWSWP

SEQ ID NO: 6929 - protein, 146 aa, Homo Sapiens
MGSSRLAALLLPLLLIVIDLSDSAGIGFRHLPHWNTRCPLASHTVFNGASSTSWCRNPKSLPHSSSIGDTRCQHLLRGSCCLVVTCLRRAITFPSPPQTSPTRDFALKGPNLRIQRHGKVFPDWTHKGMEDPSSPLICCLRPGLFG

SEQ ID NO: 6930 - protein, 700 aa, Homo Sapiens
MLAPFLLLLTHSRSPLSFRPCSHVPGALIAQKPMGSSRLAALLLPLLLIVIDLSDSAGIGFRHLPHWNTRCPLASHTDDSFTGSSAYIPCRTWWALFSTKPWCVRVWHCSRCLCQHLLSGGSGLQRGLFHLLVQKSKKSSTFKFYRRHKMPAPAQRKLLPRRHLSEKSHHISIPSPDISHKGLRSKRTQPSDPETWESLPRLDSQRHGGPEFSFDLLPEARAIRVTISSGPEVSVRLCHQWALECEELSSPYDVQKIVSGGHTVELPYEFLLPCLCIEASYLQEDTVRRKKCPFQSWPEAYGSDFWKSVHFTDYSQHTQMVMALTLRCPLKLEAALCQRHDWHTLCKDLPNATARESDGWYVLEKVDLHPQLCFKFSFGNSSHVECPHQTGSLTSWNVSMDTQAQQLILHFSSRMHATFSAAWSLPGLGQDTLVPPVYTVSQARGSSPVSLDLIIPFLRPGCCVLVWRSDVQFAWKHLLCPDVSYRHLGLLILALLALLTLLGVVLALTCRRPQSGPGPARPVLLLHAADSEAQRRLVGALAELLRAALGGGRDVIVDLWEGRHVARVGPLPWLWAARTRVAREQGTVLLLWSGADLRPVSGPDPRAAPLLALLHAAPRPLLLLAYFSRLCAKGDIPPPLRALPRYRLLRDLPRLLRALDARPFAEATSWGRLGARQRRQSRLELCSRLEREAARLADLG

SEQ ID NO: 6931 - protein, 194 aa, Homo Sapiens
MTMRHNWTPDLSPLWVLLLCAHVVTLLVRATPVSQTTTAATASVRSTKDPCPSQPPVFPAAKQCPALEVTWPEVEVPLNGTLSLSCVACSRFPNFSILYWLGNGSFIEHLPGRLWEGSTSRERGSTGTQLCKALVLEQLTPALHSTNFSCVLVDPEQVVQRHVVLAQLWAGLRATLPPTQEALPSSHSSPQQQG

SEQ ID NO: 6932 - protein, 194 aa, Homo Sapiens; identical to SEQ ID NO: 6931

SEQ ID NO: 6933 - protein, 194 aa, Homo Sapiens; identical to SEQ ID NO: 6931

SEQ ID NO: 6934 - protein, 194 aa, Homo Sapiens; identical to SEQ ID NO: 6931

SEQ ID NO: 6935 - protein, 194 aa, Homo Sapiens; identical to SEQ ID NO: 6931

SEQ ID NO: 6936 - protein, 194 aa, Homo Sapiens; identical to SEQ ID NO: 6931

SEQ ID NO: 6937 - protein, 199 aa, Homo Sapiens
MTMRHNWTPDLSPLWVLLLCAHVVTLLVRATPVSQTTTAATASVRSTKDPCPSQPPVFPAAKQCPALEVTWPEVEVPLNGTLSLSCVACSRFPNFSILYWLGNGSFIEHLPGRLWEGSTSRERGSTGTQLCKALVLEQLTPALHSTNFSCVLVDPEQVVQRHVVLAQLWVRSPRRGLQEQEELCFHMWGGKGGLCQSSL

SEQ ID NO: 6938 - protein, 199 aa, Homo Sapiens; identical to SEQ ID NO: 6937

SEQ ID NO: 6939 - protein, 163 aa, Homo Sapiens
MTMRHNWTPDLSPLWVLLLCAHVVTLLVRATPVSQTTTAATASVRSTKDPCPSQPPVFPAAKQCPALEVTWPEVEVPLNGTLSLSCVACSRFPNFSILYWLGNGSFIEHLPGRLWEGSTSRERGSTGWAEGNLAPHPRSPALQPQQSTAAGLRLSTGPAAAQP

SEQ ID NO: 6940 - protein, 163 aa, Homo Sapiens; identical to SEQ ID NO: 6939

SEQ ID NO: 6941 - protein, 115 aa, Homo Sapiens
MTMRHNWTPDLSPLWVLLLCAHVVTLLVRATPVSQTTTAATASVRSTKDPCPSQPPVFPAAKQCPALEVTWPEVEVPLSWAEGNLAPHPRSPALQPQQSTAAGLRLSTGPAAAQP

SEQ ID NO: 6942 - protein, 170 aa, Homo Sapiens
MNCRELPLTLWVLISVSTAESCTSRPHITVVEGEPFYLKHCSCSLAHEIETTTKSWYKSSGSQEHVELNPRSSSRIALHDCVLEFWPVELNDTGSYFFQMKNYTQKWKLNVIRRNKHSCFTERQVTSKIVEVKKFFQITCENSYYQTLVNSTSLYKIGPPICRKTSSGLH

SEQ ID NO: 6943 - protein, 541 aa, Homo Sapiens
MNCRELPLTLWVLISVSTAESCTSRPHITVVEGEPFYLKHCSCSLAHEIETTTKSWYKSSGSQEHVELNPRSSSRIALHDCVLEFWPVELNDTGSYFFQMKNYTQKWKLNVIRRNKHSCFTERQVTSKIVEVKKFFQITCENSYYQTLVNSTSLYKNCKKLLLENNKNPTIKKNAEFEDQGYYSCVHFLHHNGKLFNITKTFNITIVEDRSNIVPVLLGPKLNHVAVELGKNVRLNCSALLNEEDVIYWMFGEENGSDPNIHEEKEMRIMTPEGKWHASKVLRIENIGESNLNVLYNCTVASTGGTDTKSFILVRKADMADIPGHVFTRGMIIAVLILVAVVCLVTVCVIYRVDLVLFYRHLTRRDETLTDGKTYDAFVSYLKECRPENGEEHTFAVEILPRVLEKHFGYKLCIFERDVVPGGAVVDEIHSLIEKSRRLIIVLSKSYMSNEVRYELESGLHEALVERKIKIILIEFTPVTDFTFLPQSLKLLKSHRVLKWKADKSLSYNSRFWKNLLYLMPAKTVKPGRDEPEVLPVLSES

SEQ ID NO: 6944 - protein, 541 aa, Homo Sapiens; identical to SEQ ID NO: 6943

SEQ ID NO: 6945 - protein, 541 aa, Homo Sapiens; identical to SEQ ID NO: 6943

SEQ ID NO: 6946 - protein, 457 aa, Homo Sapiens
MILEVKPQTNASCEYSASHKQDLLLGSTGSISCPSLSCQSDAQSPAVTWYKNGKLLSVERSNRIVVDEVYDYHQGTYVCDYTQSDTVSSWTVRAVVQVRTIVGDTKLKPDILDPVEDTLEVELGKPLTISCKARFGFERVFNPVIKWYIKDSDLEWEVSVPEAKSIKSTLKDEIIERNIILEKVTQRDLRRKFVCFVQNSIGNTTQSVQLKEKRGVVLLYILLGTIGTLVAVLAASALLYRHWIEIVLLYRTYQSKDQTLGDKKDFDAFVSYAKWSSFPSEATSSLSEEHLALSLFPDVLENKYGYSLCLLERDVAPGGVYAEDIVSIIKRSRRGIFILSPNYVNGPSIFELQAAVNLALDDQTLKLILIKFCYFQEPESLPHLVKKALRVLPTVTWRGLKSVPPNSRFWAKMRYHMPVKNSQGFTWNQLRITSRIFQWKGLSRTETTGRSSQPKEW

SEQ ID NO: 6947 - protein, 44 aa, Homo Sapiens
MLCLGWIFLWLVAGERIKGFNISGCSTKKLLWTYSTRSEEEFVL

SEQ ID NO: 6948 - protein, 599 aa, Homo Sapiens
MLCLGWIFLWLVAGERIKGFNISGCSTKKLLWTYSTRSEEEFVLFCDLPEPQKSHFCHRNRLSPKQVPEHLPFMGSNDLSDVQWYQQPSNGDPLEDIRKSYPHIIQDKCTLHFLTPGVNNSGSYICRPKMIKSPYDVACCVKMILEVKPQTNASCEYSASHKQDLLLGSTGSISCPSLSCQSDAQSPAVTWYKNGKLLSVERSNRIVVDEVYDYHQGTYVCDYTQSDTVSSWTVRAVVQVRTIVGDTKLKPDILDPVEDTLEVELGKPLTISCKARFGFERVFNPVIKWYIKDSDLEWEVSVPEAKSIKSTLKDEIIERNIILEKVTQRDLRRKFVCFVQNSIGNTTQSVQLKEKRGVVLLYILLGTIGTLVAVLAASALLYRHWIEIVLLYRTYQSKDQTLGDKKDFDAFVSYAKWSSFPSEATSSLSEEHLALSLFPDVLENKYGYSLCLLERDVAPGGVYAEDIVSIIKRSRRGIFILSPNYVNGPSIFELQAAVNLALDDQTLKLILIKFCYFQEPESLPHLVKKALRVLPTVTWRGLKSVPPNSRFWAKMRYHMPVKNSQGFTWNQLRITSRIFQWKGLSRTETTGRSSQPKEW

SEQ ID NO: 6949 - protein, 215 aa, Homo Sapiens
MCTEGAFPHRSACSLPLTHVHTHIHVCVPVLWGSVPRGMKLQCVSLWLLGTILILCSVDNHGLRRCLISTDMHHIEESFQEIKRAIQAKDTFPNVTILSTLETLQIIKPLDVCCVTKNLLAFYVDRVFKDHQEPNPKILRKISSIANSFLYMQKTLRQCQEQRQCHCRQEATNATRVIHDNYDQLEVHAAAIKSLGELDVFLAWINKNHEVMFSA

SEQ ID NO: 6950 - protein, 177 aa, Homo Sapiens
MKLQCVSLWLLGTILILCSVDNHGLRRCLISTDMHHIEESFQEIKRAIQAKDTFPNVTILSTLETLQIIKPLDVCCVTKNLLAFYVDRVFKDHQEPNPKILRKISSIANSFLYMQKTLRQCQEQRQCHCRQEATNATRVIHDNYDQLEVHAAAIKSLGELDVFLAWINKNHEVMFSA

SEQ ID NO: 6951 - protein, 177 aa, Homo Sapiens; identical to SEQ ID NO: 6950

SEQ ID NO: 6952 - protein, 298 aa, Homo Sapiens
MEFFKNENNELPKLQWYKDCKPLLLDNIHFSGVKDRLIVMNVAEKHRGNYTCHASYTYLGKQYPITRVIEFITLEENKPTRPVIVSPANETMEVDLGSQIQLICNVTGQLSDIAYWKWNGSVIDEDDPVLGEDYYSVENPANKRRSTLITVLNISEIESRFYKHPFTCFAKNTHGIDAAYIQLIYPVTNFQKHMIGICVTLTVIIVCSVFIYKIFKIDIVLWYRDSCYDFLPIKASDGKTYDAYILYPKTVGEGSTSDCDIFVFKVLPEVLEKQCGYKLFIYGRDDYVGEDIVEVINE

SEQ ID NO: 6953 - protein, 80 aa, Homo Sapiens
MKVLLRLICFIALLISSLEADKCKEREEKIILVSSANEIDVRPCPLNPNEHKGTITWYKDDSKTPVSTEQASRIHQHKEK

SEQ ID NO: 6954 - protein, 119 aa, Homo Sapiens
MKVLLRLICFIALLISSLEADKCKEREEKIILVSSANEIDVRPCPLNPNEHKGTITWYKDDSKTPVSTEQASRIHQHKEKLWFVPAKVEDSGHYYCVVRIANLYFLTIYTLVESKIGSS

SEQ ID NO: 6955 - protein, 106 aa, Homo Sapiens
MKVLLRLICFIALLISSLEADKCKEREEKIILVSSANEIDVRPCPLNPNEHKGTITWYKDDSKTPVSTEQASRIHQHKEKLWFVPAKVEDSGHYYCVVRNSSYCLR

SEQ ID NO: 6956 - protein, 114 aa, Homo Sapiens
MKVLLRLICFIALLISSLEADKCKEREEKIILVSSANEIDVRPCPLNPNEHKGTITWYKDDSKTPVSTEQASRIHQHKEKLWFVPAKVEDSGHYYCVVRNSSYCLRIKISAKFV

SEQ ID NO: 6957 - protein, 182 aa, Homo Sapiens
MKVLLRLICFIALLISSLEADKCKEREEKIILVSSANEIDVRPCPLNPNEHKGTITWYKDDSKTPVSTEQASRIHQHKEKLWFVPAKVEDSGHYYCVVRNSSYCLRIKISAKFVENEPNLCYNAQAIFKQKLPVAGDGGLVCPYMEFFKNENNELPKLQWYKDCKPLLLDNIHFSGVKDRLI

SEQ ID NO: 6958 - protein, 447 aa, Homo Sapiens
MKVLLRLICFIALLISSLEADKCKEREEKIILVSSANEIDVRPCPLNPNEHKGTITWYKDDSKTPVSTEQASRIHQHKEKLWFVPAKVEDSGHYYCVVRNSSYCLRIKISAKFVENEPNLCYNAQAIFKQKLPVAGDGGLVCPYMEFFKNENNELPKLQWYKDCKPLLLDNIHFSGVKDRLIVMNVAEKHRGNYTCHASYTYLGKQYPITRVIEFITLEENKPTRPVIVSPANETMEVDLGSQIQLICNVTGQLSDIAYWKWNGSVIDEDDPVLGEDYYSVENPANKRRSTLITVLNISEIESRFYKHPFTCFAKNTHGIDAAYIQLIYPVTNFQKHMIGICVTLTVIIVCSVFIYKIFKIDIVLWYRDSCYDFLPIKASDGKTYDAYILYPKTVGEGSTSDCDIFVFKVLPEVLEKQCGYKLFIYGRDDYVGEGMCVMEQSKGLLL

SEQ ID NO: 6959 - protein, 447 aa, Homo Sapiens; identical to SEQ ID NO: 6958

SEQ ID NO: 6960 - protein, 538 aa, Homo Sapiens
MKVLLRLICFIALLISSLEADKCKEREEKIILVSSANEIDVRPCPLNPNEHKGTITWYKDDSKTPVSTEQASRIHQHKEKLWFVPAKVEDSGHYYCVVRNSSYCLRIKISAKFVENEPNLCYNAQAIFKQKLPVAGDGGLVCPYMEFFKNENNELPKLQWYKDCKPLLLDNIHFSGVKDRLIVMNVAEKHRGNYTCHASYTYLGKQYPITRVIEFITLEENKPTRPVIVSPANETMEVDLGSQIQLICNVTGQLSDIAYWKWNGSVIDEDDPVLGEDYYSVENPANKRRSTLITVLNISEIESRFYKHPFTCFAKNTHGIDAAYIQLIYPVTNFQKHMIGICVTLTVIIVCSVFIYKIFKIDIVLWYRDSCYDFLPIKVLPEVLEKQCGYKLFIYGRDDYVGEDIVEVINENVKKSRRLIIILVRETSGFSWLGGSSEEQIAMYNALVQDGIKVVLLELEKIQDYEKMPESIKFIKQKHGAIRWSGDFTQGPQSAKTRFWKNVRYHMPVQRRSPSSKHQLLSPATKEKLQREAHVPLG

SEQ ID NO: 6961 - protein, 447 aa, Homo Sapiens; identical to SEQ ID NO: 6958

SEQ ID NO: 6962 - protein, 569 aa, Homo Sapiens
MKVLLRLICFIALLISSLEADKCKEREEKIILVSSANEIDVRPCPLNPNEHKGTITWYKDDSKTPVSTEQASRIHQHKEKLWFVPAKVEDSGHYYCVVRNSSYCLRIKISAKFVENEPNLCYNAQAIFKQKLPVAGDGGLVCPYMEFFKNENNELPKLQWYKDCKPLLLDNIHFSGVKDRLIVMNVAEKHRGNYTCHASYTYLGKQYPITRVIEFITLEENKPTRPVIVSPANETMEVDLGSQIQLICNVTGQLSDIAYWKWNGSVIDEDDPVLGEDYYSVENPANKRRSTLITVLNISEIESRFYKHPFTCFAKNTHGIDAAYIQLIYPVTNFQKHMIGICVTLTVIIVCSVFIYKIFKIDIVLWYRDSCYDFLPIKASDGKTYDAYILYPKTVGEGSTSDCDIFVFKVLPEVLEKQCGYKLFIYGRDDYVGEDIVEVINENVKKSRRLIIILVRETSGFSWLGGSSEEQIAMYNALVQDGIKVVLLELEKIQDYEKMPESIKFIKQKHGAIRWSGDFTQGPQSAKTRFWKNVRYHMPVQRRSPSSKHQLLSPATKEKLQREAHVPLG

SEQ ID NO: 6963 - protein, 173 aa, Homo Sapiens
MKVLLRLICFIALLISSLEADKCKEREEKIILVSSANEIDVRPCPLNPNEHKGTITWYKDDSKTPVSTEQASRIHQHKEKLWFVPAKVEDSGHYYCVVRNSSYCLRIKISAKFVENEPNLCYNAQAIFKQKLPVAGDGGLVCPYMEFFKNENNELPKLQWYKVAVSRVWATAL

SEQ ID NO: 6964 - protein, 124 aa, Homo Sapiens
  misc_feature (1)..(1): Xaa can be any naturally occurring amino acid
XKCKEREEKIILVSSANEIDVRPCPLNPNEHKGTITWYKDDSKTPVSTEQASRIHQHKEKLWFVPAKVEDSGHYYCVETEDLCALIWSFLKMKIMSYLNYSGIRIANLYFLTIYTLVESKIGSS

SEQ ID NO: 6965 - protein, 229 aa, Homo Sapiens
MLRLYVLVMGVSAFTLQPAAHTGAARSCRFRGRHYKREFRLEGEPVALRCPQVPYWLWASVSPRINLTWHKNDSARTVPGEEETRMWAQDGALWLLPALQEDSGTYVCTTRNASYCDKMSIELRVFENTDAFLPFISYPQILTLSTSGVLVCPDLSEFTRDKTDVKIQWYKDSLLLDKDNEKFLSVRGTTHLLVHDVALEDAGYYRCVLTFAHEGQQYNITRSIELRIK

SEQ ID NO: 6966 - protein, 398 aa, Homo Sapiens
MLRLYVLVMGVSAFTLQPAAHTGAARSCRFRGRHYKREFRLEGEPVALRCPQVPYWLWASVSPRINLTWHKNDSARTVPGEEETRMWAQDGALWLLPALQEDSGTYVCTTRNASYCDKMSIELRVFENTDAFLPFISYPQILTLSTSGVLVCPDLSEFTRDKTDVKIQWYKDSLLLDKDNEKFLSVRGTTHLLVHDVALEDAGYYRCVLTFAHEGQQYNITRSIELRIKKKKEETIPVIISPLKTISASLGSRLTIPCKVFLGTGTPLTTMLWWTANDTHIESAYPGGRVTEGPRQEYSENNENYIEVPLIFDPVTREDLHMDFKCVVHNTLSFQTLRTTVKEASSTFSWGIVLAPLSLAFLVLGGIWMHRRCKHRTGKADGLTVLWPHHQDFQSYPK

SEQ ID NO: 6967 - protein, 398 aa, Homo Sapiens; identical to SEQ ID NO: 6966

SEQ ID NO: 6968 - protein, 296 aa, Homo Sapiens
MLRLYVLVMGVSAFTLQPAAHTGAARSCRFRGRHYKREFRLEGEPVALRCPQVPYWLWASVSPRINLTWHKNDSARTVPGEEETRMWAQDGALWLLPALQEDSGTYVCTTRNASYCDKMSIELRVFENTDAFLPFISYPQILTLSTSGVLVCPDLSEFTRDKTDVKIQWYKDSLLLDKDNEKFLSVRGTTHLLVHDVALEDAGYYRCVLTFAHEGQQYNITRSIELRIKKKKEETIPVIISPLKTISASLGSRLTIPCKVFLGTGTPLTTMLWWTANDTHIESAYPGGRVTEGPRQ

SEQ ID NO: 6969 - protein, 215 aa, Homo Sapiens
MKLPVHKLYIEYGIQRITCPNVDGYFPSSVKPTITWYMGCYKIQNFNNVIPEGMNLSFLIALISNNGNYTCVVTYPENGRTFHLTRTLTVKVVGSPKNAVPPVIHSPNDHVVYEKEPGEELLIPCTVYFSFLMDSRNEVWWTIDGKKPDDITIDVTINESISHSRTEDETRTQILSIKKVTSEDLKRSYVCHARSAKGEVAKAAKVKQKGNRCGQ

SEQ ID NO: 6970 - protein, 113 aa, Homo Sapiens
MTLLWCVVSLYFYGILQSDASERCDDWGLDTMRQIQVFEDEPARIKCPLFEHFLKFNYSTAHSAGLTLIWYWTRQDRDLEEPINFRLPENRISKEKDVLWFRPTLLNDTGNYT

SEQ ID NO: 6971 - protein, 145 aa, Homo Sapiens
MTLLWCVVSLYFYGILQSDASERCDDWGLDTMRQIQVFEDEPARIKCPLFEHFLKFNYSTAHSAGLTLIWYWTRQDRDLEEPINFRLPENRISKEKDVLWFRPTLLNDTGNYTCMLRNTTYCSKVAFPLEVVQKDSCFNSPMKLP

SEQ ID NO: 6972 - protein, 570 aa, Homo Sapiens
MTLLWCVVSLYFYGILQSDASERCDDWGLDTMRQIQVFEDEPARIKCPLFEHFLKFNYSTAHSAGLTLIWYWTRQDRDLEEPINFRLPENRISKEKDVLWFRPTLLNDTGNYTCMLRNTTYCSKVAFPLEVVQKDSCFNSPMKLPVHKLYIEYGIQRITCPNVDGYFPSSVKPTITWYMGCYKIQNFNNVIPEGMNLSFLIALISNNGNYTCVVTYPENGRTFHLTRTLTVKVVGSPKNAVPPVIHSPNDHVVYEKEPGEELLIPCTVYFSFLMDSRNEVWWTIDGKKPDDITIDVTINESISHSRTEDETRTQILSIKKVTSEDLKRSYVCHARSAKGEVAKAAKVKQKVPAPRYTVELACGFGATVLLVVILIVVYHVYWLEMVLFYRAHFGTDETILDGKEYDIYVSYARNAEEEEFVLLTLRGVLENEFGYKLCIFDRDSLPGGIVTDETLSFIQKSRRLLVVLSPNYVLQGTQALLELKAGLENMASRGNINVILVQYKAVKETKVKELKRAKTVLTVIKWKGEKSKYPQGRFWKQLQVAMPVKKSPRRSSSDEQGLSYSSLKNV

SEQ ID NO: 6973 - protein, 346 aa, Homo Sapiens
MTLLWCVVSLYFYGILQSDASERCDDWGLDTMRQIQVFEDEPARIKCPLFEHFLKFNYSTAHSAGLTLIWYWTRQDRDLEEPINFRLPENRISKEKDVLWFRPTLLNDTGNYTCMLRNTTYCSKVAFPLEVVQKDSCFNSPMKLPVHKLYIEYGIQRITCPNVDGYFPSSVKPTITWYMGCYKIQNFNNVIPEGMNLSFLIALISNNGNYTCVVTYPENGRTFHLTRTLTVKVVGSPKNAVPPVIHSPNDHVVYEKEPGEELLIPCTVYFSFLMDSRNEVWWTIDGKKPDDITIDVTINESASSKIHSGTGLWFWSHSPASGDSHCCLPCLLARDGPILPGSFWNR

SEQ ID NO: 6974 - protein, 687 aa, Homo Sapiens
MTLLWCVVSLYFYGILQSDASERCDDWGLDTMRQIQVFEDEPARIKCPLFEHFLKFNYSTAHSAGLTLIWYWTRQDRDLEEPINFRLPENRISKEKDVLWFRPTLLNDTGNYTCMLRNTTYCSKVAFPLEVVQKDSCFNSPMKLPVHKLYIEYGIQRITCPNVDGYFPSSVKPTITWYMGCYKIQNFNNVIPEGMNLSFLIALISNNGNYTCVVTYPENGRTFHLTRTLTVKVVGSPKNAVPPVIHSPNDHVVYEKEPGEELLIPCTVYFSFLMDSRNEVWWTIDGKKPDDITIDVTINESISHSRTEDETRTQILSIKKVTSEDLKRSYVCHARSAKGEVAKAAKVKQKVPAPRYTVELACGFGATVLLVVILIVVYHVYWLEMVLFYRAHFGTDETILDGKEYDIYVSYARNAEEEEFVLLTLRGVLENEFGYKLCIFDRDSLPGGNTVEAVFDFIQRSRRMIVVLSPDYVTEKSISMLEFKLGVMCQNSIATKLIVVEYRPLEHPHPGILQLKESVSFVSWKGEKSKHSGSKFWKALRLALPLRSLSASSGWNESCSSQSDISLDHVQRRRSRLKEPPELQSSERAAGSPPAPGTMSKHRGKSSATCRCCVTYCEGENHLRNKSRAEIHNQPQWETHLCKPVPQESETQWIQNGTRLEPPAPQISALALHHFTDLSNNNDFYIL

SEQ ID NO: 6975 - protein, 570 aa, Homo Sapiens; identical to SEQ ID NO: 6972

SEQ ID NO: 6976 - protein, 687 aa, Homo Sapiens; identical to SEQ ID NO: 6974

SEQ ID NO: 6977 - protein, 356 aa, Homo Sapiens
MTLLWCVVSLYFYGILQSDASERCDDWGLDTMRQIQVFEDEPARIKCPLFEHFLKFNYSTAHSAGLTLIWYWTRQDRDLEEPINFRLPENRISKEKDVLWFRPTLLNDTGNYTCMLRNTTYCSKVAFPLEVVQKDSCFNSPMKLPVHKLYIEYGIQRITCPNVDGYFPSSVKPTITWYMGCYKIQNFNNVIPEGMNLSFLIALISNNGNYTCVVTYPENGRTFHLTRTLTVKVVGSPKNAVPPVIHSPNDHVVYEKEPGEELLIPCTVYFSFLMDSRNEVWWTIDGKKPDDITIDVTINESISHSRTEDETRTQILSIKKVTSEDLKRSYVCHARSAKGEVAKAAKVKQKGNRCGQ

SEQ ID NO: 6978 - protein, 356 aa, Homo Sapiens; identical to SEQ ID NO: 6977

SEQ ID NO: 6979 - protein, 346 aa, Homo Sapiens; identical to SEQ ID NO: 6973

SEQ ID NO: 6980 - protein, 570 aa, Homo Sapiens; identical to SEQ ID NO: 6972

SEQ ID NO: 6981 - protein, 570 aa, Homo Sapiens; identical to SEQ ID NO: 6972

SEQ ID NO: 6982 - protein, 193 aa, Homo Sapiens
  misc_feature (1)..(1): Xaa can be any naturally occurring amino acid
XFIHIGTSKHIEVKTQGCYKIQNFNNVIPEGMNLSFLIALISNNGNYTCVVTYPENGRTFHLTRTLTVKVVGSPKNAVPPVIHSPNDHVVYEKEPGEELLIPCTVYFSFLMDSRNEVWWTIDGKKPDDITIDVTINESISHSRTEDETRTQILSIKKVTSEDLKRSYVCHARSAKGEVAKAAKVKQKGNRCGQ

SEQ ID NO: 6983 - protein, 38 aa, Homo Sapiens
MGFWILAILTILMYSTAAKFSKQSWGLENEALIVRCPR

SEQ ID NO: 6984 - protein, 556 aa, Homo Sapiens
MGFWILAILTILMYSTAAKFSKQSWGLENEALIVRCPRQGKPSYTVDWYYSQTNKSIPTQERNRVFASGQLLKFLPAAVADSGIYTCIVRSPTFNRTGYANVTIYKKQSDCNVPDYLMYSTVSGSEKNSKIYCPTIDLYNWTAPLEWFKNCQALQGSRYRAHKSFLVIDNVMTEDAGDYTCKFIHNENGANYSVTATRSFTVKDEQGFSLFPVIGAPAQNEIKEVEIGKNANLTCSACFGKGTQFLAAVLWQLNGTKITDFGEPRIQQEEGQNQSFSNGLACLDMVLRIADVKEEDLLLQYDCLALNLHGLRRHTVRLSRKNPIDHHSIYCIIAVCSVFLMLINVLVIILKMFWIEATLLWRDIAKPYKTRNDGKLYDAYVVYPRNYKSSTDGASRVEHFVHQILPDVLENKCGYTLCIYGRDMLPGEDVVTAVETNIRKSRRHIFILTPQITHNKEFAYEQEVALHCALIQNDAKVILIEMEALSELDMLQAEALQDSLQHLMKVQGTIKWREDHIANKRSLNSKFWKHVRYQMPVPSKIPRKASSLTPLAAQKQ

SEQ ID NO: 6985 - protein, 328 aa, Homo Sapiens
MGFWILAILTILMYSTAAKFSKQSWGLENEALIVRCPRQGKPSYTVDWYYSQTNKSIPTQERNRVFASGQLLKFLPAAVADSGIYTCIVRSPTFNRTGYANVTIYKKQSDCNVPDYLMYSTVSGSEKNSKIYCPTIDLYNWTAPLEWFKNCQALQGSRYRAHKSFLVIDNVMTEDAGDYTCKFIHNENGANYSVTATRSFTVKDEQGFSLFPVIGAPAQNEIKEVEIGKNANLTCSACFGKGTQFLAAVLWQLNGTKITDFGEPRIQQEEGQNQSFSNGLACLDMVLRIADVKEEDLLLQYDCLALNLHGLRRHTVRLSRKNPSKECF

SEQ ID NO: 6986 - protein, 314 aa, Homo Sapiens
MGFWILAILTILMYSTAAKFSKQSWGLENEALIVRCPRQGKPSYTVDWYYSQTNKSIPTQERNRVFASGQLLKFLPAAVADSGIYTCIVRSPTFNRTGYANVTIYKKQSDCNVPDYLMYSTVSGSEKNSKIYCPTIDLYNWTAPLEWFKNCQALQGSRYRAHKSFLVIDNVMTEDAGDYTCKFIHNENGANYSVTATRSFTVKDEQGFSLFPVIGAPAQNEIKEVEIGTQFLAAVLWQLNGTKITDFGEPRIQQEEGQNQSFSNGLACLDMVLRIADVKEEDLLLQYDCLALNLHGLRRHTVRLSRKNPSKECF

SEQ ID NO: 6987 - protein, 259 aa, Homo Sapiens
MGFWILAILTILMYSTAAKFSKQSWGLENEALIVRCPRQGKPSYTVDWYYSQTNKSIPTQERNRVFASGQLLKFLPAAVADSGIYTCIVRSPTFNRTGYANVTIYKKQSDCNVPDYLMYSTVSGSEKNSKIYCPTIDLYNWTAPLEWFKNCQALQGSRYRAHKSFLVIDNVMTEDAGDYTCKFIHNENGANYSVTATRSFTVKVWCQSFCKLKKSLIFSNTHWIQSLMRGFVMVYYGVHKCCRVVFNLCLQYFQHHQWP

SEQ ID NO: 6988 - protein, 211 aa, Homo Sapiens
MYSTVSGSEKNSKIYCPTIDLYNWTAPLEWFKNCQALQGSRYRAHKSFLVIDNVMTEDAGDYTCKFIHNENGANYSVTATRSFTVKDEQGFSLFPVIGAPAQNEIKEVEIGKNANLTCSACFGKGTQFLAAVLWQLNGTKITDFGEPRIQQEEGQNQSFSNGLACLDMVLRIADVKEEDLLLQYDCLALNLHGLRRHTVRLSRKNPSKECF

SEQ ID NO: 6989 - protein, 457 aa, Homo Sapiens
MTGLVSLSYFPLSTRSCALQSCSPVWGCGPCCSAGCPSPFHCLSQQDCNEIKGERFTVLETRLLVSNVSAEDRGNYACQAILTHSGKQYEVLNGITVSIKRAGYGGSVPKIIYPKNHSIEVQLGTTLIVDCNVTDTKDNTNLRCWRVNNTLVDDYYDESKRIREGVETHVSFREHNLYTVNITFLEVKMEDYGLPFMCHAGVSTAYIILQLPAPDFRAYLIGGLIALVAVAVSVVYIYNIFKIDIVLWYRSAFHSTETIVDGKLYDAYVLYPKPHKESQRHAVDALVLNILPEVLERQCGYKLFIFGRDEFPGQAVANVIDENVKLCRRLIVIVVPESLGFGLLKNLSEEQIAVYSALIQDGMKVILIELEKIEDYTVMPESIQYIKQKHGAIRWHGDFTEQSQCMKTKFWKTVRYHMPPRRCRPFPPVQLLQHTPCYRTAGPELGSRRKKCTLTTG

SEQ ID NO: 6990 - protein, 172 aa, Homo Sapiens
MWSLLLCGLSIALPLSVTADGCKDIFMKNEILSASQPFAFNCTFPPITSGEVSVTWYKNSSKIPVSKIIQSRIHQDETWILFLPMEWGDSGVYQCVIKGRDSCHRIHVNLTVFEKHWCDTSIGGLPNLSDEYKQILHLGKDDSLTCHLHFPKSCVLGPIKWYKDCNEIKGER

SEQ ID NO: 6991 - protein, 575 aa, Homo Sapiens
MWSLLLCGLSIALPLSVTADGCKDIFMKNEILSASQPFAFNCTFPPITSGEVSVTWYKNSSKIPVSKIIQSRIHQDETWILFLPMEWGDSGVYQCVIKGRDSCHRIHVNLTVFEKHWCDTSIGGLPNLSDEYKQILHLGKDDSLTCHLHFPKSCVLGPIKWYKDCNEIKGERFTVLETRLLVSNVSAEDRGNYACQAILTHSGKQYEVLNGITVSITERAGYGGSVPKIIYPKNHSIEVQLGTTLIVDCNVTDTKDNTNLRCWRVNNTLVDDYYDESKRIREGVETHVSFREHNLYTVNITFLEVKMEDYGLPFMCHAGVSTAYIILQLPAPDFRAYLIGGLIALVAVAVSVVYIYNIFKIDIVLWYRSAFHSTETIVDGKLYDAYVLYPKPHKESQRHAVDALVLNILPEVLERQCGYKLFIFGRDEFPGQAVANVIDENVKLCRRLIVIVVPESLGFGLLKNLSEEQIAVYSALIQDGMKVILIELEKIEDYTVMPESIQYIKQKHGAIRWHGDFTEQSQCMKTKFWKTVRYHMPPRRCRPFPPVQLLQHTPCYRTAGPELGSRRKKCTLTTG

SEQ ID NO: 6992 - protein, 180 aa, Homo Sapiens
MALADLYEEGGGGGGEGEDNADSKETICRPSGRKSSKMQAFRIWDVNQKTFYLRNNQLVAGYLQGPNVNLEEKIDVVPIEPHALFLGIHGGKMCLSCVKSGDETRLQLEAVNITDLSENRKQDKRFAFIRSDSGPTTSFESAACPGWFLCTAMEADQPVSLTNMPDEGVMVTKFYFQEDE

SEQ ID NO: 6993 - protein, 159 aa, Homo Sapiens
MALETICRPSGRKSSKMQAFRIWDVNQKTFYLRNNQLVAGYLQGPNVNLEEKIDVVPIEPHALFLGIHGGKMCLSCVKSGDETRLQLEAVNITDLSENRKQDKRFAFIRSDSGPTTSFESAACPGWFLCTAMEADQPVSLTNMPDEGVMVTKFYFQEDE

SEQ ID NO: 6994 - protein, 177 aa, Homo Sapiens
MEICRGLRSHLITLLLFLFHSETICRPSGRKSSKMQAFRIWDVNQKTFYLRNNQLVAGYLQGPNVNLEEKIDVVPIEPHALFLGIHGGKMCLSCVKSGDETRLQLEAVNITDLSENRKQDKRFAFIRSDSGPTTSFESAACPGWFLCTAMEADQPVSLTNMPDEGVMVTKFYFQEDE

SEQ ID NO: 6995 - protein, 143 aa, Homo Sapiens
MQAFRIWDVNQKTFYLRNNQLVAGYLQGPNVNLEEKIDVVPIEPHALFLGIHGGKMCLSCVKSGDETRLQLEAVNITDLSENRKQDKRFAFIRSDSGPTTSFESAACPGWFLCTAMEADQPVSLTNMPDEGVMVTKFYFQEDE

SEQ ID NO: 6996 - protein, 143 aa, Homo Sapiens; identical to SEQ ID NO: 6995

SEQ ID NO: 6997 - protein, 153 aa, Homo Sapiens
MYRMQLLSCIALSLALVTNSAPTSSSTKKTQLQLEHLLLDLQMILNGINNYKNPKLTRMLTFKFYMPKKATELKHLQCLEEELKPLEEVLNLAQSKNFHLRPRDLISNINVIVLELKGSETTFMCEYADETATIVEFLNRWITFCQSIISTLT

SEQ ID NO: 6998 - protein, 176 aa, Homo Sapiens
MKASSLAFSLLSAAFYLLWTPSTGLKTLNLGSCVIATNLQEIRNGFSEIRGSVQAKDGNIDIRILRRTESLQDTKPANRCCLLRHLLRLYLDRVFKNYQTPDHYTLRKISSLANSFLTIKKDLRLCHAHMTCHCGEEAMKKYSQILSHFEKLEPQAAVVKALGELDILLQWMEETE

SEQ ID NO: 6999 - protein, 176 aa, Homo Sapiens; identical to SEQ ID NO: 6998

SEQ ID NO: 7000 - protein, 151 aa, Homo Sapiens
MKASSLAFSLLSAAFYLLWTPSTGLKTLNLGSCVIATNLQEIRNGFSEIRGSVQAKDGNIDIRILRRTESLQDTKPANRCCLLRHLLRLYLDRVFKNYQTPDHYTLRKISSLANSFLTIKKDLRLCLEPQAAVVKALGELDILLQWMEETE

SEQ ID NO: 7001 - protein, 504 aa, Homo Sapiens
MKNVLQWTPPEGLQGVKVTYTVQYFIYGQKKWLNKSECRNINRTYCDLSAETSDYEHQYYAKVKAIWGTKCSKWAESGRFYPFLETQIGPPEVALTTDEKSISVVLTAPEKWKRNPEDLPVSMQQIYSNLKYNVSVLNTKSNRTWSQCVTNHTLVLTWLEPNTLYCVHVESFVPGPPRRAQPSEKQCARTLKDQSSEFKAKIIFWYVLPVSITVFLFSVMGYSIYRYIHVGKEKHPANLILIYGNEFDKRFFVPAEKIVINFITLNISDDSKISHQDMSLLGKSSDVSSLNDPQPSGNLRPPQEEEEVKHLGYASHLMEIFCDSEENTEGTSLTQQESLSRTIPPDKTVIEYEYDVRTTDICAGPEEQELSLQEEVSTQGTLLESQAALAVLGPQTLQYSYTPQLQDLDPLAQEHTDSEEGPEEEPSTTLVDWDPQTGRLCIPSLSSFDQDSEGCEPSEGDGLGEEGLLSRLYEEPAPDRPPGENETYLMQFMEEWGLYVQMEN

SEQ ID NO: 7002 - protein, 42 aa, Homo Sapiens
MRAPGRPALRPLPLPPLLLLLLAAPWGRAGYSRPLLGLWAKV

SEQ ID NO: 7003 - protein, 209 aa, Homo Sapiens
MRAPGRPALRPLPLPPLLLLLLAAPWGRAVPCVSGGLPKPANITFLSINMKNVLQWTPPEGLQGVKVTYTVQYFIYGQKKWLNKSECRNINRTYCDLSAETSDYEHQYYAKVKAIWGTKCSKWAESGRFYPFLETQIGPPEVALTTDEKSISVVLTAPEKWKRNPEDLPVSMQQIYSNLKYNVSVLNTKSNRTVSLKWNGAYIHVPLCS

SEQ ID NO: 7004 - protein, 553 aa, Homo Sapiens
MRAPGRPALRPLPLPPLLLLLLAAPWGRAVPCVSGGLPKPANITFLSINMKNVLQWTPPEGLQGVKVTYTVQYFIYGQKKWLNKSECRNINRTYCDLSAETSDYEHQYYAKVKAIWGTKCSKWAESGRFYPFLETQIGPPEVALTTDEKSISVVLTAPEKWKRNPEDLPVSMQQIYSNLKYNVSVLNTKSNRTWSQCVTNHTLVLTWLEPNTLYCVHVESFVPGPPRRAQPSEKQCARTLKDQSSEFKAKIIFWYVLPVSITVFLFSVMGYSIYRYIHVGKEKHPANLILIYGNEFDKRFFVPAEKIVINFITLNISDDSKISHQDMSLLGKSSDVSSLNDPQPSGNLRPPQEEEEVKHLGYASHLMEIFCDSEENTEGTSLTQQESLSRTIPPDKTVIEYEYDVRTTDICAGPEEQELSLQEEVSTQGTLLESQAALAVLGPQTLQYSYTPQLQDLDPLAQEHTDSEEGPEEEPSTTLVDWDPQTGRLCIPSLSSFDQDSEGCEPSEGDGLGEEGLLSRLYEEPAPDRPPGENETYLMQFMEEWGLYVQMEN

SEQ ID NO: 7005 - protein, 89 aa, Homo Sapiens
MSYNGLHQRVFKELKLLTLCSISSPEKWKRNPEDLPVSMQQIYSNLKYNVSVLNTKSNRTWSQCVTNHTLVLTWLEPNTLYCVHVESFV

SEQ ID NO: 7006 - protein, 177 aa, Homo Sapiens
MSYNGLHQRVFKELKLLTLCSISSQIGPPEVALTTDEKSISVVLTAPEKWKRNPEDLPVSMQQIYSNLKYNVSVLNTKSNRTWSQCVTNHTLVLTWLEPNTLYCVHVESFVPGPPRRAQPSEKQCARTLKDQSSEFKAKIIFWYVLPVSITVFLFSVMGYSIYRYIHVGKEKHPANL

SEQ ID NO: 7007 - protein, 442 aa, Homo Sapiens
MSYNGLHQRVFKELKLLTLCSISSQIGPPEVALTTDEKSISVVLTAPEKWKRNPEDLPVSMQQIYSNLKYNVSVLNTKSNRTWSQCVTNHTLVLTWLEPNTLYCVHVESFVPGPPRRAQPSEKQCARTLKDQSSEFKAKIIFWYVLPVSITVFLFSVMGYSIYRYIHVGKEKHPANLILIYGNEFDKRFFVPAEKIVINFITLNISDDSKISHQDMSLLGKSSDVSSLNDPQPSGNLRPPQEEEEVKHLGYASHLMEIFCDSEENTEGTSLTQQESLSRTIPPDKTVIEYEYDVRTTDICAGPEEQELSLQEEVSTQGTLLESQAALAVLGPQTLQYSYTPQLQDLDPLAQEHTDSEEGPEEEPSTTLVDWDPQTGRLCIPSLSSFDQDSEGCEPSEGDGLGEEGLLSRLYEEPAPDRPPGENETYLMQFMEEWGLYVQMEN

SEQ ID NO: 7008 - protein, 162 aa, Homo Sapiens
MRSSPGNMERIVICLMVIFLGTLVHKSSSQGQDRHMIRMRQLIDIVDQLKNYVNDLVPEFLPAPEDVETNCEWSAFSCFQKAQLKSANTGNNERIINVSIKKLKRKPPSTNAGRRQKHRLTCPSCDSYEKKPPKEFLERFKSLLQKMIHQHLSSRTHGSEDS

SEQ ID NO: 7009 - protein, 153 aa, Homo Sapiens
MRSSPGNMERIVICLMVIFLGTLVHKSSSQGQDRHMIRMRQLIDIVDQLKNYVNDLVPEFLPAPEDVETNCEWSAFSCFQKAQLKSANTGNNERIINVSIKKLKRKPPSTNAGRRQKHRLTCPSCDSYEKKPPKEFLERFKSLLQKVSTLSFI

SEQ ID NO: 7010 - protein, 179 aa, Homo Sapiens
MAALQKSVSSFLMGTLATSCLLLLALLVQGGAAAPISSHCRLDKSNFQQPYITNRTFMLAKEASLADNNTDVRLIGEKLFHGVSMSERCYLMKQVLNFTLEEVLFPQSDRFQPYMQEVVPFLARLSNRLSTCHIEGDDLHIQRNVQKLKDTVKKLGESGEIKAIGELDLLFMSLRNACI

SEQ ID NO: 7011 - protein, 179 aa, Homo Sapiens; identical to SEQ ID NO: 7010

SEQ ID NO: 7012 - protein, 263 aa, Homo Sapiens
MMPKHCFLGFLISFFLTGVAGTQSTHESLKPQRVQFQSRNFHNILQWQPGRALTGNSSVYFVQYKIMFSCSMKSSHQKPSGCWQHISCNFPGCRTLAKYGQRQWKNKEDCWGTQELSCDLTSETSDIQEPYYGRVRAASAGSYSEWSMTPRFTPWWETKIDPPVMNITQVNGSLLVILHAPNLPYRYQKEKNVSIEDYYELLYRVFIINNSLEKEQKVYEGAHRAVEIEALTPHSSYCVVAEIYQPMLDRRSQRSEERCVEIP

SEQ ID NO: 7013 - protein, 130 aa, Homo Sapiens
MMPKHCFLGFLISFFLTGVAGTQSTHESLKPQRVQFQSRNFHNILQWQPGRALTGNSSVYFVQYKIYGQRQWKNKEDCWGTQELSCDLTSETSDIQEPYYGRVRAASAGSYSEWSMTPRFTPWWERAKGL

SEQ ID NO: 7014 - protein, 231 aa, Homo Sapiens
MMPKHCFLGFLISFFLTGVAGTQSTHESLKPQRVQFQSRNFHNILQWQPGRALTGNSSVYFVQYKIYGQRQWKNKEDCWGTQELSCDLTSETSDIQEPYYGRVRAASAGSYSEWSMTPRFTPWWETKIDPPVMNITQVNGSLLVILHAPNLPYRYQKEKNVSIEDYYELLYRVFIINNSLEKEQKVYEGAHRAVEIEALTPHSSYCVVAEIYQPMLDRRSQRSEERCVEIP

SEQ ID NO: 7015 - protein, 189 aa, Homo Sapiens
MLGSRAVMLLLLLPWTAQGRAVPGGSSPAWTQCQQLSQKLCTLAWSAHPLVGHMDLREEGDEETTNDVPHIQCGDGCDPQGLRDNSQFCLQRIHQGLIFYEKLLGSDIFTGEPSLLPDSPVGQLHASLLGLSQLLQPEGHHWETQQIPSLSPSQPWQRLLLRFKILRSLQAFVAVAARVFAHGAATLSP

SEQ ID NO: 7016 - protein, 206 aa, Homo Sapiens
MNFQQRLQSLWTLARPFCPPLLATASQMQMVVLPCLGFTLLLWSQVSGAQGQEFHFGPCQVKGVVPQKLWEAFWAVKDTMQAQDNITSARLLQQEVLQNVSDAESCYLVHTLLEFYLKTVFKNYHNRTVEVRTLKSFSTLANNFVLIVSQLQPSQENEMFSIRDSAHRRFLLFRRAFKQLDVEAALTKALGEVDILLTWMQKFYKL

SEQ ID NO: 7017 - protein, 60 aa, Homo Sapiens
MNFQQRLQSLWTLASKLRITSRVPGCCSRRFCRTSRKKMRCFPSETVHTGGFCYSGEHSN

SEQ ID NO: 7018 - protein, 63 aa, Homo Sapiens
MNFQQRLQSLWTLASKLRITSRVPGCCSRRFCRTSRKKMRCFPSETVHTGGFCYSGEHSNSWT

SEQ ID NO: 7019 - protein, 51 aa, Homo Sapiens
MNFQQRLQSLWTLASKLRITSRVPGCCSRRFCRTSRMLRAVTLSTPCWSST

SEQ ID NO: 7020 - protein, 207 aa, Homo Sapiens
MNFQQRLQSLWTLASRPFCPPLLATASQMQMVVLPCLGFTLLLWSQVSGAQGQEFHFGPCQVKGVVPQKLWEAFWAVKDTMQAQDNITSARLLQQEVLQNVSDAESCYLVHTLLEFYLKTVFKNYHNRTVEVRTLKSFSTLANNFVLIVSQLQPSQENEMFSIRDSAHRRFLLFRRAFKQLDVEAALTKALGEVDILLTWMQKFYKL

SEQ ID NO: 7021 - protein, 154 aa, Homo Sapiens
MNFQQRLQSLWTLASRPFCPPLLATASQMQMVVLPCLGFTLLLWSQVSGAQGQEFHFGPCQVKGVVPQKLWEAFWAVKDTMQAQDNITSARLLQQEVLQNVSQENEMFSIRDSAHRRFLLFRRAFKQLDVEAALTKALGEVDILLTWMQKFYKL

SEQ ID NO: 7022 - protein, 177 aa, Homo Sapiens
MRERPRLGEDSSLISLFLQVVAFLAMVMGTHTYSHWPSCCPSKGQDTSEELLRWSTVPVPPLEPARPNRHPESCRASEDGPLNSRAISPWRYELDRDLNRLPQDLYHARCLCPHCVSLQTGSHMDPRGNSELLYHNQTVFYRRPCHGEKGTHKGYCLERRLYRVSLACVCVRPRVMG

SEQ ID NO: 7023 - protein, 161 aa, Homo Sapiens
MYQVVAFLAMVMGTHTYSHWPSCCPSKGQDTSEELLRWSTVPVPPLEPARPNRHPESCRASEDGPLNSRAISPWRYELDRDLNRLPQDLYHARCLCPHCVSLQTGSHMDPRGNSELLYHNQTVFYRRPCHGEKGTHKGYCLERRLYRVSLACVCVRPRVMG

SEQ ID NO: 7024 - protein, 171 aa, Homo Sapiens
MLVNFILRCGLLLVTLSLAIAKHKQSSFTKSCYPRGTLSQAVDALYIKAAWLKATIPEDRIKNIRLLKKKTKKQFMKNCQFQEQLLSFFMEDVFGQLQLQGCKKIRFVEDFHSLRQKLSHCISCASSAREMKSITRMKRIFYRIGNKGIYKAISELDILLSWIKKLLESSQ

SEQ ID NO: 7025 - protein, 24 aa, Homo Sapiens
MERMQLWAMRLDLRDLQRHLRFQV

SEQ ID NO: 7026 - protein, 243 aa, Homo Sapiens
MGQTAGDLGWRLSLLLLPLLLVQAGVWGFPRPPGRPQLSLQELRREFTVSLHLARKLLSEVRGQAHRFAESHLPGVNLYLLPLGEQLPDVSLTFQAWRRLSDPERLCFISTTLQPFHALLGGLGTQGRWTNMERMQLWAMRLDLRDLQRHLRFQVLAAGFNLPEEEEEEEEEEEEERKGLLPGALGSALQGPAQVSWPQLLSTYRLLHSLELVLSRAVRELLLLSKAGHSVWPLGFPTLSPQP

SEQ ID NO: 7027 - protein, 88 aa, Homo Sapiens
MAAPALSWRLPLLILLLPLATSWASAAVNGTSQFTCFYNSRANISCVWSQDGALQDTSCQVHAWPDRRRWNQTCELLPVSQASWACNL

SEQ ID NO: 7028 - protein, 146 aa, Homo Sapiens
MAAPALSWRLPLLILLLPLATSWASAAVNGTSQFTCFYNSRANISCVWSQDGALQDTSCQVHAWPDRRRWNQTCELLPVSQASWACNLILGAPDSQKLTTVDIVTLRVLCREGVRWRVMAIQDFKPFENLRLMAPISLQVVHVETH

SEQ ID NO: 7029 - protein, 188 aa, Homo Sapiens
MAAPALSWRLPLLILLLPLATSWASAAVNGTSQFTCFYNSRANISCVWSQDGALQDTSCQVHAWPDRRRWNQTCELLPVSQASWACNLILGAPDSQKLTTVDIVTLRVLCREGVRWRVMAIQDFKPFENLRLMAPISLQVVHVETHRCNISWEISQASHYFERHLEFEARTLSPGHTWEEAPLLTLKQ

SEQ ID NO: 7030 - protein, 551 aa, Homo Sapiens
MAAPALSWRLPLLILLLPLATSWASAAVNGTSQFTCFYNSRANISCVWSQDGALQDTSCQVHAWPDRRRWNQTCELLPVSQASWACNLILGAPDSQKLTTVDIVTLRVLCREGVRWRVMAIQDFKPFENLRLMAPISLQVVHVETHRCNISWEISQASHYFERHLEFEARTLSPGHTWEEAPLLTLKQKQEWICLETLTPDTQYEFQVRVKPLQGEFTTWSPWSQPLAFRTKPAALGKDTIPWLGHLLVGLSGAFGFIILVYLLINCRNTGPWLKKVLKCNTPDPSKFFSQLSSEHGGDVQKWLSSPFPSSSFSPGGLAPEISPLEVLERDKVTQLLLQQDKVPEPASLSSNHSLTSCFTNQGYFFFHLPDALEIEACQVYFTYDPYSEEDPDEGVAGAPTGSSPQPLQPLSGEDDAYCTFPSRDDLLLFSPSLLGGPSPPSTAPGGSGAGEERMPPSLQERVPRDWDPQPLGPPTPGVPDLVDFQPPPELVLREAGEEVPDAGPREGVSFPWSRPPGQGEFRALNARLPLNTDAYLSLQELQGQDPTHLV

SEQ ID NO: 7031 - protein, 105 aa, Homo Sapiens
TCFYNSRANISCVWSQDGALQDTSCQVHAWPDRRSLQLPWDQAGMREQDKVPMREECHGASGGGSAPHSGWHRGPSLALLPGAILAAERSEKSPLGQLCGSFLFF

SEQ ID NO: 7032 - protein, 152 aa, Homo Sapiens
MSRLPVLLLLQLLVRPGLQAPMTQTTPLKTSWVNCSNMIDEIITHLKQPPLPLLDFNNLNGEDQDILMENNLRRPNLEAFNRAVKSLQNASAIESILKNLLPCLPLATAAPTRHPIHIKDGDWNEFRRKLTFYLKTLENAQAQQTTLSLAIF

SEQ ID NO: 7033 - protein, 164 aa, Homo Sapiens
MASHSGPSTSVLFLFCCLGGWLASHTLPVRLLRPSDDVQKIVEELQSLSKMLLKDVEEEKGVLVSQNYTLPCLSPDAQPPNNIHSPAIRAYLKTIRQLDNKSVIDEIIEHLDKLIFQDAPETNISVPTDTHECKRFILTISQQFSECMDLALKSLTSGAQQATT

SEQ ID NO: 7034 - protein, 582 aa, Homo Sapiens
MCIRQLKFFTTACVCECPQNILSPQPSCVNLGMMWTWALWMLPSLCKFSLAALPAKPENISCVYYYRKNLTCTWSPGKETSYTQYTVKRTYAFGEKHDNCTTNSSTSENRASCSFFLPRITIPDNYTIEVEAENGDGVIKSHMTYWRLENIAKTEPPKIFRVKPVLGIKRMIQIEWIKPELAPVSSDLKYTLRFRTVNSTSWMEVNFAKNRKDKNQTYNLTGLQPFTEYVIALRCAVKESKFWSDWSQEKMGMTEEEAPCGLELWRVLKPAEADGRRPVRLLWKKARGAPVLEKTLGYNIWYYPESNTNLTETMNTTNQQLELHLGGESFWVSMISYNSLGKSPVATLRIPAIQEKSFQCIEVMQACVAEDQLVVKWQSSALDVNTWMIEWFPDVDSEPTTLSWESVSQATNWTIQQDKLKPFWCYNISVYPMLHDKVGEPYSIQAYAKEGVPSEGPETKVENIGVKTVTITWKEIPKSERKGIICNYTIFYQAEGGKGFCKHAHSEVEKNPKPQIDAMDRPVVGMAPPSHCDLQPGMNHLASLNLSENGAKSTHLLGFWGLNESEVTVPERRVLRKWKELL

SEQ ID NO: 7035 - protein, 681 aa, Homo Sapiens
MCIRQLKFFTTACVCECPQNILSPQPSCVNLGMMWTWALWMLPSLCKFSLAALPAKPENISCVYYYRKNLTCTWSPGKETSYTQYTVKRTYAFGEKHDNCTTNSSTSENRASCSFFLPRITIPDNYTIEVEAENGDGVIKSHMTYWRLENIAKTEPPKIFRVKPVLGIKRMIQIEWIKPELAPVSSDLKYTLRFRTVNSTSWMEVNFAKNRKDKNQTYNLTGLQPFTEYVIALRCAVKESKFWSDWSQEKMGMTEEEAPCGLELWRVLKPAEADGRRPVRLLWKKARGAPVLEKTLGYNIWYYPESNTNLTETMNTTNQQLELHLGGESFWVSMISYNSLGKSPVATLRIPAIQEKSFQCIEVMQACVAEDQLVVKWQSSALDVNTWMIEWFPDVDSEPTTLSWESVSQATNWTIQQDKLKPFWCYNISVYPMLHDKVGEPYSIQAYAKEGVPSEGPETKVENIGVKTVTITWKEIPKSERKGIICNYTIFYQAEGGKGFSKTVNSSILQYGLESLKRKTSYIVQVMASTSAGGTNGTSINFKTLSFSVFEIILITSLIGGGLLILIILTVAYGLKKPNKLTHLCWPTVPNPAESSIATWHGDDFKDKLNLKESDDSVNTEDRILKPCSTPSDKLVIDKLVVNFGNVLQEIFTDEARTGQENNLGGEKNGTRILSSCPTSI

SEQ ID NO: 7036 - protein, 764 aa, Homo Sapiens
MCIRQLKFFTTACVCECPQNILSPQPSCVNLGMMWTWALWMLPSLCKFSLAALPAKPENISCVYYYRKNLTCTWSPGKETSYTQYTVKRTYAFGEKHDNCTTNSSTSENRASCSFFLPRITIPDNYTIEVEAENGDGVIKSHMTYWRLENIAKTEPPKIFRVKPVLGIKRMIQIEWIKPELAPVSSDLKYTLRFRTVNSTSWMEVNFAKNRKDKNQTYNLTGLQPFTEYVIALRCAVKESKFWSDWSQEKMGMTEEEAPCGLELWRVLKPAEADGRRPVRLLWKKARGAPVLEKTLGYNIWYYPESNTNLTETMNTTNQQLELHLGGESFWVSMISYNSLGKSPVATLRIPAIQEKSFQCIEVMQACVAEDQLVVKWQSSALDVNTWMIEWFPDVDSEPTTLSWESVSQATNWTIQQDKLKPFWCYNISVYPMLHDKVGEPYSIQAYAKEGVPSEGPETKVENIGVKTVTITWKEIPKSERKGIICNYTIFYQAEGGKGFSKTVNSSILQYGLESLKRKTSYIVQVMASTSAGGTNGTSINFKTLSFSVFEIILITSLIGGGLLILIILTVAYGLKKPNKLTHLCWPTVPNPAESSIATWHGDDFKDKLNLKESDDSVNTEDRILKPCSTPSDKLVIDKLVVNFGNVLQEIFTDEARTGQENNLGGEKNGYVTCPFRPDCPLGKSFEELPVSPEIPPRKSQYLRSRMPEGTRPEAKEQLLFSGQSLVPDHLCEEGAPNPYLKNSVTAREFLVSEKLPEHTKGEV

SEQ ID NO: 7037 - protein, 745 aa, Homo Sapiens
MKLSPQPSCVNLGMMWTWALWMLPSLCKFSLAALPAKPENISCVYYYRKNLTCTWSPGKETSYTQYTVKRTYAFGEKHDNCTTNSSTSENRASCSFFLPRITIPDNYTIEVEAENGDGVIKSHMTYWRLENIAKTEPPKIFRVKPVLGIKRMIQIEWIKPELAPVSSDLKYTLRFRTVNSTSWMEVNFAKNRKDKNQTYNLTGLQPFTEYVIALRCAVKESKFWSDWSQEKMGMTEEEAPCGLELWRVLKPAEADGRRPVRLLWKKARGAPVLEKTLGYNIWYYPESNTNLTETMNTTNQQLELHLGGESFWVSMISYNSLGKSPVATLRIPAIQEKSFQCIEVMQACVAEDQLVVKWQSSALDVNTWMIEWFPDVDSEPTTLSWESVSQATNWTIQQDKLKPFWCYNISVYPMLHDKVGEPYSIQAYAKEGVPSEGPETKVENIGVKTVTITWKEIPKSERKGIICNYTIFYQAEGGKGFSKTVNSSILQYGLESLKRKTSYIVQVMASTSAGGTNGTSINFKTLSFSVFEIILITSLIGGGLLILIILTVAYGLKKPNKLTHLCWPTVPNPAESSIATWHGDDFKDKLNLKESDDSVNTEDRILKPCSTPSDKLVIDKLVVNFGNVLQEIFTDEARTGQENNLGGEKNGYVTCPFRPDCPLGKSFEELPVSPEIPPRKSQYLRSRMPEGTRPEAKEQLLFSGQSLVPDHLCEEGAPNPYLKNSVTAREFLVSEKLPEHTKGEV

SEQ ID NO: 7038 - protein, 662 aa, Homo Sapiens
MKLSPQPSCVNLGMMWTWALWMLPSLCKFSLAALPAKPENISCVYYYRKNLTCTWSPGKETSYTQYTVKRTYAFGEKHDNCTTNSSTSENRASCSFFLPRITIPDNYTIEVEAENGDGVIKSHMTYWRLENIAKTEPPKIFRVKPVLGIKRMIQIEWIKPELAPVSSDLKYTLRFRTVNSTSWMEVNFAKNRKDKNQTYNLTGLQPFTEYVIALRCAVKESKFWSDWSQEKMGMTEEEAPCGLELWRVLKPAEADGRRPVRLLWKKARGAPVLEKTLGYNIWYYPESNTNLTETMNTTNQQLELHLGGESFWVSMISYNSLGKSPVATLRIPAIQEKSFQCIEVMQACVAEDQLVVKWQSSALDVNTWMIEWFPDVDSEPTTLSWESVSQATNWTIQQDKLKPFWCYNISVYPMLHDKVGEPYSIQAYAKEGVPSEGPETKVENIGVKTVTITWKEIPKSERKGIICNYTIFYQAEGGKGFSKTVNSSILQYGLESLKRKTSYIVQVMASTSAGGTNGTSINFKTLSFSVFEIILITSLIGGGLLILIILTVAYGLKKPNKLTHLCWPTVPNPAESSIATWHGDDFKDKLNLKESDDSVNTEDRILKPCSTPSDKLVIDKLVVNFGNVLQEIFTDEARTGQENNLGGEKNGTRILSSCPTSI

SEQ ID NO: 7039 - protein, 662 aa, Homo Sapiens; identical to SEQ ID NO: 7038

SEQ ID NO: 7040 - protein, 324 aa, Homo Sapiens
MMWTWALWMLPSLCKFSLAALPAKPENISCVYYYRKNLTCTWSPGKETSYTQYTVKRTYAFGEKHDNCTTNSSTSENRASCSFFLPRITIPDNYTIEVEAENGDGVIKSHMTYWRLENIAKTEPPKIFRVKPVLGIKRMIQIEWIKPELAPVSSDLKYTLRFRTVNSTSWMEVNFAKNRKDKNQTYNLTGLQPFTEYVIALRCAVKESKFWSDWSQEKMGMTEEEAPCGLELWRVLKPAEADGRRPVRLLWKKARGAPVLEKTLGYNIWYYPESNTNLTETMNTTNQQLELHLGGESFWVSMISYNSLGKSPVATLRIPAIQEK

SEQ ID NO: 7041 - protein, 622 aa, Homo Sapiens
MTYWRLENIAKTEPPKIFRVKPVLGIKRMIQIEWIKPELAPVSSDLKYTLRFRTVNSTSWMEVNFAKNRKDKNQTYNLTGLQPFTEYVIALRCAVKESKFWSDWSQEKMGMTEEEAPCGLELWRVLKPAEADGRRPVRLLWKKARGAPVLEKTLGYNIWYYPESNTNLTETMNTTNQQLELHLGGESFWVSMISYNSLGKSPVATLRIPAIQEKSFQCIEVMQACVAEDQLVVKWQSSALDVNTWMIEWFPDVDSEPTTLSWESVSQATNWTIQQDKLKPFWCYNISVYPMLHDKVGEPYSIQAYAKEGVPSEGPETKVENIGVKTVTITWKEIPKSERKGIICNYTIFYQAEGGKGFSKTVNSSILQYGLESLKRKTSYIVQVMASTSAGGTNGTSINFKTLSFSVFEIILITSLIGGGLLILIILTVAYGLKKPNKLTHLCWPTVPNPAESSIATWHGDDFKDKLNLKESDDSVNTEDRILKPCSTPSDKLVIDKLVVNFGNVLQEIFTDEARTGQENNLGGEKNGYVTCPFRPDCPLGKSFEELPVSPEIPPRKSQYLRSRMPEGTRPEAKEQLLFSGQSLVPDHLCEEGAPNPYLKNSVTAREFLVSEKLPEHTKGEV

SEQ ID NO: 7042 - protein, 212 aa, Homo Sapiens
MCFPKGLGAWVSACDTEDTVGHLGPWRDKDPALWCQLCLSSQHQAIERFYDKMQNAESGRGQVMSSLAELEDDFKEGYLETVAAYYEEQHPELTPLLEKERDGLRCRGNRSPVPDVEDPATEEPGESFCDKVMRWFQAMLQRLQTWWHGVLAWVKEKVVALVHAVQALWKQFQSFCCSLSELFMSSFQSYGAPRGDKEELTPQKCSEPQSSK

SEQ ID NO: 7043 - protein, 131 aa, Homo Sapiens
MCFPKVLSDDMKKLKARMDDFKEGYLETVAAYYEEQHPELTPLLEKERDGLRCRGNRSPVPDVEDPATEEPGESFCDKVMRWFQAMLQRLQTWWHGVLAWVKEKVVALVHAVQALWKQFQSFCCSLSELFM

SEQ ID NO: 7044 - protein, 179 aa, Homo Sapiens
MCFPKVLSDDMKKLKARMHQAIERFYDKMQNAESGRGQDDFKEGYLETVAAYYEEQHPELTPLLEKERDGLRCRGNRSPVPDVEDPATEEPGESFCDKVMRWFQAMLQRLQTWWHGVLAWVKEKVVALVHAVQALWKQFQSFCCSLSELFMSSFQSYGAPRGDKEELTPQKCSEPQSSK

SEQ ID NO: 7045 - protein, 179 aa, Homo Sapiens; identical to SEQ ID NO: 7044

SEQ ID NO: 7046 - protein, 131 aa, Homo Sapiens
MCFPKVLSDDMKKLKARMHQAIERFYDKMQNAESGRGQVMSSLAELEDDFKEGYLETVAAYYEEQHPELTPLLEKERDGLRCRGNRSPVPDVEDPATEEPGESFCDKSYGAPRGDKEELTPQKCSEPQSSK

SEQ ID NO: 7047 - protein, 131 aa, Homo Sapiens; identical to SEQ ID NO: 7046

SEQ ID NO: 7048 - protein, 131 aa, Homo Sapiens; identical to SEQ ID NO: 7046

SEQ ID NO: 7049 - protein, 188 aa, Homo Sapiens
MCFPKVLSDDMKKLKARMHQAIERFYDKMQNAESGRGQVMSSLAELEDDFKEGYLETVAAYYEEQHPELTPLLEKERDGLRCRGNRSPVPDVEDPATEEPGESFCDKVMRWFQAMLQRLQTWWHGVLAWVKEKVVALVHAVQALWKQFQSFCCSLSELFMSSFQSYGAPRGDKEELTPQKCSEPQSSK

SEQ ID NO: 7050 - protein, 188 aa, Homo Sapiens; identical to SEQ ID NO: 7049

SEQ ID NO: 7051 - protein, 188 aa, Homo Sapiens; identical to SEQ ID NO: 7049

SEQ ID NO: 7052 - protein, 188 aa, Homo Sapiens; identical to SEQ ID NO: 7049

SEQ ID NO: 7053 - protein, 188 aa, Homo Sapiens; identical to SEQ ID NO: 7049

SEQ ID NO: 7054 - protein, 188 aa, Homo Sapiens; identical to SEQ ID NO: 7049

SEQ ID NO: 7055 - protein, 188 aa, Homo Sapiens; identical to SEQ ID NO: 7049

SEQ ID NO: 7056 - protein, 188 aa, Homo Sapiens; identical to SEQ ID NO: 7049

SEQ ID NO: 7057 - protein, 188 aa, Homo Sapiens; identical to SEQ ID NO: 7049

SEQ ID NO: 7058 - protein, 188 aa, Homo Sapiens; identical to SEQ ID NO: 7049

SEQ ID NO: 7059 - protein, 168 aa, Homo Sapiens
MCFPKVLSDDMKKLKARMHQAIERFYDKMQNAESGRGQVMSSLAELEELTPLLEKERDGLRCRGNRSPVPDVEDPATEEPGESFCDKVMRWFQAMLQRLQTWWHGVLAWVKEKVVALVHAVQALWKQFQSFCCSLSELFMSSFQSYGAPRGDKEELTPQKCSEPQSSK

SEQ ID NO: 7060 - protein, 168 aa, Homo Sapiens; identical to SEQ ID NO: 7059

SEQ ID NO: 7061 - protein, 225 aa, Homo Sapiens
MCFPKVLSDDMKKLKARMVMLLPTSAQGLGAWVSACDTEDTVGHLGPWRDKDPALWCQLCLSSQHQAIERFYDKMQNAESGRGQDDFKEGYLETVAAYYEEQHPELTPLLEKERDGLRCRGNRSPVPDVEDPATEEPGESFCDKVMRWFQAMLQRLQTWWHGVLAWVKEKVVALVHAVQALWKQFQSFCCSLSELFMSSFQSYGAPRGDKEELTPQKCSEPQSSK

SEQ ID NO: 7062 - protein, 225 aa, Homo Sapiens
MCFPKVLSDDMKKLKARMVMLLPTSAQGLGAWVSACDTEDTVGHLGPWRDKDPALWCQLCLSSQHQAIERFYDKMQNAESGRGQVMSSLAELEDDFKEGYLETVAAYYEEQHPELTPLLEKERDGLRCRGNRSPVPDVEDPATEEPGESFCDKVMRWFQAMLQRLQTWWHGVLAWVKEKVVALVHAVQALWKQFQSFCCSLSELFMSSFQSYGAPRGDKEELTPQ

SEQ ID NO: 7063 - protein, 234 aa, Homo Sapiens
MCFPKVLSDDMKKLKARMVMLLPTSAQGLGAWVSACDTEDTVGHLGPWRDKDPALWCQLCLSSQHQAIERFYDKMQNAESGRGQVMSSLAELEDDFKEGYLETVAAYYEEQHPELTPLLEKERDGLRCRGNRSPVPDVEDPATEEPGESFCDKVMRWFQAMLQRLQTWWHGVLAWVKEKVVALVHAVQALWKQFQSFCCSLSELFMSSFQSYGAPRGDKEELTPQKCSEPQSSK

SEQ ID NO: 7064 - protein, 234 aa, Homo Sapiens; identical to SEQ ID NO: 7063

SEQ ID NO: 7065 - protein, 234 aa, Homo Sapiens; identical to SEQ ID NO: 7063

SEQ ID NO: 7066 - protein, 221 aa, Homo Sapiens
MCFPKVLSDDMKKLKARMVMLLPTSAQGLGAWVSACDTEDTVGHLGPWRDKDPALWCQLCLSSQHQAIERFYDKMQNAESGRGQVMSSLAELEDDFKEGYLETVAAYYEEQHPELTPLLEKERDGLRCRGNRSPVPDVEDPATEEPGESFCDKVMRWFQAMLQRLQTWWHGVLAWVKEKVVALVHAVQALWKQFQSFCCSLSELFMSSFQSYGATRGARRS

SEQ ID NO: 7067 - protein, 168 aa, Homo Sapiens
MCFPKVLSDDMKKLKARMVMSSLAELEDDFKEGYLETVAAYYEEQHPELTPLLEKERDGLRCRGNRSPVPDVEDPATEEPGESFCDKVMRWFQAMLQRLQTWWHGVLAWVKEKVVALVHAVQALWKQFQSFCCSLSELFMSSFQSYGAPRGDKEELTPQKCSEPQSSK

SEQ ID NO: 7068 - protein, 168 aa, Homo Sapiens; identical to SEQ ID NO: 7067

SEQ ID NO: 7069 - protein, 168 aa, Homo Sapiens; identical to SEQ ID NO: 7067

SEQ ID NO: 7070 - protein, 148 aa, Homo Sapiens
MCFPKVLSDDMKKLKARMVMSSLAELEELTPLLEKERDGLRCRGNRSPVPDVEDPATEEPGESFCDKVMRWFQAMLQRLQTWWHGVLAWVKEKVVALVHAVQALWKQFQSFCCSLSELFMSSFQSYGAPRGDKEELTPQKCSEPQSSK

SEQ ID NO: 7071 - protein, 178 aa, Homo Sapiens
MKKLKARMHQAIERFYDKMQNAESGRGQVMSSLAELEDDFKEGYLETVAAYYEEQHPELTPLLEKERDGLRCRGNRSPVPDVEDPATEEPGESFCDKVMRWFQAMLQRLQTWWHGVLAWVKEKVVALVHAVQALWKQFQSFCCSLSELFMSSFQSYGAPRGDKEELTPQKCSEPQSSK

SEQ ID NO: 7072 - protein, 54 aa, Homo Sapiens
MPRGFTWLRYLGIFLGVALGNEPLEMWPLTQNEECTVTGFLRDKLQYRSRLQYM

SEQ ID NO: 7073 - protein, 242 aa, Homo Sapiens
MPRGFTWLRYLGIFLGVALGNEPLEMWPLTQNEECTVTGFLRDKLQYRSRLQYMKHYFPINYKISVPYEGVFRIANVTRLQRAQVSERELRYLWVLVSLSATESVQDVLLEGHPSWKYLQEVETLLLNVQQGLTDVEVSPKVESVLSLLNAPGPNLKLVRPKALLDNCFRVMELLYCSCCKQSSVLNWQDCEVPSPQSCSPEPSLQYAATQLYPPPPWSPSSPPHSTGSVRPVRAQGEGLLP

SEQ ID NO: 7074 - protein, 242 aa, Homo Sapiens; identical to SEQ ID NO: 7073

SEQ ID NO: 7075 - protein, 217 aa, Homo Sapiens
MWPLTQNEECTVTGFLRDKLQYRSRLQYMKHYFPINYKISVPYEGVFRIANVTRLQRAQVSERELRYLWVLVSLSATESVQDVLLEGHPSWKYLQEVETLLLNVQQGLTDVEVSPKVESVLSLLNAPGPNLKLVRPKALLDNCFRVMELLYCSCCKQSSVLNWQDCEVPSPQSCSPEPSLQYAATQLYPPPPWSPSSPPHSTGSVRPVRAQGEGLLP

SEQ ID NO: 7076 - protein, 378 aa, Homo Sapiens
MVLLWLTLLLIALPCLLQTKEDPNPPITNLRMKAKAQQLTWDLNRNVTDIECVKDADYSMPAVNNSYCQFGAISLCEVTNYTVRVANPPFSTWILFPENSGKPWAGAENLTCWIHDVDFLSCSWAVGPGAPADVQYDLYLNVANRRQQYECLHYKTDAQGTRIGCRFDDISRLSSGSQSSHILVRGRSAAFGIPCTDKFVVFSQIEILTPPNMTAKCNKTHSFMHWKMRSHFNRKFRYELQIQKRMQPVITEQVRDRTSFQLLNPGTYTVQIRARERVYEFLSAWSTPQRFECDQEEGANTRAWRTSLLIALGTLLALVCVFVICRRYLVMQRLFPRIPHMKDPIGDSFQNDKLVVWEAGKAGLEECLVTEVQVVQKT

SEQ ID NO: 7077 - protein, 164 aa, Homo Sapiens
MVLLWLTLLLIALPCLLQTKEGGKPWAGAENLTCWIHDVDFLSCSWAVGPGAPADVQYDLYLNVANRRQQYECLHYKTDAQGTRIGCRFDDISRLSSGSQSSHILVRGRSAAFGIPCTDKFVVFSQIEILTPPNMTAKCNKTHSFMHWKMRSHFNRKFRYELQI

SEQ ID NO: 7078 - protein, 300 aa, Homo Sapiens
MVLLWLTLLLIALPCLLQTKEGGKPWAGAENLTCWIHDVDFLSCSWAVGPGAPADVQYDLYLNVANRRQQYECLHYKTDAQGTRIGCRFDDISRLSSGSQSSHILVRGRSAAFGIPCTDKFVVFSQIEILTPPNMTAKCNKTHSFMHWKMRSHFNRKFRYELQIQKRMQPVITEQVRDRTSFQLLNPGTYTVQIRARERVYEFLSAWSTPQRFECDQEEGANTRAWRTSLLIALGTLLALVCVFVICRRYLVMQRLFPRIPHMKDPIGDSFQNDKLVVWEAGKAGLEECLVTEVQVVQKT

SEQ ID NO: 7079 - protein, 137 aa, Homo Sapiens
MGLTSQLLPPLFFLLACAGNFVHGHKCDITLQEIIKTLNSLTEQKNTTEKETFCRAATVLRQFYSHHEKDTRCLGATAQQFHRHKQLIRFLKRLDRNLWGLAGLNSCPVKEANQSTLENFLERLKTIMREKYSKCSS

SEQ ID NO: 7080 - protein, 153 aa, Homo Sapiens [sequence omitted]

SEQ ID NO: 7081 - protein, 136 aa, Homo Sapiens
MGLTSQLLPPLFFLLACAGNFVHGHKCDITLQEIIKTLNSLTEQKTLCTELTVTDIFAASKQHACLPTSRHTGTICRPPSARVPSTSTRLQSPERTQLRRKPSAGLRLCSGSSTATMRRTLAAWVRLHSSSTGTSS

SEQ ID NO: 7082 - protein, 32 aa, Homo Sapiens
MAPLALHLLVLVPILLSLVASQDWKAERSQDP

SEQ ID NO: 7083 - protein, 150 aa, Homo Sapiens
MAPLALHLLVLVPILLSLVASQDWKAERSQDPFEKCMQDPDYEQLLKVTILEADNRIGGRIFTYRDQNTGWIGELGAMRMPSSHRILHKLCQGLGLNLTKFTQYDKNTWTEVHEVKLRNYVVEKVPEKLGYALRPQEKGHSPEDIYQMAL

SEQ ID NO: 7084 - protein, 71 aa, Homo Sapiens
MAPLALHLLVLVPILLSLVASQDWKAERSQDPFEKCMQDPDYEQLLKVVTWGLNRTLKPQRVIVVGAGVAG

SEQ ID NO: 7085 - protein, 567 aa, Homo Sapiens
MAPLALHLLVLVPILLSLVASQDWKAERSQDPFEKCMQDPDYEQLLKVVTWGLNRTLKPQRVIVVGAGVAGLVAAKVLSDAGHKVTILEADNRIGGRIFTYRDQNTGWIGELGAMRMPSSHRILHKLCQGLGLNLTKFTQYDKNTWTEVHEVKLRNYVVEKVPEKLGYALRPQEKGHSPEDIYQMALNQALKDLKALGCRKAMKKFERHTLLEYLLGEGNLSRPAVQLLGDVMSEDGFFYLSFAEALRAHSCLSDRLQYSRIVGGWDLLPRALLSSLSGLVLLNAPVVAMTQGPHDVHVQIETSPPARNLKVLKADVVLLTASGPAVKRITFSPPLPRHMQEALRRLHYVPATKVFLSFRRPFWREEHIEGGHSNTDRPSRMIFYPPPREGALLLASYTWSDAAAAFAGLSREEALRLALDDVAALHGPVVRQLWDGTGVVKRWAEDQHSQGGFVVQPPALWQTEKDDWTVPYGRIYFAGEHTAYPHGWVETAVKSALRAAIKINSRKGPASDTASPEGHASDMEGQGHVHGVASSPSHDLAKEEGSHPPVQGQLSLQNTTHTRTSH

SEQ ID NO: 7086 - protein, 82 aa, Homo Sapiens
MPNDDFCPGLTIKAMGAERAPQRQPCNTISHRESWPHWPCTSSSSSPSSSAWWPPRTGRLNAAKTPSRNACRILTMSSCSRW

SEQ ID NO: 7087 - protein, 106 aa, Homo Sapiens
MPNDDFCPGLTIKAMGAERAPQRQPCTLHLLVLVPILLSLVASQDWKAERSQDPFEKCMQDPDYEQLLKVVTWGLNRTLKPQRVIVVGAGVAGLVAAKVLSDAGHK

SEQ ID NO: 7088 - protein, 589 aa, Homo Sapiens
MPNDDFCPGLTIKAMGAERAPQRQPCTLHLLVLVPILLSLVASQDWKAERSQDPFEKCMQDPDYEQLLKVVTWGLNRTLKPQRVIVVGAGVAGLVAAKVLSDAGHKVTILEADNRIGGRIFTYRDQNTGWIGELGAMRMPSSHRILHKLCQGLGLNLTKFTQYDKNTWTEVHEVKLRNYVVEKVPEKLGYALRPQEKGHSPEDIYQMALNQALKDLKALGCRKAMKKFERHTLLEYLLGEGNLSRPAVQLLGDVMSEDGFFYLSFAEALRAHSCLSDRLQYSRIVGGWDLLPRALLSSLSGLVLLNAPVVAMTQGPHDVHVQIETSPPARNLKVLKADVVLLTASGPAVKRITFSPPLPRHMQEALRRLHYVPATKVFLSFRRPFWREEHIEGGHSNTDRPSRMIFYPPPREGALLLASYTWSDAAAAFAGLSREEALRLALDDVAALHGPVVRQLWDGTGVVKRWAEDQHSQGGFVVQPPALWQTEKDDWTVPYGRIYFAGEHTAYPHGWVETAVKSALRAAIKINSRKGPASDTASPEGHASDMEGQGHVHGVASSPSHDLAKEEGSHPPVQGQLSLQNTTHTRTSH

SEQ ID NO: 7089 - protein, 589 aa, Homo Sapiens; identical to SEQ ID NO: 7088

SEQ ID NO: 7090 - protein, 10 aa, Homo Sapiens
MGWLCSGLLF

SEQ ID NO: 7091 - protein, 66 aa, Homo Sapiens
MGWLCSGLLFPVSCLVLLQVASSGLFRMPCGERKRVEARRSGGRSGVEEMRGSGSLWEVDLRTDWN

SEQ ID NO: 7092 - protein, 66 aa, Homo Sapiens; identical to SEQ ID NO: 7091

SEQ ID NO: 7093 - protein, 66 aa, Homo Sapiens; identical to SEQ ID NO: 7091

SEQ ID NO: 7094 - protein, 64 aa, Homo Sapiens
MGWLCSGLLFPVSCLVLLQVASSGNMKVLQEPTCVSDYMSISTCEWKMNGPTNCSTELRLLYQL

SEQ ID NO: 7095 - protein, 120 aa, Homo Sapiens
MGWLCSGLLFPVSCLVLLQVASSGNMKVLQEPTCVSDYMSISTCEWKMNGPTNCSTELRLLYQLVFLLSEAHTCIPENNGGAGCVCHLLMDDVVSADNYTLDLWAGQQLLWKGSFKPSEH

SEQ ID NO: 7096 - protein, 120 aa, Homo Sapiens; identical to SEQ ID NO: 7095

SEQ ID NO: 7097 - protein, 825 aa, Homo Sapiens
MGWLCSGLLFPVSCLVLLQVASSGNMKVLQEPTCVSDYMSISTCEWKMNGPTNCSTELRLLYQLVFLLSEAHTCIPENNGGAGCVCHLLMDDVVSADNYTLDLWAGQQLLWKGSFKPSEHVKPRAPGNLTVHTNVSDTLLLTWSNPYPPDNYLYNHLTYAVNIWSENDPADFRIYNVTYLEPSLRIAASTLKSGISYRARVRAWAQCYNTTWSEWSPSTKWHNSYREPFEQHLLLGVSVSCIVILAVCLLCYVSITKIKKEWWDQIPNPARSRLVAIIIQDAQGSQWEKRSRGQEPAKCPHWKNCLTKLLPCFLEHNMKRDEDPHKAAKEMPFQGSGKSAWCPVEISKTVLWPESISVVRCVELFEAPVECEEEEEVEEEKGSFCASPESSRDDFQEGREGIVARLTESLFLDLLGEENGGFCQQDMGESCLLPPSGSTSAHMPWDEFPSAGPKEAPPWGKEQPLHLEPSPPASPTQSPDNLTCTETPLVIAGNPAYRSFSNSLSQSPCPRELGPDPLLARHLEEVEPEMPCVPQLSEPTTVPQPEPETWEQILRRNVLQHGAAAAPVSAPTSGYQEFVHAVEQGGTQASAVVGLGPPGEAGYKAFSSLLASSAVSPEKCGFGASSGEEGYKPFQDLIPGCPGDPAPVPVPLFTFGLDREPPRSPQSSHLPSSSPEHLGLEPGEKVEDMPKPPLPQEQATDPLVDSLGSGIVYSALTCHLCGHLKQCHGQEDGGQTPVMASPCCGCCCGDRSSPPTTPLRAPDPSPGGVPLEASLCPASLAPSGISEKSKSSSSFHPAPGNAQSSSQTPKIVNFVSVGPTYMRVS

SEQ ID NO: 7098 - protein, 825 aa, Homo Sapiens; identical to SEQ ID NO: 7097

SEQ ID NO: 7099 - protein, 124 aa, Homo Sapiens
MGWLCSGLLFPVSCLVLLQVASSGNMKVLQEPTCVSDYMSISTCEWKMNGPTNCSTELRLLYQLVFLLSEAHTCIPENNGGAGCVCHLLMDDVVSADNYTLDLWAGQQLLWKGSFKPSEHVQNL

SEQ ID NO: 7100 - protein, 810 aa, Homo Sapiens
MQKDARREGNMKVLQEPTCVSDYMSISTCEWKMNGPTNCSTELRLLYQLVFLLSEAHTCIPENNGGAGCVCHLLMDDVVSADNYTLDLWAGQQLLWKGSFKPSEHVKPRAPGNLTVHTNVSDTLLLTWSNPYPPDNYLYNHLTYAVNIWSENDPADFRIYNVTYLEPSLRIAASTLKSGISYRARVRAWAQCYNTTWSEWSPSTKWHNSYREPFEQHLLLGVSVSCIVILAVCLLCYVSITKIKKEWWDQIPNPARSRLVAIIIQDAQGSQWEKRSRGQEPAKCPHWKNCLTKLLPCFLEHNMKRDEDPHKAAKEMPFQGSGKSAWCPVEISKTVLWPESISVVRCVELFEAPVECEEEEEVEEEKGSFCASPESSRDDFQEGREGIVARLTESLFLDLLGEENGGFCQQDMGESCLLPPSGSTSAHMPWDEFPSAGPKEAPPWGKEQPLHLEPSPPASPTQSPDNLTCTETPLVIAGNPAYRSFSNSLSQSPCPRELGPDPLLARHLEEVEPEMPCVPQLSEPTTVPQPEPETWEQILRRNVLQHGAAAAPVSAPTSGYQEFVHAVEQGGTQASAVVGLGPPGEAGYKAFSSLLASSAVSPEKCGFGASSGEEGYKPFQDLIPGCPGDPAPVPVPLFTFGLDREPPRSPQSSHLPSSSPEHLGLEPGEKVEDMPKPPLPQEQATDPLVDSLGSGIVYSALTCHLCGHLKQCHGQEDGGQTPVMASPCCGCCCGDRSSPPTTPLRAPDPSPGGVPLEASLCPASLAPSGISEKSKSSSSFHPAPGNAQSSSQTPKIVNFVSVGPTYMRVS

SEQ ID NO: 7101 - protein, 133 aa, Homo Sapiens
PSTKWHNSYREPFEQHLLLGVSVSCIVILAVCLLCYVSITKIKKEWWDQIPNPARSRLVAIIIQDAQGSQWEKRSRGPWAPRLVNELLAAPSTASAADCPCCNCPRHVLPTRSWPTWRPTCLCLTELEAEPRN

SEQ ID NO: 7102 - protein, 49 aa, Homo Sapiens
  misc_feature (1)..(1): Xaa can be any naturally occurring amino acid
XCVCHLLMDDVVSADNYTLDLWAGQQLLWKGSFKPSEHVLPPLKRSWSQ

SEQ ID NO: 7103 - protein, 193 aa, Homo Sapiens
  misc_feature (1)..(1): Xaa can be any naturally occurring amino acid
XNVTYLEPSLRIAASTLKSGISYRARVRAWAQCYNTTWSEWSPSTKWHNSYREPFEQHLLLGVSVSCIVILAVCLLCYVSITKIKKEWWDQIPNPARSRLVAIIIQDAQGSQWEKRSRGQEPAKCPLQGTAGGGVFWKRGLLAKPPEFHWCVRHWKNCLTKLLPCFLEHNMKRDEDPHKAAKEMPFQGSGKSA

SEQ ID NO: 7104 - protein, 51 aa, Homo Sapiens
MGVVVGWIGDPGSGTLRIPVPVHKNHQLCTEEIFQGIGTLESQTVQGGTVE

SEQ ID NO: 7105 - protein, 134 aa, Homo Sapiens
MRMLLHLSLLALGAAYVYAIPTEIPTSALVKETLALLSTHRTLLIANETLRIPVPVHKNHQLCTEEIFQGIGTLESQTVQGGTVERLFKNLSLIKKYIDGQKKKCGEERRRVNQFLDYLQEFLGVMNTEWIIES

SEQ ID NO: 7106 - protein, 109 aa, Homo Sapiens
MIIVAHVLLILLGATEILQADLLPDEKISLLPPVNFTIKVTGLAQVLLQWKPNPDQEQRNVNLEYQVKINAPKEDDYETRITESKCVTILHKGFSASVRTILQNDHSLL

SEQ ID NO: 7107 - protein, 196 aa, Homo Sapiens
MIIVAHVLLILLGATEILQADLLPDEKISLLPPVNFTIKVTGLAQVLLQWKPNPDQEQRNVNLEYQVKINAPKEDDYETRITESKCVTILHKGFSASVRTILQNDHSLLASSWASAELHAPPGSPGTSIVNLTCTTNTTEDNYSRLRSYQVSLHCTWLVGTDAPEDTQYFLYYRYGSWTEECQEYSKDTLGRNIAC

SEQ ID NO: 7108 - protein, 420 aa, Homo Sapiens
MIIVAHVLLILLGATEILQADLLPDEKISLLPPVNFTIKVTGLAQVLLQWKPNPDQEQRNVNLEYQVKINAPKEDDYETRITESKCVTILHKGFSASVRTILQNDHSLLASSWASAELHAPPGSPGTSIVNLTCTTNTTEDNYSRLRSYQVSLHCTWLVGTDAPEDTQYFLYYRYGSWTEECQEYSKDTLGRNIACWFPRTFILSKGRDWLAVLVNGSSKHSAIRPFDQLFALHAIDQINPPLNVTAEIEGTRLSIQWEKPVSAFPIHCFDYEVKIHNTRNGYLQIEKLMTNAFISIIDDLSKYDVQVRAAVSSMCREAGLWSEWSQPIYVGNDEHKPLREWFVIVIMATICFILLILSLICKICHLWIKLFPPIPAPKSNIKDLFVTTNYEKAGSSETEIEVICYIEKPGVETLEDSVF

SEQ ID NO: 7109 - protein, 335 aa, Homo Sapiens
MIIVAHVLLILLGATEILQADLLPDEKISLLPPVNFTIKVTGLAQVLLQWKPNPDQEQRNVNLEYQVKINAPKEDDYETRITESKCVTILHKGFSASVRTILQNDHSLLASSWASAELHAPPGSPGTSIVNLTCTTNTTEDNYSRLRSYQVSLHCTWLVGTDAPEDTQYFLYYRYGSWTEECQEYSKDTLGRNIACWFPRTFILSKGRDWLAVLVNGSSKHSAIRPFDQLFALHAIDQINPPLNVTAEIEGTRLSIQWEKPVSAFPIHCFDYEVKIHNTRNGYLQIEKLMTNAFISIIDDLSKYDVQVRAAVSSMCREAGLWSEWSQPIYVGFSR

SEQ ID NO: 7110 - protein, 335 aa, Homo Sapiens; identical to SEQ ID NO: 7109

SEQ ID NO: 7111 - protein, 333 aa, Homo Sapiens
MIIVAHVLLILLGATEILQADLLPDEKISLLPPVNFTIKVTGLAQVLLQWKPNPDQEQRNVNLEYQVKINAPKEDDYETRITESKCVTILHKGFSASVRTILQNDHSLLASSWASAELHAPPGSPGTSIVNLTCTTNTTEDNYSRLRSYQVSLHCTWLVGTDAPEDTQYFLYYRYGSWTEECQEYSKDTLGRNIACWFPRTFILSKGRDWLAVLVNGSSKHSAIRPFDQLFALHAIDQINPPLNVTAEIEGTRLSIQWEKPVSAFPIHCFDYEVKIHNTRNGYLQIEKLMTNAFISIIDDLSKYDVQVRAAVSSMCREAGLWSEWSQPIYVGK

SEQ ID NO: 7112 - protein, 420 aa, Homo Sapiens; identical to SEQ ID NO: 7108

SEQ ID NO: 7113 - protein, 378 aa, Homo Sapiens
MIIVAHVLLILLGATEILQADLLPDEKISLLPPVNFTIKVTGLAQVLLQWKPNPDQEQRNVNLEYQVKINAPKEDDYETRITESKCVTILHKGFSASVRTILQNDHSLLASSWASAELHAPPGSPGTSIVNLTCTTNTTEDNYSRLRSYQVSLHCTWLVGTDAPEDTQYFLYYRYGSWTEECQEYSKDTLGRNIACWFPRTFILSKGRDWLAVLVNGSSKHSAIRPFDQLFALHAIDQINPPLNVTAEIEGTRLSIQWEKPVSAFPIHCFDYEVKIHNTRNGYLQIEKLMTNAFISIIDDLSKYDVQVRAAVSSMCREAGLWSEWSQPIYVGNDEHKPLREWFVIVIMATICFILLILSLICKIKLGPVRRKLKSSVI

SEQ ID NO: 7114 - protein, 333 aa, Homo Sapiens; identical to SEQ ID NO: 7111

SEQ ID NO: 7115 - protein, 325 aa, Homo Sapiens
MIIVAHVLLILLGATEILQADLLPDEKISLLPPVNFTIKVTGLAQVLLQWKPNPDQEQRNVNLEYQVKINAPKEDDYETRITESKCVTILHKGFSASVRTILQNDHSLLASSWASAELHAPPGSPGTSIVNLTCTTNTTEDNYSRLRSYQVSLHCTWLVGTDAPEDTQYFLYYRYGSWTEECQEYSKDTLGRNIACWFPRTFILSKGRDWLAVLVNGSSKHSAIRPFDQLFALHAIGNDEHKPLREWFVIVIMATICFILLILSLICKICHLWIKLFPPIPAPKSNIKDLFVTTNYEKAGSSETEIEVICYIEKPGVETLEDSVF

SEQ ID NO: 7116 - protein, 136 aa, Homo Sapiens
MCESSKEALAENNLNLPKMAEKDGCFQSGFNEETCLVKIITGLLEFEVYLEYLQNRFESSEEQARAVQMSTKVLIQFLQKKAKNLDAITTPDPTTNASLLTKLQAQNQWLQDMTTHLILRSFKEFLQSSLRALRQM

SEQ ID NO: 7117 - protein, 122 aa, Homo Sapiens
MCESSKEALAENNLNLPKMAEKDGCFQSGFNEETCLVKIITGLLEFEVYLEYLQNRFESSEEQARAVQMSTKVLIQFLQKKVGVSSFPQLGVGEDRLKDSVLDNSGMQCHFQKRRLHVNKRV

SEQ ID NO: 7118 - protein, 189 aa, Homo Sapiens
MNSFSTIPPGEDSKDVAAPHRQPLTSSERIDKQIRYILDGISALRKETCNKSNMCESSKEALAENNLNLPKMAEKDGCFQSGFNEETCLVKIITGLLEFEVYLEYLQNRFESSEEQARAVQMSTKVLIQFLQKKAKNLDAITTPDPTTNASLLTKLQAQNQWLQDMTTHLILRSFKEFLQSSLRALRQM

SEQ ID NO: 7119 - protein, 152 aa, Homo Sapiens
MNSFSTSAFGPVAFSLGLLLVLPAAFPAPVPPGEDSKDVAAPHRQPLTSSERIDKQIRYILDGISALRKETCNKSNMCESSKEALAENNLNLPKMAEKDGCFQSGFNEETCLVKIITGLLEFEVYLEYLQNRFESSEEQARAVQMSTKVLIQ

SEQ ID NO: 7120 - protein, 212 aa, Homo Sapiens
MNSFSTSAFGPVAFSLGLLLVLPAAFPAPVPPGEDSKDVAAPHRQPLTSSERIDKQIRYILDGISALRKETCNKSNMCESSKEALAENNLNLPKMAEKDGCFQSGFNEETCLVKIITGLLEFEVYLEYLQNRFESSEEQARAVQMSTKVLIQFLQKKAKNLDAITTPDPTTNASLLTKLQAQNQWLQDMTTHLILRSFKEFLQSSLRALRQM

SEQ ID NO: 7121 - protein, 212 aa, Homo Sapiens; identical to SEQ ID NO: 7120

SEQ ID NO: 7122 - protein, 198 aa, Homo Sapiens
MNSFSTSAFGPVAFSLGLLLVLPAAFPAPVPPGEDSKDVAAPHRQPLTSSERIDKQIRYILDGISALRKETCNKSNMCESSKEALAENNLNLPKMAEKDGCFQSGFNEETCLVKIITGLLEFEVYLEYLQNRFESSEEQARAVQMSTKVLIQFLQKKVGVSSFPQLGVGEDRLKDSVLDNSGMQCHFQKRRLHVNKRV

SEQ ID NO: 7123 - protein, 171 aa, Homo Sapiens [sequence omitted]

SEQ ID NO: 7124 - protein, 365 aa, Homo Sapiens [sequence omitted]

SEQ ID NO: 7125 - protein, 468 aa, Homo Sapiens
MLAVGCALLAALLAAPGAALAPRRCPAQEVARGVLTSLPGDSVTLTCPGVEPEDNATVHWVLRKPAAGSHPSRWAGMGRRLLLRSVQLHDSGNYSCYRAGRPAGTVHLLVDVPPEEPQLSCFRKSPLSNVVCEWGPRSTPSLTTKAVLLVRKFQNSPAEDFQEPCQYSQESQKFSCQLAVPEGDSSFYIVSMCVASSVGSKFSKTQTFQGCGILQPDPPANITVTAVARNPRWLSVTWQDPHSWNSSFYRLRFELRYRAERSKTFTTWMVKDLQHHCVIHDAWSGLRHVVQLRAQEEFGQGEWSEWSPEAMGTPWTESRSPPAENEVSTPMQALTTNKDDDNILFRDSANATSLPVQDSSSVPLPTFLVAGGSLAFGTLLCIAIVLRFKKTWKLRALKEGKTSMHPPYSLGQLVPERPRPTPVLVPLISPPVSPSSLGSDNTSSHNRPDARDPRSPYDISNTDYFFPR

SEQ ID NO: 7126 - protein, 352 aa, Homo Sapiens
MLAVGCALLAALLAAPGAALAPRRCPAQEVARGVLTSLPGDSVTLTCPGVEPEDNATVHWVLRKPAAGSHPSRWAGMGRRLLLRSVQLHDSGNYSCYRAGRPAGTVHLLVDVPPEEPQLSCFRKSPLSNVVCEWGPRSTPSLTTKAVLLVRKFQNSPAEDFQEPCQYSQESQKFSCQLAVPEGDSSFYIVSMCVASSVGSKFSKTQTFQGCGILQPDPPANITVTAVARNPRWLSVTWQDPHSWNSSFYRLRFELRYRAERSKTFTTWMVKDLQHHCVIHDAWSGLRHVVQLRAQEEFGQGEWSEWSPEAMGTPWTDRLSPRCPGWSTAVQSQLTATSASWVQAILPPQPPK

SEQ ID NO: 7127 - protein, 190 aa, Homo Sapiens
  misc_feature (1)..(1): Xaa can be any naturally occurring amino acid
XGSKFSKTQTFQGCGILQPDPPANITVTAVARNPRWLSVTWQDPHSWNSSFYRLRFELRYRAERSKTFTTWMVKDLQHHCVIHDAWSGLRHVVQLRAQEEFGQGEWSEWSPEAMGTPWTESRSPPAENEVSTPMQALTTNKDDDNILFRDSANATSLPVQDSSSVPLPTFLVAGGSLAFGTLLCIAIVLR

SEQ ID NO: 7128 - protein, 294 aa, Homo Sapiens
  misc_feature (1)..(1): Xaa can be any naturally occurring amino acid
XRRLLLRSVQLHDSGNYSCYRAGRPAGTVHLLVDVPPEEPQLSCFRKSPLSNVVCEWGPRSTPSLTTKAVLLVRKFQNSPAEDFQEPCQYSQESQKFSCQLAVPEGDSSFYIVSMCVASSVGSKFSKTQTFQGCGILQPDPPANITVTAVARNPRWLSVTWQDPHSWNSSFYRLRFELRYRAERSKTFTTWMVKDLQHHCVIHDAWSGLRHVVQLRAQEEFGQGEWSEWSPEAMGTPWTGFSPQTIPGGIWDPAGESRSPPAENEVSTPMQALTTNKDDDNILFRDSANATSLP

SEQ ID NO: 7129 - protein, 66 aa, Homo Sapiens
MLTLQTWLVQALFIFLTTESTELKNTSGLMFQILQRVILPSGHLTLLQGTILIQKIKCIQMAISLM

SEQ ID NO: 7130 - protein, 918 aa, Homo Sapiens
MLTLQTWLVQALFIFLTTESTGELLDPCGYISPESPVVQLHSNFTAVCVLKEKCMDYFHVNANYIVWKTNHFTIPKEQYTIINRTASSVTFTDIASLNIQLTCNILTFGQLEQNVYGITIISGLPPEKPKNLSCIVNEGKKMRCEWDGGRETHLETNFTLKSEWATHKFADCKAKRDTPTSCTVDYSTVYFVNIEVWVEAENALGKVTSDHINFDPVYKVKPNPPHNLSVINSEELSSILKLTWTNPSIKSVIILKYNIQYRTKDASTWSQIPPEDTASTRSSFTVQDLKPFTEYVFRIRCMKEDGKGYWSDWSEEASGITYEDRPSKAPSFWYKIDPSHTQGYRTVQLVWKTLPPFEANGKILDYEVTLTRWKSHLQNYTVNATKLTVNLTNDRYLATLTVRNLVGKSDAAVLTIPACDFQATHPVMDLKAFPKDNMLWVEWTTPRESVKKYILEWCVLSDKAPCITDWQQEDGTVHRTYLRGNLAESKCYLITVTPVYADGPGSPESIKAYLKQAPPSKGPTVRTKKVGKNEAVLEWDQLPVDVQNGFIRNYTIFYRTIIGNETAVNVDSSHTEYTLSSLTSDTLYMVRMAAYTDEGGKDGPEFTFTTPKFAQGEIEAIVVPVCLAFLLTTLLGVLFCFNKRDLIKKHIWPNVPDPSKSHIAQWSPHTPPRHNFNSKDQMYSDGNFTDVSVVEIEANDKKPFPEDLKSLDLFKKEKINTEGHSSGIGGSSCMSSSRPSISSSDENESSQNTSSTVQYSTVVHSGYRHQVPSVQVFSRSESTQPLLDSEERPEDLQLVDHVDGGDGILPRQQYFKQNCSQHESSPDISHFERSKQVSSVNEEDFVRLKQQISDHISQSCGSGQMKMFQEVSAADAFGPGTEGQVERFETVGMEAATDEGMPKSYLPQTVRQGGYMPQ

SEQ ID NO: 7131 - protein, 918 aa, Homo Sapiens; identical to SEQ ID NO: 7130

SEQ ID NO: 7132 - protein, 857 aa, Homo Sapiens
MLTLQTWLVQALFIFLTTESTGELLDPCGYISPESPVVQLHSNFTAVCVLKEKCMDYFHVNANYIVWKTNHFTIPKEQYTIINRTASSVTFTDIASLNIQLTCNILTFGQLEQNVYGITIISGLPPEKPKNLSCIVNEGKKMRCEWDGGRETHLETNFTLKSEWATHKFADCKAKRDTPTSCTVDYSTVYFVNIEVWVEAENALGKVTSDHINFDPVYKVKPNPPHNLSVINSEELSSILKLTWTNPSIKSVIILKYNIQYRTKDASTWSQIPPEDTASTRSSFTVQDLKPFTEYVFRIRCMKEDGKGYWSDWSEEASGITYEDRPSKAPSFWYKIDPSHTQGYRTVQLVWKTLPPFEANGKILDYEVTLTRWKSHLQNYTVNATKLTVNLTNDRYLATLTVRNLVGKSDAAVLTIPACDFQGNLAESKCYLITVTPVYADGPGSPESIKAYLKQAPPSKGPTVRTKKVGKNEAVLEWDQLPVDVQNGFIRNYTIFYRTIIGNETAVNVDSSHTEYTLSSLTSDTLYMVRMAAYTDEGGKDGPEFTFTTPKFAQGEIEAIVVPVCLAFLLTTLLGVLFCFNKRDLIKKHIWPNVPDPSKSHIAQWSPHTPPRHNFNSKDQMYSDGNFTDVSVVEIEANDKKPFPEDLKSLDLFKKEKINTEGHSSGIGGSSCMSSSRPSISSSDENESSQNTSSTVQYSTVVHSGYRHQVPSVQVFSRSESTQPLLDSEERPEDLQLVDHVDGGDGILPRQQYFKQNCSQHESSPDISHFERSKQVSSVNEEDFVRLKQQISDHISQSCGSGQMKMFQEVSAADAFGPGTEGQVERFETVGMEAATDEGMPKSYLPQTVRQGGYMPQ

SEQ ID NO: 7133 - protein, 329 aa, Homo Sapiens
MLTLQTWLVQALFIFLTTESTGELLDPCGYISPESPVVQLHSNFTAVCVLKEKCMDYFHVNANYIVWKTNHFTIPKEQYTIINRTASSVTFTDIASLNIQLTCNILTFGQLEQNVYGITIISGLPPEKPKNLSCIVNEGKKMRCEWDGGRETHLETNFTLKSEWATHKFADCKAKRDTPTSCTVDYSTVYFVNIEVWVEAENALGKVTSDHINFDPVYKVKPNPPHNLSVINSEELSSILKLTWTNPSIKSVIILKYNIQYRTKDASTWSQIPPEDTASTRSSFTVQDLKPFTEYVFRIRCMKEDGKGYWSDWSEEASGITYEDNIASF

SEQ ID NO: 7134 - protein, 918 aa, Homo Sapiens; identical to SEQ ID NO: 7130

SEQ ID NO: 7135 - protein, 329 aa, Homo Sapiens; identical to SEQ ID NO: 7133

SEQ ID NO: 7136 - protein, 333 aa, Homo Sapiens
MLTLQTWLVQALFIFLTTESTGELLDPCGYISPESPVVQLHSNFTAVCVLKEKCMDYFHVNANYIVWKTNHFTIPKEQYTIINRTASSVTFTDIASLNIQLTCNILTFGQLEQNVYGITIISGLPPEKPKNLSCIVNEGKKMRCEWDGGRETHLETNFTLKSEWATHKFADCKAKRDTPTSCTVDYSTVYFVNIEVWVEAENALGKVTSDHINFDPVYKVKPNPPHNLSVINSEELSSILKLTWTNPSIKSVIILKYNIQYRTKDASTWSQIPPEDTASTRSSFTVQDLKPFTEYVFRIRCMKEDGKGYWSDWSEEASGITYEDTLDKPLGSG

SEQ ID NO: 7137 - protein, 203 aa, Homo Sapiens
MLTLQTWLVQALFIFLTTESTGELLDPCGYISPESPVVQLHSNFTAVCVLKEKLKPNPPHNLSVINSEELSSILKLTWTNPSIKSVIILKYNIQYRTKDASTWSQIPPEDTASTRSSFTVQDLKPFTEYVFRIRCMKEDGKGYWSDWSEEASGITYEDKLKNTSGLMFQILQRVILPSGHLTLLQGTILIQKIKCIQMAISLM

SEQ ID NO: 7138 - protein, 55 aa, Homo Sapiens
MLTLQTWLVQALFIFLTTESTGQHTSLLIAKQNVTPPPHALLIILLCILSTLKSG

SEQ ID NO: 7139 - protein, 115 aa, Homo Sapiens
MFHVSFRYIFGLPPLILVLLPVASSDCDIEGKDGKQYESVLMVSIDQLLDSMKEIGSNCLNNEFNFFKRHICDANKEENKSLKEQKKLNDLCFLKRLLQEIKTCWNKILMGTKEH

SEQ ID NO: 7140 - protein, 159 aa, Homo Sapiens
MFHVSFRYIFGLPPLILVLLPVASSDCDIEGKDGKQYESVLMVSIDQLLDSMKEIGSNCLNNEFNFFKRHICDANKEGMFLFRAARKLRQFLKMNSTGDFDLHLLKVSEGTTILLNCTGQEENKSLKEQKKLNDLCFLKRLLQEIKTCWNKILMGTKEH

SEQ ID NO: 7141 - protein, 177 aa, Homo Sapiens
MFHVSFRYIFGLPPLILVLLPVASSDCDIEGKDGKQYESVLMVSIDQLLDSMKEIGSNCLNNEFNFFKRHICDANKEGMFLFRAARKLRQFLKMNSTGDFDLHLLKVSEGTTILLNCTGQVKGRKPAALGEAQPTKSLEENKSLKEQKKLNDLCFLKRLLQEIKTCWNKILMGTKEH

SEQ ID NO: 7142 - protein, 133 aa, Homo Sapiens
MFHVSFRYIFGLPPLILVLLPVASSDCDIEGKDGKQYESVLMVSIDQLLDSMKEIGSNCLNNEFNFFKRHICDANKVKGRKPAALGEAQPTKSLEENKSLKEQKKLNDLCFLKRLLQEIKTCWNKILMGTKEH

SEQ ID NO: 7143 - protein, 71 aa, Homo Sapiens
MFHVSFRYIFGLPPLILVLLPVASSDCDIEGKDGKQYESVLMVSIDQLLNQPYKKKEKRTERKQQSAMSNN

SEQ ID NO: 7144 - protein, 71 aa, Homo Sapiens; identical to SEQ ID NO: 7143

SEQ ID NO: 7145 - protein, 37 aa, Homo Sapiens
MFHVSFRYIFGLPPLILVLLPVASSDCDIEGQHERNW

SEQ ID NO: 7146 - protein, 37 aa, Homo Sapiens; identical to SEQ ID NO: 7145

SEQ ID NO: 7147 - protein, 65 aa, Homo Sapiens
AAMYEIKVRSIPDHYFKGFWSEWSPSYYFRTPEINNSSGLSLSYGPVSPIIRRLWNIFVRNQEKI

SEQ ID NO: 7148 - protein, 52 aa, Homo Sapiens
MTILGTTFGMVFSLLQVVSGESGYAQNGDLEDAELDDYSFSCYSQLEVNGSQ

SEQ ID NO: 7149 - protein, 59 aa, Homo Sapiens
MTILGTTFGMVFSLLQVVSGESGYAQNGDLEDAELDDYSFSCYSQLEVNGSQHSLTCAF

SEQ ID NO: 7150 - protein, 150 aa, Homo Sapiens
MTILGTTFGMVFSLLQVVSGESGYAQNGDLEDAELDDYSFSCYSQLEVNGSQHSLTCAFEDPDVNITNLEFEICGALVEVKCLNFRKLQEIYFIETKKFLLIGKSNICVKVGEKSLTCKKIDLTTIGKKLYIKVWLSLLGYLKTLCLDIL

SEQ ID NO: 7151 - protein, 180 aa, Homo Sapiens
MTILGTTFGMVFSLLQVVSGESGYAQNGDLEDAELDDYSFSCYSQLEVNGSQHSLTCAFEDPDVNITNLEFEICGALVEVKCLNFRKLQEIYFIETKKFLLIGKSNICVKVGEKSLTCKKIDLTTIVKPEAPFDLSVVYREGANDFVVTFNTSHLQKKYVKVLMHDVAYRQEKDENKWTD

SEQ ID NO: 7152 - protein, 459 aa, Homo Sapiens
MTILGTTFGMVFSLLQVVSGESGYAQNGDLEDAELDDYSFSCYSQLEVNGSQHSLTCAFEDPDVNITNLEFEICGALVEVKCLNFRKLQEIYFIETKKFLLIGKSNICVKVGEKSLTCKKIDLTTIVKPEAPFDLSVVYREGANDFVVTFNTSHLQKKYVKVLMHDVAYRQEKDENKWTHVNLSSTKLTLLQRKLQPAAMYEIKVRSIPDHYFKGFWSEWSPSYYFRTPEINNSSGEMDPILLTISILSFFSVALLVILACVLWKKRIKPIVWPSLPDHKKTLEHLCKKPRKNLNVSFNPESFLDCQIHRVDDIQARDEVEGFLQDTFPQQLEESEKQRLGGDVQSPNCPSEDVVITPESFGRDSSLTCLAGNVSACDAPILSSSRSLDCRESGKNGPHVYQDLLLSLGTTNSTLPPPFSLQSGILTLNPVAQGQPILTSLGSNQEEAYVTMSSFYQNQ

SEQ ID NO: 7153 - protein, 261 aa, Homo Sapiens
MTILGTTFGMVFSLLQVVSGESGYAQNGDLEDAELDDYSFSCYSQLEVNGSQHSLTCAFEDPDVNITNLEFEICGALVEVKCLNFRKLQEIYFIETKKFLLIGKSNICVKVGEKSLTCKKIDLTTIVKPEAPFDLSVVYREGANDFVVTFNTSHLQKKYVKVLMHDVAYRQEKDENKWTHVNLSSTKLTLLQRKLQPAAMYEIKVRSIPDHYFKGFWSEWSPSYYFRTPEINNSSGLSLSYGPVSPIIRRLWNIFVRNQEK

SEQ ID NO: 7154 - protein, 144 aa, Homo Sapiens
MLLAMVLTSALLLCSVAGQGCPTLAGILDINFLINKMQEDPASKCHCSANVTSCLCLGIPSDNCTRPCFSERLSQMTNTTMQTRYPLIFSRVKKSVEVLKNNKCPYFSCEQPCNQTTAGNALTFLKSLLEIFQKEKMRGMRGKI

SEQ ID NO: 7155 - protein, 457 aa, Homo Sapiens
MAWPKLPAPWLLLCTWLPAGCLSLLVTVQHTERYVTLFASIILKCDYTTSAQLQDVVVTWRFKSFCKDPIFDYYSASYQAALSLGQDPSNDCNDNQREVRIVAQRRGQNEPVLGVDYRQRKITIQNPLARHRYMKQAQALGPQMMGKPLYWGADRSSQVSSYPMHPLLQRDLSLPSSLPQMPMTQTTNQPPIANGVLEYLEKELRNLNLAQPLPPDLKGRFGHPCSMLSSLGSEVVERRIIHLPPLIRDLSSSRRTSDSLHQQWLTPIPSRPWDLREGRSHHHYPDFHQELQDRGPKSWALERRELDPSWSGRHRSSRLNGSPIHWSDRDSLSDVPSSSEARWRPSHPPFRSRCQERPRRPSPRESTQRHGRRRRHRSYSPPLPSGLSSWSSEEDKERQPQSWRAHRRGSHSPHWPEEKPPSYRSLDITPGKNSRKKGSVERRSEKDSSHSGRSVVI

SEQ ID NO: 7156 - protein, 546 aa, Homo Sapiens
MAWPKLPAPWLLLCTWLPAGCLSLLVTVQHTERYVTLFASIILKCDYTTSAQLQDVVVTWRFKSFCKDPIFDYYSASYQAALSLGQDPSNDCNDNQREVRIVAQRRGQNEPVLGVDYRQRKITIQNRADLVINEVMWWDHGVYYCTIEAPGDTSGDPDKEVKLIVLHWLTVIFIILGALLLLLLIGVCWCQCCPQYCCCYIRCPCCPAHCCCPEEALARHRYMKQAQALGPQMMGKPLYWGADRSSQVSSYPMHPLLQRDLSLPSSLPQMPMTQTTNQPPIANGVLEYLEKELRNLNLAQPLPPDLKGRFGHPCSMLSSLGSEVVERRIIHLPPLIRDLSSSRRTSDSLHQQWLTPIPSRPWDLREGRSHHHYPDFHQELQDRGPKSWALERRELDPSWSGRHRSSRLNGSPIHWSDRDSLSDVPSSSEARWRPSHPPFRSRCQERPRRPSPRESTQRHGRRRRHRSYSPPLPSGLSSWSSEEDKERQPQSWRAHRRGSHSPHWPEEKPPSYRSLDITPGKNSRKKGSVERRSEKDSSHSGRSVVI

SEQ ID NO: 7157 - protein, 546 aa, Homo Sapiens; identical to SEQ ID NO: 7156

SEQ ID NO: 7158 - protein, 265 aa, Homo Sapiens
MAWPKLPAPWLLLCTWLPAGCLSLLVTVQHTERYVTLFASIILKCDYTTSAQLQDVVVTWRFKSFCKDPIFDYYSASYQAALSLGQDPSNDCNDNQREVRIVAQRRGQNEPVLGVDYRQRKITIQNRADLVINEVMWWDHGVYYCTIEAPGDTSGDPDKEVKLIVLHWLTVIFIILGALLLLLLIGVCWCQCCPQYCCCYIRCPCCPAHCCCPEEALARHRYMKQAQALGPQMMGKPLYWGADRSSQVSSYPMHPLLQRASRRCQ

SEQ ID NO: 7159 - protein, 502 aa, Homo Sapiens
MAWPKLPAPWLLLCTWLPAGCLSLLVTVQHTERYVTLFASIILKCDYTTSAQLQDVVVTWRFKSFCKDPIFDYYSASYQAALSLGQDPSNDCNDNQREVRIVAQRRGQNEPVLGVDYRQRKITIQNRADLVINEVMWWDHGVYYCTIEAPGDTSGDPDKEVKLIVLHWLTVIFIILGALLLLLLIGVCWCQCCPQYCCCYIRCPCCPAHCCCPEEDLSLPSSLPQMPMTQTTNQPPIANGVLEYLEKELRNLNLAQPLPPDLKGRFGHPCSMLSSLGSEVVERRIIHLPPLIRDLSSSRRTSDSLHQQWLTPIPSRPWDLREGRSHHHYPDFHQELQDRGPKSWALERRELDPSWSGRHRSSRLNGSPIHWSDRDSLSDVPSSSEARWRPSHPPFRSRCQERPRRPSPRESTQRHGRRRRHRSYSPPLPSGLSSWSSEEDKERQPQSWRAHRRGSHSPHWPEEKPPSYRSLDITPGKNSRKKGSVERRSEKDSSHSGRSVVI

SEQ ID NO: 7160 - protein, 167 aa, Homo Sapiens
MDRVLLRWISLFWLTAMVEGLQVTVPDKKKVAMLFQPTVLRCHFSTSSHQPAVVQWKFKSYCQDRMGESLGMSSTRAQSLSKRNLEWDPYLDCLDSRRTVRVVASKQGSTVTLGDFYRGREITIVHDADLQIGKLMWGDSGLYYCIITTPDDLEGKNEDSVELLVLE

SEQ ID NO: 7161 - protein, 620 aa, Homo Sapiens
MDRVLLRWISLFWLTAMVEGLQVTVPDKKKVAMLFQPTVLRCHFSTSSHQPAVVQWKFKSYCQDRMGESLGMSSTRAQSLSKRNLEWDPYLDCLDSRRTVRVVASKQGSTVTLGDFYRGREITIVHDADLQIGKLMWGDSGLYYCIITTPDDLEGKNEDSVELLVLEWVFVGLVLLGVFLFFVLVGICWCQCCPHSCCCYVRCPCCPDSCCCPQALYEAGKAAKAGYPPSVSGVPGPYSIPSVPLGGAPSSGMLMDKPHPPPLAPSDSTGGSHSVRKGYRIQADKERDSMKVLYYVEKELAQFDPARRMRGRYNNTISELSSLHEEDSNFRQSFHQMRSKQFPVSGDLESNPDYWSGVMGGSSGASRGPSAMEYNKEDRESFRHSQPRSKSEMLSRKNFATGVPAVSMDELAAFADSYGQRPRRADGNSHEARGGSRFERSESRAHSGFYQDDSLEEYYGQRSRSREPLTDADRGWAFSPARRRPAEDAHLPRLVSRTPGTAPKYDHSYLGSARERQARPEGASRGGSLETPSKRSAQLGPRSASYYAWSPPGTYKAGSSQDDQEDASDDALPPYSELELTRGPSYRGRDLPYHSNSEKKRKKEPAKKTNDFPTRMSLVV

SEQ ID NO: 7162 - protein, 580 aa, Homo Sapiens
MDRVLLRWISLFWLTAMVEGLQVTVPDKKKVAMLFQPTVLRCHFSTSSHQPAVVQWKFKSYCQDRMGESLGMSSTRAQSLSKRNLEWDPYLDCLDSRRTVRVVASKQGSTVTLGDFYRGREITIVHDADLQIGKLMWGDSGLYYCIITTPDDLEGKNEDSVELLVLGRTGLLADLLPSFAVEIMPEWVFVGLVLLGVFLFFVLVGICWCQCCPHSCCCYVRCPCCPDSCCCPQAFRKGYRIQADKERDSMKVLYYVEKELAQFDPARRMRGRYNNTISELSSLHEEDSNFRQSFHQMRSKQFPVSGDLESNPDYWSGVMGGSSGASRGPSAMEYNKEDRESFRHSQPRSKSEMLSRKNFATGVPAVSMDELAAFADSYGQRPRRADGNSHEARGGSRFERSESRAHSGFYQDDSLEEYYGQRSRSREPLTDADRGWAFSPARRRPAEDAHLPRLVSRTPGTAPKYDHSYLGSARERQARPEGASRGGSLETPSKRSAQLGPRSASYYAWSPPGTYKAGSSQDDQEDASDDALPPYSELELTRGPSYRGRDLPYHSNSEKKRKKEPAKKTNDFPTRMSLVV

SEQ ID NO: 7163 - protein, 639 aa, Homo Sapiens
MDRVLLRWISLFWLTAMVEGLQVTVPDKKKVAMLFQPTVLRCHFSTSSHQPAVVQWKFKSYCQDRMGESLGMSSTRAQSLSKRNLEWDPYLDCLDSRRTVRVVASKQGSTVTLGDFYRGREITIVHDADLQIGKLMWGDSGLYYCIITTPDDLEGKNEDSVELLVLGRTGLLADLLPSFAVEIMPEWVFVGLVLLGVFLFFVLVGICWCQCCPHSCCCYVRCPCCPDSCCCPQALYEAGKAAKAGYPPSVSGVPGPYSIPSVPLGGAPSSGMLMDKPHPPPLAPSDSTGGSHSVRKGYRIQADKERDSMKVLYYVEKELAQFDPARRMRGRYNNTISELSSLHEEDSNFRQSFHQMRSKQFPVSGDLESNPDYWSGVMGGSSGASRGPSAMEYNKEDRESFRHSQPRSKSEMLSRKNFATGVPAVSMDELAAFADSYGQRPRRADGNSHEARGGSRFERSESRAHSGFYQDDSLEEYYGQRSRSREPLTDADRGWAFSPARRRPAEDAHLPRLVSRTPGTAPKYDHSYLGSARERQARPEGASRGGSLETPSKRSAQLGPRSASYYAWSPPGTYKAGSSQDDQEDASDDALPPYSELELTRGPSYRGRDLPYHSNSEKKRKKEPAKKTNDFPTRMSLVV

SEQ ID NO: 7164 - protein, 437 aa, Homo Sapiens
MDRVLLRWISLFWLTAMVEGLQVTVPDKKKVAMLFQPTVLRCHFSTSSHQPAVVQWKFKSYCQDRMGESLGMSSTRAQSLSKRNLEWDPYLDCLDSRRTVRVVASKQGSTVTLGDFYRGREITIVHDADLQIGKLMWGDSGLYYCIITTPDDLEGKNEDSVELLVLGRTGLLADLLPSFAVEIMPEWVFVGLVLLGVFLFFVLVGICWCQCCPHSCCCYVRCPCCPDSCCCPQALYEAGKAAKAGYPPSVSGVPGPYSIPSVPLGGAPSSGMLMDKPHPPPLAPSDSTGGSHSVRKGYRIQADKERDSMKVLYYVEKELAQFDPARRMRGRYNNTISELSSLHEEDSNFRQSFHQMRSKQFPVSGDLESNPDYWSGVMGGSSGASRGPSAMEYNKEDRESFRHRMTFQPGCPLWSDVVNISLDNEKSDMDYGDKTQI

SEQ ID NO: 7165 - protein, 531 aa, Homo Sapiens
MDRVLLRWISLFWLTAMVEGLQVTVPDKKKVAMLFQPTVLRCHFSTSSHQPAVVQWKFKSYCQDRMGESLGMSSTRAQSLSKRNLEWDPYLDCLDSRRTVRVVASKQGSTVTLGDFYRGREITIVHDADLQIGKLMWGDSGLYYCIITTPDDLEGKNEDSVELLVLGRTGLLADLLPSFAVEIMPVRKGYRIQADKERDSMKVLYYVEKELAQFDPARRMRGRYNNTISELSSLHEEDSNFRQSFHQMRSKQFPVSGDLESNPDYWSGVMGGSSGASRGPSAMEYNKEDRESFRHSQPRSKSEMLSRKNFATGVPAVSMDELAAFADSYGQRPRRADGNSHEARGGSRFERSESRAHSGFYQDDSLEEYYGQRSRSREPLTDADRGWAFSPARRRPAEDAHLPRLVSRTPGTAPKYDHSYLGSARERQARPEGASRGGSLETPSKRSAQLGPRSASYYAWSPPGTYKAGSSQDDQEDASDDALPPYSELELTRGPSYRGRDLPYHSNSEKKRKKEPAKKTNDFPTRMSLVV

SEQ ID NO: 7166 - protein, 512 aa, Homo Sapiens
MDRVLLRWISLFWLTAMVEGLQVTVPDKKKVAMLFQPTVLRCHFSTSSHQPAVVQWKFKSYCQDRMGESLGMSSTRAQSLSKRNLEWDPYLDCLDSRRTVRVVASKQGSTVTLGDFYRGREITIVHDADLQIGKLMWGDSGLYYCIITTPDDLEGKNEDSVELLVLVRKGYRIQADKERDSMKVLYYVEKELAQFDPARRMRGRYNNTISELSSLHEEDSNFRQSFHQMRSKQFPVSGDLESNPDYWSGVMGGSSGASRGPSAMEYNKEDRESFRHSQPRSKSEMLSRKNFATGVPAVSMDELAAFADSYGQRPRRADGNSHEARGGSRFERSESRAHSGFYQDDSLEEYYGQRSRSREPLTDADRGWAFSPARRRPAEDAHLPRLVSRTPGTAPKYDHSYLGSARERQARPEGASRGGSLETPSKRSAQLGPRSASYYAWSPPGTYKAGSSQDDQEDASDDALPPYSELELTRGPSYRGRDLPYHSNSEKKRKKEPAKKTNDFPTRMSLVV

SEQ ID NO: 7167 - protein, 172 aa, Homo Sapiens
MITTSRDPSSRLKMFAKELKLVFPGAQRMNRGRHEVGALVRACKANGVTDLLVVHEHRGTPVGLIVSHLPFGPTAYFTLCNVVMRHDIPDLGTMSEAKPHLITHGFSSRLGKRVSDILRYLFPVPKDDSHRVITFANQDDYISFRHHVYKKTDHRNVELTEVGPRFELKLYM

SEQ ID NO: 7168 - protein, 76 aa, Homo Sapiens
MLRREARLRREYLYRKAREEAQRSAQERKERLRRALEENRLIPTELRREALALQGSLEFDDAGGEGNYTRCDQPRG

SEQ ID NO: 7169 - protein, 248 aa, Homo Sapiens
MLRREARLRREYLYRKAREEAQRSAQERKERLRRALEENRLIPTELRREALALQGSLEFDDAGGEGVTSHVDDEYRWAGVEDPKVMITTSRDPSSRLKMFAKELKLVFPGAQRMNRGRHEVGALVRACKANGVTDLLVVHEHRGTPVGLIVSHLPFGPTAYFTLCNVVMRHDIPDLGTMSEAKPHLITHGFSSRLGKRVSDILRYLFPVPKDDSHRVITFANQDDYISFRHHVYKKTDHRNVELTECT

SEQ ID NO: 7170 - protein, 291 aa, Homo Sapiens
MLRREARLRREYLYRKAREEAQRSAQERKERLRRALEENRLIPTELRREALALQGSLEFDDAGGEGVTSHVDDEYRWAGVEDPKVMITTSRDPSSRLKMFAKELKLVFPGAQRMNRGRHEVGALVRACKANGVTDLLVVHEHRGTPVGLIVSHLPFGPTAYFTLCNVVMRHDIPDLGTMSEAKPHLITHGFSSRLGKRVSDILRYLFPVPKDDSHRVITFANQDDYISFRHHVYKKTDHRNVELTEVGPRFELKLYMIRLGTLEQEATADVEWRWHPYTNTARKRVFLSTE

SEQ ID NO: 7171 - protein, 236 aa, Homo Sapiens
MMLEVKVTIQGVTSHVDDEYRWAGVEDPKVMITTSRDPSSRLKMFAKELKLVFPGAQRMNRGRHEVGALVRACKANGVTDLLVVHEHRGTPVGLIVSHLPFGPTAYFTLCNVVMRHDIPDLGTMSEAKPHLITHGFSSRLGKRVSDILRYLFPVPKDDSHRVITFANQDDYISFRHHVYKKTDHRNVELTEVGPRFELKLYMIRLGTLEQEATADVEWRWHPYTNTARKRVFLSTE

SEQ ID NO: 7172 - protein, 280 aa, Homo Sapiens
  misc_feature (1)..(1): Xaa can be any naturally occurring amino acid
XSKCLPAVFLAHWVLLLVLRVFLPCDENRLIPTELRREALALQGSLEFDDAGGEGVTSHVDDEYRWAGVEDPKVMITTSRDPSSRLKMFAKELKLVFPGAQRMNRGRHEVGALVRACKANGVTDLLVVHEHRGTPVGLIVSHLPFGPTAYFTLCNVVMRHDIPDLGTMSEAKPHLITHGFSSRLGKRVSDILRYLFPVPKDDSHRVITFANQDDYISFRHHVYKKTDHRNVELTEVGPRFELKLYMIRLGTLEQEATADVEWRWHPYTNTARKRVFLSTE

SEQ ID NO: 7173 - protein, 158 aa, Homo Sapiens
ERPNGTSAQPAQVKPEFYRQAELKPCPWTGSNQRRCITFCPTPDQADPCKFLACGEFAQCVKNERTEEAECRCKPGYDSQGSLDGLEPGLCGPGTKECEVLQGKGAPCRLPDHSENQAYKTSVKKFQNQQNNKVISKRNSELLTVEYEEFNHQDWEGN

SEQ ID NO: 7174 - protein, 140 aa, Homo Sapiens
MKQILDSLQAYYRLRVCQEAVWEAYRIFLDRIPDTGEYQDWVSICQQETFCLFDIGKNFSNSQEHLDLLQQRIKQRSFPDRKDEISAEKTLGEPGETIVISTEKNKGKTKPFNILQFGNNHHEHLLPIFCLLSSIIYTYY

SEQ ID NO: 7175 - protein, 797 aa, Homo Sapiens
MYLETRRAIFVFWIFLQVQGTKDISINIYHSETKDIDNPPRNETTESTEKMYKMSTMRRIFDLAKHRTKRSAFFPTGVKVCPQESMKQILDSLQAYYRLRVCQEAVWEAYRIFLDRIPDTGEYQDWVSICQQETFCLFDIGKNFSNSQEHLDLLQQRIKQRSFPDRKDEISAEKTLGEPGETIVISTDVANVSLGPFPLTPDDTLLNEILDNTLNDTKMPTTERETEFAVLEEQRVELSVSLVNQKFKAELADSQSPYYQELAGKSQLQMQKIFKKLPGFKKIHVLGFRPKKEKDGSSSTEMQLTAIFKRHSAEAKSPASDLLSFDSNKIESEEVYHGTMEEDKQPEIYLTATDLKRLISKALEEEQSLDVGTIQFTDEIAGSLPAFGPDTQSELPTSFAVITEDATLSPELPPVEPQLETVDGAEHGLPDTSWSPPAMASTSLSEAPPFFMASSIFSLTDQGTTDTMATDQTMLVPGLTIPTSDYSAISQLALGISHPPASSDDSRSSAGGEDMVRHLDEMDLSDTPAPSEVPELSEYVSVPDHFLEDTTPVSALQYITTSSMTIAPKGRELVVFFSLRVANMAFSNDLFNKSSLEYRALEQQFTQLLVPYLRSNLTGFKQLEILNFRNGSVIVNSKMKFAKSVPYNLTKAVHGVLEDFRSAAAQQLHLEIDSYSLNIEPADQADPCKFLACGEFAQCVKNERTEEAECRCKPGYDSQGSLDGLEPGLCGPGTKECEVLQGKGAPCRLPDHSENQAYKTSVKKFQNQQNNKVISKRNSELLTVEYEEFNHQDWEGN

SEQ ID NO: 7176 - protein, 719 aa, Homo Sapiens
MYLETRRAIFVFWIFLQVQGTKVCQEAVWEAYRIFLDRIPDTGEYQDWVSICQQETFCLFDIGKNFSNSQEHLDLLQQRIKQRSFPDRKDEISAEKTLGEPGETIVISTDVANVSLGPFPLTPDDTLLNEILDNTLNDTKMPTTERETEFAVLEEQRVELSVSLVNQKFKAELADSQSPYYQELAGKSQLQMQKIFKKLPGFKKIHVLGFRPKKEKDGSSSTEMQLTAIFKRHSAEAKSPASDLLSFDSNKIESEEVYHGTMEEDKQPEIYLTATDLKRLISKALEEEQSLDVGTIQFTDEIAGSLPAFGPDTQSELPTSFAVITEDATLSPELPPVEPQLETVDGAEHGLPDTSWSPPAMASTSLSEAPPFFMASSIFSLTDQGTTDTMATDQTMLVPGLTIPTSDYSAISQLALGISHPPASSDDSRSSAGGEDMVRHLDEMDLSDTPAPSEVPELSEYVSVPDHFLEDTTPVSALQYITTSSMTIAPKGRELVVFFSLRVANMAFSNDLFNKSSLEYRALEQQFTQLLVPYLRSNLTGFKQLEILNFRNGSVIVNSKMKFAKSVPYNLTKAVHGVLEDFRSAAAQQLHLEIDSYSLNIEPADQADPCKFLACGEFAQCVKNERTEEAECRCKPGYDSQGSLDGLEPGLCGPGTKECEVLQGKGAPCRLPDHSENQAYKTSVKKFQNQQNNKVISKRNSELLTVEYEEFNHQDWEGN

SEQ ID NO: 7177 - protein, 366 aa, Homo Sapiens
MVLHLLLFLLLTPQGGHSCQGLELARELVLAKVRALFLDALGPPAVTREGGDPGVRRLPRRHALGGFTHRGSEPEEEEDVSQAILFPATDASCEDKSAARGLAQEAEEGLFRYMFRPSQHTRSRQVTSAQLWFHTGLDRQGTAASNSSEPLLGLLALSPGGPVAVPMSLGHAPPHWAVLHLATSALSLLTHPVLVLLLRCPLCTCSARPEATPFLVAHTRTRPPSGGERARRSTPLMSWPWSPSALRLLQRPPEEPAAHANCHRVALNISFQELGWERWIVYPPSFIFHYCHGGCGLHIPPNLSLPVPGAPPTPAQPYSLLPGAQPCCAALPGTMRPLHVRTTSDGGYSFKYETVPNLLTQHCACI

SEQ ID NO: 7178 - protein, 426 aa, Homo Sapiens
MPLLWLRGFLLASCWIIVRSSPTPGSEGHSAAPDCPSCALAALPKDVPNSQPEMVEAVKKHILNMLHLKKRPDVTQPVPKAALLNAIRKLHVGKVGENGYVEIEDDIGRRAEMNELMEQTSEIITFAESGTARKTLHFEISKEGSDLSVVERAEVWLFLKVPKANRTRTKVTIRLFQQQKHPQGSLDTGEEAEEVGLKGERSELLLSEKVVDARKSTWHVFPVSSSIQRLLDQGKSSLDVRIACEQCQESGASLVLLGKKKKKEEEGEGKKKGGGEGGAGADEEKEQSHRPFLMLQARQSEDHPHRRRRRGLECDGKVNICCKKQFFVSFKDIGWNDWIIAPSGYHANYCEGECPSHIAGTSGSSLSFHSTVINHYRMRGHSPFANLKSCCVPTKLRPMSMLYYDDGQNIIKKDIQNMIVEECGCS

SEQ ID NO: 7179 - protein, 426 aa, Homo Sapiens; identical to SEQ ID NO: 7178

SEQ ID NO: 7180 - protein, 426 aa, Homo Sapiens; identical to SEQ ID NO: 7178

SEQ ID NO: 7181 - protein, 407 aa, Homo Sapiens
MDGLPGRALGAACLLLLAAGWLGPEAWGSPTPPPTPAAPPPPPPPGSPGGSQDTCTSCGGFRRPEELGRVDGDFLEAVKRHILSRLQMRGRPNITHAVPKAAMVTALRKLHAGKVREDGRVEIPHLDGHASPGADGQERVSEIISFAETDGLASSRVRLYFFISNEGNQNLFVVQASLWLYLKLLPYVLEKGSRRKVRVKVYFQEQGHGDRWNMVEKRVDLKRSGWHTFPLTEAIQALFERGERRLNLDVQCDSCQELAVVPVFVDPGEESHRPFVVVQARLGDSRHRIRKRGLECDGRTNLCCRQQFFIDFRLIGWNDWIIAPTGYYGNYCEGSCPAYLAGVPGSASSFHTAVVNQYRMRGLNPGTVNSCCIPTKLSTMSMLYFDDEYNIVKRDVPNMIVEECGCA

SEQ ID NO: 7182 - protein, 352 aa, Homo Sapiens
MTSSLLLAFLLLAPTTVATPRAGGQCPACGGPTLELESQRELLLDLAKRSILDKLHLTQRPTLNRPVSRAALRTALQHLHGVPQGALLEDNREQECEIISFAETGLSTINQTRLDFHFSSDRTAGDREVQQASLMFFVQLPSNTTWTLKVRVLVLGPHNTNLTLATQYLLEVDASGWHQLPLGPEAQAACSQGHLTLELVLEGQVAQSSVILGGAAHRPFVAARVRVGGKHQIHRRGIDCQGGSRMCCRQEFFVDFREIGWHDWIIQPEGYAMNFCIGQCPLHIAGMPGIAASFHTAVLNLLKANTAAGTTGGGSCCVPTARRPLSLLYYDRDSNIVKTDIPDMVVEACGCS

SEQ ID NO: 7183 - protein, 274 aa, Homo Sapiens
METAAAVVKLERLEAALTRALRRLQPGSVAPGNGEEVISFATVTDSTSAYSSLLTFHLSTPRSHHLYHARLWLHVLPTLPGTLCLRIFRWGPRRRRQGSRTLLAEHHITNLGWHTLTLPSSGLRGEKSGVLKLQLDCRPLEGNSTVTGQPRRLLDTAGHQQPFLELKIRANEPGAGRARRRTPTCEPATPLCCRRDHYVDFQELGWRDWILQPEGYQLNYCSGQCPPHLAGSPGIAASFHSAVFSLLKANNPWPASTSCCVPTARRPLSLLYLD

SEQ ID NO: 7184 - protein, 350 aa, Homo Sapiens
MRLPDVQLWLVLLWALVRAQGTGSVCPSCGGSKLAPQAERALVLELAKQQILDGLHLTSRPRITHPPPQAALTRALRRLQPGSVAPGNGEEVISFATVTDSTSAYSSLLTFHLSTPRSHHLYHARLWLHVLPTLPGTLCLRIFRWGPRRRRQGSRTLLAEHHITNLGWHTLTLPSSGLRGEKSGVLKLQLDCRPLEGNSTVTGQPRRLLDTAGHQQPFLELKIRANEPGAGRARRRTPTCEPATPLCCRRDHYVDFQELGWRDWILQPEGYQLNYCSGQCPPHLAGSPGIAASFHSAVFSLLKANNPWPASTSCCVPTARRPLSLLYLDHNGNVVKTDVPDMVVEACGCS

SEQ ID NO: 7185 - protein, 104 aa, Homo Sapiens
LDISFPPSYPYSEDARQGEQYMNTRCPAWCDRILMSPSAKELVLRSESEEKVVTYDHIGPNVCMGDHKPVFLAFRIMPGAGKRCQRHERTLREPPCSRGPNTHS

SEQ ID NO: 7186 - protein, 412 aa, Homo Sapiens
MAGKAAAPGTAVLLVTANVGSLFDDPENLQKNWLREFYQVVHTHKPHFMALHCQEFGGKNYEASMSHVDKFVKELLSSDAMKEYNRARVYLDENYKSQEHFTALGSFYFLHESLKNIYQFDFKAKKYRKVAGKEIYSDTLESTPMLEKEKFPQDYFPECKWSRKGFIRTRWCIADCAFDLVNIHLFHDASNLVAWETSPSVYSGIRHKALGYVLDRIIDQRFEKVSYFVFGDFNFRLDSKSVVETLCTKATMQTVRAADTNEVVKLIFRESDNDRKVMLQLEKKLFDYFNQEVFRDNNGTALLEFDKELSVFKDRLYELDISFPPSYPYSEDARQGEQYMNTRCPAWCDRILMSPSAKELVLRSESEEKVVTYDHIGPNVCMGDHKPVFLAFRIMPGAGKPHAHVHKCCVVQ

SEQ ID NO: 7187 - protein, 387 aa, Homo Sapiens
MAGKAAAPGTAVLLVTANVGSLFDDPENLQKNWLREFYQVVHTHKPHFMALHCQEFGGKNYEASMSHVDKFVKELLSSDAMKEYNRARVYLDENYKSQEHFTALGSFYFLHESLKNIYQFDFKAKKYRKVAGKEIYSDTLESTPMLEKEKFPQDYFPECKWSRKGFIRTRWCIADCAFDLVNIHLFHDASNLVAWETSPSVYSGIRHKALGYVLDRIIDQRFEKVSYFVFGDFNFRLDSKSVVETLCTKATMQTVRAADTNEVVKLIFRESDNDRKVMLQLEKKLFDYFNQEVFRDNNGTALLEFDKELSVFKDRLYELDISFPPSYPYSEDARQGEQYMNTRCPAWCDRILMSPSAKELVLRVSVCCPSPGHRGMWSAGSGLAQPW

SEQ ID NO: 7188 - protein, 138 aa, Homo Sapiens
VTANVGSLFDDPENLQKNWLREFYQALGSFYFLHESLKNIYQFDFKAKKYRKVAGKEIYSDTLESTPMLEKEKFPQDYFPECKWSRKGFIRTRWCIADCAFDLVNIHLFHDASNLVAWETSPSVYSGIRHKALGYVLD

SEQ ID NO: 7189 - protein, 278 aa, Homo Sapiens
  misc_feature (1)..(1): Xaa can be any naturally occurring amino acid
XQKNWLREFYQVVHTHKPHFMALHCQEFGGKNYEASMSHVDKFVKELLSSDAMKEYNRARVYLDENYKSQEHFTALGSFYFLHESLKNIYQFDFKAKKYRKVAGKEIYSDTLESTPMLEKEKFPQDYFPECKWSRKGFIRTRWCIADCAFDLVNIHLFHDASNLVAWETSPSVYSGIRHKALGYVLDRIIDQRFEKVSYFVFGDFNFRLDSKSVVELLEFDKELSVFKDRLYELDISFPPSYPYSEDARQGEQYMNTRCPAWCDRILMSPSAKELVLR

SEQ ID NO: 7190 - protein, 92 aa, Homo Sapiens
MALWMRLLPLLALLALWGPDPAAAFVNQHLCGSHLVEALYLVCGERGFFYTPKTRREAEDLQAGELLQLDAARRQPHTRRLLHRERWNKALE

SEQ ID NO: 7191 - protein, 98 aa, Homo Sapiens
MALWMRLLPLLALLALWGPDPAAAFVNQHLCGSHLVEALYLVCGERGFFYTPKTRREAEDLQGSLQPLALEGSLQKRGIVEQCCTSICSLYQLENYCN

SEQ ID NO: 7192 - protein, 110 aa, Homo Sapiens
MALWMRLLPLLALLALWGPDPAAAFVNQHLCGSHLVEALYLVCGERGFFYTPKTRREAEDLQVGQVELGGGPGAGSLQPLALEGSLQKRGIVEQCCTSICSLYQLENYCN

SEQ ID NO: 7193 - protein, 110 aa, Homo Sapiens; identical to SEQ ID NO: 7192

SEQ ID NO: 7194 - protein, 110 aa, Homo Sapiens; identical to SEQ ID NO: 7192

SEQ ID NO: 7195 - protein, 200 aa, Homo Sapiens
MALWMRLLPLLALLALWGPDPAAAFVNQHLCGSHLVEALYLVCGERGFFYTPKTRREAEDLQASALSLSSSTSTWPEGLDATARAPPALVVTANIGQAGGSSSRQFRQRALGTSDSPVLFIHCPGAAGTAQGLEYRGRRVTTELVWEEVDSSPQPQGSESLPAQPPAQPAPQPEPQQAREPSPEVSCCGLWPRRPQRSQN

SEQ ID NO: 7196 - protein, 200 aa, Homo Sapiens; identical to SEQ ID NO: 7195

SEQ ID NO: 7197 - protein, 157 aa, Homo Sapiens
MDPRLPAWALVLLGPALVFALGPAPTPEMREKLCGHHFVRALVRVCGGPRWSTEARRPATGGDQRESHSVSQAGLKLLSSSNPPTLTFQSVGISDVSCYSGWRDDICSMGWWPTVISRWDLACSPCPRPLTITATTVQLPPTLHATAASVAVPNKTC

SEQ ID NO: 7198 - protein, 131 aa, Homo Sapiens
MDPRLPAWALVLLGPALVFALGPAPTPEMREKLCGHHFVRALVRVCGGPRWSTEARRPATGGDRELLQWLERRHLLHGLVADSNLTLGPGLQPLPQTSHHHRHHRAAATNPARYCCLSGCTQQDLLTLCPY

SEQ ID NO: 7199 - protein, 71 aa, Homo Sapiens
  misc_feature (1)..(1): Xaa can be any naturally occurring amino acid
XDPRLPAWALVLLGPALVFALGPAPTPEMREKLCGHHFVRALVRVCGGPRWSTEARRPATGGDPEFHSVPR

SEQ ID NO: 7200 - protein, 139 aa, Homo Sapiens
MASLFRSYLPAIWLLLSQLLRESLAAELRGCGPRFGKHLLSYCPMPEKTFTTTPGGWLLESGRPKEMVSTSNNKDGQALGTTSEFIPNLSPELKKPLSEGQPSLKKIILSRKKRSGRHRFDPFCCEVICDDGTSVKLCT

SEQ ID NO: 7201 - protein, 135 aa, Homo Sapiens
MKGSIFTLFLFSVLFAISEVRSKESVRLCGLEYIRTVIYICASSRWRRHQEGIPQAQQAETGNSFQLPHKREFSEENPAQNLPKVDASGEDRLWGGQMPTEELWKSKKHSVMSRQDLQTLCCTDGCSMTDLSALC

SEQ ID NO: 7202 - protein, 213 aa, Homo Sapiens
MPRLLRLSLLWLGLLLVRFSRELSDISSARKLCGRYLVKEIEKLCGHANWSQFRFEEETPFSRLIAQASEKVEAYSPYQFESPQTASPARGRGTNPVSTSWEEAVNSWEMQSLPEYKDKKGYSPLGKTREFSSSHNINVYIHENAKFQKKRRNKIKTLSNLFWGHHPQRKRRGYSEKCCLTGCTKEELSIACLPYIDFKRLKEKRSSLVTKIY

SEQ ID NO: 7203 - protein, 902 aa, Homo Sapiens
MAVYTYLRLIVDHHGTAQLQALRQKEVDFCISLLRERFMECLMIGRDLVRLLQNVARIPEFELLWKDIIHNPQALSPQFTGILQLLQSRTSRKFLACRLTPDMETKLLFMTSRVRFGQQKRYQDWFQRQYLSTPDSQSLRCDLIRYICGVVHPSNEVLSSDILPRWAIIGWLLTTCTSNVAASNAKLALFYDWLFFSPDKDSIMNIEPAILVMHHSMKPHPAITATLLDFMCRIIPNFYPPLEGHVRQGVFSSLNHIVEKRVLAHLAPLFDNPKLDKELRAMLREKFPEFCSSPSPPVEVKIEEPVSMEMDNHMSDKDESCYDNAEAAFSDDEEDLNSKGKKREFRFHPIKETVVEEPVDITPYLDQLDESLRDKVLQLQKGSDTEAQCEVMQEIVDQVLEEDFDSEQLSVLASCLQELFKAHFRGEVLPEEITEESLEESVGKPLYLIFRNLCQMQEDNSSFSLLLDLLSELYQKQPKIGYHLLYYLRASKAAAGKMNLYESFAQATQLGDLHTCLMMDMKACQEDDVRLLCHLTPSIYTEFPDETLRSGELLNMIVAVIDSAQLQELVCHVMMGNLVMFRKDSVLNILIQSLDWETFEQYCAWQLFLAHNIPLETIIPILQHLKYKEHPEALSCLLLQLRREKPSEEMVKMVLSRPCHPDDQFTTSILRHWCMKHDELLAEHIKSLLIKNNSLPRKRQSLRSSSSKLAQLTLEQILEHLDNLRLNLTNTKQNCMPSTLGVQCRRCCPGPDYAWSQAGGRGRTPGATTHTRDKTTCACCLISSQTSDCFSFPALPFLPLVFSQTPILQALQHVQASCDEAHKMKFSDLFSLAEEYEDSSTKPPKSRRKAALSSPRSRKNATQPPNAEEESGSSSASEEEDTKPKPTKRKRKGSSAVGSDSD

SEQ ID NO: 7204 - protein, 1042 aa, Homo Sapiens
MELQKGKGAAAAAAASGAAGGGGGGAGAGAPGGGRLLLSTSLDAKDELEERLERCMSIVTSMTAGVSEREANDALNAYVCKGLPQHEEICLGLFTLILTEPAQAQKCYRDLALVSRDGMNIVLNKINQILMEKYLKLQDTCRTQLVWLVRELVKSGVLGADGVCMTFMKQIAGGDVTAKNIWLAESVLDILTEQREWVLKSSILIAMAVYTYLRLIVDHHGTAQLQALRQKEVDFCISLLRERFMECLMIGRDLVRLLQNVARIPEFELLWKDIIHNPQALSPQFTGILQLLQSRTSRKFLACRLTPDMETKLLFMTSRVRFGQQKRYQDWFQRQYLSTPDSQSLRCDLIRYICGVVHPSNEVLSSDILPRWAIIGWLLTTCTSNVAASNAKLALFYDWLFFSPDKDSIMNIEPAILVMHHSMKPHPAITATLLDFMCRIIPNFYPPLEGHVRQGVFSSLNHIVEKRVLAHLAPLFDNPKLDKELRAMLREKFPEFCSSPSPPVEVKIEEPVSMEMDNHMSDKDESCYDNAEAAFSDDEEDLNSKGKKREFRFHPIKETVVEEPVDITPYLDQLDESLRDKVLQLQKGSDTEAQCEVMQEIVDQVLEEDFDSEQLSVLASCLQELFKAHFRGEVLPEEITEESLEESVGKPLYLIFRNLCQMQEDNSSFSLLLDLLSELYQKQPKIGYHLLYYLRASKAAAGKMNLYESFAQATQLGDLHTCLMMDMKACQEDDVRLLCHLTPSIYTEFPDETLRSGELLNMIVAVIDSAQLQELVCHVMMGNLVMFRKDSVLNILIQSLDWETFEQYCAWQLFLAHNIPLETIIPILQHLKYKEHPEALSCLLLQLRREKPSEEMVKMVLSRPCHPDDQFTTSILRHWCMKHDELLAEHIKSLLIKNNSLPRKRQSLRSSSSKLAQLTLEQILEHLDNLRLNLTNTKQNFFSQTPILQALQHVQASCDEAHKMKFSDLFSLAEEYEDSSTKPPKSRRKAALSSPRSRKNATQPPNAEEESGSSSASEEEDTKPKPTKRKRKGSSAVGSDSD

SEQ ID NO: 7205 - protein, 1042 aa, Homo Sapiens; identical to SEQ ID NO: 7204

SEQ ID NO: 7206 - protein, 41 aa, Homo Sapiens
TQPPNAEEESGSSSASEEEDTKPKPTKRKRKGSSAVGSDSD

SEQ ID NO: 7207 - protein, 280 aa, Homo Sapiens
VYTYLRLIVDHHGTAQLQALRQKEVDFCISLLRERFMECLMIGRDLVRLLQNVARIPEFELLWKDIIHNPQALSPQFTGILQLLQSRTSRKFLACRLTPDMETKLLFMTSRVRFGQQKRYQDWFQRQYLSTPDSQSLRCDLIRYICGVVHPSNEVLSSDILPRWAIIGWLLTTCTSNVAASNAKLALFYDWLFFSPDKDSIMNIEPAILVMHHSMKPHPAITATLLDFMCRIIPNFYPPLEGHVRQGVFSSLNHIVEKRVLACKKYWLYLRLLGICLLGS

SEQ ID NO: 7208 - protein, 49 aa, Homo Sapiens
  misc_feature (1)..(1): Xaa can be any naturally occurring amino acid
XSQSLRCDLIRYICGVVHPSNEVLSSDILPRWAIIGWLLTTCTTPSSPV

SEQ ID NO: 7209 - protein, 64 aa, Homo Sapiens
MDLNSASTVVLQVLTQATSQDTAVLKPAEEQLKQWETQPGFYSVLLNIFTNHTLDINVRWLAVL

SEQ ID NO: 7210 - protein, 149 aa, Homo Sapiens
MDLNSASTVVLQVLTQATSQDTAVLKPAEEQLKQWETQPGFYSVLLNIFTNHTLDINVRWLAVLYFKHGIDRYWRRVAPHALSEEEKTTLRAGLITNFNEPINQIATQIAVLIAKVARLDCPRQWPELIPTLIESVKVQDDLRQHRALL

SEQ ID NO: 7211 - protein, 162 aa, Homo Sapiens
MDLNSASTVVLQVLTQATSQDTAVLKPAEEQLKQWETQPGFYSVLLNIFTNHTLDINVRWLAVLYFKHGIDRYWRRVAPHALSEEEKTTLRAGLITNFNEPINQIATQIAVLIAKVARLDCPRQWPELIPTLIESVKVQDDLRQHRALLTFYHVTKTLASKR

SEQ ID NO: 7212 - protein, 975 aa, Homo Sapiens
MDLNSASTVVLQVLTQATSQDTAVLKPAEEQLKQWETQPGFYSVLLNIFTNHTLDINVRWLAVLYFKHGIDRYWRRVAPHALSEEEKTTLRAGLITNFNEPINQIATQIAVLIAKVARLDCPRQWPELIPTLIESVKVQDDLRQHRALLTFYHVTKTLASKRLAADRKLFYDLASGIYNFACSLWNHHTDTFLQEVSSGNEAAILSSLERTLLSLKVLRKLTVNGFVEPHKNMEVMGFLHGIFERLKQFLECSRSIGTDNVCRDRLEKTIILFTKVLLDFLDQHPFSFTPLIQRSLEFSVSYVFTEVGEGVTFERFIVQCMNLIKMIVKNYAYKPSKNFEDSSPETLEAHKIKMAFFTYPTLTEICRRLVSHYFLLTEEELTMWEEDPEGFTVEETGGDSWKYSLRPCTEVLFIDIFHEYNQTLTPVLLEMMQTLQGPTNVEDMNALLIKDAVYNAVGLAAYELFDSVDFDQWFKNQLLPELQVIHNRYKPLRRRVIWLIGQWISVKFKSDLRPMLYEAICNLLQDQDLVVRIETATTLKLTVDDFEFRTDQFLPYLETMFTLLFQLLQQVTECDTKMHVLHVLSCVIERVNMQIRPYVGCLVQYLPLLWKQSEEHNMLRCAILTTLIHLVQGLGADSKNLYPFLLPVIQLSTDVSQPPHVYLLEDGLELWLVTLENSPCITPELLRIFQNMSPLLELSSENLRTCFKIINGYIFLSSTEFLQTYAVGLCQSFCELLKEITTEGQVQVLKVVENALKVNPILGPQMFQPILPYVFKGIIEGERYPVVMSTYLGVMGRVLLQNTSFFSSLLNEMAHKFNQEMDQLLGNMIEMWVDRMDNITQPERRKLSALALLSLLPSDNSVIQDKFCGIINISVEGLHDVMTEDPETGTYKDCMLMSHLEEPKVTEDEEPPTEQDKRKKMLALKDPVHTVSLQQFIYEKLKAQQEMLGEQGFQSLMETVDTEIVTQLQEFLQGF

SEQ ID NO: 7213 - protein, 863 aa, Homo Sapiens
MDLNSASTVVLQVLTQATSQDTAVLKPAEEQLKQWETQPGFYSVLLNIFTNHTLDINVRWLAVLYFKHGIDRYWRRVAPHALSEEEKTTLRAGLITNFNEPINQIATQIAVLIAKVARLDCPRQWPELIPTLIESVKVQDDLRQHRALLTFYHVTKTLASKRLAADRKLFYDLASGIYNFACSLWNHHTDTFLQEVSSGNEAAILSSLERTLLSLKVLRKLTVNGFVEPHKNMEVMGFLHGIFERLKQFLECSRSIGTDNVCRDRLEKTIILFTKVLLDFLDQHPFSFTPLIQRSLEFSVSYVFTEVGEGVTFERFIVQCMNLIKMIVKNYAYKPSKNFEDSSPETLEAHKIKMAFFTYPTLTEICRRLVSHYFLLTEEELTMWEEDPEGFTVEETGGDSWKYSLRPCTEVLFIDIFHEYNQTLTPVLLEMMQTLQGPTNVEDMNALLIKDAVYNAVGLAAYELFDSVDFDQWFKNQLLPELQVIHNRYKPLRRRVIWLIGQWISVKFKSDLRPMLYEAICNLLQDQDLVVRIETATTLKLTVDDFEFRTDQFLPYLETMFTLLFQLLQQVTECDTKMHVLHVLSCVIERVNMQIRPYVGCLVQYLPLLWKQSEEHNMLRCAILTTLIHLVQGLGADSKNLYPFLLPVIQLSTDVSQPPHVYLLEDGLELWLVTLENSPCITPELLRIFQNMSPLLELSSENLRTCFKIINGYIFLSSTEFLQTYAVGLCQSFCELLKEITTEGQVQVLKVVENALKVNPILGPQMFQPILPYVFKGIIEGERYPVVMSTYLGVMGRVLLQNTSFFSSLLNEMAHKFNQEMDQLLGNMIEMWVDRMDNITQPERRKLSALALLSLLPSDNSQF

SEQ ID NO: 7214 - protein, 59 aa, Homo Sapiens
MDQLLGNMIEMWVDRMDNITQPERRKLSALALLSLLPSDNSFLYPWQPLFYTLTVKEPM

SEQ ID NO: 7215 - protein, 94 aa, Homo Sapiens
MTEDPETGTYKDCMLMSHLEEPKVTEDEEPPTEQDKRKKMLALKDPVHTVSLQQFIYEKLKAQQEMLGEQGFQSLMETVDTEIVTQLQEFLQGF

SEQ ID NO: 7216 - protein, 1015 aa, Homo Sapiens
MVQPIIHLGYVVYSLLYLGYKPVQHVTALNTVSSCHKMVSMDLNSASTVVLQVLTQATSQDTAVLKPAEEQLKQWETQPGFYSVLLNIFTNHTLDINVRWLAVLYFKHGIDRYWRRVAPHALSEEEKTTLRAGLITNFNEPINQIATQIAVLIAKVARLDCPRQWPELIPTLIESVKVQDDLRQHRALLTFYHVTKTLASKRLAADRKLFYDLASGIYNFACSLWNHHTDTFLQEVSSGNEAAILSSLERTLLSLKVLRKLTVNGFVEPHKNMEVMGFLHGIFERLKQFLECSRSIGTDNVCRDRLEKTIILFTKVLLDFLDQHPFSFTPLIQRSLEFSVSYVFTEVGEGVTFERFIVQCMNLIKMIVKNYAYKPSKNFEDSSPETLEAHKIKMAFFTYPTLTEICRRLVSHYFLLTEEELTMWEEDPEGFTVEETGGDSWKYSLRPCTEVLFIDIFHEYNQTLTPVLLEMMQTLQGPTNVEDMNALLIKDAVYNAVGLAAYELFDSVDFDQWFKNQLLPELQVIHNRYKPLRRRVIWLIGQWISVKFKSDLRPMLYEAICNLLQDQDLVVRIETATTLKLTVDDFEFRTDQFLPYLETMFTLLFQLLQQVTECDTKMHVLHVLSCVIERVNMQIRPYVGCLVQYLPLLWKQSEEHNMLRCAILTTLIHLVQGLGADSKNLYPFLLPVIQLSTDVSQPPHVYLLEDGLELWLVTLENSPCITPELLRIFQNMSPLLELSSENLRTCFKIINGYIFLSSTEFLQTYAVGLCQSFCELLKEITTEGQVQVLKVVENALKVNPILGPQMFQPILPYVFKGIIEGERYPVVMSTYLGVMGRVLLQNTSFFSSLLNEMAHKFNQEMDQLLGNMIEMWVDRMDNITQPERRKLSALALLSLLPSDNSVIQDKFCGIINISVEGLHDVMTEDPETGTYKDCMLMSHLEEPKVTEDEEPPTEQDKRKKMLALKDPVHTVSLQQFIYEKLKAQQEMLGEQGFQSLMETVDTEIVTQLQEFLQGF

SEQ ID NO: 7217 - protein, 160 aa, Homo Sapiens
  misc_feature (1)..(1): Xaa can be any naturally occurring amino acid
XLRCAILTTLIHLVQVVENALKVNPILGPQMFQPILPYVFKGIIEGERYPVVMSTYLGVMGRVLLQNTSFFSSLLNEMAHKFNQEMDQLLGNMIEMWVDRMDNITQPERRKLSALALLSLLPSDNSVIQDKFCGIINISVEGLHDVMTEDPETGTYKDWP

SEQ ID NO: 7218 - protein, 1041 aa, Homo Sapiens
MAAAAAAGAASGLPGPVAQGLKEALVDTLTGILSPVQEVRAAAEEQIKVLEVTEEFGVHLAELTVDPQGALAIRQLASVILKQYVETHWCAQSEKFRPPETTERAKIVIRELLPNGLRESISKVRSSVAYAVSAIAHWDWPEAWPQLFNLLMEMLVSGDLNAVHGAMRVLTEFTREVTDTQMPLVAPVILPEMYKIFTMAEVYGIRTRSRAVEIFTTCAHMICNMEELEKGAAKVLIFPVVQQFTEAFVQALQIPDGPTSDSGFKMEVLKAVTALVKNFPKHMVSSMQQILPIVWNTLTESAAFYVRTEVNYTEEVEDPVDSDGEVLGFENLVFSIFEFVHALLENSKFKSTVKKALPELIYYIILYMQITEEQIKVWTANPQQFVEDEDDDTFSYTVRIAAQDLLLAVATDFQNESAAALAAAATRHLQEAEQTKNSGTEHWWKIHEACMLALGSVKAIITDSVKNGRIHFDMHGFLTNVILADLNLSVSPFLLGRALWAASRFTVAMSPELIQQFLQATVSGLHETQPPSVRISAVRAIWGYCDQLKVSESTHVLQPFLPSILDGLIHLAAQFSSEVLNLVMETLCIVCTVDPEFTASMESKICPFTIAIFLKYSNDPVVASLAQDIFKELSQIEACQGPMQMRLIPTLVSIMQAPADKIPAGLCATAIDILTTVVRNTKPPLSQLLICQAFPAVAQCTLHTDDNATMQNGGECLRAYVSVTLEQVAQWHDEQGHNGLWYVMQVVSQLLDPRTSEFTAAFVGRLVSTLISKAGRELGENLDQILRAILSKMQQAETLSVMQSLIMVFAHLVHTQLEPLLEFLCSLPGPTGKPALEFVMAEWTSRQHLFYGQYEGKVSSVALCKLLQHGINADDKRLQDIRVKGEEIYSMDEGIRTRSKSAKNPERWTNIPLLVKILKLIINELSNVMEANAARQATPAEWSQDDSNDMWEDQEEEEEEEEDGLAGQLLSDILATSKYEEDYYEDDEEDDPDALKDPLYQIDLQAYLTDFLCQFAQQPCYIMFSGHLNDNERRVLQTIGI

SEQ ID NO: 7219 - protein, 155 aa, Homo Sapiens
SNVMEANAARQATPAEWSQDDSNDMWEDQEEEEEEEEDGLAGQLLSDILATSKYEEDYYEDDEEDDPDALKDPLYQIDLQATLMTMRGEFYRPSASKKGSLSTFAPSGPAANHFAALTGLEMHFLLNLKWHLDPWPLASAVTLMTIQTRLTGAVT

SEQ ID NO: 7220 - protein, 127 aa, Homo Sapiens
MDTQNLEKTAIKIQSWWRGNMVRRTLLQAALRAWVIQCWWRSMQAKMLEQRRRLALRLYTCQEWAVVKVQAQVRMWQARRRFLQARQAACIIQSHWRWHASQTRGLIRGHYEVRASRLELDIEILMT

SEQ ID NO: 7221 - protein, 107 aa, Homo Sapiens
MVRRTLLQAALRAWVIQCWWRSMQAKMLEQRRRLALRLYTCQEWAVVKVQAQVRMWQARRRFLQARQAACIIQSHWRWHASQTRGLIRGHYEVRASRLELDIEILMT

SEQ ID NO: 7222 - protein, 596 aa, Homo Sapiens
MAGNCGARGALSAHTLLFDLPPALLGELCAVLDSCDGALGWRGLAERLSSSWLDVRHIEKYVDQGKSGTRELLWSWAQKNKTIGDLLQVLQEMGHRRAIHLITNYGAVLSPSEKSYQEGGFPNILFKETANVTVDNVLIPEHNEKGILLKSSISFQNIIEGTRNFHKDFLIGEGEIFEVYRVEIQNLTYAVKLFKQEKKMQCKKHWKRFLSELEVLLLFHHPNILELAAYFTETEKFCLIYPYMRNGTLFDRLQCVGDTAPLPWHIRIGILIGISKAIHYLHNVQPCSVICGSISSANILLDDQFQPKLTDFAMAHFRSHLEHQSCTINMTSSSSKHLWYMPEEYIRQGKLSIKTDVYSFGIVIMEVLTGCRVVLDDPKHIQLRDLLRELMEKRGLDSCLSFLDKKVPPCPRNFSAKLFCLAGRCAATRAKLRPSMDEVLNTLESTQASLYFAEDPPTSLKSFRCPSPLFLENVPSIPVEDDESQNNNLLPSDEGLRIDRMTQKTPFECSQSEVMFLSLDKKPESKRNEEACNMPSSSCEESWFPKYIVPSQDLRPYKVNIDPSSEAPGHSCRSRPVESSCSSKFSWDEYEQYKKE

SEQ ID NO: 7223 - protein, 535 aa, Homo Sapiens
MAGNCGARGALSAHTLLFDLPPALLGELCAVLDSCDGALGWRGLGAVLSPSEKSYQEGGFPNILFKETANVTVDNVLIPEHNEKGILLKSSISFQNIIEGTRNFHKDFLIGEGEIFEVYRVEIQNLTYAVKLFKQEKKMQCKKHWKRFLSELEVLLLFHHPNILELAAYFTETEKFCLIYPYMRNGTLFDRLQCVGDTAPLPWHIRIGILIGISKAIHYLHNVQPCSVICGSISSANILLDDQFQPKLTDFAMAHFRSHLEHQSCTINMTSSSSKHLWYMPEEYIRQGKLSIKTDVYSFGIVIMEVLTGCRVVLDDPKHIQLRDLLRELMEKRGLDSCLSFLDKKVPPCPRNFSAKLFCLAGRCAATRAKLRPSMDEVLNTLESTQASLYFAEDPPTSLKSFRCPSPLFLENVPSIPVEDDESQNNNLLPSDEGLRIDRMTQKTPFECSQSEVMFLSLDKKPESKRNEEACNMPSSSCEESWFPKYIVPSQDLRPYKVNIDPSSEAPGHSCRSRPVESSCSSKFSWDEYEQYKKE

SEQ ID NO: 7224 - protein, 93 aa, Homo Sapiens
MAGNCGARGALSAHTLLFDLPPALLGELCAVLDSCDGALGWRGLVSKNKLCENGVLILQGFWHVVVCKYKDSKYGCVALFEKTPSETYLHMET

SEQ ID NO: 7225 - protein, 1257 aa, Homo Sapiens
MASCSFTRDQATRRLRGAAAAAAAALAAVVTTPLLSSGTPTALIGTGSSCPGAMWLSTATGSRSDSESEEEDLPVGEEVCKRGYLRKQKHGHRRYFVLKLETADAPARLEYYENARKFRHSVRAAAAAAAAAASGAAIPPLIPPRRVITLYQCFSVSQRADARYRHLIALFTQDEYFAMVAENESEQESWYLLLSRLILESKRRRCGTLGAQPDGEPAALAAAAAAEPPFYKDVWQVIVKPRGLGHRKELSGVFRLCLTDEEVVFVRLNTEVASVVVQLLSIRRCGHSEQYFFLEVGRSTVIGPGELWMQVDDCVVAQNMHELFLEKMRALCADEYRARCRSYSISIGAHLLTLLSARRHLGLVPLEPGGWLRRSRFEQFCHLRAIGDGEDEMLFTRRFVTPSEPVAHSRRGRLHLPRGRRSRRAVSVPASFFRRLAPSPARPRHPAEAPNNGARLSSEVSGSGSGNFGEEGNPQGKEDQEGSGGDYMPMNNWGSGNGRGSGGGQGSNGQGSSSHSSGGNQCSGEGQGSRGGQGSNGQGSGGNQCSRDGQGTAGGHGSGGGQRPGGGHGSGGGQGPGDGHGSGGGKNSGGGKGSGSGKGSDGDGERGKSLKKRSYFGKLTQSKQQQMPPPPPPPPPPPPAGGTGGKGKSGGRFRLYFCVDRGATKECKEAKEVKDAEIPEGAARGPHRARAFDEDEDDPYVPMRPGVATPLVSSSDYMPMAPQNVSASKKRHSRSPFEDSRGYMMMFPRVSPPPAPSPPKAPDTNKEDDSKDNDSESDYMFMAPGAGAIPKNPRNPQGGSSSKSWSSYFSLPNPFRSSPLGQNDNSEYVPMLPGKFLGRGLDKEVSYNWDPKDAASKPSGEGSFSKPGDGGSPSKPSDHEPPKNKAKRPNRLSFITKGYKIKPKPQKPTHEQREADSSSDYVNMDFTKRESNTPAPSTQGLPDSWGIIAEPRQSAFSNYVNVEFGVPFPNPANDLSDLLRAIPRANPLSLDSARWPLPPLPLSATGSNAIEEEGDYIEVIFNSAMTPAMALADSAIRYDAETGRIYVVDPFSECCMDISLSPSRCSEPPPVARLLQEEEQERRRPQSRSQSFFAAARAAVSAFPTDSLERDLSPSSAPAVASAAEPTLALSQVVAAASALAAAPGIGAAAAAAGFDSASARWFQPVANAADAEAVRGAQDVAGGSNPGAHNPSANLARGDNQAGGAAAAAAAPEPPPRSRRVPRPPEREDSDNDDDTHVRMDFARRDNQFDSPKRGR

SEQ ID NO: 7226 - protein, 147 aa, Homo Sapiens
MQELHLLWWALLLGLAQACPEPCDCGEKYGFQIADCAYRDLESVPPGFPANVTTLSLSANRLPGLPEGAFREVPLLQSLWLAHNEIRTVAAGALASLSHLKSLDLSHNLISDFAWSDLHNLSALQLLKMDSNELTFIPRDAFRSLRA

SEQ ID NO: 7227 - protein, 183 aa, Homo Sapiens
MQELHLLWWALLLGLAQACPEPCDCGEKYGFQIADCAYRDLESVPPGFPANVTTLSLSANRLPGLPEGAFREVPLLQSLWLAHNEIRTVAAGALASLSHLKSLDLSHNLISDFAWSDLHNLSALQLLKMDSNELTFIPRDAFRSLRALRSLQLNHNRLHTLAEGTFTPLTALSHLQINENPFD

SEQ ID NO: 7228 - protein, 428 aa, Homo Sapiens
MQELHLLWWALLLGLAQACPEPCDCGEKYGFQIADCAYRDLESVPPGFPANVTTLSLSANRLPGLPEGAFREVPLLQSLWLAHNEIRTVAAGALASLSHLKSLDLSHNLISDFAWSDLHNLSALQLLKMDSNELTFIPRDAFRSLRALRSLQLNHNRLHTLAEGTFTPLTALSHLQINENPFDCTCGIVWLKTWALTTAVSIPEQDNIACTSPHVLKGTPLSRLPPLPCSAPSVQLSYQPSQDGAELRPGFVLALHCDVDGQPAPQLHWHIQIPSGIVEITSPNVGTDGRALPGTPVASSQPRFQAFANGSLLIPDFGKLEEGTYSCLATNELGSAESSVDVALATPGEGGEDTLGRRFHGKAVEGKGCYTVDNEVQPSGPEDNVVIIYLSRAGNPEAAVAEGVPGQLPPGLLLLGQSLLLFFFLTSF

SEQ ID NO: 7229 - protein, 428 aa, Homo Sapiens; identical to SEQ ID NO: 7228

SEQ ID NO: 7230 - protein, 5 aa, Homo Sapiens
MFPLR

SEQ ID NO: 7231 - protein, 89 aa, Homo Sapiens
MFPLRALWLVWALLGVAGSCPEPCACVDKYAHQFADCAYKELREVPEGLPANVTTLSLSANKITVLRRGAFADVTQVTSLWLAHNEVRT

SEQ ID NO: 7232 - protein, 114 aa, Homo Sapiens
MFPLRALWLVWALLGVAGSCPEPCACVDKYAHQFADCAYKELREVPEGLPANVTTLSLSANKITVLRRGAFADVTQVTSLWLAHNEVRTVEPGALAVLSQLKNLDLSHNFISSF

SEQ ID NO: 7233 - protein, 138 aa, Homo Sapiens
MFPLRALWLVWALLGVAGSCPEPCACVDKYAHQFADCAYKELREVPEGLPANVTTLSLSANKITVLRRGAFADVTQVTSLWLAHNEVRTVEPGALAVLSQLKNLDLSHNFISSFPWSDLRNLSALQLLKMNHNRLGSL

SEQ ID NO: 7234 - protein, 334 aa, Homo Sapiens
MFPLRALWLVWALLGVAGSCPEPCACVDKYAHQFADCAYKELREVPEGLPANVTTLSLSANKITVLRRGAFADVTQVTSLWLAHNEVRTVEPGALAVLSQLKNLDLSHNFISSFPWSDLRNLSALQLLKMNHNRLGSLPRDALGALPDLRSLRINNNRLAGEACHVQVVFSTKKELPSLLVIVAVSVFLLVLATVPLLGAACCHLLAKHPGKPYRLILRPQAPDPMEKRIAADFDPRASYLESEKSYPAGGEAGGEEPEDVQGEGLDEDAEQGDPSGDLQREESLAACSLVESQSKANQEEFEAGSEYSDRLPLGAEAVNIAQEINGNYRQTAG

SEQ ID NO: 7235 - protein, 745 aa, Homo Sapiens
MFPLRALWLVWALLGVAGSCPEPCACVDKYAHQFADCAYKELREVPEGLPANVTTLSLSANKITVLRRGAFADVTQVTSLWLAHNEVRTVEPGALAVLSQLKNLDLSHNFISSFPWSDLRNLSALQLLKMNHNRLGSLPRDALGALPDLRSLRINNNRLRTLAPGTFDALSALSHLQLYHNPFHCGCGLVWLQAWAASTRVSLPEPDSIACASPPALQGVPVYRLPALPCAPPSVHLSAEPPLEAPGTPLRAGLAFVLHCIADGHPTPRLQWQLQIPGGTVVLEPPVLSGEDDGVGAEEGEGEGDGDLLTQTQAQTPTPAPAWPAPPATPRFLALANGSLLVPLLSAKEAGVYTCRAHNELGANSTSIRVAVAATGPPKHAPGAGGEPDGQAPTSERKSTAKGRGNSVLPSKPEGKIKGQGLAKVSILGETETEPEEDTSEGEEAEDQILADPAEEQRCGNGDPSRYVSNHAFNQSAELKPHVFELGVIALDVAEREARVQLTPLAARWGPGPGGAGGAPRPGRRPLRLLYLCPAGGGAAVQWSRVEEGVNAYWFRGLRPGTNYSVCLALAGEACHVQVVFSTKKELPSLLVIVAVSVFLLVLATVPLLGAACCHLLAKHPGKPYRLILRPQAPDPMEKRIAADFDPRASYLESEKSYPAGGEAGGEEPEDVQGEGLDEDAEQGDPSGDLQREESLAACSLVESQSKANQEEFEAGSEYSDRLPLGAEAVNIAQEINGNYRQTAG

SEQ ID NO: 7236 - protein, 745 aa, Homo Sapiens; identical to SEQ ID NO: 7235

SEQ ID NO: 7237 - protein, 745 aa, Homo Sapiens; identical to SEQ ID NO: 7235

SEQ ID NO: 7238 - protein, 745 aa, Homo Sapiens; identical to SEQ ID NO: 7235

SEQ ID NO: 7239 - protein, 745 aa, Homo Sapiens; identical to SEQ ID NO: 7235

SEQ ID NO: 7240 - protein, 464 aa, Homo Sapiens
MVRLAAELLLLLGLLLLTLHITVLRGSGAADGPDAAAGNASQAQLQNNLNVGSDTTSETSFSLSKEAPREHLDHQAAHQPFPRPRFRQETGHPSLQRDFPRSFLLDLPNFPDLSKADINGQNPNIQVTIEVVDGPDSEADKDQHPENKPSWSVPSPDWRAWWQRSLSLARANSGDQDYKYDSTSDDSNFLNPPRGWDHTAPGHRTFETKDQPEYDSTDGEGDWSLWSVCSVTCGNGNQKRTRSCGYACTATESRTCDRPNCPGIEDTFRTAATEVSLLAGSEEFNATKLFEVDTDSCERWMSCKSEFLKKYMHKVMNDLPSCPCSYPTEVAYSTADIFDRIKRKDFRWKDASGPKEKLEIYKPTARYCIRSMLSLESTTLAAQHCCYGDNMQLITRGKGAGTPNLISTEFSAELHYKVDVLPWIICKGDWSRYNEARPPNNGQKCTESPSDEDYIKQFQEAREY

SEQ ID NO: 7241 - protein, 76 aa, Homo Sapiens
MRALRDRAGLLLCVLLLAALLEAALGLPVKKPRLRGPRPGSLTRLAEPPFQVRASSERSPAGARNLALCGVAGQGR

SEQ ID NO: 7242 - protein, 292 aa, Homo Sapiens
MRALRDRAGLLLCVLLLAALLEAALGLPVKKPRLRGPRPGSLTRLAEVSASPDPRPLKEEEEAPLLPRTHLQAEPHQHGCWTVTEPAAMTPGNATPPRTPEVTPLRLELQKLPGLANTTLSTPNPDTQASASPDPRPLREEEEARLLPRTHLQAELHQHGCWTVTEPAALTPGNATPPRTQEVTPLLLELQKLPELVHATLSTPNPDNQTMSLRRSGVPGLPAVGTAALASSRGLGPVAMAALPPRPVPVTCPPVLALRTRTPWASPVRSGSSWPAMLRTCMIKMWTAVRSG

SEQ ID NO: 7243 - protein, 571 aa, Homo Sapiens
MRALRDRAGLLLCVLLLAALLEAALGLPVKKPRLRGPRPGSLTRLAEVSASPDPRPLKEEEEAPLLPRTHLQAEPHQHGCWTVTEPAAMTPGNATPPRTPEVTPLRLELQKLPGLANTTLSTPNPDTQASASPDPRPLREEEEARLLPRTHLQAELHQHGCWTVTEPAALTPGNATPPRTQEVTPLLLELQKLPELVHATLSTPNPDNQVTIKVVEDPQAEVSIDLLAEPSNPPPQDTLSWLPALWSFLWGDYKGEEKDRAPGEKGEEKEEDEDYPSEDIEGEDQEDKEEDEEEQALWFNGTTDNWDQGWLAPGDWVFKDSVSYDYEPQKEWSPWSPCSGNCSTGKQQRTRPCGYGCTATETRTCDLPSCPGTEDKDTLGLPSEEWKLLARNATDMHDQDVDSCEKWLNCKSDFLIKYLSQMLRDLPSCPCAYPLEAMDSPVSLQDEHQGRSFRWRDASGPRERLDIYQPTARFCLRSMLSGESSTLAAQHCCYDEDSRLLTRGKGAGMPNLISTDFSPKLHFKFDTTPWILCKGDWSRLHAVLPPNNGRACTDNPLEEEYLAQLQEAKEY

SEQ ID NO: 7244 - protein, 185 aa, Homo Sapiens
MRALRDRAGLLLCVLLLAALLEAALGLPVKKPRLRGPRPGSLTRLAEVSASPDPRPLKEEEEAPLLPRTHLQAEPHQHGCWTVTEPAAMTPGNATPPRTPEVTPLRLELQKLPGLANTTLSTPNPDTQVTIKVVEDPQAEVSIDLLAEPSNPPPQDTLSWLPALWSFLWGDYKGEEKDRAPGEKG

SEQ ID NO: 7245 - protein, 104 aa, Homo Sapiens
  misc_feature (1)..(1): Xaa can be any naturally occurring amino acid
XCVLLLAALLEAALGLPVKKPRLRGPRPGSLTRLAEVSGGGTGLRSALSVPPPQPAGSSRAGSGTGTHTGSDPPMERGAGAGRKLPDTGRCPGAPDFGASTPRA

SEQ ID NO: 7246 - protein, 73 aa, Homo Sapiens
  misc_feature (1)..(1): Xaa can be any naturally occurring amino acid
XRLAEVSGGGTGLRSALSVPPPQPAGSSRAGSGTGTHTGSDPPMERGAGAGRKLPDTGRCPGAPDFGASTPRA

SEQ ID NO: 7247 - protein, 614 aa, Homo Sapiens
MAWEARREPGPRRAAVRETVMLLLCLGVPTGRPYNVDTESALLYQGPHNTLFGYSVVLHSHGANRWLLVGAPTANWLANASVINPGAIYRCRIGKNPGQTCEQLQLGSPNGEPCGKTCLEERDNQWLGVTLSRQPGENGSIVTCGHRWKNIFYIKNENKLPTGGCYGVPPDLRTELSKRIAPCYQDYVKKFGENFASCQAGISSFYTKDLIVMGAPGSSYWTGSLFVYNITTNKYKAFLDKQNQVKFGSYLGYSVGAGHFRSQHTTEVVGGAPQHEQIGKAYIFSIDEKELNILHEMKGKKLGSYFGASVCAVDLNADGFSDLLVGAPMQSTIREEGRVFVYINSGSGAVMNAMETNLVGSDKYAARFGESIVNLGDIDNDGFEDVAIGAPQEDDLQGAIYIYNGRADGISSTFSQRIEGLQISKSLSMFGQSISGQIDADNNGYVDVAVGAFRSDSAVLLRTRPVVIVDASLSHPESVNRTKFDCVENGWPSVCIDLTLCFSYKGKEVPGYIVLFYNMSLDVNRKAESPPRFYFSSNGTSDVITGSIQVSSREANCRTHQAFMRKDVRDILTPIQIEAAYHLGPHVISKRSTEEFPPLQPILQQKKEKDIMKK

SEQ ID NO: 7248 - protein, 1032 aa, Homo Sapiens [sequence omitted]

SEQ ID NO: 7249 - protein, 195 aa, Homo Sapiens
MAWEARREPGPRRAAVRETVMLLLCLGVPTGRPYNVDTESALLYQGPHNTLFGYSVVLHSHGANRWLLVGAPTANWLANASVINPGAIYRCRIGKNPGQTCEQLQLGSPNGEPCGKTCLEERDNQWLGVTLSRQPGENGSIVTCGHRWKNIFYIKNENKLPTGGCYGVPPDLRTELSKRIAPCYQGSISKYRART

SEQ ID NO: 7250 - protein, 1035 aa, Homo Sapiens
MGGPAAPRGAGRLRALLLALVVAGIPAGAYNLDPQRPVHFQGPADSFFGYAVLEHFHDNTRWVLVGAPKADSKYSPSVKSPGAVFKCRVHTNPDRRCTELDMARGKNRGTSCGKTCREDRDDEWMGVSLARQPKADGRVLACAHRWKNIYYEADHILPHGFCYIIPSNLQAKGRTLIPCYEEYKKKYGEEHGSCQAGIAGFFTEELVVMGAPGSFYWAGTIKVLNLTDNTYLKLNDEVIMNRRYTYLGYAVTAGHFSHPSTIDVVGGAPQDKGIGKVYIFRADRRSGTLIKIFQASGKKMGSYFGSSLCAVDLNGDGLSDLLVGAPMFSEIRDEGQVTVYINRGNGALEEQLALTGDGAYNAHFGESIASLDDLDNDGFPDVAIGAPKEDDFAGAVYIYHGDAGGIVPQYSMKLSGQKINPVLRMFGQSISGGIDMDGNGYPDVTVGAFMSDSVVLLRARPVITVDVSIFLPGSINITAPQCHDGQQPVNCLNVTTCFSFHGKHVPGEIGLNYVLMADVAKKEKGQMPRVYFVLLGETMGQVTEKLQLTYMEETCRHYVAHVKRRVQDVISPIVFEAAYSLSEHVTGEEERELPPLTPVLRWKKGQKIAQKNQTVFERNCRSEDCAADLQLQGKLLLSSMDEKTLYLALGAVKNISLNISISNLGDDAYDANVSFNVSRELFFINMWQKEEMGISCELLESDFLKCSVGFPFMRSKSKYEFSVIFDTSHLSGEEEVLSFIVTAQSGNTERSESLHDNTLVLMVPLMHEVDTSITGIMSPTSFVYGESVDAANFIQLDDLECHFQPINITLQVYNTGPSTLPGSSVSISFPNRLSSGGAEMFHVQEMVVGQEKGNCSFQKNPTPCIIPQEQENIFHTIFAFFTKSGRKVLDCEKPGISCLTAHCNFSALAKEESRTIDIYMLLNTEILKKDSSSVIQFMSRAKVKVDPALRVVEIAHGNPEEVTVVFEALHNLEPRGYVVGWIIAISLLVGILIFLLLAVLLWKMGFFRRRYKEIIEAEKNRKENEDSWDWVQKNQ

SEQ ID NO: 7251 - protein, 632 aa, Homo Sapiens
MGGPAAPRGAGRLRALLLALVVAGIPAGAYNLDPQRPVHFQGPADSFFGYAVLEHFHDNTRWVLVGAPKADSKYSPSVKSPGAVFKCRVHTNPDRRCTELDMARGKNRGTSCGKTCREDRDDEWMGVSLARQPKADGRVLACAHRWKNIYYEADHILPHGFCYIIPSNLQAKGRTLIPCYEEYKKKYGEEHGSCQAGIAGFFTEELVVMGAPGSFYWAGTIKVLNLTDNTYLKLNDEVIMNRRYTYLGYAVTAGHFSHPSTIDVVGGAPQDKGIGKVYIFRADRRSGTLIKIFQASGKKMGSYFGSSLCAVDLNGDGLSDLLVGAPMFSEIRDEGQVTVYINRGNGALEEQLALTGDGAYNAHFGESIASLDDLDNDGFPDVAIGAPKEDDFAGAVYIYHGDAGGIVPQYSMKLSGQKINPVLRMFGQSISGGIDMDGNGYPDVTVGAFMSDSVVLLRARPVITVDVSIFLPGSINITAPQCHDGQQPVNCLNVTTCFSFHGKHVPGEIGLNYVLMADVAKKEKGQMPRVYFVLLGETMGQVTEKLQLTYMEETCRHYVAHVKRRVQDVISPIVFEAAYSLSEHVTGEEERELPPLTPVLRWKKGQKIAQKNQVRTLKLILSTQGGSCTEQK

SEQ ID NO: 7252 - protein, 69 aa, Homo Sapiens
  misc_feature (1)..(1): Xaa can be any naturally occurring amino acid
XKKDSSSVIQFMSRAKVKVDPALRVVEIAHGNPEEVTMGFFRRRYKEIIEAEKNRKENEDSWDWVQKNQ

SEQ ID NO: 7253 - protein, 404 aa, Homo Sapiens
MKDSCITVMAMALLSGFFFFAPASSYNLDVRGARSFSPPRAGRHFGYRVLQIKSLIPQFQGRLVANLTYTLQLDGHRTRRRGLFPGGRHELRRNIAVTTSMSCTDFSFHFPMMFNTLVNSSWGDSVELHANVTCNNEDSDLLEDNSATTIIPILYPINILIQDQEDSTLYVSFTPKGPKIHQVKHMYQVRIQPSIHDHNIPTLEAVVGVPQPPSEGPITHQWSVQMEPPVPCHYEDLERLPDAAEPCLPGALFRCPVVFRQEILVQVIGTLELVGEIEASSMFSLCSSLSISFNSSKHFHLYGSNASLAQVVMKVDVVYEKQMLYLYVLSGIGGLLLLLLIFIVLYKVGFFKRNLKEKMEAGRGVPNGIPAEDSEQLASGQEAGDPGCLKPLHEKDSESGGGKD

SEQ ID NO: 7254 - protein, 109 aa, Homo Sapiens
MKDSCITVMAMALLSGFFFFAPASSYNLDVRGARSFSPPRAGRHFGYRVLQLDGHRTRRRGLFPGGRHELRRNIAVTTSMSCTDFSFHFPIQSPASNCFCQPLCGAEPE

SEQ ID NO: 7255 - protein, 55 aa, Homo Sapiens
MKDSCITVMAMALLSGFFFFAPASSYNLDVRGARSFSPPRAGRHFGYRVLQVGNG

SEQ ID NO: 7256 - protein, 1170 aa, Homo Sapiens
MKDSCITVMAMALLSGFFFFAPASSYNLDVRGARSFSPPRAGRHFGYRVLQVGNGVIVGAPGEGNSTGSLYQCQSGTGHCLPVTLRGSNYTSKYLGMTLATDPTDGSILACDPGLSRTCDQNTYLSGLCYLFRQNLQGPMLQGRPGFQECIKGNVDLVFLFDGSMSLQPDEFQKILDFMKDVMKKLSNTSYQFAAVQFSTSYKTEFDFSDYVKRKDPDALLKHVKHMLLLTNTFGAINYVATEVFREELGARPDATKVLIIITDGEATDSGNIDAAKDIIRYIIGIGKHFQTKESQETLHKFASKPASEFVKILDTFEKLKDLFTELQKKIYVIEGTSKQDLTSFNMELSSSGISADLSRGHAVVGAVGAKDWAGGFLDLKADLQDDTFIGNEPLTPEVRAGYLGYTVTWLPSRQKTSLLASGAPRYQHMGRVLLFQEPQGGGHWSQVQTIHGTQIGSYFGGELCGVDVDQDGETELLLIGAPLFYGEQRGGRVFIYQRRQLGFEEVSELQGDPGYPLGRFGEAITALTDINGDGLVDVAVGAPLEEQGAVYIFNGRHGGLSPQPSQRIEGTQVLSGIQWFGRSIHGVKDLEGDGLADVAVGAESQMIVLSSRPVVDMVTLMSFSPAEIPVHEVECSYSTSNKMKEGVNITICFQIKSLIPQFQGRLVANLTYTLQLDGHRTRRRGLFPGGRHELRRNIAVTTSMSCTDFSFHFPVCVQDLISPINVSLNFSLWEEEGTPRDQRAQGKDIPPILRPSLHSETWEIPFEKNCGEDKKCEANLRVSFSPARSRALRLTAFASLSVELSLSNLEEDAYWVQLDLHFPPGLSFRKVEMLKPHSQIPVSCEELPEESRLLSRALSCNVSSPIFKAGHSVALQMMFNTLVNSSWGDSVELHANVTCNNEDSDLLEDNSATTIIPILYPINILIQDQEDSTLYVSFTPKGPKIHQVKHMYQVRIQPSIHDHNIPTLEAVVGVPQPPSEGPITHQWSVQMEPPVPCHYEDLERLPDAAEPCLPGALFRCPVVFRQEILVQVIGTLELVGEIEASSMFSLCSSLSISFNSSKHFHLYGSNASLAQVVMKVDVVYEKQMLYLYVLSGIGGLLLLLLIFIVLYKVGFFKRNLKEKMEAGRGVPNGIPAEDSEQLASGQEAGDPGCLKPLHEKDSESGGGKD

SEQ ID NO: 7257 - protein, 162 aa, Homo Sapiens
MKDSCITVMAMALLSGFFFFAPASSYNLDVRGARSFSPPRAGRHFGYRVLQVGNGVIVGAPGEGNSTGSLYQCQSGTGHCLPVTLRGSNYTSKYLGMTLATDPTDGSILACDPGLSRTCDQNTYLSGLCYLFRQNLQGPMLQGRPGFQVCCCSVFHKLQNRI

SEQ ID NO: 7258 - protein, 1086 aa, Homo Sapiens
MKDSCITVMAMALLSGFFFFAPASSYNLDVRGARSFSPPRAGRHFGYRVLQVGNGVIVGAPGEGNSTGSLYQCQSGTGHCLPVTLRGSNYTSKYLGMTLATDPTDGSILFAAVQFSTSYKTEFDFSDYVKRKDPDALLKHVKHMLLLTNTFGAINYVATEVFREELGARPDATKVLIIITDGEATDSGNIDAAKDIIRYIIGIGKHFQTKESQETLHKFASKPASEFVKILDTFEKLKDLFTELQKKIYVIEGTSKQDLTSFNMELSSSGISADLSRGHAVVGAVGAKDWAGGFLDLKADLQDDTFIGNEPLTPEVRAGYLGYTVTWLPSRQKTSLLASGAPRYQHMGRVLLFQEPQGGGHWSQVQTIHGTQIGSYFGGELCGVDVDQDGETELLLIGAPLFYGEQRGGRVFIYQRRQLGFEEVSELQGDPGYPLGRFGEAITALTDINGDGLVDVAVGAPLEEQGAVYIFNGRHGGLSPQPSQRIEGTQVLSGIQWFGRSIHGVKDLEGDGLADVAVGAESQMIVLSSRPVVDMVTLMSFSPAEIPVHEVECSYSTSNKMKEGVNITICFQIKSLIPQFQGRLVANLTYTLQLDGHRTRRRGLFPGGRHELRRNIAVTTSMSCTDFSFHFPVCVQDLISPINVSLNFSLWEEEGTPRDQRAGKDIPPILRPSLHSETWEIPFEKNCGEDKKCEANLRVSFSPARSRALRLTAFASLSVELSLSNLEEDAYWVQLDLHFPPGLSFRKVEMLKPHSQIPVSCEELPEESRLLSRALSCNVSSPIFKAGHSVALQMMFNTLVNSSWGDSVELHANVTCNNEDSDLLEDNSATTIIPILYPINILIQDQEDSTLYVSFTPKGPKIHQVKHMYQVRIQPSIHDHNIPTLEAVVGVPQPPSEGPITHQWSVQMEPPVPCHYEDLERLPDAAEPCLPGALFRCPVVFRQEILVQVIGTLELVGEIEASSMFSLCSSLSISFNSSKHFHLYGSNASLAQVVMKVDVVYEKQMLYLYVLSGIGGLLLLLLIFIVLYKVGFFKRNLKEKMEAGRGVPNGIPAEDSEQLASGQEAGDPGCLKPLHEKDSESGGGKD

SEQ ID NO: 7259 - protein, 204 aa, Homo Sapiens
MKDSCITVMAMALLSGFFFFAPASSYNLDVRGARSFSPPRAGRHFGYRVLQVGNGVIVGAPGEGNSTGSLYQCQSGTGHCLPVTLRGSNYTSKYLGMTLATDPTDGSILFAAVQFSTSYKTEFDFSDYVKRKDPDALLKHVKHMLLLTNTFGAINYVATEVFREELGARPDATKVLIIITDGEATDSGNIDAAKDIIRYIIGVG

SEQ ID NO: 7260 - protein, 90 aa, Homo Sapiens
MKDSCITVMAMALLSGFFFFERPNGKLYPQALGRAFRALGGPGVAPSIFPEVNALEGKRRVRVAWGATSGWAWDRPPAGHVQGRGSLGRS

SEQ ID NO: 7261 - protein, 41 aa, Homo Sapiens
MTLATDPTDGSILACDPGLSRTCDQNTYLSGLCYLFRQNLQ

SEQ ID NO: 7262 - protein, 38 aa, Homo Sapiens
  misc_feature (1)..(1): Xaa can be any naturally occurring amino acid
XKEGVNITICFQIKSLIPQFQAGWPPDQKTGVVPRRET

SEQ ID NO: 7263 - protein, 1163 aa, Homo Sapiens
MTRTRAALLLFTALATSLGFNLDTEELTAFRVDSAGFGDSVVQYANSWVVVGAPQKITAANQTGGLYQCGYSTGACEPIGLQVPPEAVNMSLGLSLASTTSPSQLLACGPTVHHECGRNMYLTGLCFLLGPTQLTQRLPVSRQECPRQEQDIVFLIDGSGSISSRNFATMMNFVRAVISQFQRPSTQFSLMQFSNKFQTHFTFEEFRRSSNPLSLLASVHQLQGFTYTATAIQNVVHRLFHASYGARRDAAKILIVITDGKKEGDSLDYKDVIPMADAAGIIRYAIGVGLAFQNRNSWKELNDIASKPSQEHIFKVEDFDALKDIQNQLKEKIFAIEGTETTSSSSFELEMAQEGFSAVFTPDGPVLGAVGSFTWSGGAFLYPPNMSPTFINMSQENVDMRDSYLGYSTELALWKGVQSLVLGAPRYQHTGKAVIFTQVSRQWRMKAEVTGTQIGSYFGASLCSVDVDSDGSTDLVLIGAPHYYEQTRGGQVSVCPLPRGWRRWWCDAVLYGEQGHPWGRFGAALTVLGDVNGDKLTDVVIGAPGEEENRGAVYLFHGVLGPSISPSHSQRIAGSQLSSRLQYFGQALSGGQDLTQDGLVDLAVGARGQVLLLRTRPVLWVGVSMQFIPAEIPRSAFECREQVVSEQTLVQSNICLYIDKRSKNLLGSRDLQSSVTLDLALDPGRLSPRATFQETKNRSLSRVRVLGLKAHCENFNLLLPSCVEDSVTPITLRLNFTLVGKPLLAFRNLRPMLAADAQRYFTASLPFEKNCGADHICQDNLGISFSFPGLKSLLVGSNLELNAEVMVWNDGEDSYGTTITFSHPAGLSYRYVAEGQKQGQLRSLHLTCDSAPVGSQGTWSTSCRINHLIFRGGAQITFLATFDVSPKAVLGDRLLLTANVSSENNTPRTSKTTFQLELPVKYAVYTVVSSHEQFTKYLNFSESEEKESHVAMHRYQVNNLGQRDLPVSINFWVPVELNQEAVWMDVEVSHPQNPSLRCSSEKIAPPASDFLAHIQKNPVLDCSIAGCLRFRCDVPSFSVQEELDFTLKGNLSFGWVRQILQKKVSVVSVAEITFDTSVYSQLPGQEAFMRAQTTTVLEKYKVHNPTPLIVGSSIGGLLLLALITAVLYKVGFFKRQYKEMMEEANGQIAPENGTQTPSPPSEK

SEQ ID NO: 7264 - protein, 1169 aa, Homo Sapiens
MTRTRAALLLFTALATSLGFNLDTEELTAFRVDSAGFGDSVVQYANSWVVVGAPQKITAANQTGGLYQCGYSTGACEPIGLQVPPEAVNMSLGLSLASTTSPSQLLACGPTVHHECGRNMYLTGLCFLLGPTQLTQRLPVSRQECPRQEQDIVFLIDGSGSISSRNFATMMNFVRAVISQFQRPSTQFSLMQFSNKFQTHFTFEEFRRSSNPLSLLASVHQLQGFTYTATAIQNVVHRLFHASYGARRDAAKILIVITDGKKEGDSLDYKDVIPMADAAGIIRYAIGVGLAFQNRNSWKELNDIASKPSQEHIFKVEDFDALKDIQNQLKEKIFAIEGTETTSSSSFELEMAQEGFSAVFTPDGPVLGAVGSFTWSGGAFLYPPNMSPTFINMSQENVDMRDSYLGYSTELALWKGVQSLVLGAPRYQHTGKAVIFTQVSRQWRMKAEVTGTQIGSYFGASLCSVDVDSDGSTDLVLIGAPHYYEQTRGGQVSVCPLPRGWRRWWCDAVLYGEQGHPWGRFGAALTVLGDVNGDKLTDVVIGAPGEEENRGAVYLFHGVLGPSISPSHSQRIAGSQLSSRLQYFGQALSGGQDLTQDGLVDLAVGARGQVLLLRTRPVLWVGVSMQFIPAEIPRSAFECREQVVSEQTLVQSNICLYIDKRSKNLLGSRDLQSSVTLDLALDPGRLSPRATFQETKNRSLSRVRVLGLKAHCENFNLLLPSCVEDSVTPITLRLNFTLVGKPLLAFRNLRPMLAADAQRYFTASLPFEKNCGADHICQDNLGISFSFPGLKSLLVGSNLELNAEVMVWNDGEDSYGTTITFSHPAGLSYRYVAEGQKQGQLRSLHLTCDSAPVGSQGTWSTSCRINHLIFRGGAQITFLATFDVSPKAVLGDRLLLTANVSSENNTPRTSKTTFQLELPVKYAVYTVVSSHEQFTKYLNFSESEEKESHVAMHRYQVNNLGQRDLPVSINFWVPVELNQEAVWMDVEVSHPQNPSLRCSSEKIAPPASDFLAHIQKNPVLDCSIAGCLRFRCDVPSFSVQEELDFTLKGNLSFGWVRQILQKKVSVVSVAEITFDTSVYSQLPGQEAFMRAQTTTVLEKYKVHNPTPLIVGSSIGGLLLLALITAVLYKVGFFKRQYKEMMEEANGQIAPENGTQTPSPPTPHYPQDNV

SEQ ID NO: 7265 - protein, 181 aa, Homo Sapiens
MTRTRAALLLFTALATSLGFNLDTEELTAFRVDSAGFGDSVVQYANSWVVVGAPQKITAANQTGGLYQCGYSTGACEPIGLQVPPEAVNMSLGLSLASTTSPSQLLLTQRLPVSRQGECRDHQGFEELTHIQLGVRWARDSLARVDQKEGIWKKSYHVLQWFLTLLPAHPADRPHAAGPFL

SEQ ID NO: 7266 - protein, 49 aa, Homo Sapiens
MNLQPIFWIGLISSVCCVFAQTDENRCLKANAKSCGECIQAGPNCGWCT

SEQ ID NO: 7267 - protein, 89 aa, Homo Sapiens
MNLQPIFWIGLISSVCCVFAQTDENRCLKANAKSCGECIQAGPNCGWCTNSTFLQEGMPTSARCDDLEALKKKGCPPDDIENPRGSKDI

SEQ ID NO: 7268 - protein, 104 aa, Homo Sapiens
MNLQPIFWIGLISSVCCVFAQTDENRCLKANAKSCGECIQAGPNCGWCTNSTFLQEGMPTSARCDDLEALKKKGCPPDDIENPRGSKDIKKNKNVTNRSKGTAE

SEQ ID NO: 7269 - protein, 125 aa, Homo Sapiens
MNLQPIFWIGLISSVCCVFAQTDENRCLKANAKSCGECIQAGPNCGWCTNSTFLQEGMPTSARCDDLEALKKKGCPPDDIENPRGSKDIKKNKNVTNRSKGTAEKLKPEDITQIQPQQLVLRLRS

SEQ ID NO: 7270 - protein, 136 aa, Homo Sapiens
MNLQPIFWIGLISSVCCVFAQTDENRCLKANAKSCGECIQAGPNCGWCTNSTFLQEGMPTSARCDDLEALKKKGCPPDDIENPRGSKDIKKNKNVTNRSKGTAEKLKPEDITQIQPQQLVLRLRSGEPQTFTLKFK

SEQ ID NO: 7271 - protein, 143 aa, Homo Sapiens
MNLQPIFWIGLISSVCCVFAQTDENRCLKANAKSCGECIQAGPNCGWCTNSTFLQEGMPTSARCDDLEALKKKGCPPDDIENPRGSKDIKKNKNVTNRSKGTAEKLKPEDITQIQPQQLVLRLRSGEPQTFTLKFKRAEDYPI

SEQ ID NO: 7272 - protein, 163 aa, Homo Sapiens
MNLQPIFWIGLISSVCCVFAQTDENRCLKANAKSCGECIQAGPNCGWCTNSTFLQEGMPTSARCDDLEALKKKGCPPDDIENPRGSKDIKKNKNVTNRSKGTAEKLKPEDITQIQPQQLVLRLRSGEPQTFTLKFKRAEDYPIDLYYLMDLSYSMKDDLENVK

SEQ ID NO: 7273 - protein, 798 aa, Homo Sapiens
MNLQPIFWIGLISSVCCVFAQTDENRCLKANAKSCGECIQAGPNCGWCTNSTFLQEGMPTSARCDDLEALKKKGCPPDDIENPRGSKDIKKNKNVTNRSKGTAEKLKPEDITQIQPQQLVLRLRSGEPQTFTLKFKRAEDYPIDLYYLMDLSYSMKDDLENVKSLGTDLMNEMRRITSDFRIGFGSFVEKTVMPYISTTPAKLRNPCTSEQNCTSPFSYKNVLSLTNKGEVFNELVGKQRISGNLDSPEGGFDAIMQVAVCGSLIGWRNVTRLLVFSTDAGFHFAGDGKLGGIVLPNDGQCHLENNMYTMSHYYDYPSIAHLVQKLSENNIQTIFAVTEEFQPVYKELKNLIPKSAVGTLSANSSNVIQLIIDAYNSLSSEVILENGKLSEGVTISYKSYCKNGVNGTGENGRKCSNISIGDEVQFEISITSNKCPKKDSDSFKIRPLGFTEEVEVILQYICECECQSEGIPESPKCHEGNGTFECGACRCNEGRVGRHCECSTDEVNSEDMDAYCRKENSSEICSNNGECVCGQCVCRKRDNTNEIYSGKFCECDNFNCDRSNGLICGGNGVCKCRVCECNPNYTGSACDCSLDTSTCEASNGQICNGRGICECGVCKCTDPKFQGQTCEMCQTCLGVCAEHKECVQCRAFNKGEKKDTCTQECSYFNITKVESRDKLPQPVQPDPVSHCKEKDVDDCWFYFTYSVNGNNEVMVHVVENPECPTGPDIIPIVAGVVAGIVLIGLALLLIWKLLMIIHDRREFAKFEKEKMNAKWDTGENPIYKSAVTTVVNPKYEGK

SEQ ID NO: 7274 - protein, 798 aa, Homo Sapiens; identical to SEQ ID NO: 7273

SEQ ID NO: 7275 - protein, 801 aa, Homo Sapiens
MNLQPIFWIGLISSVCCVFAQTDENRCLKANAKSCGECIQAGPNCGWCTNSTFLQEGMPTSARCDDLEALKKKGCPPDDIENPRGSKDIKKNKNVTNRSKGTAEKLKPEDITQIQPQQLVLRLRSGEPQTFTLKFKRAEDYPIDLYYLMDLSYSMKDDLENVKSLGTDLMNEMRRITSDFRIGFGSFVEKTVMPYISTTPAKLRNPCTSEQNCTSPFSYKNVLSLTNKGEVFNELVGKQRISGNLDSPEGGFDAIMQVAVCGSLIGWRNVTRLLVFSTDAGFHFAGDGKLGGIVLPNDGQCHLENNMYTMSHYYDYPSIAHLVQKLSENNIQTIFAVTEEFQPVYKELKNLIPKSAVGTLSANSSNVIQLIIDAYNSLSSEVILENGKLSEGVTISYKSYCKNGVNGTGENGRKCSNISIGDEVQFEISITSNKCPKKDSDSFKIRPLGFTEEVEVILQYICECECQSEGIPESPKCHEGNGTFECGACRCNEGRVGRHCECSTDEVNSEDMDAYCRKENSSEICSNNGECVCGQCVCRKRDNTNEIYSGKFCECDNFNCDRSNGLICGGNGVCKCRVCECNPNYTGSACDCSLDTSTCEASNGQICNGRGICECGVCKCTDPKFQGQTCEMCQTCLGVCAEHKECVQCRAFNKGEKKDTCTQECSYFNITKVESRDKLPQPVQPDPVSHCKEKDVDDCWFYFTYSVNGNNEVMVHVVENPECPTGPDIIPIVAGVVAGIVLIGLALLLIWKLLMIIHDRREFAKFEKEKMNAKWDTQENPIYKSPINNFKNPNYGRKAGL

SEQ ID NO: 7276 - protein, 152 aa, Homo Sapiens
MNLQPIFWIGLISSVCCVFAQTDENRCLKANAKSCGECIQAGPNCGWCTNSVSKTFLQEGMPTSARCDDLEALKKKGCPPDDIENPRGSKDIKKNKNVTNRSKGTAEKLKPEDITQIQPQQLVLRLRSGEPQTFTLKFKRAEDYPIDLYYLM

SEQ ID NO: 7277 - protein, 14 aa, Homo Sapiens
MPTSARCDDLEALK

SEQ ID NO: 7278 - protein, 31 aa, Homo Sapiens
MPTSARCDDLEALKKKGCPPDDIENPRGSKD

SEQ ID NO: 7279 - protein, 98 aa, Homo Sapiens
MPTSARCDDLEALKKKGCPPDDIENPRGSKDIKKNKNVTNRSKGTAEKLKPEDITQIQPQQLVLRLRSGEPQTFTLKFKRAEDYPIDLYYLMDLSYSM

SEQ ID NO: 7280 - protein, 108 aa, Homo Sapiens
  misc_feature (1)..(1): Xaa can be any naturally occurring amino acid
XDMDAYCRKENSSEICSNNGECVCGQCVCRKRDNTNEIYSGKFCECDNFNCDRSNGLICGGNGVCKCRVCECNPNYTGSACDCSLDTSTCEASNGQICNGRGICECGV

SEQ ID NO: 7281 - protein, 70 aa, Homo Sapiens
  misc_feature (1)..(1): Xaa can be any naturally occurring amino acid
XVAGVVAGIVLIGLALLLIWKLLMIIHDRREFAKFEKEKMNAKWDTQENPIYKSPINNFKNPNYGRKAGL

SEQ ID NO: 7282 - protein, 322 aa, Homo Sapiens
GRLGKDLATGVLSQECTKFKVSSCRECIESGPGCTWCQKLNFTGPGDPDSIRCDTRPQLLMRGCAADDIMDPTSLAETQEDHNGGQKQLSPQKVTLYLRPGQAAAFNVTFRRAKGYPIDLYYLMDLSYSMLDDLRNVKKLGGDLLRALNEITESGRIGFGSFVDKTVLPFVNTHPDKLRNPCPNKEKECQPPFAFRHVLKLTNNSNQFQTEVGKQLISGNLDAPEGGLDAMMQVAACPEEIGWRNVTRLLVFATDDGFHFAGDGKLGAILTPNDGRCHLEDNLYKRSNEFDYPSVGQLAHKLAENNIQPIFAVTSRMVKTYE

SEQ ID NO: 7283 - protein, 71 aa, Homo Sapiens
MLGLRPPLLALVGLLSLGCGRPRAPTHQPASSLSPLSGVHEVQGQQLPGMHRVGARLHLVPEAELHRAGGS

SEQ ID NO: 7284 - protein, 49 aa, Homo Sapiens
MLGLRPPLLALVGLLSLGCVLSQECTKFKVSSCRECIESGPGCTWCQKL

SEQ ID NO: 7285 - protein, 93 aa, Homo Sapiens
MLGLRPPLLALVGLLSLGCVLSQECTKFKVSSCRECIESGPGCTWCQKLGAALGPPAHATAASSPRRRSRVAPVCPRTEQGGQAPELHRAGGS

SEQ ID NO: 7286 - protein, 108 aa, Homo Sapiens
MLGLRPPLLALVGLLSLGCVLSQECTKFKVSSCRECIESGPGCTWCQKLGAALGPPAHATAASSPRRRSRVAPVCPRTEQGGQAPGGNYLGQAGFFPSPFWRFSAPLK

SEQ ID NO: 7287 - protein, 70 aa, Homo Sapiens
MLGLRPPLLALVGLLSLGCVLSQECTKFKVSSCRECIESGPGCTWCQKLNFTGPGDPDSIRCDTRPQLLM

SEQ ID NO: 7288 - protein, 712 aa, Homo Sapiens
MLGLRPPLLALVGLLSLGCVLSQECTKFKVSSCRECIESGPGCTWCQKLNFTGPGDPDSIRCDTRPQLLMRGCAADDIMDPTSLAETQEDHNGGQKQLSPQKVTLYLRPGFGSFVDKTVLPFVNTHPDKLRNPCPNKEKECQPPFAFRHVLKLTNNSNQFQTEVGKQLISGNLDAPEGGLDAMMQVAACPEEIGWRNVTRLLVFATDDGFHFAGDGKLGAILTPNDGRCHLEDNLYKRSNEFDYPSVGQLAHKLAENNIQPIFAVTSRMVKTYEKLTEIIPKSAVGELSEDSSNVVHLIKNAYNKLSSRVFLDHNALPDTLKVTYDSFCSNGVTHRNQPRGDCDGVQINVPITFQVKVTATECIQEQSFVIRALGFTDIVTVQVLPQCECRCRDQSRDRSLCHGKGFLECGICRCDTGYIGKNCECQTQGRSSQELEGSCRKDNNSIICSGLGDCVCGQCLCHTSDVPGKLIYGQYCECDTINCERYNGQVCGGPGRGLCFCGKCRCHPGFEGSACQCERTTEGCLNPRRVECSGRGRCRCNVCECHSGYQLPLCQECPGCPSPCGKYISCAECLKFEKGPFGKNCSAACPGLQLSNNPVKGRTCKERDSEGCWVAYTLEQQDGMDRYLIYVDESRECVAGPNIAAIVGGTVAGIVLIGILLLVIWKALIHLSDLREYRRFEKEKLKSQWNNDNPLFKSATTTVMNPKFAES

SEQ ID NO: 7289 - protein, 120 aa, Homo Sapiens
MLGLRPPLLALVGLLSLGCVLSQECTKFKVSSCRECIESGPGCTWCQKLNFTGPGDPDSIRCDTRPQLLMRGCAADDIMDPTSLAETQEDHNGGQKQLSPQKVTLYLRPGQAAAFNVTFR

SEQ ID NO: 7290 - protein, 160 aa, Homo Sapiens
MLGLRPPLLALVGLLSLGCVLSQECTKFKVSSCRECIESGPGCTWCQKLNFTGPGDPDSIRCDTRPQLLMRGCAADDIMDPTSLAETQEDHNGGQKQLSPQKVTLYLRPGQAAAFNVTFRRAKGYPIDLYYLMDLSYSMLDDLRNVKKLGGDLLRALNEI

SEQ ID NO: 7291 - protein, 166 aa, Homo Sapiens
MLGLRPPLLALVGLLSLGCVLSQECTKFKVSSCRECIESGPGCTWCQKLNFTGPGDPDSIRCDTRPQLLMRGCAADDIMDPTSLAETQEDHNGGQKQLSPQKVTLYLRPGQAAAFNVTFRRAKGYPIDLYYLMDLSYSMLDDLRNVKKLGGDLLRALNEITESGRI

SEQ ID NO: 7292 - protein, 769 aa, Homo Sapiens
MLGLRPPLLALVGLLSLGCVLSQECTKFKVSSCRECIESGPGCTWCQKLNFTGPGDPDSIRCDTRPQLLMRGCAADDIMDPTSLAETQEDHNGGQKQLSPQKVTLYLRPGQAAAFNVTFRRAKGYPIDLYYLMDLSYSMLDDLRNVKKLGGDLLRALNEITESGRIGFGSFVDKTVLPFVNTHPDKLRNPCPNKEKECQPPFAFRHVLKLTNNSNQFQTEVGKQLISGNLDAPEGGLDAMMQVAACPEEIGWRNVTRLLVFATDDGFHFAGDGKLGAILTPNDGRCHLEDNLYKRSNEFDYPSVGQLAHKLAENNIQPIFAVTSRMVKTYEKLTEIIPKSAVGELSEDSSNVVHLIKNAYNKLSSRVFLDHNALPDTLKVTYDSFCSNGVTHRNQPRGDCDGVQINVPITFQVKVTATECIQEQSFVIRALGFTDIVTVQVLPQCECRCRDQSRDRSLCHGKGFLECGICRCDTGYIGKNCECQTQGRSSQELEGSCRKDNNSIICSGLGDCVCGQCLCHTSDVPGKLIYGQYCECDTINCERYNGQVCGGPGRGLCFCGKCRCHPGFEGSACQCERTTEGCLNPRRVECSGRGRCRCNVCECHSGYQLPLCQECPGCPSPCGKYISCAECLKFEKGPFGKNCSAACPGLQLSNNPVKGRTCKERDSEGCWVAYTLEQQDGMDRYLIYVDESRECVAGPNIAAIVGGTVAGIVLIGILLLVIWKALIHLSDLREYRRFEKEKLKSQWNNDNPLFKSATTTVMNPKFAES

SEQ ID NO: 7293 - protein, 769 aa, Homo Sapiens; identical to SEQ ID NO: 7292

SEQ ID NO: 7294 - protein, 769 aa, Homo Sapiens; identical to SEQ ID NO: 7292

SEQ ID NO: 7295 - protein, 769 aa, Homo Sapiens; identical to SEQ ID NO: 7292

SEQ ID NO: 7296 - protein, 769 aa, Homo Sapiens; identical to SEQ ID NO: 7292

SEQ ID NO: 7297 - protein, 37 aa, Homo Sapiens
MRGCAADDIMDPTSLAETQEDHNGGQKQLSPQKVTLY

SEQ ID NO: 7298 - protein, 49 aa, Homo Sapiens
MRGCAADDIMDPTSLAETQEDHNGGQKQLSPQKVTLYLRPGQAAAFNVT

SEQ ID NO: 7299 - protein, 35 aa, Homo Sapiens
LKSCMGLKIGDTVRWAGQGLCPGASVGTQPPFFLL

SEQ ID NO: 7300 - protein, 788 aa, Homo Sapiens
MRARPRPRPLWATVLALGALAGVGVGGPNICTTRGVSSCQQCLAVSPMCAWCSDEALPLGSPRCDLKENLLKDNCAPESIEFPVSEARVLEDRPLSDKGSGDSSQVTQVSPQRIALRLRPDDSKNFSIQVRQVEDYPVDIYYLMDLSYSMKDDLWSIQNLGTKLATQMRKLTSNLRIGFGAFVDKPVSPYMYISPPEALENPCYDMKTTCLPMFGYKHVLTLTDQVTRFNEEVKKQSVSRNRDAPEGGFDAIMQATVCDEKIGWRNDASHLLVFTTDAKTHIALDGRLAGIVQPNDGQCHVGSDNHYSASTTMDYPSLGLMTEKLSQKNINLIFAVTENVVNLYQNYSELIPGTTVGVLSMDSSNVLQLIVDAYGKIRSKVELEVRDLPEELSLSFNATCLNNEVIPGLKSCMGLKIGDTVSFSIEAKVRGCPQEKEKSFTIKPVGFKDSLIVQVTFDCDCACQAQAEPNSHRCNNGNGTFECGVCRCGPGWLGSQCECSEEDYRPSQQDECSPREGQPVCSQRGECLCGQCVCHSSDFGKITGKYCECDDFSCVRYKGEMCSGHGQCSCGDCLCDSDWTGYYCNCTTRTDTCMSSNGLLCSGRGKCECGSCVCIQPGSYGDTCEKCPTCPDACTFKKECVECKKFDRGALHDENTCNRYCRDEIESVKELKDTGKDAVNCTYKNEDDCVVRFQYYEDSSGKSILYVVEEPECPKGPDILVVLLSVMGAILLIGLAALLIWKLLITIHDRKEFAKFEEERARAKWDTANNPLYKEATSTFTNITYRGT

SEQ ID NO: 7301 - protein, 443 aa, Homo Sapiens
MRARPRPRPLWATVLALGALAGVGVGGPNICTTRGVSSCQQCLAVSPMCAWCSDEALPLGSPRCDLKENLLKDNCAPESIEFPVSEARVLEDRPLSDKGSGDSSQVTQVSPQRIALRLRPDDSKNFSIQVRQVEDYPVDIYYLMDLSYSMKDDLWSIQNLGTKLATQMRKLTSNLRIGFGAFVDKPVSPYMYISPPEALENPCYDMKTTCLPMFGYKHVLTLTDQVTRFNEEVKKQSVSRNRDAPEGGFDAIMQATVCDEKIGWRNDASHLLVFTTDAKTHIALDGRLAGIVQPNDGQCHVGSDNHYSASTTMDYPSLGLMTEKLSQKNINLIFAVTENVVNLYQNYSELIPGTTVGVLSMDSSNVLQLIVDAYGKIRSKVELEVRDLPEELSLSFNATCLNNEVIPGLKSCMGLKIGDTVRWAGQGLCPGASVGTQPPFFLL

SEQ ID NO: 7302 - protein, 89 aa, Homo Sapiens
MVALPMVLVLLLVLSRGESELDAKIPSTGDATEWRNPHLSMLGSCQPAPSCQKCILSHPSCAWCKQLNFTASGEAEARRCARREELLAR

SEQ ID NO: 7303 - protein, 93 aa, Homo Sapiens
MVALPMVLVLLLVLSRGESELDAKIPSTGDATEWRNPHLSMLGSCQPAPSCQKCILSHPSCAWCKQLNFTASGEAEARRCARREELLARGCPL

SEQ ID NO: 7304 - protein, 158 aa, Homo Sapiens
MVALPMVLVLLLVLSRGESELDAKIPSTGDATEWRNPHLSMLGSCQPAPSCQKCILSHPSCAWCKQLNFTASGEAEARRCARREELLARGCPLEELEEPRGQQEVLQDQPLSQGARGEGATQLAPQRVRVTLRPGEPQQLQVRFLRAEGYPVDLYYLM

SEQ ID NO: 7305 - protein, 798 aa, Homo Sapiens
MVALPMVLVLLLVLSRGESELDAKIPSTGDATEWRNPHLSMLGSCQPAPSCQKCILSHPSCAWCKQLNFTASGEAEARRCARREELLARGCPLEELEEPRGQQEVLQDQPLSQGARGEGATQLAPQRVRVTLRPGEPQQLQVRFLRAEGYPVDLYYLMDLSYSMKDDLERVRQLGHALLVRLQEVTHSVRIGFGSFVDKTVLPFVSTVPSKLRHPCPTRLERCQSPFSFHHVLSLTGDAQAFEREVGRQSVSGNLDSPEGGFDAILQAALCQEQIGWRNVSRLLVFTSDDTFHTAGDGKLGGIFMPSDGHCHLDSNGLYSRSTEFDYPSVGQVAQALSAANIQPIFAVTSAALPVYQELSKLIPKSAVGELSEDSSNVVQLIMDAYNSLSSTVTLEHSSLPPGVHISYESQCEGPEKREGKAEDRGQCNHVRINQTVTFWVSLQATHCLPEPHLLRLRALGFSEELIVELHTLCDCNCSDTQPQAPHCSDGQGHLQCGVCSCAPGRLGRLCECSVAELSSPDLESGCRAPNGTGPLCSGKGHCQCGRCSCSGQSSGHLCECDDASCERHEGILCGGFGRCQCGVCHCHANRTGRACECSGDMDSCISPEGGLCSGHGRCKCNRCQCLDGYYGALCDQCPGCKTPCERHRDCAECGAFRTGPLATNCSTACAHTNVTLALAPILDDGWCKERTLDNQLFFFLVEDDARGTVVLRVRPQEKGADHTQAIVLGCVGGIVAVGLGLVLAYRLSVEIYDRREYSRFEKEQQQLNWKQDSNPLYKSAITTTINPRFQEADSPTL

SEQ ID NO: 7306 - protein, 798 aa, Homo Sapiens; identical to SEQ ID NO: 7305

SEQ ID NO: 7307 - protein, 650 aa, Homo Sapiens
MVALPMVLVLLLVLSRGESELDAKIPSTGDATEWRNPHLSMLGSCQPAPSCQKCILSHPSCAWCKQLNFTASGEAEARRCARREELLARGCPLEELEEPRGQQEVLQDQPLSQGARGEGATQLAPQRVRVTLRPGEPQQLQVRFLRAEGYPVDLYYLMDLSYSMKDDLERVRQLGHALLVRLQEVTHSVRIGFGSFVDKTVLPFVSTVPSKLRHPCPTRLERCQSPFSFHHVLSLTGDAQAFEREVGRQSVSGNLDSPEGGFDAILQAALCQEQIGWRNVSRLLVFTSDDTFHTAGDGKLGGIFMPSDGHCHLDSNGLYSRSTEFDYPSVGQVAQALSAANIQPIFAVTSAALPVYQELSKLIPKSAVGELSEDSSNVVQLIMDAYNSLSSTVTLEHSSLPPGVHISYESQCEGPEKREGKAEDRGQCNHVRINQTVTFWVSLQATHCLPEPHLLRLRALGFSEELIVELHTLCDCNCSDTQPQAPHCSDGQGHLQCGVCRDCAECGAFRTGPLATNCSTACAHTNVTLALAPILDDGWCKERTLDNQLFFFLVEDDARGTVVLRVRPQEKGADHTQAIVLGCVGGIVAVGLGLVLAYRLSVEIYDRREYSRFEKEQQQLNWKQDSNPLYKSAITTTINPRFQEADSPTL

SEQ ID NO: 7308 - protein, 471 aa, Homo Sapiens
MVALPMVLVLLLVLSRGESELDAKIPSTGDATEWRNPHLSMLGSCQPAPSCQKCILSHPSCAWCKQLNFTASGEAEARRCARREELLARGCPLEELEEPRGQQEVLQDQPLSQGARGEGATQLAPQRVRVTLRPGEPQQLQVRFLRAEGYPVDLYYLMDLSYSMKDDLERVRQLGHALLVRLQEVTHSVRIGFGSFVDKTVLPFVSTVPSKLRHPCPTRLERCQSPFSFHHVLSLTGDAQAFEREVGRQSVSGNLDSPEGGFDAILQAALCQEQIGWRNVSRLLVFTSDDTFHTAGDGKLGGIFMPSDGHCHLDSNGLYSRSTEFDYPSVGQVAQALSAANIQPIFAVTSAALPVYQELSKLIPKSAVGELSEDSSNVVQLIMDAYNSLSSTVTLEHSSLPPGVHISYESQCEGPEKREGKAEDRGQCNHVRINQTGLCRVWGLQDWPTGHQLQYSLCPYQCDPGLGPYLG

SEQ ID NO: 7309 - protein, 117 aa, Homo Sapiens
  misc_feature (1)..(1): Xaa can be any naturally occurring amino acid
XSTACAHTNVTLALAPILDDGWCKERTLDNQLFFFLVEDDARGTVVLRVRPQEKGADHTQAIVLGCVGGIVAVGLGLVLAYRLSVEIYDRREYSRFEKEQQQLNWKQLLGFGSRLAS

SEQ ID NO: 7310 - protein, 353 aa, Homo Sapiens
MCKNSQDIICSNAGTCHCGRCKCDNSDGSGLVYGKFCECDDRECIDDETEEICGGHGKCYCGNCYCKAGWHGDKCEFQCDITPWESKRRCTSPDGKICSNRGTCVCGECTCHDVDPTGDWGDIHGDTCECDERDCRAVYDRYSDDFCSGHGQCNCGRCDCKAGWYGKKCEHPQSCTLSAEESIRKCQGSSDLPCSGRGKCECGKCTCYPPGDRRVYGKTCECDDRRCEDLDGVVCGGHGTCSCGRCVCERGWFGKLCQHPRKCNMTEEQSKNLCESADGILCSGKGSCHCGKCICSAEEWYISGEFCDCDDRDCDKHDGLICTGNGICSCGNCECWDGWNGNACEIWLGSEYP

SEQ ID NO: 7311 - protein, 401 aa, Homo Sapiens
MNLVAVMGAFNKGHGKCDCGKCKCDQGWYGDACQYPTNCDLTKKKSNQMCKNSQDIICSNAGTCHCGRCKCDNSDGSGLVYGKFCECDDRECIDDETEEICGGHGKCYCGNCYCKAGWHGDKCEFQCDITPWESKRRCTSPDGKICSNRGTCVCGECTCHDVDPTGDWGDIHGDTCECDERDCRAVYDRYSDDFCSGHGQCNCGRCDCKAGWYGKKCEHPQSCTLSAEESIRKCQGSSDLPCSGRGKCECGKCTCYPPGDRRVYGKTCECDDRRCEDLDGVVCGGHGTCSCGRCVCERGWFGKLCQHPRKCNMTEEQSKNLCESADGILCSGKGSCHCGKCICSAEEWYISGEFCDCDDRDCDKHDGLICTGNGICSCGNCECWDGWNGNACEIWLGSEYP

SEQ ID NO: 7312 - protein, 494 aa, Homo Sapiens
MRPPGFRNFLLLASSLLFAGLSAVPQSFSPSLRSWPGAACRLSRAESERRCRAPGQPPGAALCHGRGRCDCGVCICHVTEPGMFFGPLCECHEWVCETYDGSTCAGHGKCDCGKCKCDQGWYGDACQYPTNCDLTKKKSNQMCKNSQDIICSNAGTCHCGRCKCDNSDGSGLVYGKFCECDDRECIDDETEEICGGHGKCYCGNCYCKAGWHGDKCEFQCDITPWESKRRCTSPDGKICSNRGTCVCGECTCHDVDPTGDWGDIHGDTCECDERDCRAVYDRYSDDFCSGHGQCNCGRCDCKAGWYGKKCEHPQSCTLSAEESIRKCQGSSDLPCSGRGKCECGKCTCYPPGDRRVYGKTCECDDRRCEDLDGVVCGGHGTCSCGRCVCERGWFGKLCQHPRKCNMTEEQSKNLCESADGILCSGKGSCHCGKCICSAEEWYISGEFCDCDDRDCDKHDGLICTGNGICSCGNCECWDGWNGNACEIWLGSEYP

SEQ ID NO: 7313 - protein, 445 aa, Homo Sapiens
MRPPGFRNFLLLASSLLFAGLSAVPQSFSPSLRSWPGAACRLSRAESERRCRAPGQPPGAALCHGRGRCDCGVCICHVTEPGMFFGPLCECHEWVCETYDGSTCAGTCHCGRCKCDNSDGSGLVYGKFCECDDRECIDDETEEICGGHGKCYCGNCYCKAGWHGDKCEFQCDITPWESKRRCTSPDGKICSNRGTCVCGECTCHDVDPTGDWGDIHGDTCECDERDCRAVYDRYSDDFCSGHGQCNCGRCDCKAGWYGKKCEHPQSCTLSAEESIRKCQGSSDLPCSGRGKCECGKCTCYPPGDRRVYGKTCECDDRRCEDLDGVVCGGHGTCSCGRCVCERGWFGKLCQHPRKCNMTEEQSKNLCESADGILCSGKGSCHCGKCICSAEEWYISGEFCDCDDRDCDKHDGLICTGNGICSCGNCECWDGWNGNACEIWLGSEYP

SEQ ID NO: 7314 - protein, 401 aa, Homo Sapiens
MSGCARPTTGAPVQAMVSVGKCKCDQGWYGDACQYPTNCDLTKKKSNQMCKNSQDIICSNAGTCHCGRCKCDNSDGSGLVYGKFCECDDRECIDDETEEICGGHGKCYCGNCYCKAGWHGDKCEFQCDITPWESKRRCTSPDGKICSNRGTCVCGECTCHDVDPTGDWGDIHGDTCECDERDCRAVYDRYSDDFCSGHGQCNCGRCDCKAGWYGKKCEHPQSCTLSAEESIRKCQGSSDLPCSGRGKCECGKCTCYPPGDRRVYGKTCECDDRRCEDLDGVVCGGHGTCSCGRCVCERGWFGKLCQHPRKCNMTEEQSKNLCESADGILCSGKGSCHCGKCICSAEEWYISGEFCDCDDRDCDKHDGLICTGNGICSCGNCECWDGWNGNACEIWLGSEYP

SEQ ID NO: 7315 - protein, 208 aa, Homo Sapiens
  misc_feature (1)..(1): Xaa can be any naturally occurring amino acid
XCEGHGQCNCGRCDCKAGWYGKKCEHPQSCTLSAEESIRKCQGSSDLPCSGRGKCECGKCTCYPPGDRRVYGKTCECDDRRCEDLDGVVCGGHGTCSCGRCVCERGWFGKLCQHPRKCNMTEEQSKNLCESADGILCSGKGSCHCGKCICSAEEWYISGEFCDCDDRDCDKHDGLICTGNGICSCGNCECWDGWNGNACEIWLGSEYP

SEQ ID NO: 7316 - protein, 911 aa, Homo Sapiens
MDGAMGPRGLLLCMYLVSLLILQAMPALGSATGRSKSSEKRQAVDTAVDGVFIRSLKVNCKVTSRFAHYVVTSQVVNTANEAREVAFDLEIPKTAFISDFAVTADGNAFIGDIKDKVTAWKQYRKAAISGENAGLVRASGRTMEQFTIHLTVNPQSKVTFQLTYEEVLKRNHMQYEIVIKVKPKQLVHHFEIDVDIFEPQGISKLDAQASFLPKELAAQTIKKSFSGKKGHVLFRPTVSQQQSCPTCSTSLLNGHFKVTYDVSRDKICDLLVANNHFAHFFAPQNLTNMNKNVVFVIDISGSMRGQKVKQTKEALLKILGDMQPGDYFDLVLFGTRVQSWKGSLVQASEANLQAAQDFVRGFSLDEATNLNGGLLRGIEILNQVQESLPELSNHASILIMLTDGDPTEGVTDRSQILKNVRNAIRGRFPLYNLGFGHNVDFNFLEVMSMENNGRAQRIYEDHDATQQLQGFYSQVAKPLLVDVDLQYPQDAVLALTQNHHKQYYEGSEIVVAGRIADNKQSSFKADVQAHGEGQEFSITCLVDEEEMKKLLRERGHMLENHVERLWAYLTIQELLAKRMKVDREERANLSSQALQMSLDYGFVTPLTSMSIRGMADQDGLKPTIDKPSEDSPPLEMLGPRRTFVLSALQPSPTHSSSNTQRLPDRVTGVDTDPHFIIHVPQKEDTLCFNINEEPGVILSLVQDPNTGFSVNGQLIGNKARSPGQHDGTYFGRLGIANPATDFQLEVTPQNITLNPGFGGPVFSWRDQAVLRQDGVVVTINKKRNLVVSVDDGGTFEVVLHRVWKGSSVHQDFLGFYVLDSHRMSARTHGLLGQFFHPIGFEVSDIHPGSDPTKPDATMVVRNRRLTVTRGLQKDYSKDPWHGAEVSCWFIHNNGAGLIDGAYTDYIVPDIF

SEQ ID NO: 7317 - protein, 213 aa, Homo Sapiens
MDGAMGPRGLLLCMYLVSLLILQAMPALGSATGRSKSSEKRQAVDTAVDGVFIRSLKVNCKVTSRFAHYVVTSQVVNTANEAREVAFDLEIPKTAFISDFAVTADGNAFIGDIKDKVTAWKQYRKAAISGENAGLVRASGRTMEQFTIHLTVNPQSKVTFQLTYEEVLKRNHMQYEIVIKVKPKQLVHHFEVDHRSRGRGPAPLSVTMAPNTG

SEQ ID NO: 7318 - protein, 623 aa, Homo Sapiens
MNKNVVFVIDISGSMRGQKVKQTKEALLKILGDMQPGDYFDLVLFGTRVQSWKGSLVQASEANLQAAQDFVRGFSLDEATNLNGGLLRGIEILNQVQESLPELSNHASILIMLTDGDPTEGVTDRSQILKNVRNAIRGRFPLYNLGFGHNVDFNFLEVMSMENNGRAQRIYEDHDATQQLQGFYSQVAKPLLVDVDLQYPQDAVLALTQNHHKQYYEGSEIVVAGRIADNKQSSFKADVQAHGEGQEFSITCLVDEEEMKKLLRERGHMLENHVERLWAYLTIQELLAKRMKVDREERANLSSQALQMSLDYGFVTPLTSMSIRGMADQDGLKPTIDKPSEDSPPLEMLGPRRTFVLSALQPSPTHSSSNTQRLPDRVTGVDTDPHFIIHVPQKEDTLCFNINEEPGVILSLVQDPNTGFSVNGQLIGNKARSPGQHDGTYFGRLGIANPATDFQLEVTPQNITLNPGFGGPVFSWRDQAVLRQDGVVVTINKKRNLVVSVDDGGTFEVVLHRVWKGSSVHQDFLGFYVLDSHRMSARTHGLLGQFFHPIGFEVSDIHPGSDPTKPDATMVVRNRRLTVTRGLQKDYSKDPWHGAEVSCWFIHNNGAGLIDGAYTDYIVPDIF

SEQ ID NO: 7319 - protein, 277 aa, Homo Sapiens
MPLPLPSAFVLSALQPSPTHSSSNTQRLPDRVTGVDTDPHFIIHVPQKEDTLCFNINEEPGVILSLVQDPNTGFSVNGQLIGNKARSPGQHDGTYFGRLGIANPATDFQLEVTPQNITLNPGFGGPVFSWRDQAVLRQDGVVVTINKKRNLVVSVDDGGTFEVVLHRVWKGSSVHQDFLGFYVLDSHRMSARTHGLLGQFFHPIGFEVSDIHPGSDPTKPDATMVVRNRRLTVTRGLQKDYSKDPWHGAEVSCWFIHNNGAGLIDGAYTDYIVPDIF

SEQ ID NO: 7320 - protein, 464 aa, Homo Sapiens
SMENNGRAQRIYEDHDATQQLQGFYSQVAKPLLVDVDLQYPQDAVLALTQNHHKQYYEGSEIVVAGRIADNKQSSFKADVQAHGEGQEFSITCLVDEEEMKKLLRERGHMLENHVERLWAYLTIQELLAKRMKVDREERANLSSQALQMSLDYGFVTPLTSMSIRGMADQDGLKPTIDKPSEGIGCREMLGPRRTFVLSALQPSPTHSSSNTQRLPDRVTGVDTDPHFIIHVPQKEDTLCFNINEEPGVILSLVQDPNTGFSVNGQLIGNKARSPGQHDGTYFGRLGIANPATDFQLEVTPQNITLNPGFGGPVFSWRDQAVLRQDGVVVTINKKRNLVVSVDDGGTFEVVLHRVWKGSSVHQDFLGFYVLDSHRMSARTHGLLGQFFHPIGFEVSDIHPGSDPTKPDATMVVRNRRLTVTRGLQKDYSKDPWHGAEVSCWFIHNNGAGLIDGAYTDYIVPDIF

SEQ ID NO: 7321 - protein, 74 aa, Homo Sapiens
  misc_feature (1)..(1): Xaa can be any naturally occurring amino acid
XMKVDREERANLSSQALQMSLDYGFVTPLTSMSIRGMADQDGLKPTIDKPSEDSPPLEMLGPRRTPIPSGCQTE

SEQ ID NO: 7322 - protein, 935 aa, Homo Sapiens
MKRLTCFFICFFLSEVSGFEIPINGLSEFVDYEDLVELAPGKFQLVAENRRYQEEVDQVTLYSYKVQSTITSRMATTMIQSKVVNNSPQPQNVVFDVQIPKGAFISNFSMTVDGKTFRSSIKEKTVGRALYAQARAKGKTAGLVRSSALDMENFRTEVNVLPGAKVQFELHYQEVKWRKLGSYEHRIYLQPGRLAKHLEVDVWVIEPQGLRFLHVPDTFEGHFDGVPVISKGQQKAHVSFKPTVAQQRICPNCRETAVDGELVVLYDVKREEKAGELEVFNGYFVHFFAPDNLDPIPKNILFVIDVSGSMWGVKMKQTVEAMKTILDDLRAEDHFSVIDFNQNIRTWRNDLISATKTQVADAKRYIEKIQPSGGTNINEALLRAIFILNEANNLGLLDPNSVSLIILVSDGDPTVGELKLSKIQKNVKENIQDNISLFSLGMGFDVDYDFLKRLSNENHGIAQRIYGNQDTSSQLKKFYNQVSTPLLRNVQFNYPHTSVTDVTQNNFHNYFGGSEIVVAGKFDPAKLDQIESVITATSANTQLVLETLAQMDDLQDFLSKDKHADPDFTRKLWAYLTINQLLAERSLAPTAAAKRRITRSILQMSLDHHIVTPLTSLVIENEAGDERMLADAPPQDPSCCSGALYYGSKVVPDSTPSWANPSPTPVISMLAQGSQVLESTPPPHVMRVENDPHFIIYLPKSQKNICFNIDSEPGKILNLVSDPESGIVVNGQLVGAKKPNNGKLSTYFGKLGFYFQSEDIKIEISTETITLSHGSSTFSLSWSDTAQVTNQRVQISVKKEKVVTITLDKEMSFSVLLHRVWKKHPVNVDFLGIYIPPTNKFSPKAHGLIGQFMQEPKIHIFNERPGKDPEKPEASMEVKGQKLIITRGLQKDYRTDLVFGTDVTCWFVHNSGKGFIDGHYKDYFVPQLYSFLKRP

SEQ ID NO: 7323 - protein, 946 aa, Homo Sapiens
MKRLTCFFICFFLSEVSGFEIPINGLSEFVDYEDLVELAPGKFQLVAENRRYQRSLPGESEEMMEEVDQVTLYSYKVQSTITSRMATTMIQSKVVNNSPQPQNVVFDVQIPKGAFISNFSMTVDGKTFRSSIKEKTVGRALYAQARAKGKTAGLVRSSALDMENFRTEVNVLPGAKVQFELHYQEVKWRKLGSYEHRIYLQPGRLAKHLEVDVWVIEPQGLRFLHVPDTFEGHFDGVPVISKGQQKAHVSFKPTVAQQRICPNCRETAVDGELVVLYDVKREEKAGELEVFNGYFVHFFAPDNLDPIPKNILFVIDVSGSMWGVKMKQTVEAMKTILDDLRAEDHFSVIDFNQNIRTWRNDLISATKTQVADAKRYIEKIQPSGGTNINEALLRAIFILNEANNLGLLDPNSVSLIILVSDGDPTVGELKLSKIQKNVKENIQDNISLFSLGMGFDVDYDFLKRLSNENHGIAQRIYGNQDTSSQLKKFYNQVSTPLLRNVQFNYPHTSVTDVTQNNFHNYFGGSEIVVAGKFDPAKLDQIESVITATSANTQLVLETLAQMDDLQDFLSKDKHADPDFTRKLWAYLTINQLLAERSLAPTAAAKRRITRSILQMSLDHHIVTPLTSLVIENEAGDERMLADAPPQDPSCCSGALYYGSKVVPDSTPSWANPSPTPVISMLAQGSQVLESTPPPHVMRVENDPHFIIYLPKSQKNICFNIDSEPGKILNLVSDPESGIVVNGQLVGAKKPNNGKLSTYFGKLGFYFQSEDIKIEISTETITLSHGSSTFSLSWSDTAQVTNQRVQISVKKEKVVTITLDKEMSFSVLLHRVWKKHPVNVDFLGIYIPPTNKFSPKAHGLIGQFMQEPKIHIFNERPGKDPEKPEASMEVKGQKLIITRGLQKDYRTDLVFGTDVTCWFVHNSGKGFIDGHYKDYFVPQLYSFLKRP

SEQ ID NO: 7324 - protein, 237 aa, Homo Sapiens
MKRLTCFFICFFLSEVSGFEIPINGLSERSLPGESEEMMEEVDQVTLYSYKVQSTITSRMATTMIQSKVVNNSPQPQNVVFDVQIPKGAFISNFSMTVDGKTFRSSIKEKTVGRALYAQARAKGKTAGLVRSSALDMENFRTEVNVLPGAKVQFELHYQEVKWRKLGSYEHRIYLQPGRLAKHLEVDVWVIEPQGLRFLHVPDTFEGHFDGVPVISKGQQKAHVSFKPTVAQQRICP

SEQ ID NO: 7325 - protein, 698 aa, Homo Sapiens
MAFAWWPCLILALLSSLAASGFPRSPFRLLGKRSLPEGVANGIEVYSTKINSKVTSRFAHNVVTMRAVNRADTAKEVSFDVELPKTAFITNFTLTIDGVTYPGNVKEKEVAKKQYEKAVSQGKTAGLVKASGRKLEKFTVSVNVAAGSKVTFELTYEELLKRHKGKYEMYLKVQPKQLVKHFEIEVDIFEPQGISMLDAEASFITNDLLGSALTKSFSGKKGHVSFKPSLDQQRSCPTCTDSLLNGDFTITYDVNRESPGNVQIVNGYFVHFFAPQGLPVVPKNVAFVIDISGSMAGRKLEQTKEALLRILEDMQEEDYLNFILFSGDVSTWKEHLVQATPENLQEARTFVKSMEDKGMTNINDGLLRGISMLNKAREEHRIPERSTSIVIMLTDGDANVGESRPEKIQENVRNAIGGKFPLYNLGFGNNLNYNFLENMALENHGFARRIYEDSDADLQLQGFYEEVANPLLTGVEMEYPENAILDLTQNTYQHFYDGSEIVVAGRLVDEDMNSFKADVKGHGATNDLTFTEEVTTEKITLWNRAVPSTFSWLDTVTVTQDGLSMMINRKNMVVSFGDGVTFVVVLHQVWKKHPVHRDFLGFYVVDSHRMSAQTHGLLGQFFQPFDFKVSDIRPGSDPTKPDATLVVKNHQLIVTRGSQKDYRKDASIGTKVVCWFVHNNGEGLIDGVHTDYIVPNLF

SEQ ID NO: 7326 - protein, 890 aa, Homo Sapiens
MAFAWWPCLILALLSSLAASGFPRSPFRLLGKRSLPEGVANGIEVYSTKINSKVTSRFAHNVVTMRAVNRADTAKEVSFDVELPKTAFITNFTLTIDGVTYPGNVKEKEVAKKQYEKAVSQGKTAGLVKASGRKLEKFTVSVNVAAGSKVTFELTYEELLKRHKGKYEMYLKVQPKQLVKHFEIEVDIFEPQGISMLDAEASFITNDLLGSALTKSFSGKKGHVSFKPSLDQQRSCPTCTDSLLNGDFTITYDVNRESPGNVQIVNGYFVHFFAPQGLPVVPKNVAFVIDISGSMAGRKLEQTKEALLRILEDMQEEDYLNFILFSGDVSTWKEHLVQATPENLQEARTFVKSMEDKGMTNINDGLLRGISMLNKAREEHRIPERSTSIVIMLTDGDANVGESRPEKIQENVRNAIGGKFPLYNLGFGNNLNYNFLENMALENHGFARRIYEDSDADLQLQGFYEEVANPLLTGVEMEYPENAILDLTQNTYQHFYDGSEIVVAGRLVDEDMNSFKADVKGHGATNDLTFTEEVDMKEMEKALQERDYIFGNYIERLWAYLTIEQLLEKRKNAHGEEKENLTARALDLSLKYHFVTPLTSMVVTKPEDNEDERAIADKPGEDAEATPVSPAMSYLTSYQPPQNPYYYVDGDPHFIIQIPEKDDALCFNIDEAPGTVLRLIQDAVTGLTVNGQITGDKRGSPDSKTRKTYFGKLGIANAQMDFQVEVTTEKITLWNRAVPSTFSWLDTVTVTQDGLSMMINRKNMVVSFGDGVTFVVVLHQVWKKHPVHRDFLGFYVVDSHRMSAQTHGLLGQFFQPFDFKVSDIRPGSDPTKPDATLVVKNHQLIVTRGSQKDYRKDASIGTKVVCWFVHNNGEGLIDGVHTDYIVPNLF

SEQ ID NO: 7327 - protein, 670 aa, Homo Sapiens [sequence omitted]

SEQ ID NO: 7328 - protein, 930 aa, Homo Sapiens
MKPPRPVRTCSKVLVLLSLLAIHQTTTAEKNGIDIYSLTVDSRVSSRFAHTVVTSRVVNRANTVQEATFQMELPKKAFITNFSMIIDGMTYPGIIKEKAEAQAQYSAAVAKGKSAGLVKATGRNMEQFQVSVSVAPNAKITFELVYEELLKRRLGVYELLLKVRPQQLVKHLQMDIHIFEPQGISFLETESTFMTNQLVDALTTWQNKTKAHIRFKPTLSQQQKSPEQQETVLDGNLIIRYDVDRAISGGSIQIENGYFVHYFAPEGLTTMPKNVVFVIDKSGSMSGRKIQQTREALIKILDDLSPRDQFNLIVFSTEATQWRPSLVPASAENVNKARSFAAGIQALGGTNINDAMLMAVQLLDSSNQEERLPEGSVSLIILLTDGDPTVGETNPRSIQNNVREAVSGRYSLFCLGFGFDVSYAFLEKLALDNGGLARRIHEDSDSALQLQDFYQEVANPLLTAVTFEYPSNAVEEVTQNNFRLLFKGSEMVVAGKLQDRGPDVLTATVSGKLPTQNITFQTESSVAEQEAEFQSPKYIFHNFMERLWAYLTIQQLLEQTVSASDADQQALRNQALNLSLAYSFVTPLTSMVVTKPDDQEQSQVAEKPMEGESRNRNVHSGSTFFKYYLQGAKIPKPEASFSPRRGWNRQAGAAGSRMNFRPGVLSSRQLGLPGPPDVPDHAAYHPFRRLAILPASAPPATSNPDPAVSRVMNMKIEETTMTTQTPAPIQAPSAILPLPGQSVERLCVDPRHRQGPVNLLSDPEQGVEVTGQYEREKAGFSWIEVTFKNPLVWVHASPEHVVVTRNRRSSAYKWKETLFSVMPGLKMTMDKTGLLLLSDPDKVTIGLLFWDGRGEGLRLLLRDTDRFSSHVGGTLGQFYQEVLWGSPAASDDGRRTLRVQGNDHSATRERRLDYQEGPPGVEISCWSVEL

SEQ ID NO: 7329 - protein, 900 aa, Homo Sapiens
MKPPRPVRTCSKVLVLLSLLAIHQTTTAEKNGIDIYSLTVDSRVSSRFAHTVVTSRVVNRANTVQEATFQMELPKKAFITNFSMIIDGMTYPGIIKEKAEAQAQYSAAVAKGKSAGLVKATGRNMEQFQVSVSVAPNAKITFELVYEELLKRRLGVYELLLKVRPQQLVKHLQMDIHIFEPQGISFLETESTFMTNQLVDALTTWQNKTKAHIRFKPTLSQQQKSPEQQETVLDGNLIIRYDVDRAISGGSIQIENGYFVHYFAPEGLTTMPKNVVFVIDKSGSMSGRKIQQTREALIKILDDLSPRDQFNLIVFSTEATQWRPSLVPASAENVNKARSFAAGIQALGGTNINDAMLMAVQLLDSSNQEERLPEGSVSLIILLTDGDPTVGETNPRSIQNNVREAVSGRYSLFCLGFGFDVSYAFLEKLALDNGGLARRIHEDSDSALQLQDFYQEVANPLLTAVTFEYPSNAVEEVTQNNFRLLFKGSEMVVAGKLQDRGPDVLTATVSGKLPTQNITFQTESSVAEQEAEFQSPKYIFHNFMERLWAYLTIQQLLEQTVSASDADQQALRNQALNLSLAYSFVTPLTSMVVTKPDDQEQSQVAEKPMEGESRNRNVHSAGAAGSRMNFRPGVLSSRQLGLPGPPDVPDHAAYHPFRRLAILPASAPPATSNPDPAVSRVMNMKIEETTMTTQTPAPIQAPSAILPLPGQSVERLCVDPRHRQGPVNLLSDPEQGVEVTGQYEREKAGFSWIEVTFKNPLVWVHASPEHVVVTRNRRSSAYKWKETLFSVMPGLKMTMDKTGLLLLSDPDKVTIGLLFWDGRGEGLRLLLRDTDRFSSHVGGTLGQFYQEVLWGSPAASDDGRRTLRVQGNDHSATRERRLDYQEGPPGVEISCWSVEL

SEQ ID NO: 7330 - protein, 935 aa, Homo Sapiens
MKPPRPVRTCSKVLVLLSLLAIHQTTTAEKNGIDIYSLTVDSRVSSRFAHTVVTSRVVNRANTVQEATFQMELPKKAFITNFSMIIDGMTYPGIIKEKAEAQAQYSAAVAKGKSAGLVKATGRNMEQFQVSVSVAPNAKITFELVYEELLKRRLGVYELLLKVRPQQLVKHLQMDIHIFEPQGISFLETESTFMTNQLVDALTTWQNKTKAHIRFKPTLSQQQKSPEQQETVLDGNLIIRYDVDRAISGGSIQIENGYFVHYFAPEGLTTMPKNVVFVIDKSGSMSGRKIQQTREALIKILDDLSPRDQFNLIVFSTEATQWRPSLVPASAENVNKARSFAAGIQALGGTNINDAMLMAVQLLDSSNQEERLPEGSVSLIILLTDGDPTVGETNPRSIQNNVREAVSGRYSLFCLGFGFDVSYAFLEKLALDNGGLARRIHEDSDSALQLQDFYQEVANPLLTAVTFEYPSNAVEEVTQNNFRLLFKGSEMVVAGKLQDRGPDVLTATVSGKLPTQNITFQTESSVAEQEAEFQSPKYIFHNFMERLWAYLTIQQLLEQTVSASDADQQALRNQALNLSLAYSFVTPLTSMVVTKPDDQEQSQVAEKPMEGESRNRNVHSGSTFFKYYLQGAKIPKPGLDHTEASFSPRRGWNRQAGAAGSRMNFRPGVLSSRQLGLPGPPDVPDHAAYHPFRRLAILPASAPPATSNPDPAVSRVMNMKIEETTMTTQTPAPIQAPSAILPLPGQSVERLCVDPRHRQGPVNLLSDPEQGVEVTGQYEREKAGFSWIEVTFKNPLVWVHASPEHVVVTRNRRSSAYKWKETLFSVMPGLKMTMDKTGLLLLSDPDKVTIGLLFWDGRGEGLRLLLRDTDRFSSHVGGTLGQFYQEVLWGSPAASDDGRRTLRVQGNDHSATRERRLDYQEGPPGVEISCWSVEL

SEQ ID NO: 7331 - protein, 719 aa, Homo Sapiens
  misc_feature (1)..(1): Xaa can be any naturally occurring amino acid
XVSVAPNAKITFELVYEELLKRRLGVYELLLKVRPQQLVKHLQMDIHIFEPQGISFLETESTFMTNQLVDALTTWQNKTKQKSPEQQETVLDGNLIIRYDVDRAISGGSIQIENGYFVHYFAPEGLTTMPKNVVFVIDKSGSMSGRKIQQTREALIKILDDLSPRDQFNLIVFSTEATQWRPSLVPASAENVNKARSFAAGIQALGGTNINDAMLMAVQLLDSSNQEERLPEGSVSLIILLTDGDPTVGETNPRSIQNNVREAVSGRYSLFCLGFGFDVSYAFLEKLALDNGGLARRIHEDSDSALQLQDFYQEVANPLLTAVTFEYPSNAVEEVTQNNFRLLFKGSEMVVAGKLQDRGPDVLTATVSGKLPTQNITFQTESSVAEQEAEFQSPKYIFHNFMERLWAYLTIQQLLEQTVSASDADQQALRNQALNLSLAYSFVTPLTSMVVTKPDDQEQSQVAEKPMEGESRNRNVHSAGAAGSRMNFRPGVLSSRQLGLPGPPDVPDHAAYHPFRRLAILPASAPPATSNPDPAVSRVMNMKIEETTMTTQTPGVEVTGQYEREKAGFSWIEVTFKNPLVWVHASPEHVVVTRNRRSSAYKWKETLFSVMPGLKMTMDKTGLLLLSDPDKVTIGLLFWDGRGEGLRLLLRDTDRFSSHVGGTLGQFYQEVLWGSPAASDDGRRTLRVQGNDHSATRERRLDYQEGPPGVEISCWSVEL

SEQ ID NO: 7332 - protein, 942 aa, Homo Sapiens
MLLLLGLCLGLSLCVGSQEEAQSWGHSSEQDGLRVPRQVRLLQRLKTKPLMTEFSVKSTIISRYAFTTVSCRMLNRASEDQDIEFQMQIPAAAFITNFTMLIGDKVYQGEITEREKKSGDRVKEKRNKTTEENGEKGTEIFRASAVIPSKDKAAFFLSYEELLQRRLGKYEHSISVRPQQLSGRLSVDVNILESAGIASLEVLPLHNSRQRGSGRGEDDSGPPPSTVINQNETFANIIFKPTVVQQARIAQNGILGDFIIRYDVNREQSIGDIQVLNGYFVHYFAPKDLPPLPKNVVFVLDSSASMVGTKLRQTKDALFTILHDLRPQDRFSIIGFSNRIKVWKDHLISVTPDSIRDGKVYIHHMSPTGGTDINGALQRAIRLLNKYVAHSGIGDRSVSLIVFLTDGKPTVGETHTLKILNNTREAARGQVCIFTIGIGNDVDFRLLEKLSLENCGLTRRVHEEEDAGSQLIGFYDEIRTPLLSDIRIDYPPSSVVQATKTLFPNYFNGSEIIIAGKLVDRKLDHLHVEVTASNSKKFIILKTDVPVRPQKAGKDVTGSPRPGGDGEGDTNHIERLWSYLTTKELLSSWLQSDDEPEKERLRQRAQALAVSYRFLTPFTSMKLRGPVPRMDGLEEAHGMSAAMGPEPVVQSVRGAGTQPGPLLKKPYQPRIKISKTSVDGDPHFVVDFPLSRLTVCFNIDGQPGDILRLVSDHRDSGVTVNGELIGAPAPPNGHKKQRTYLRTITILINKPERSYLEITPSRVILDGGDRLVLPCNQSVVVGSWGLEVSVSANANVTVTIQGSIAFVILIHLYKKPAPFQRHHLGFYIANSEGLSSNCHGLLGQFLNQDARLTEDPAGPSQNLTHPLLLQVGEGPEAVLTVKGHQVPVVWKQRKIYNGEEQIDCWFARNNAAKLIDGEYKDYLASHPFDTGMTLGRGMSREL

SEQ ID NO: 7333 - protein, 702 aa, Homo Sapiens
MLLLLGLCLGLSLCVGSQEEAQSWGHSSEQDGLRVPRQVRLLQRLKTKPLMTEFSVKSTIISRYAFTTVSCRMLNRASEDQDIEFQMQIPAAAFITNFTMLIGDKVYQGEITEREKKSGDRVKEKRNKTTEENGEKGTEIFRASAVIPSKDKAAFFLSYEELLQRRLGKYEHSISVRPQQLSGRLSVDVNILESAGIASLEVLPLHNSRQRGSGRGEDDSGPPPSTVINQNETFANIIFKPTVVQQARIAQNGILGDFIIRYDVNREQSIGDIQVLNGYFVHYFAPKDLPPLPKNVVFVLDSSASMVGTKLRQTKDALFTILHDLRPQDRFSIIGFSNRIKVWKDHLISVTPDSIRDGKVYIHHMSPTGGTDINGALQRAIRLLNKYVAHSGIGDRSVSLIVFLTDGKPTVGETHTLKILNNTREAARGQVCIFTIGIGNDVDFRLLEKLSLENCGLTRRVHEEEDAGSQLIGFYDEIRTPLLSDIRIDYPPSSVVQATKTLFPNYFNGSEIIIAGKLVDRKLDHLHVEVTASNSKKFIILKTDVPVRPQKAGKDVTGSPRPGGDGEGDTNHIERLWSYLTTKELLSSWLQSDDEPEKERLRQRAQALAVSYRFLTPFTSMKLRGPVPRMDGLEEAHGMSAAMGPEPVVQSVRGAGTQPGPLLKKPYQPRIKISKTSVRGFRREEQIFSNVMKFPFASILEL

SEQ ID NO: 7334 - protein, 728 aa, Homo Sapiens
MRNYDSGPPPSTVINQNETFANIIFKPTVVQQARIAQNGILGDFIIRYDVNREQSIGDIQVLNGYFVHYFAPKDLPPLPKNVVFVLDSSASMVGTKLRQTKDALFTILHDLRPQDRFSIIGFSNRIKVWKDHLISVTPDSIRDGKVYIHHMSPTGGTDINGALQRAIRLLNKYVAHSGIGDRSVSLIVFLTDGKPTVGETHTLKILNNTREAARGQVCIFTIGIGNDVDFRLLEKLSLENCGLTRRVHEEEDAGSQLIGFYDEIRTPLLSDIRIDYPPSSVVQATKTLFPNYFNGSEIIIAGKLVDRKLDHLHVEVTASNSKKFIILKTDVPVRPQKAGKDVTGSPRPGGDGEGDTNHIERLWSYLTTKELLSSWLQSDDEPEKERLRQRAQALAVSYRFLTPFTSMKLRGPVPRMDGLEEAHGMSAAMGPEPVVQSVRGAGTQPGPLLKKPYQPRIKISKTSVDGDPHFVVDFPLSRLTVCFNIDGQPGDILRLVSDHRDSGVTVNGELIGAPAPPNGHKKQRTYLRTITILINKPERSYLEITPSRVILDGGDRLVLPCNQSVVVGSWGLEVSVSANANVTVTIQGSIAFVILIHLYKKPAPFQRHHLGFYIANSEGLSSNCHGLLGQFLNQDARLTEDPAGPSQNLTHPLLLQVGEGPEAVLTVKGHQVPVVWKQRKIYNGEEQIDCWFARNNAAKLIDGEYKDYLASHPFDTGMTLGRGMSREL

SEQ ID NO: 7335 - protein, 119 aa, Homo Sapiens
  misc_feature (1)..(1): Xaa can be any naturally occurring amino acid
XPSTVINQNETFANIIFKPTVVQQARIAQNGILGDFIIRYDVNREQSIGDIQVLNGYFVHYFAPKDLPPLPKNVVFVLDSSASMVGTKLRQDIGFSLAVQNWVPKGYLDISCVTLQVHV

SEQ ID NO: 7336 - protein, 1313 aa, Homo Sapiens
MSGWRYLICVSFLLTILLELTYQGPPVPASSSTKLLMTSYSMRSTVVSRYAHTLVTSVLFNPHAEAHEAIFDLDLPHLAFISNFTMTINNKVYIAEVKEKHQAKKIYEEAHQQGKTAAHVGIRDRESEKFRISTSLAAGTEVTFSLAYEELLQRHQGQYQLVVSLRPGQLVKRLSIEVTVSERTGISYVHIPPLRTGRLRTNAHASEVDSPPSTRIERGETCVRITYCPTLQDQSSISGSGIMADFLVQYDVVMEDIIGDVQIYDDYFIHYFAPRGLPPMEKNVVFVIDVSSSMFGTKMEQTKTAMNVILSDLQANDYFNIISFSDTVNVWKAGGSIQATIQNVHSAKDYLHCMEADGWTDVNSALLAAASVLNHSNQEPGRGPSVGRIPLIIFLTDGEPTAGVTTPSVILSNVRQALGHRVSLFSLAFGDDADFTLLRRLSLENRGIARRIYEDTDAALQLKGLYEEISMPLLADVRLNYLGGLVGASPWAVFPNYFGGSELVVAGQVQPGKQELGIHLAARGPKDQLLVAHHSEGATNNSQKAFGCPGEPAPNVAHFIRRLWAYVTIGELLDAHFQARDTTTRHLLAAKVLNLSLEYNFVTPLTSLVMVQPKQASEETRRQTSTSAGPDTIMPSSSSRHGLGVSTAQPALVPKVISPKSRPVKPKFYLSSTTTASTKKMLSSKELEPLGESPHTLSMPTYPKAKIPAQQDSGTLAQPTLRTKPTILVPSNSGTLLPLKPGSLSHQNPDILPTNSRTQVPPVKPGIPASPKADTVKCVTPLHSKPGAPSHPQLGALTSQAPKGLPQSRPGVSTLQVPKYPLHTRPRVPAPKTRNNMPHLGPGILLSKTPKILLSLKPSAPPHQISTSISLSKPETPNPHMPQTPLPPRPDRPRPPLPESLSTFPNTISSSTGPSSTTTTSVLGEPLPMPFTPTLPPGRFWHQYDLLPGPQRTRQVLGPSRPGVPTMSLLNSSRPTPEGSPPNLPILLPSSILPEAISLLLLPEELELLSESMVESKFVESLNPPAFYTFLTPDEDGSPNWDGNSEEILGGAGGSMESQGSSVGLAKGTLPSIFTFSSSVDGDPHFVIQIPHSEEKICFTLNGHPGDLLQLIEDPKAGLHVSGKLLGAPPRPGHKDQTRTYFQIITVTTDKPRAYTITISRSSISLRGEGTLRLSWDQPALLKRPQLELYVAAAARLTLRLGPYLEFLVLRHRYRHPSTLQLPHLGFYVANGSGLSPSARGLIGQFQHADIRLVTGPMGPCLRRHHGPDVPVILGKRLLKDSPRLLPRWASCWLVKRSHVELLLGHPYLSYVL

SEQ ID NO: 7337 - protein, 313 aa, Homo Sapiens
MNQLSFLLFLIATTRGWSTDEANTYFKEWTCSSSPSLPRSCKEIKDECPSAFDGLYFLRTENGVIYQTFCDMTSGGGGWTLVASVHENDMRGKCTVGDRWSSQQGSKAVYPEGDGNWANYNTFGSAEAATSDDYKNPGYYDIQAKDLGIWHVPNKSPMQHWRNSSLLRYRTDTGFLQTLGHNLFGIYQKYPVKYGEGKCWTDNGPVIPVVYDFGDAQKTASYYSPYGQREFTAGFVQFRVFNNERAANALCAGMRVTGCNTEHHCIGGGGYFPEASPQQCGDFSGFDWSGYGTHVGYSSSREITEAAVLLFYR

SEQ ID NO: 7338 - protein, 325 aa, Homo Sapiens
MLSMLRTMTRLCFLLFFSVATSGCSAAAASSLEMLSREFETCAFSFSSLPRSCKEIKERCHSAGDGLYFLRTKNGVVYQTFCDMTSGGGGWTLVASVHENDMRGKCTVGDRWSSQQGNKADYPEGDGNWANYNTFGSAEAATSDDYKNPGYYDIQAKDLGIWHVPNKSPMQHWRNSALLRYRTNTGFLQRLGHNLFGIYQKYPVKYRSGKCWNDNGPAIPVVYDFGDAKKTASYYSPYGQREFVAGFVQFRVFNNERAANALCAGIKVTGCNTEHHCIGGGGFFPQGKPRQCGDFSAFDWDGYGTHVKSSCSREITEAAVLLFYR

SEQ ID NO: 7339 - protein, 243 aa, Homo Sapiens
MACWWPLLLELWTVMPTWAGDELLNICMNAKHHKRVPSPEDKLYEECIPWKDNACCTLTTSWEAHLDVSPLYNFSLFHCGLLMPGCRKHFIQAICFYECSPNLGPWIQPVAPSGQGERVVNVPLCQEDCEEWWEDCRMSYTCKSNWRGGWDWSQGKNRCPKGAQCLPFSHYFPTPADLCEKTWSNSFKASPERRNSGRCLQKWFEPAQGNPNVAVARLFASSAPSWELSYTIMVCSLFLPFLS

SEQ ID NO: 7340 - protein, 250 aa, Homo Sapiens
MACWWPLLLELWTVMPTWAGDELLNICMNAKHHKRVPSPEDKLYEECIPWKDNACCTLTTSWEAHLDVSPLYNFSLFHCGLLMPGCRKHFIQAICFYECSPNLGPWIQPVGSLGWEVAPSGQGERVVNVPLCQEDCEEWWEDCRMSYTCKSNWRGGWDWSQGKNRCPKGAQCLPFSHYFPTPADLCEKTWSNSFKASPERRNSGRCLQKWFEPAQGNPNVAVARLFASSAPSWELSYTIMVCSLFLPFLS

SEQ ID NO: 7341 - protein, 184 aa, Homo Sapiens
MALLLCLVCLTAALAHGCLHCHSNFSKKFSFYRHHVNFKSWWVGDIPVSGALLTDWSDDTMKELHLAIPAKITREKLDQVATAVYQMMDQLYQGKMYFPGKGRETEAGPPHPGTPRPPPEPDLLLPRRLRVFPQRAAKHLPGAGAPHPERHHRKPHRLSAPLWSSAQWKSAVQGLLNYINNWHK

SEQ ID NO: 7342 - protein, 232 aa, Homo Sapiens
MALLLCLVCLTAALAHGCLHCHSNFSKKFSFYRHHVNFKSWWVGDIPVSGALLTDWSDDTMKELHLAIPAKITREKLDQVATAVYQMMDQLYQGKMYFPGYFPNELRNIFREQVHLIQNAIIESRIDCQHRCGIFQYETISCNNCTDSHVACFGYNCESSAQWKSAVQGLLNYINNWHKQDTSMRPRSSAFSWPGTHRATPAFLVSPALRCLEPPHLANLTLEDAAECLKQH

SEQ ID NO: 7343 - protein, 214 aa, Homo Sapiens
MALLLCLVCLTAALAHGCLHCHSNFSKKFSFYRHHVNFKSWWVGDIPVSGALLTDWSDDTMKELHLAIPAKITREKLDQVATAVYQMMDQLYQGKMYFPGYFPNELRNIFREQVHLIQNAIIESRIDCQHRCGIFQYETISCNNCTDSHVACFGYNCESSAQWKSAVQGLLNYINNWHKQDTSMSLVSPALRCLEPPHLANLTLEDAAECLKQH

SEQ ID NO: 7344 - protein, 208 aa, Homo Sapiens
MALLLCLVCLTAALAHGCLHCHSNFSKKFSFYRHHVNFKSWWVGDIPVSGALLTDWSDDTMKELHLAIPAKITREKLDQVATAVYQMMDQLYQGKMYFPGYFPNELRNIFREQVHLIQNAIIESRIDCQHRCGIFQYETISCNNCTDSHVACFGYNCESSAQWKSAVQGLLNYINNWHNLVSPALRCLEPPHLANLTLEDAAECLKQH

SEQ ID NO: 7345 - protein, 152 aa, Homo Sapiens
VSGALLTDWSDDTMKELHLAIPAKITREKLDQVATAVYQMMDQLYQGKMYFPGYFPNELRNIFREQVHLIQNAIIESIFQYETISCNNCTDSHVACFGYNCESSAQWKSAVQGLLNYINNWHNLVSPALRCLEPPHLANLTLEDAAECLKQH

SEQ ID NO: 7346 - protein, 152 aa, Homo Sapiens
  misc_feature (1)..(1): Xaa can be any naturally occurring amino acid
XPQQLLQEVLLLPPPCELQVLVGGRHPRVRGAAHRLERRHDEGAAPGHPRQDHPGEAGPSGDSSVPDDGSAVPGEDVLPRVFPQRAAKHLPGAGAPHPERHHRKPHRLSAPLWSSAQWKSAVQGLLNYINNWHKPRSSAFSWPGTHRATPAL

SEQ ID NO: 7347 - protein, 138 aa, Homo Sapiens
  misc_feature (1)..(1): Xaa can be any naturally occurring amino acid
XSALPQQLLQEVLLLPPPCELQVLVGGRHPRVRGAAHRLERRHDEGAAPGHPRQDHPGEAGPSGDSSVPDDGSAVPGEDVLPRVFPQRAAKHLPGAGAPHPERHHRKPHRLSAPLWHLPVRDHLLQQLHRLARRLLWL

SEQ ID NO: 7348 - protein, 155 aa, Homo Sapiens
MFCPLKLILLPVLLDYSLGLNDLNVSPPELTVHVGDSALMGCVFQSTEDKCIFKIDWTLSPGEHAKDEYVLYYYSNLSVPIGRFQNRVHLMGDILCNDGSLLLQDVQEADQGTYICEIRLKGESQVFKKAVVLHVLPEEPKELMVHVGGLIQMGC

SEQ ID NO: 7349 - protein, 383 aa, Homo Sapiens
MFCPLKLILLPVLLDYSLGLNDLNVSPPELTVHVGDSALMGCVFQSTEDKCIFKIDWTLSPGEHAKDEYVLYYYSNLSVPIGRFQNRVHLMGDILCNDGSLLLQDVQEADQGTYICEIRLKGESQVFKKAVVLHVLPEEPKELMVHVGGLIQMGCVFQSTEVKHVTKEEIVFRYYHKLRMSVEYSQSWGHFQNRVNLVGDIFRNDGSIMLQGVRESDGGNYTCSIHLGNLVFKKTIVLHVSPEEPRTLVTPAALRPLVLGGNQLVIIVGIVCATILLLPVLILIVKKTCGNKSSVNSTVLVKNTKKTNPEIKEKPCHFERCEGEKHIYSPIIVREVIEEEEPSEKSEATYMTMHPVWPSLRSDRNNSLEKKSGGGMPKTQQAF

SEQ ID NO: 7350 - protein, 394 aa, Homo Sapiens
MFCPLKLILLPVLLDYSLGLNDLNVSPPELTVHVGDSALMGCVFQSTEDKCIFKIDWTLSPGEHAKDEYVLYYYSNLSVPIGRFQNRVHLMGDILCNDGSLLLQDVQEADQGTYICEIRLKGESQVFKKAVVLHVLPEEPKELMVHVGGLIQMGCVFQSTEVKHVTKVEWIFSGRRAKEEIVFRYYHKLRMSVEYSQSWGHFQNRVNLVGDIFRNDGSIMLQGVRESDGGNYTCSIHLGNLVFKKTIVLHVSPEEPRTLVTPAALRPLVLGGNQLVIIVGIVCATILLLPVLILIVKKTCGNKSSVNSTVLVKNTKKTNPEIKEKPCHFERCEGEKHIYSPIIVREVIEEEEPSEKSEATYMTMHPVWPSLRSDRNNSLEKKSGGGMPKTQQAF

SEQ ID NO: 7351 - protein, 66 aa, Homo Sapiens
MFCPLKLILLPVLLEHRRQMYIQDRLDSVTRRARQGRICAILLLQSQCAYWALPEPRTLDGGHLMQ

SEQ ID NO: 7352 - protein, 121 aa, Homo Sapiens
MGCVFQSTEDKCIFKIDWTLSPGEHAKDEYVLYYYSNLSVPIGRFQNRVHLMGDILCNDGSLLLQDVQEADQGTYICEIRLKGESQVFKKAVVLHVLPEEPKELMVHVGGLIQMGCVFQST

SEQ ID NO: 7353 - protein, 220 aa, Homo Sapiens
MGCVFQSTEDKCIFKIDWTLSPGEHAKDEYVLYYYSNLSVPIGRFQNRVHLMGDILCNDGSLLLQDVQEADQGTYICEIRLKGESQVFKKAVVLHVLPEEPKELMVHVGGLIQMGCVFQSTEVKHVTKVEWIFSGRRAKEEIVFRYYHKLRMSVEYSQSWGHFQNRVNLVGDIFRNDGSIMLQGVRESDGGNYTCSIHLGNLVFKKTIVLHVSPEEPRKW

SEQ ID NO: 7354 - protein, 305 aa, Homo Sapiens
MGCVFQSTEDKCIFKIDWTLSPGEHAKDEYVLYYYSNLSVPIGRFQNRVHLMGDILCNDGSLLLQDVQEADQGTYICEIRLKGESQVFKKAVVLHVLPEEPKELMVHVGGLIQMGCVFQSTEVKHVTKVEWIFSGRRAKEEIVFRYYHKLRMSVEYSQSWGHFQNRVNLVGDIFRNDGSIMLQGVRESDGGNYTCSIHLGNLVFKKTIVLHVSPEEPRTLVTPAALRPLVLGGNQLVIIVGIVCATILLLPVLILIVKKTCGNKSSVNSTVLVKNTKKTNPEIKEKPCHFERCEGEVNTRFSLKH

SEQ ID NO: 7355 - protein, 355 aa, Homo Sapiens
MGCVFQSTEDKCIFKIDWTLSPGEHAKDEYVLYYYSNLSVPIGRFQNRVHLMGDILCNDGSLLLQDVQEADQGTYICEIRLKGESQVFKKAVVLHVLPEEPKELMVHVGGLIQMGCVFQSTEVKHVTKVEWIFSGRRAKEEIVFRYYHKLRMSVEYSQSWGHFQNRVNLVGDIFRNDGSIMLQGVRESDGGNYTCSIHLGNLVFKKTIVLHVSPEEPRTLVTPAALRPLVLGGNQLVIIVGIVCATILLLPVLILIVKKTCGNKSSVNSTVLVKNTKKTNPEIKEKPCHFERCEGEKHIYSPIIVREVIEEEEPSEKSEATYMTMHPVWPSLRSDRNNSLEKKSGGGMPKTQQAF

SEQ ID NO: 7356 - protein, 384 aa, Homo Sapiens
MVSGDYSLGLNDLNVSPPELTVHVGDSALMGCVFQSTEDKCIFKIDWTLSPGEHAKDEYVLYYYSNLSVPIGRFQNRVHLMGDILCNDGSLLLQDVQEADQGTYICEIRLKGESQVFKKAVVLHVLPEEPKELMVHVGGLIQMGCVFQSTEVKHVTKVEWIFSGRRAKEEIVFRYYHKLRMSVEYSQSWGHFQNRVNLVGDIFRNDGSIMLQGVRESDGGNYTCSIHLGNLVFKKTIVLHVSPEEPRTLVTPAALRPLVLGGNQLVIIVGIVCATILLLPVLILIVKKTCGNKSSVNSTVLVKNTKKTNPEIKEKPCHFERCEGEKHIYSPIIVREVIEEEEPSEKSEATYMTMHPVWPSLRSDRNNSLEKKSGGGMPKTQQAF

SEQ ID NO: 7357 - protein, 70 aa, Homo Sapiens
MKNHLLFWGVLAVFIKAVHVKAQEDERIVLVDNKCKCARITSRIIRSSEDPNEDIVERNIRIIVPLNNRE

SEQ ID NO: 7358 - protein, 159 aa, Homo Sapiens
MKNHLLFWGVLAVFIKAVHVKAQEDERIVLVDNKCKCARITSRIIRSSEDPNEDIVERNIRIIVPLNNRENISDPTSPLRTRFVYHLSDLCKKCDPTEVELDNQIVTATQSNICDEDSATETCYTYDRNKCYTAVVPLVYGGETKMVETALTPDACYPD

SEQ ID NO: 7359 - protein, 159 aa, Homo Sapiens; identical to SEQ ID NO: 7358

SEQ ID NO: 7360 - protein, 159 aa, Homo Sapiens; identical to SEQ ID NO: 7358

SEQ ID NO: 7361 - protein, 158 aa, Homo Sapiens
MKNHLLFWGVLAVFIKAVHVKENGIHSEFRAQEDERIVLVDNKCKCARITSRIIRSSEDPNEDIVERNIRIIVPLNNRENISDPTSPLRTRFVYHLSDLCKKCDPTEVELDNQIVTATQSNICDEDSATETCYTYDRNKCYTAVVPLVYGGETKMVET

SEQ ID NO: 7362 - protein, 157 aa, Homo Sapiens
MKNHLLFWGVLAVFIKAVHVKGSRDSSASASRVAGITAQEDERIVLVDNKCKCARITSRIIRSSEDPNEDIVERNIRIIVPLNNRENISDPTSPLRTRFVYHLSDLCKKCDPTEVELDNQIVTATQSNICDEDSATETCYTYDRNKCYTAVVPLVYG

SEQ ID NO: 7363 - protein, 285 aa, Homo Sapiens
MAGGWAQGSRRAARLPEGGRLMAPASRLLALWALAAVALPGSGAEGDGGWRPGGPGAVAEEERCTVERRADLTYAEFVQQYAFVRPVILQGLTDNSRFRALCSRDRLLASFGDRVVRLSTANTYSYHKVDLPFQEYVEQLLHPQDPTSLGNDTLYFFGDNNFTEWASLFRHYSPPPFGLLGTAPAYSFGIAGAGSGVPFHWHGPGYSEVIYGRKRWFLYPPEKTPEFHPNKTTLAWLRDTYPALPPSARPLECTIRAGEVLYFPDRWWHATLNLDTSVFISTFLG

SEQ ID NO: 7364 - protein, 264 aa, Homo Sapiens
MAPASRLLALWALAAVALPGSGAEGDGGWRPGGPGAVAEEERCTVERRADLTYAEFVQQYAFVRPVILQGLTDNSRFRALCSRDRLLASFGDRVVRLSTANTYSYHKVDLPFQEYVEQLLHPQDPTSLGNDTLYFFGDNNFTEWASLFRHYSPPPFGLLGTAPAYSFGIAGAGSGVPFHWHGPGYSEVIYGRKRWFLYPPEKTPEFHPNKTTLAWLRDTYPALPPSARPLECTIRAGEVLYFPDRWWHATLNLDTSVFISTFLG

SEQ ID NO: 7365 - protein, 219 aa, Homo Sapiens
MAPASRLLALWALAAVALPGSGAEGDGGWRPGGPGAVAEEERCTVERRADLTYAEFVQQYAFVRPVILQGLTDNSRFRALCSRDRLLASFGDRVVRLSTANTYSYHKVDLPFQEYVEQLLHPQDPTSLGNDTLYFFGDNNFTEWASLFRHYSPPPFGLLGTAPAYSFGIAGAGSGVPFHWHGPGYSEVIYGRKVLYFPDRWWHATLNLDTSVFISTFLG

SEQ ID NO: 7366 - protein, 234 aa, Homo Sapiens
MAPASRLLALWALAAVALPGSGAEGDGGWYAFVRPVILQGLTDNSRFRALCSRDRLLASFGDRVVRLSTANTYSYHKVDLPFQEYVEQLLHPQDPTSLGNDTLYFFGDNNFTEWASLFRHYSPPPFGLLGTAPAYSFGIAGAGSGVPFHWHGPGYSEVIYGRKRWFLYPPEKTPEFHPNKTTLAWLRDTYPALPPSARPLECTIRAGEVLYFPDRWWHATLNLDTSVFISTFLG

SEQ ID NO: 7367 - protein, 81 aa, Homo Sapiens
  misc_feature (1)..(1): Xaa can be any naturally occurring amino acid
XWTCPSRSMWSSCCTPRTPPPWAMTPCTSSGTTTSPSGPLSFGTTPHPHLACWEPLQLTALESQELARGCPSTGMDPGTQK

SEQ ID NO: 7368 - protein, 331 aa, Homo Sapiens
MSMTTRAWEELDGGLGSCQALEDHSALAETQEDRASATPRLADSGSVPHDSQVAEGPSVDTRPKKMEKEPAARGTPGTGKERLKAGASPRSVPARKKAQTAPPLQPPPPPPALSEELPWGDLSLNKCLVLASLVALLGSAFQLCRDAVPGEAALQARVPEPWVPPSSAPREPSSPLPKFEAQAPPSAPPAPRAEAEVRPKIPGSREAAENDEEEPGEATGEAVREDRVTLADRGPKERPRREGKPRKEKPRKEERPKKERPRKEERPRAAREPREALPQRWESREGGHRPWARDSRDAEPRKKQAWVSPRRPDEEQRPGSRQKLRAGKGRD

SEQ ID NO: 7369 - protein, 206 aa, Homo Sapiens
ENLKRLKCLRRYRQRYGVEALLHRQLKERRMLATDGAAQQAHTTRSSQRCLAFVDDVRCSNQSLPMTRHCLTHICQDTNQVLFKCCQGSEEVPCNKPVPVSLSEDPCCPLHFQLPPQMYKPEQDLDVVGDGMQCPPSPLLFDPSLTLEDHLVKEIAEDPVDILGQMQMAGDGCRSQGSRNSEKASAPLSQSGLATANGKPEPTSIS

SEQ ID NO: 7370 - protein, 675 aa, Homo Sapiens
MAVLFPLSSCGWAAISLFLSAQSCYSASKQCQSQSPSCRLPGARISGDWSRRTKWRSHRLPRPGPVVRSEAGRDKGGVRGGGVAAAWGWCCRFPSCCSCASPEDTFSVVWFGVGPGMEGHAKGRQSHRCLWRLGEGGGDLRSVPYGDDFCMSFGNCPRDLCGAGIFGKGKGFLVFRLTPQVLVMNRIRIHVLPTNRGRITPVPRSQEPLSCAFTHRPCSHPRLEGQEFCIKHILEDKNAPFKQCSYISTKNGKRCPNAAPKPEKKDGVSFCAEHVRRNALALHAQMKKTNPGPVGETLLCQLSSYAKTELGSQTPESSRSEASRILDEDSWSDGEQEPITVDQTWRGDPDSEADSIDSDQEDPLKHAGVYTAEEVALIMREKLIRLQSLYIDQFKRLQHLLKEKKRRYLHNRKVEHEALGSSLLTGPEGLLAKERENLKRLKCLRRYRQRYGVEALLHRQLKERRMLATDGAAQQAHTTRSSQRCLAFVDDVRCSNQSLPMTRHCLTHICQDTNQVLFKCCQGSEEVPCNKPVPVSLSEDPCCPLHFQLPPQMYKPEQVLSVPDDLEAGPMDLYLSAAELQPTESLPLEFSDDLDVVGDGMQCPPSPLLFDPSLTLEDHLVKEIAEDPVDILGQMQMAGDGCRSQGSRNSEKASAPLSQSGLATANGKPEPTSIS

SEQ ID NO: 7371 - protein, 69 aa, Homo Sapiens
MNRIRIHVLPTNRGRITPVPRSQEPLSCAFTHRPCSHPRLEGQEFCIKHILEDKNAPFKQCSYISTKNG

SEQ ID NO: 7372 - protein, 108 aa, Homo Sapiens
MNRIRIHVLPTNRGRITPVPRSQEPLSCAFTHRPCSHPRLEGQEFCIKHILEDKNAPFKQCSYISTKNGKRCPNAAPKPEKKDGVSFCAEHVRRNALALHAQMKKTNP

SEQ ID NO: 7373 - protein, 492 aa, Homo Sapiens
MNRIRIHVLPTNRGRITPVPRSQEPLSCAFTHRPCSHPRLEGQEFCIKHILEDKNAPFKQCSYISTKNGKRCPNAAPKPEKKDGVSFCAEHVRRNALALHAQMKKTNPGPVGETLLCQLSSYAKTELGSQTPESSRSEASRILDEDSWSDGEQEPITVDQTWRGDPDSEADSIDSDQEDPLKHAGVYTAEEVALIMREKLIRLQSLYIDQFKRLQHLLKEKKRRYLHNRKVEHEALGSSLLTGPEGLLAKERENLKRLKCLRRYRQRYGVEALLHRQLKERRMLATDGAAQQAHTTRSSQRCLAFVDDVRCSNQSLPMTRHCLTHICQDTNQVLFKCCQGSEEVPCNKPVPVSLSEDPCCPLHFQLPPQMYKPEQVLSVPDDLEAGPMDLYLSAAELQPTESLPLEFSDDLDVVGDGMQCPPSPLLFDPSLTLEDHLVKEIAEDPVDILGQMQMAGDGCRSQGSRNSEKASAPLSQSGLATANGKPEPTSIS

SEQ ID NO: 7374 - protein, 454 aa, Homo Sapiens
MNRIRIHVLPTNRGRITPVPRSQEPLSCAFTHRPCSHPRLEGQEFCIKHILEDKNAPFKQCSYISTKNGKRCPNAAPKPEKKDGVSFCAEHVRRNALALHAQMKKTNPGPVGETLLCQLSSYAKTELGSQTPESSRSEASRILDEDSWSDGEQEPITVDQTWRGDPDSEADSIDSDQEDPLKHAGVYTAEEVALIMREKLIRLQSLYIDQFKRLQHLLKEKKRRYLHNRKVEHEALGSSLLTGPEGLLAKERENLKRLKCLRRYRQRYGVEALLHRQLKERRMLATDGAAQQAHTTRSSQRCLAFVDDVRCSNQSLPMTRHCLTHICQDTNQVLFKCCQGSEEVPCNKPVPVSLSEDPCCPLHFQLPPQMYKPEQDLDVVGDGMQCPPSPLLFDPSLTLEDHLVKEIAEDPGQMQMAGDGCRSQGSRNSEKASAPLSQSGLATANGKPEPTSIS

SEQ ID NO: 7375 - protein, 155 aa, Homo Sapiens
MNRIRIHVLPTNRGRITPVPRSQEPLSCAFTHRPCSHPRLEGQEFCIKHILEDKNAPFKQCSYISTKNGKRCPNAAPKPEKKDGVSFCAEHVRRNALALHAQMKKTNPGPVGETLLCQLSSYAKTELGSQTPESSRSEASRILDMLVSTQQKKWP

SEQ ID NO: 7376 - protein, 133 aa, Homo Sapiens
MNRIRIHVLPTNRGRITPVPRVSFCAEHVRRNALALHAQMKKTNPGPVGETLLCQLSSYAKTELGSQTPESSRSEASRILDEDSWSDGEQEPITVDQTWRGDPDSEADSIDSDQEDPLKHAGVYTAEEVALIM

SEQ ID NO: 7377 - protein, 74 aa, Homo Sapiens
PNAAPKPEKKDGVSFCAEHVRRNALALHAQMKKTNPGPVGETLLCQLSSYAKTELGSQTPESSRSEASRILGLG

SEQ ID NO: 7378 - protein, 340 aa, Homo Sapiens
  misc_feature (1)..(1): Xaa can be any naturally occurring amino acid
XLPTNRGRITPVPRSQEPLSCAFTHRPCSHPRLEGQEFCIKHILEDKNAPFKQCSYISTKNGKRCPNAAPKPEKKDGVSFCAEHVRRNALALHAQMKKTNPGPVGETLLCQLSSYAKTELGSQTPESSRSEASRILDEDSWSDGEQEPITVDQTWRGDPDSEADSIDSDQEDPLKHAGVYTAEEVALIMREKLIRLQSLYIDQFKRLQHLLKEKKRRYLHNRKVEHEALGSSLLTGPEGLLAKERENLKRLKCLRRYRQRYGVEALLHRQLKERRMLATDGAAQQAHTTRSSQRCLAFVDDVRCSNQSLPMTRHCLTQKDATAIGDLLTLYCGLMETALD

SEQ ID NO: 7379 - protein, 25 aa, Homo Sapiens
  misc_feature (1)..(1): Xaa can be any naturally occurring amino acid
XPESSRSEASRILDMLVSTQQKKWP

SEQ ID NO: 7380 - protein, 304 aa, Homo Sapiens
MLPPPRPAAALALPVLLLLLVVLTPPPTGARPSPGPDYLRRGWMRLLAEGEGCAPCRPEECAAPRGCLAGRVRDACGCCWECANLEGQLCDLDPSAHFYGHCGEQLECRLDTGGDLSRGEVPEPLCACRSQSPLCGSDGHTYSQICRLQEAARARPDANLTVAHPGPCESGPQIVSHPYDTWNVTGQDVIFGCEVFAYPMASIEWRKDGLDIQLPGDDPHISVQFRGGPQRFEVTGWLQIQAVRPSDEGTYRCLGRNALGQVEAPASLTVLTPDQLNSTGIPQLRSLNLVPEEEAESEENDDYY

SEQ ID NO: 7381 - protein, 230 aa, Homo Sapiens
MGIQGMELCAMAVVVLLFIAVLKQFGILEPISMEDSSDSELELSTVRHQPEGLDQLQAQTKFTKKELQSLYRGFKNECPTGLVDEDTFKLIYAQFFPQGDATTYAHFLFNAFDADGNGAIHFEDFVVGLSILLRGTVHEKLKWAFNLYDINKDGYITKEEMLAIMKSIYDMMGRHTYPILREDAPAEHVERFFEKMDRNQDGVVTIEEFLEACQKDENIMSSMQLFENVI

SEQ ID NO: 7382 - protein, 256 aa, Homo Sapiens
MQPAKEVTKASDGSLLGDLGHTPLSKKEGIKWQRPRLSRQALMRCCLVKWILSSTAPQGSDSSDSELELSTVRHQPEGLDQLQAQTKFTKKELQSLYRGFKNECPTGLVDEDTFKLIYAQFFPQGDATTYAHFLFNAFDADGNGAIHFEDFVVGLSILLRGTVHEKLKWAFNLYDINKDGYITKEEMLAIMKSIYDMMGRHTYPILREDAPAEHVERFFEKMDRNQDGVVTIEEFLEACQKDENIMSSMQLFENVI

SEQ ID NO: 7383 - protein, 256 aa, Homo Sapiens
MQPRKEVTKASDGSLLGDLGHTPLSKKEGIKWQRPRLSRQALMRCCLVKWILSSTAPQGSDSSDSELELSTVRHQPEGLDQLQAQTKFTKKELQSLYRGFKNECPTGLVDEDTFKLIYAQFFPQGDATTYAHFLFNAFDADGNGAIHFEDFVVGLSILLRGTVHEKLKWAFNLYDINKDGYITKEEMLAIMKSIYDMMGRHTYPILREDAPAEHVERFFEKMDRNQDGVVTIEEFLEACQKDENIMSSMQLFENVI

SEQ ID NO: 7384 - protein, 252 aa, Homo Sapiens
MGGLRPWSRYGLLVVAHLLALGLGAVVFQALEGPPACRLQAELRAELAAFQAEHRACLPPGALEELLGTALATQAHGVSTLGNSSEGRTWDLPSALLFAASILTTTGYGHMAPLSPGGKAFCMVYAALGLPASLALVATLRHCLLPVLSRPRAWVAVHWQLSPARAALLQAVALGLLVASSFVLLPALVLWGLQGDCSLLGAVYFCFSSLSTIGLEDLLPGRGRSLHPVIYHLGQLALLGGGTSLQGTAWEG

SEQ ID NO: 7385 - protein, 252 aa, Homo Sapiens; identical to SEQ ID NO: 7384

SEQ ID NO: 7386 - protein, 257 aa, Homo Sapiens
MGGLRPWSRYGLLVVAHLLALGLGAVVFQALEGPPACRLQAELRAELAAFQAEHRACLPPGALEELLGTALATQAHGVSTLGNSSEGRTWDLPSALLFAASILTTTGYGHMAPLSPGGKAFCMVYAALGLPASLALVATLRHCLLPVLSRPRAWVAVHWQLSPARAALLQAVALGLLVASSFVLLPALVLWGLQGDCSLLGAVYFCFSSLSTIGLEDLLPGRGRSLHPVIYHLGQLALLGKSSHLTACGGRGKRSLD

SEQ ID NO: 7387 - protein, 307 aa, Homo Sapiens
MGGLRPWSRYGLLVVAHLLALGLGAVVFQALEGPPACRLQAELRAELAAFQAEHRACLPPGALEELLGTALATQAHGVSTLGNSSEGRTWDLPSALLFAASILTTTGYGHMAPLSPGGKAFCMVYAALGLPASLALVATLRHCLLPVLSRPRAWVAVHWQLSPARAALLQAVALGLLVASSFVLLPALVLWGLQGDCSLLGAVYFCFSSLSTIGLEDLLPGRGRSLHPVIYHLGQLALLGYLLLGLLAMLLAVETFSELPQVRAMGKFFRPSGPVTAEDQGGILGQDELALSTLPPAAPASGQAPAC

SEQ ID NO: 7388 - protein, 72 aa, Homo Sapiens
  misc_feature (1)..(1): Xaa can be any naturally occurring amino acid
XHLGQLALLGLLAMLLAVETFSELPQVRAMGKFFRPSGPVTAEDQGGILGQDELALSTLPPAAPASGQAPAC

SEQ ID NO: 7389 - protein, 28 aa, Homo Sapiens
  misc_feature (1)..(1): Xaa can be any naturally occurring amino acid
XLHPVIYHLGQLALLGGGTSLQGTAWEG

SEQ ID NO: 7390 - protein, 57 aa, Homo Sapiens
MGGDLVLGLGALRRRKRLLEQEKSLAGWALVLAGTGIGLMVLHAEMLWFGGCSTHFG

SEQ ID NO: 7391 - protein, 427 aa, Homo Sapiens
MGGDLVLGLGALRRRKRLLEQEKSLAGWALVLAGTGIGLMVLHAEMLWFGGCSWALYLFLVKCTISISTFLLLCLIVAFHAKEVQLFMTDNGLRDWRVALTGRQAAQIVLELVVCGLHPAPVRGPPCVQDLGAPLTSPQPWPGFLGQGEALLSLAMLLRLYLVPRAVLLRSGVLLNASYRSIGALNQVRFRHWFVAKLYMNTHPGRLLLGLTLGLWLTTAWVLSVAERQAVNATGHLSDTLWLIPITFLTIGYGDVVPGTMWGKIVCLCTGVMGVCCTALLVAVVARKLEFNKAEKHVHNFMMDIQYTKEMKESAARVLQEAWMFYKHTRRKESHAARRHQRKLLAAINAFRQVRLKHRKLREQVNSMVDISKMHMILYDLQQNLSSSHRALEKQIDTLAGKLDALTELLSTALGPRQLPEPSQQSK

SEQ ID NO: 7392 - protein, 295 aa, Homo Sapiens
MHDQHFHLLTPLPHRGLSCQRGPAVHDRQRAAGLARGADRAAGNASYRSIGALNQVRFRHWFVAKLYMNTHPGRLLLGLTLGLWLTTAWVLSVAERQAVNATGHLSDTLWLIPITFLTIGYGDVVPGTMWGKIVCLCTGVMGVCCTALLVAVVARKLEFNKAEKHVHNFMMDIQYTKEMKESAARVLQEAWMFYKHTRRKESHAARRHQRKLLAAINAFRQVRLKHRKLREQVNSMVDISKMHMILYDLQQNLSSSHRALEKQIDTLAGKLDALTELLSTALGPRQLPEPSQQSK

SEQ ID NO: 7393 - protein, 113 aa, Homo Sapiens
SDTLWLIPITFLTIGYGDVVPGTMWGKIVCLCTGVMGVCCTALLVAVVARKLEFNKAEKHVHNFMMDIQYTKEMKESAARVLQEAWMFYKHTRRKESHAARRHQRKLLAAINA

SEQ ID NO: 7394 - protein, 59 aa, Homo Sapiens
VDISKMHMILYDLQQNLSSSHRALEKQIDTLAGKLDALTELLSTALGPRQLPEPSQQSK

SEQ ID NO: 7395 - protein, 165 aa, Homo Sapiens
  misc_feature (1)..(1): Xaa can be any naturally occurring amino acid
XVCCTALLVAVVARKLEFNKAEKHVHNFMMDIQYTKEEGVSCCPQASAQAAGRHQRVRAALYAHVSMCTHVQVTSLHGCVCACPCLSRFRQVRLKHRKLREQVNSMVDISKMHMILYDLQQNLSSSHRALEKQIDTLAGKLDALTELLSTALGPRQLPEPSQQSK

SEQ ID NO: 7396 - protein, 113 aa, Homo Sapiens
MFQTKLRNETWEDLPKMSCTTEIQAAFILSSFVTFFSGLIILLIFRLIWRSVKKWQIIKGTGIILELFTSGTIARSHVRSLHFQGQFRDHIEMLLSAQTFVGQVLPCWKLFII

SEQ ID NO: 7397 - protein, 1149 aa, Homo Sapiens
MFQTKLRNETWEDLPKMSCTTEIQAAFILSSFVTFFSGLIILLIFRLIWRSVKKWQIIKGTGIILELFTSGTIARSHVRSLHFQGQFRDHIEMLLSAQTFVGQVLVILVFVLSIGSLIIYFINSADPVGSCSSYEDKTIPIDLVFNAFFSFYFGLRFMAADDKIKFWLEMNSIVDIFTIPPTFISYYLKSNWLGLRFLRALRLLELPQILQILRAIKTSNSVKFSKLLSIILSTWFTAAGFIHLVENSGDPWLKGRNSQNISYFESIYLVMATTSTVGFGDVVAKTSLGRTFIMFFTLGSLILFANYIPEMVELFANKRKYTSSYEALKGKKFIVVCGNITVDSVTAFLRNFLRDKSGEINTEIVFLGETPPSLELETIFKCYLAYTTFISGSAMKWEDLRRVAVESAEACLIIANPLCSDSHAEDISNIMRVLSIKNYDSTTRIIIQILQSHNKVYLPKIPSWNWDTGDNIICFAELKLGFIAQGCLVPGLCTFLTSLFVEQNKKVMPKQTWKKHFLNSMKNKILTQRLSDDFAGMSFPEVARLCFLKMHLLLIAIEYKSLFTDGFCGLILNPPPQVRIRKNTLGFFIAETPKDVRRALFYCSVCHDDVFIPELITNCGCKSRSRQHITVPSVKRMKKCLKGISSRISGQDSPPRVSASTSSISNFTTRTLQHDVEQDSDQLDSSGMFHWCKPTSLDKVTLKRTGKSKYKFRNHIVACVFGDAHSAPMGLRNFVMPLRASNYTRKELKDIVFIGSLDYLQREWRFLWNFPQIYILPGCALYSGDLHAANIEQCSMCAVLSPPPQPSSNQTLVDTEAIMATLTIGSLQIDSSSDPSPSVSEETPGYTNGHNEKSNCRKVPILTELKNPSNIHFIEQLGGLEGSLQETNLHLSTAFSTGTVFSGSFLDSLLATAFYNYHVLELLQMLVTGGVSSQLEQHLDKDKVYGVADSCTSLLSGRNRCKLGLLSLHETILSDVNPRNTFGQLFCGSLDLFGILCVGLYRIIDEEELNPENKRFVITRPANEFKLLPSDLVFCAIPFSTACYKRNEEFSLQKSYEIVNKASQTTETHSDTNCPPTIDSVTETLYSPVYSYQPRTNSLSFPKQIAWNQSRTNSIISSQIPLGDNAKENERKTSDEVYDEDPFAYSEPL

SEQ ID NO: 7398 - protein, 308 aa, Homo Sapiens
MFQTKLRNETWEDLPKMSCTTEIQAAFILSSFVTFFSGLIILLIFRLIWRSVKKWQIIKGTGIILELFTSGTIARSHVRSLHFQGQFRDHIEMLLSAQTFVGQVLVILVFVLSIGSLIIYFINSADPVGSCSSYEDKTIPIDLVFNAFFSFYFGLRFMAADDKIKFWLEMNSIVDIFTIPPTFISYYLKSNWLGLRFLRALRLLELPQILQILRAIKTSNSVKFSKLLSIILSTWFTAAGFIHLVENSGDPWLKGRNSQNISYFESIYLVMATTSTVGFGDVVAKTSLGRTFIMFFTLGSLVKNIFNI

SEQ ID NO: 7399 - protein, 947 aa, Homo Sapiens
MFQTKLRNETWEDLPKMSCTTEIQAAFILSSFVTFFSGLIILLIFRLIWRSVKKWQIIKGTGIILELFTSGTIARSHVRSLHFQGQFRDHIEMLLSAQTFVGQVLVILVFVLSIGSLIIYFINSADPVGSCSSYEDKTIPIDLVFNAFFSFYFGLRFMAADDKIKFWLEMNSIVDIFTIPPTFISYYLKSNWLGLRFLRALRLLELPQILQILRAIKTSNSVKFSKLLSIILSTWFTAAGFIHLVENSGDPWLKGRNSQNISYFESIYLVMATTSTVGFGDVVAKTSLGRTFIMFFTLGSLILFANYIPEMVELFANKRKYTSSYEALKGKKFIVVCGNITVDSVTAFLRNFLRDKSGEINTEIVFLGETPPSLELETIFKCYLAYTTFISGSAMKWEDLRRVAVESAEACLIIANPLCSDSHAEDISNIMRVLSIKNYDSTTRIIIQILQSHNKVYLPKIPSWNWDTGDNIICFAELKLGFIAQGCLVPGLCTFLTSLFVEQNKKVMPKQTWKKHFLNSMKNKILTQRLSDDFAGMSFPEVARLCFLKMHLLLIAIEYKSLFTDGFCGLILNPPPQVRIRKNTLGFFIAETPKDVRRALFYCSVCHDDVFIPELITNCGCKSRSRQHITVPSVKRMKKCLKGISSRISGQDSPPRVSASTSSISNFTTRTLQHDVEQDSDQLDSSGMFHWCKPTSLDKVTLKRTGKSKYKFRNHIVACVFGDAHSAPMGLRNFVMPLRASNYTRKELKDIVFIGSLDYLQREWRFLWNFPQIYILPGCALYSGDLHAANIEQCSMCAVLSPPPQPSSNQTLVDTEAIMATLTIGSLQIDSSSDPSPSVSEETPGYTNGHNEKSNCRKVPILTELKNPSNIHFIEQLGGLEGSLQETNLHLSTAFSTGTVFSGSFLDSLLATLMWKLAIKGSQFQGRSSGLCWPSTIIMSWNCFRCW

SEQ ID NO: 7400 - protein, 51 aa, Homo Sapiens
MIKKTEFSNVCSIFYLILQAMLKGLLQLSCPGIASDAGDRRSKFSAGTTFR

SEQ ID NO: 7401 - protein, 1628 aa, Homo Sapiens
MAGVGAAALSLLLHLGALALAAGAEGGAVPREPPGQQTTAHSSVLAGNSQEQWHPLREWLGRLEAAVMELREQNKDLQTRVRQLESCECHPASPQCWGLGRAWPEGARWEPDACTACVCQDGAAHCGPQAHLPHCRGCSQNGQTYGNGETFSPDACTTCRCLEGTITCNQKPCPRGPCPEPGACCPHCKPGCDYEGQLYEEGVTFLSSSNPCLQCTCLRSRVRCMALKCPPSPCPEPVLRPGHCCPTCQGCTEGGSHWEHGQEWTTPGDPCRICRCLEGHIQCRQRECASLCPYPARPLPGTCCPVCDGCFLNGREHRSGEPVGSGDPCSHCRCANGSVQCEPLPCPPVPCRHPGKIPGQCCPVCDGCEYQGHQYQSQETFRLQERGLCVRCSCQAGEVSCEEQECPVTPCALPASGRQLCPACELDGEEFAEGVQWEPDGRPCTACVCQDGVPKCGAVLCPPAPCQHPTQPPGACCPSCDSCTYHSQVYANGQNFTDADSPCHACHCQDGTVTCSLVDCPPTTCARPQSGPGQCCPRCPDCILEEEVFVDGESFSHPRDPCQECRCQEGHAHCQPRPCPRAPCAHPLPGTCCPNDCSGCAFGGKEYPSGADFPHPSDPCRLCRCLSGNVQCLARRCVPLPCPEPVLLPGECCPQCPAAPAPAGCPRPGAAHARHQEYFSPPGDPCRRCLCLDGSVSCQRLPCPPAPCAHPRQGPCCPSCDGCLYQGKEFASGERFPSPTAACHLCLCWEGSVSCEPKACAPALCPFPARGDCCPDCDGCEYLGESYLSNQEFPDPREPCNLCTCLGGFVTCGRRPCEPPGCSHPLIPSGHCCPTCQGCRYHGVTTASGETLPDPLDPTCSLCTCQEGSMRCQKKPCPPALCPHPSPGPCFCPVCHSCLSQGREHQDGEEFEGPAGSCEWCRCQAGQVSCVRLQCPPLPCKLQVTERGSCCPRCRGCLAHGEEHPEGSRWVPPDSACSSCVCHEGVVTCARIQCISSCAQPRQGPHDCCPQCSDCEHEGRKYEPGESFQPGADPCEVCICEPQPEGPPSLRCHRRQCPSLVGCPPSQLLPPGPQHCCPTCAEALSNCSEGLLGSELAPPDPCYTCQCQDLTWLCIHQACPELSCPLSERHTPPGSCCPVCRECVVEAEGRRVADGESWRDPSNACIACTCHRGHVECHLEECQALSCPHGWAKVPQADSCCERCQAPTQSCVHQGREVASGERWTVDTCTSCSCMAGTVRCQSQRCSPLSCGPDKAPALSPGSCCPRCLPRPASCMAFGDPHYRTFDGRLLHFQGSCSYVLAKDCHSGDFSVHVTNDDRGRSGVAWTQEVAVLLGDMAVRLLQDGAVTVDGHPVALPFLQEPLLYVELRGHTVILHAQPGLQVLWDGQSQVEVSVPGSYQGRTCGLCGNFNGFAQDDLQGPEGLLLPSEAAFGNSWQVSEGLWPGRPCSAGREVDPCRAAGYRARREANARCGVLKSSPFSRCHAVVPPEPFFAACVYDLCACGPGSSADACLCDALEAYASHCRQAGVTPTWRGPTLCVVGCPLERGFVFDECGPPCPRTCFNQHIPLGELAAHCVRPCVPGCQCPAGLVEHEAHCIPPEACPQVLLTGDQPLGARPSPSREPQETP

SEQ ID NO: 7402 - protein, 1504 aa, Homo Sapiens
MAGVGAAALSLLLHLGALALAAGAEGGAVPREPPGQQTTAHSSVLAGNSQEQWHPLREWLGRLEAAVMELREQNKDLQTRVRQLESCECHPASPQCWGLGRAWPEGARWEPDACTACVCQDGAAHCGPQAHLPHCRGCSQNGQTYGNGETFSPDACTTCRCLTGAVQCQGPSCSELNCLESCTPPGECCPICRCTEGGSHWEHGQEWTTPGDPCRICRCLEGHIQCRQRECASLCPYPARPLPGTCCPVCDGCFLNGREHRSGEPVGSGDPCSHCRCANGSVQCEPLPCPPVPCRHPGKIPGQCCPVCDGCEYQGHQYQSQETFRLQERGLCVRCSCQAGEVSCEEQECPVTPCALPASGRQLCPACELDGEEFAEGVQWEPDGRPCTACVCQDGVPKCGAVLCPPAPCQHPTQPPGACCPSCDSCTYHSQVYANGQNFTDADSPCHACHCQDGTVTCSLVDCPPTTCARPQSGPGQCCPRCPDCILEEEVFVDGESFSHPRDPCQECRCQEGHAHCQPRPCPRAPCAHPLPGTCCPNDCSGCAFGGKEYPSGADFPHPSDPCRLCRCLSGNVQCLARRCVPLPCPEPVLLPGECCPQCPAPAGCPRPGAAHARHQEYFSPPGDPCRRCLCLDGSVSCQRLPCPPAPCAHPRQGPCCPSCDGCLYQGKEFASGERFPSPTAACHLCLCWEGSVSCEPKACAPALCPFPARGDCCPDCDGCEYLGESYLSNQEFPDPREPCNLCTCLGGFVTCGRRPCEPPGCSHPLIPSGHCCPTCQGCRYHGVTTASGETLPDPLDPTCSLCTCQEGSMRCQKKPCPPALCPHPSPGPCFCPVCHSCLSQGREHQDGEEFEGPAGSCEWCRCQAGQVSCVRLQCPPLPCKLQVTERGSCCPRCRGCLAHGEEHPEGSRWVPPDSACSSCVCHEGVVTCARIQCISSCAQPRQGPHDCCPQCSDCEHEGRKYEPGESFQPGADPCEVCICEPQPEGPPSLRCHRRQCPSLVGCPPSQLLPPGPQHCCPTCAEALSNCSEGLLGSELAPPDPCYTCQCQDLTWLCIHQACPELSCPLSERHTPPGSCCPVCRAPTQSCVHQGREVASGERWTVDTCTSCSCMAGTVRCQSQRCSPLSCGPDKAPALSPGSCCPRCLPRPASCMAFGDPHYRTFDGRLLHFQGSCSYVLAKDCHSGDFSVHVTNDDRGRSGVAWTQEVAVLLGDMAVRLLQDGAVTVDGHPVALPFLQEPLLYVELRGHTVILHAQPGLQVLWDGQSQVEVSVPGSYQGRTCGLCGNFNGFAQDDLQGPEGLLLPSEAAFGNSWQVSEGLWPGRPCSAGREVDPCRAAGYRARREANARCGVLKSSPFSRCHAVVPPEPFFAACVYDLCACGPGSSADACLCDALEAYASHCRQAGVTPTWRGPTLCVVGCPLERGFVFDECGPPCPRTCFNQHIPLGELAAHCVRPCVPGCQCPAGLVEHEAHCIPPEACPQVLLTGDQPLGARPSPSREPQETP

SEQ ID NO: 7403 - protein, 1568 aa, Homo Sapiens
MAGVGAAALSLLLHLGALALAAGAEGGAVPREPPGQQTTAHSSVLAGNSQEQWHPLREWLGRLEAAVMELREQNKDLQTRVRQLESCECHPASPQCWGLGRAWPEGARWEPDACTACVCQDGAAHCGPQAHLPHCRGCSQNGQTYGNGETFSPDACTTCRCLTGAVQCQGPSCSELNCLESCTPPGECCPICRPGCDYEGQLYEEGVTFLSSSNPCLQCTCLRSRVRCMALKCPPSPCPEPVLRPGHCCPTCQGCTEGGSHWEHGQEWTTPGDPCRICRCLEGHIQCRQRECASLCPYPARPLPGTCCPVCDGCFLNGREHRSGEPVGSGDPCSHCRCANGSVQCEPLPCPPVPCRHPGKIPGQCCPVCDGCEYQGHQYQSQETFRLQERGLCVRCSCQAGEVSCEEQECPVTPCALPASGRQLCPACELDGEEFAEGVQWEPDGRPCTACVCQDGVPKCGAVLCPPAPCQHPTQPPGACCPSCDSCTYHSQVYANGQNFTDADSPCHACHCQDGTVTCSLVDCPPTTCARPQSGPGQCCPRCPDCILEEEVFVDGESFSHPRDPCQECRCQEGHAHCQPRPCPRAPCAHPLPGTCCPNDCSGCAFGGKEYPSGADFPHPSDPCRLCRCLSGNVQCLARRCVPLPCPEPVLLPGECCPQCPAAPAPAGCPRPGAAHARHQEYFSPPGDPCRRCLCLDGSVSCQRLPCPPAPCAHPRQGPCCPSCDGCLYQGKEFASGERFPSPTAACHLCLCWEGSVSCEPKACAPALCPFPARGDCCPDCDGCEYLGESYLSNQEFPDPREPCNLCTCLGGFVTCGRRPCEPPGCSHPLIPSGHCCPTCQGCRYHGVTTASGETLPDPLDPTCSLCTCQEGSMRCQKKPCPPALCPHPSPGPCFCPVCHSCLSQGREHQDGEEFEGPAGSCEWCRCQAGQVSCVRLQCPPLPCKLQVTERGSCCPRCRGCLAHGEEHPEGSRWVPPDSACSSCVCHEGVVTCARIQCISSCAQPRQGPHDCCPQCSDCEHEGRKYEPGESFQPGADPCEVCICEPQPEGPPSLRCHRRQCPSLVGCPPSQLLPPGPQHCCPTCAEALSNCSEGLLGSELAPPDPCYTCQCQDLTWLCIHQACPELSCPLSERHTPPGSCCPVCRAPTQSCVHQGREVASGERWTVDTCTSCSCMAGTVRCQSQRCSPLSCGPDKAPALSPGSCCPRCLPRPASCMAFGDPHYRTFDGRLLHFQGSCSYVLAKDCHSGDFSVHVTNDDRGRSGVAWTQEVAVLLGDMAVRLLQDGAVTVDGHPVALPFLQEPLLYVELRGHTVILHAQPGLQVLWDGQSQVEVSVPGSYQGRTCGLCGNFNGFAQDDLQGPEGLLLPSEAAFGNSWQVSEGLWPGRPCSAGREVDPCRAAGYRARREANARCGVLKSSPFSRCHAVVPPEPFFAACVYDLCACGPGSSADACLCDALEAYASHCRQAGVTPTWRGPTLCVVGCPLERGFVFDECGPPCPRTCFNQHIPLGELAAHCVRPCVPGCQCPAGLVEHEAHCIPPEACPQVLLTGDQPLGARPSPSREPQETP

SEQ ID NO: 7404 - protein, 1275 aa, Homo Sapiens
MAGVGAAALSLLLHLGALALAAGAEGGAVPREPPGQQTTAHSSVLAGNSQEQWHPLREWLGRLEAAVMELREQNKDLQTRVRQLESCECHPASPQCWGLGRAWPEGARWEPDACTACVCQDGAAHCGPQAHLPHCRGCSQNGQTYGNGETFSPDACTTCRCLTGAVQCQGPSCSELNCLESCTPPGECCPICRPGCDYEGQLYEEGVTFLSSSNPCLQCTCLRSRVRCMALKCPPSPCPEPVLRPGHCCPTCQGCTEGGSHWEHGQEWTTPGDPCRICRCLEGHIQCRQRECASLCPYPARPLPGTCCPVCDGCFLNGREHRSGEPVGSGDPCSHCRCANGSVQCEPLPCPPVPCRHPGKIPGQCCPVCDGCEYQGHQYQSQETFRLQERGLCVRCSCQAGEVSCEEQECPVTPCALPASGRQLCPACELDGEEFAEGVQWEPDGRPCTACVCQDGVPKCGAVLCPPAPCQHPTQPPGACCPSCDSCTYHSQVYANGQNFTDADSPCHACHCQDGTVTCSLVDCPPTTCARPQSGPGQCCPRCPDCILEEEVFVDGESFSHPRDPCQECRCQEGHAHCQPRPCPRAPCAHPLPGTCCPNDCSGCAFGGKEYPSGADFPHPSDPCRLCRCLSGNVQCLARRCVPLPCPEPVLLPGECCPQCPAAPAPAGCPRPGAAHARHQEYFSPPGDPCRRCLCLDGSVSCQRLPCPPAPCAHPRQGPCCPSCDGCLYQGKEFASGERFPSPTAACHLCLCWEGSVSCEPKACAPALCPFPARGDCCPDCDGCEYLGESYLSNQEFPDPREPCNLCTCLGGFVTCGRRPCEPPGCSHPLIPSGHCCPTCQGCRYHGVTTASGETLPDPLDPTCSLCTCQEGSMRCQKKPCPPALCPHPSPGPCFCPVCHSCLSQGREHQDGEEFEGPAGSCEWCRCQAGQVSCVRLQCPPLPCKLQVTERGSCCPRCRGCLAHGEEHPEGSRWVPPDSACSSCVCHEGVVTCARIQCISSCAQPRQGPHDCCPQCSDCEHEGRKYEPGESFQPGADPCEVCICEPQPEGPPSLRCHRRQCPSLVGCPPSQLLPPGPQHCCPTCAEALSNCSEGLLGSELAPPDPCYTCQCQDLTWLCIHQACPELSCPLSERHTPPGSCCPVCRAPTQSCVHQGREVASGERWTVDTCTSCSCMAGTVRCQSQRCSPLSCGPDKAPALSPGSCCPRCLPRPASCMAFGDPHYRTFDGRLLHFQGSCSYVLAKDCHSGDFRWMGTRWPCPSCRSRCCMWSCEDTL

SEQ ID NO: 7405 - protein, 502 aa, Homo Sapiens
MFGTLLLYCFFLATVPALAETGGERQLSPEKSEIWGPGLKADVVLPARYFYIQAVDTSGNKFTSSPGEKVFQVKVSAPEEQFTRVGVQVLDRKDGSFIVRYRMYASYKNLKVEIKFQGQHVAKSPYILKGPVYHENCDCPLQDSAAWLREMNCPETIAQIQRDLAHFPAVDPEKIAVEIPKRFGQRQSLCHYTLKDNKVYIKTHGEHVGFRIFMDAILLSLTRKVKMPDVELFVNLGDWPLEKKKSNSNIHPIFSWCGSTDSKDIVMPTYDLTDSVLETMGRVSLDMMSVQANTGPPWESKNSTAVWRGRDSRKERLELVKLSRKHPELIDAAFTNFFFFKHDENLYGPIVKHISFFDFFKHKYQINIDGTVAAYRLPYLLVGDSVVLKQDSIYYEHFYNELQPWKHYIPVKSNLSDLLEKLKWAKDHDEEAKKIAKAGQEFARNNLMGDDIFCYYFKLFQEYANLQVSEPQIREGMKRVEPQTEDDLFPCTCHRKKTKDEL

SEQ ID NO: 7406 - protein, 507 aa, Homo Sapiens
MRRLPRALLLQLRLALLVAAGAPEVLVSAPRSLVWGPGLQAAVVLPVRYFYLQAVNSEGQNLTRSPAGETPFKVVVKSLSPKELVRIHVPKPLDRNDGTFLMRYRMYETVDEGLKIEVLYGDEHVAQSPYILKGPVYHEYCECPEDPQAWQKTLSCPTKEPQIAKDFASFPSINLQQMLKEVPKRFGDERGAIVHYTILNNHVYRRSLGKYTDFKMFSDEILLSLTRKVLLPDLEFYVNLGDWPLEHRKVNGTPSPIPIISWCGSLDSRDVVLPTYDITHSMLEAMRGVTNDLLSIQGNTGPSWINKTERAFFRGRDSREERLQLVQLSKENPQLLDAGITGYFFFQEKEKELGKAKLMGFFDFFKYKYQVNVDGTVAAYRYPYLMLGDSLVLKQDSPYYEHFYMALEPWKHYVPIKRNLSDLLEKVKWAKENDEEAKKIAKEGQLMARDLLQPHRLYCYYYQVLQKYAERQSSKPEVRDGMELVPQPEDSTAICQCHRKKPSREEL

SEQ ID NO: 7407 - protein, 451 aa, Homo Sapiens
MVELFIFLFLLGETPFKVVVKSLSPKELVRIHVPKPLDRNDGTFLMRYRMYETVDEGLKIEVLYGDEHVAQSPYILKGPVYHEYCECPEDPQAWQKTLSCPTKEPQIAKDFASFPSINLQQMLKEVPKRFGDERGAIVHYTILNNHVYRRSLGKYTDFKMFSDEILLSLTRKVLLPDLEFYVNLGDWPLEHRKVNGTPSPIPIISWCGSLDSRDVVLPTYDITHSMLEAMRGVTNDLLSIQGNTGPSWINKTERAFFRGRDSREERLQLVQLSKENPQLLDAGITGYFFFQEKEKELGKAKLMGFFDFFKYKYQVNVDGTVAAYRYPYLMLGDSLVLKQDSPYYEHFYMALEPWKHYVPIKRNLSDLLEKVKWAKENDEEAKKIAKEGQLMARDLLQPHRLYCYYYQVLQKYAERQSSKPEVRDGMELVPQPEDSTAICQCHRKKPSREEL

SEQ ID NO: 7408 - protein, 409 aa, Homo Sapiens
MVELFIFLFLLGETPFKVVVKSLSPKELVRIHVPKPLDRNDGTFLMRYRMYETVDEGLKIEVLYGDEHVAQSPYILKGPVYHEYCECPEDPQAWQKTLSCPTKEPQIAKDFASFPSINLQQMLKEVPKRFGDERGAIVHYTILNNHVYRRSLGKYTDFKMFSDEILLSLTRKVLLPDLEFYVNLGDWPLEHRKVNGTPSPIPIISWCGSLDSRDVVLPTYDITHSMLEAMRGVTNDLLSIQGNTGPSWINKTERAFFRGRDSREERLQLVQLSKENPQLLDAGITGYFFFQEKEKELGKAKLMGFFDFFKYKYQVNVDGTVAAYRYPYLMLGDSLVLKQDSPYYEHFYMALEPWKHYVPIKRNLSDLLEKVKWAKSFTLSPRLECSGTISTHCNLCLPGSRNFVPQPPE

SEQ ID NO: 7409 - protein, 160 aa, Homo Sapiens
  misc_feature (1)..(1): Xaa can be any naturally occurring amino acid
XEAMRGVTNDLLSIQGNTGPSWINKTERAFFRGRDSREERLQLVQLSKENPQLLDAGITGYFFFQEKEKELGKAKLMGFFDFFKENDEEAKKIAKEGQLMARDLLQPHRLYCYYYQVLQKYAERQSSKPEVRDGMELVPQPEDSTAICQCHRKKPSREEL

SEQ ID NO: 7410 - protein, 302 aa, Homo Sapiens [sequence omitted]

SEQ ID NO: 7411 - protein, 876 aa, Homo Sapiens
MLSGKKAAAAAAAAAAAATGTEAGPGTAGGSENGSEVAAQPAGLSGPAEVGPGAVGERTPRKKEPPRASPPGGLAEPPGSAGPQAGPTVVPGSATPMETGIAETPEGRRTSRRKRAKVEYREMDESLANLSEDEYYSEEERNAKAEKEKKLPPPPPQAPPEEENESEPEEPSGQAGGLQDDSSGGYGDGQASGVEGAAFQSRLPHDRMTSQEAACFPDIISGPQQTQKVFLFIRNRTLQLWLDNPKIQLTFEATLQQLEAPYNSDTVLVHRVHSYLERHGLINFGIYKRIKPLPTKKTGKVIIIGSGVSGLAAARQLQSFGMDVTLLEARDRVGGRVATFRKGNYVADLGAMVVTGLGGNPMAVVSKQVNMELAKIKQKCPLYEANGQADTVKVPKEKDEMVEQEFNRLLEATSYLSHQLDFNVLNNKPVSLGQALEVVIQLQEKHVKDEQIEHWKKIVKTQEELKELLNKMVNLKEKIKELHQQYKEASEVKPPRDITAEFLVKSKHRDLTALCKEYDELAETQGKLEEKLQELEANPPSDVYLSSRDRQILDWHFANLEFANATPLSTLSLKHWDQDDDFEFTGSHLTVRNGYSCVPVALAEGLDIKLNTAVRQVRYTASGCEVIAVNTRSTSQTFIYKCDAVLCTLPLGVLKQQPPAVQFVPPLPEWKTSAVQRMGFGNLNKVVLCFDRVFWDPSVNLFGHVGSTTASRGELFLFWNLYKAPILLALVAGEAAGIMENISDDVIVGRCLAILKGIFGSSAVPQPKETVVSRWRADPWARGSYSYVAAGSSGNDYDLMAQPITPGPSIPGAPQPIPRLFFAGEHTIRNYPATVHGALLSGLREAGRIADQFLGAMYTLPRQATPGVPAQQSPSM

SEQ ID NO: 7412 - protein, 852 aa, Homo Sapiens
MLSGKKAAAAAAAAAAAATGTEAGPGTAGGSENGSEVAAQPAGLSGPAEVGPGAVGERTPRKKEPPRASPPGGLAEPPGSAGPQAGPTVVPGSATPMETGIAETPEGRRTSRRKRAKVEYREMDESLANLSEDEYYSEEERNAKAEKEKKLPPPPPQAPPEEENESEPEEPSGVEGAAFQSRLPHDRMTSQEAACFPDIISGPQQTQKVFLFIRNRTLQLWLDNPKIQLTFEATLQQLEAPYNSDTVLVHRVHSYLERHGLINFGIYKRIKPLPTKKTGKVIIIGSGVSGLAAARQLQSFGMDVTLLEARDRVGGRVATFRKGNYVADLGAMVVTGLGGNPMAVVSKQVNMELAKIKQKCPLYEANGQAVPKEKDEMVEQEFNRLLEATSYLSHQLDFNVLNNKPVSLGQALEVVIQLQEKHVKDEQIEHWKKIVKTQEELKELLNKMVNLKEKIKELHQQYKEASEVKPPRDITAEFLVKSKHRDLTALCKEYDELAETQGKLEEKLQELEANPPSDVYLSSRDRQILDWHFANLEFANATPLSTLSLKHWDQDDDFEFTGSHLTVRNGYSCVPVALAEGLDIKLNTAVRQVRYTASGCEVIAVNTRSTSQTFIYKCDAVLCTLPLGVLKQQPPAVQFVPPLPEWKTSAVQRMGFGNLNKVVLCFDRVFWDPSVNLFGHVGSTTASRGELFLFWNLYKAPILLALVAGEAAGIMENISDDVIVGRCLAILKGIFGSSAVPQPKETVVSRWRADPWARGSYSYVAAGSSGNDYDLMAQPITPGPSIPGAPQPIPRLFFAGEHTIRNYPATVHGALLSGLREAGRIADQFLGAMYTLPRQATPGVPAQQSPSM

SEQ ID NO: 7413 - protein, 858 aa, Homo Sapiens
MLSGKKAAAAAAAAAAAATGTEAGPGTAGGSENGSEVAAQPAGLSGPAEVGPGAVGERTPRKKEPPRASPPGGLAEPPGSAGPQAGPTVVPGSATPMETGIAETPEGRRTSRRKRAKVEYREMDESLANLSEDEYYSEEERNAKAEKEKKLPPPPPQAPPEEENESEPEEPSGVEGAAFQSRLPHDRMTSQEAACFPDIISGPQQTQKVFLFIRNRTLQLWLDNPKIQLTFEATLQQLEAPYNSDTVLVHRVHSYLERHGLINFGIYKRIKPLPTKKTGKVIIIGSGVSGLAAARQLQSFGMDVTLLEARDRVGGRVATFRKGNYVADLGAMVVTGLGGNPMAVVSKQVNMELAKIKQKCPLYEANGQAVPKEKDEMVEQEFNRLLEATSYLSHQLDFNVLNNKPVSLGQALEVVIQLQEKHVKDEQIEHWKKIVKTQEELKELLNKMVNLKEKIKELHQQYKEASEVKPPRDITAEFLVKSKHRDLTALCKEYDELAETQGKLEEKLQELEANPPSPLFFCSDVYLSSRDRQILDWHFANLEFANATPLSTLSLKHWDQDDDFEFTGSHLTVRNGYSCVPVALAEGLDIKLNTAVRQVRYTASGCEVIAVNTRSTSQTFIYKCDAVLCTLPLGVLKQQPPAVQFVPPLPEWKTSAVQRMGFGNLNKVVLCFDRVFWDPSVNLFGHVGSTTASRGELFLFWNLYKAPILLALVAGEAAGIMENISDDVIVGRCLAILKGIFGSSAVPQPKETVVSRWRADPWARGSYSYVAAGSSGNDYDLMAQPITPGPSIPGAPQPIPRLFFAGEHTIRNYPATVHGALLSGLREAGRIADQFLGAMYTLPRQATPGVPAQQSPSM

SEQ ID NO: 7414 - protein, 274 aa, Homo Sapiens
IFVEFDGCNWKQHSWVKVHAEEVIVLLLEGSLVWAPREDPVLLQGIRVSIAQWPALTFTPLVDKLGLGSVVPVEYLLDRELRFLSDANGLHLFQMGTDSQNQILLEHAALRETVNALISDQKLQEIFSRGPYSVQGHRVKIYQPEGEEGWLYGVVSHQDSITRLMEVSVTESGEIKSVDPRLIHVMLMDNSAPQSEGGTLKAVKSSKGKKKRESIEGKDGRRRKSASDSGCDPASKKLKGDRGEVDSNGSDGDKPQHSLCHLHQRKRQDSGGAG

SEQ ID NO: 7415 - protein, 1761 aa, Homo Sapiens
MADAAASPVGKRLLLLFADTAASASASAPAAAAASGDPGPALRTRAWRAGTVRAMSGAVPQDLAIFVEFDGCNWKQHSWVKVHAEEVIVLLLEGSLVWAPREDPVLLQGIRVSIAQWPALTFTPLVDKLGLGSVVPVEYLLDRELRFLSDANGLHLFQMGTDSQNQILLEHAALRETVNALISDQKLQEIFSRGPYSVQGHRVKIYQPEGEEGWLYGVVSHQDSITRLMEVSVTESGEIKSVDPRLIHVMLMDNSAPQSEGGTLKAVKSSKGKKKRESIEGKDGRRRKSASDSGCDPASKKLKGDRGEVDSNGSDGGEASRGPWKGGNASGEPGLDQRAKQPPSTFVPQINRNIRFATYTKENGRTLVVQDEPVGGDTPASFTPYSTATGQTPLAPEVGGAENKEAGKTLEQVGQGIVASAAVVTTASSTPNTVRISDTGLAAGTVPEKQKGSRSQASGENSRNSILASSGFGAPLPSSSQPLTFGSGRSQSNGVLATENKPLGFSFGCSSAQEAQKDTDLSKNLFFQCMSQTLPTSNYFTTVSESLADDSSSRDSFKQSLESLSSGLCKGRSVLGTDTKPGSKAGSSVDRKVPAESMPTLTPAFPRSLLNARTPENHENLFLQPPKLSREEPSNPFLAFVEKVEHSPFSSFASQASGSSSSATTVTSKVAPSWPESHSSADSASLAKKKPLFITTDSSKLVSGVLGSALTSGGPSLSAMGNGRSSSPTSSLTQPIEMPTLSSSPTEERPTVGPGQQDNPLLKTFSNVFGRHSGGFLSSPADFSQENKAPFEAVKRFSLDERSLACRQDSDSSTNSDLSDLSDSEEQLQAKTGLKGIPEHLMGKLGPNGERSAELLLGKSKGKQAPKGRPRTAPLKVGQSVLKDVSKVKKLKQSGEPFLQDGSCINVAPHLHKCRECRLERYRKFKEQEQDDSTVACRFFHFRRLIFTRKGVLRVEGFLSPQQSDPDAMNLWIPSSSLAEGIDLETSKYILANVGDQFCQLVMSEKEAMMMVEPHQKVAWKRAVRGVREMCDVCETTLFNIHWVCRKCGFGVCLDCYRLRKSRPRSETEEMGDEEVFSWLKCAKGQSHEPENLMPTQIIPGTALYNIGDMVHAARGKWGIKANCPCISRQNKSVLRPAVTNGMSQLPSINPSASSGNETTFSGGGGPAPVTTPEPDHVPKADSTDIRSEEPLKTDSSASNSNSELKAIRPPCPDTAPPSSALHWLADLATQKAKEETKEAGSLRSVLNKESHSPFGLDSFNSTAKVSPLTPKLFNSLLLGPTASNNKTEGSSLRDLLHSGPGKLPQTPLDTGIPFPPVFSTSSAGVKSKASLPNFLDHIIASVVENKKTSDASKRACNLTDTQKEVKEMVMGLNVLDPHTSHSWLCDGRLLCLHDPSNKNNWKIFRECWKQGQPVLVSGVHKKLKSELWKPEAFSQEFGDQDVDLVNCRNCAIISDVKVRDFWDGFEIICKRLRSEDGQPMVLKLKDWPPGEDFRDMMPTRFEDLMENLPLPEYTKRDGRLNLASRLPSYFVRPDLGPKMYNAYGLITAEDRRVGTTNLHLDVSDAVNVMVYVGIPIGEGAHDEEVLKTIDEGDADEVTKQRIHDGKEKPGALWHIYAAKDAEKIRELLRKVGEEQGQENPPDHDPIHDQSWYLDQTLRKRLYEEYGVQGWAIVQFLGDAVFIPAGAPHQVHNLYSCIKVAEDFVSPEHVKHCFRLTQEFRHLSNTHTNHEDKLQVKNIIYHAVKDAVGTLKAHESKLARS

SEQ ID NO: 7416 - protein, 759 aa, Homo Sapiens
MSEKEAMMMVEPHQKVAWKRAVRGVREMCDVCETTLFNIHWVCRKCGFGVCLDCYRLRKSRPRSETEEMGDEEVFSWLKCAKGQSHEPENLMPTQIIPGTALYNIGDMVHAARGKWGIKANCPCISRQNKSVLRPAVTNGMSQLPSINPSASSGNETTFSGGGGPAPVTTPEPDHVPKADSTDIRSEEPLKTDSSASNSNSELKAIRPPCPDTAPPSSALHWLADLATQKAKEETKEAGSLRSVLNKESHSPFGLDSFNSTAKVSPLTPKLFNSLLLGPTASNNKTEGSSLRDLLHSGPGKLPQTPLDTGIPFPPVFSTSSAGVKSKASLPNFLDHIIASVVENKKTSDASKRACNLTDTQKEVKEMVMGLNVLDPHTSHSWLCDGRLLCLHDPSNKNNWKIFRECWKQGQPVLVSGVHKKLKSELWKPEAFSQEFGDQDVDLVNCRNCAIISDVKVRDFWDGFEIICKRLRSEDGQPMVLKLKDWPPGEDFRDMMPTRFEDLMENLPLPEYTKRDGRLNLASRLPSYFVRPDLGPKMYNAYGLITAEDRRVGTTNLHLDVSDAVNVMVYVGIPIGEGAHDEEVLKTIDEGDADEVTKQRIHDGKEKPGALWHIYAAKDAEKIRELLRKVGEEQGQENPPDHDPIHDQSWYLDQTLRKRLYEEYGVQGWAIVQFLGDAVFIPAGAPHQVHNLYSCIKVAEDFVSPEHVKHCFRLTQEFRHLSNTHTNHEDKLQVKNIIYHAVKDAVGTLKAHESKLARS

SEQ ID NO: 7417 - protein, 20 aa, Homo Sapiens
VPEKQKGSRSQASGELASQC

SEQ ID NO: 7418 - protein, 1384 aa, Homo Sapiens
MAAGKASGESEEASPSLTAEEREALGGLDSRLFGFVRFHEDGARTKALLGKAVRCYESLILKAEGKVESDFFCQLGHFNLLLEDYPKALSAYQRYYSLQSDYWKNAAFLYGLGLVYFHYNAFQWAIKAFQEVLYVDPSFCRAKEIHLRLGLMFKVNTDYESSLKHFQLALVDCNPCTLSNAEIQFHIAHLYETQRKYHSAKEAYEQLLQTENLSAQVKATVLQQLGWMHHTVDLLGDKATKESYAIQYLQKSLEADPNSGQSWYFLGRCYSSIGKVQDAFISYRQSIDKSEASADTWCSIGVLYQQQNQPMDALQAYICAVQLDHGHAAAWMDLGTLYESCNQPQDAIKCYLNATRSKSCSNTSALAARIKYLQACKPHHPNTEPVLGLSQTPISQQSLPLHMIPSSQVDDLSSPAKRKRTSSPTKNTSDNWSGGHAVSHPPVQQQAHSWCLTPQKLQHLEQLRANRNNLNPAQKLMLEQLESQFVLMQQHQMRPTGVAQVRSTGIPNGPTADSSLPTNSVSGQQPQLALTRVPSVSQPGVRPACPGQPLANGPFSAGHVPCSTSRTLGSTDTILIGNNHITGSGSNGNVPYLQRNALTLPHNRTNLTSSAEEPWKNQLSNSTQGLHKGQSSHSAGPNGERPLSSTGPSQHLQAAGSGIQNQNGHPTLPSNSVTQGAALNHLSSHTATSGGQQGITLTKESKPSGNILTVPETSRHTGETPNSTASVEGLPNHVHQMTADAVCSPSHGDSKSPGLLSSDNPQLSALLMGKANNNVGTGTCDKVNNIHPAVHTKTDNSVASSPSSAISTATPSPKSTEQTTTNSVTSLNSPHSGLHTINGEGMEESQSPMKTDLLLVNHKPSPQIIPSMSVSIYPSSAEVLKACRNLGKNGLSNSSILLDKCPPPRPPSSPYPPLPKDKLNPPTPSIYLENKRDAFFPPLHQFCTNPNNPVTVIRGLAGALKLDLGLFSTKTLVEANNEHMVEVRTQLLQPADENWDPTGTKKIWHCESNRSHTTIAKYAQYQASSFQESLREENEKRSHHKDHSDSESTSSDNSGRRRKGPFKTIKFGTNIDLSDDKKWKLQLHELTKLPAFVRVVSAGNLLSHVGHTILGMNTVQLYMKVPGSRTPGHQENNNFCSVNINIGPGDCEWFVVPEGYWGVLNDFCEKNNLNFLMGSWWPNLEDLYEANVPVYRFIQRPGDLVWINAGTVHWVQAIGWCNNIAWNVGPLTACQYKLAVERYEWNKLQSVKSIVPMVHLSWNMARNIKVSDPKLFEMIKYCLLRTLKQCQTLREALIAAGKEIIWHGRTKEEPAHYCSICEVEVFDLLFVTNESNSRKTYIVHCQDCARKTSGNLENFVVLEQYKMEDLMQVYDQFTLAPPLPSASS

SEQ ID NO: 7419 - protein, 1269 aa, Homo Sapiens
MAAGKASGESEEASPSLTAEEREALGGLDSRLFGFVRFHEDGARTKALLGKAVRCYESLILKAEGKVESDFFCQLGHFNLLLEDYPKALSAYQRYYSLQSDYWKNAAFLYGLGLVYFHYNAFQWAIKAFQEVLYVDPSFCRAKEIHLRLGLMFKVNTDYESSLKHFQLALVDCNPCTLSNAEIQFHIAHLYETQRKYHSAKEAYEQLLQTENLSAQVKATVLQQLGWMHHTVDLLGDKATKESYAIQYLQKSLEADPNSGQSWYFLGRCYSSIGKVQDAFISYRQSIDKSEASADTWCSIGVLYQQQNQPMDALQAYICAVQLDHGHAAAWMDLGTLYESCNQPQDAIKCYLNATRSKSCSNTSALAARIKYLQACKPHHPNTEPVLGLSQTPISQQSLPLHMIPSSQVDDLSSPAKRKRTSSPTKNTSDNWSGGHAVSHPPVQQQAHSWCLTPQKLQMRPTGVAQVRSTGIPNGPTADSSLPTNSVSGQQPQLALTRVPSVSQPGVRPACPGQPLANGPFSAGHVPCSTSRTLGSTDTILIGNNHITGSGSNGNVPYLQRNALTLPHNRTNLTSSAEEPWKNQLSNSTQGLHKGQSSHSAGPNGERPLSSTGPSQHLQAAGSGIQNQNGHPTLPSNSVTQGAALNHLSSHTATSGGQQGITLTKESKPSGNILTVPETSRHTGETPNSTASVEGLPNHVHQMTADAVCSPSHGDSKSPGLLSSDNPQLSALLMGKANNNVGTGTCDKVNNIHPAVHTKTDNSVASSPSSAISTATPSPKSTEQTTTNSVTSLNSPHSGLHTINGEGMEESQSPMKTDLLLVNHKPSPQIIPSMSVSIYPSSAEVLKACRNLGKNGLSNSSILLDKCPPPRPPSSPYPPLPKDKLNPPTPSIYLENKRDAFFPPLHQFCTNPNNPVTVIRGLAGALKLDLGLFSTKTLVEANNEHMVEVRTQLLQPADENWDPTGTKKIWHCESNRSHTTIAKYAQYQASSFQESLREENEKRSHHKDHSDSESTSSDNSGRRRKGPFKTIKFGTNIDLSDDKKWKLQLHELTKLPAFVRVVSAGNLLSHVGHTILGMNTVQLYMKVPGSRTPGHQENNNFCSVNINIGPGDCEWFVVPEGYWGVLNDFCEKNNLNFLMGSWWPNLEDLYEANVPVYRFIQRPGDLVWINAGTVHWVQAIGWCNNIAWNVGPLTACQYKLAVERYEWNKLQSVKSIVPMVHLSWNMARNIKVLSSKNSEAMSDIEGSSHCCRKRDYMAWADKRRTSSLL

SEQ ID NO: 7420 - protein, 1332 aa, Homo Sapiens
MAAGKASGESEEASPSLTAEEREALGGLDSRLFGFVRFHEDGARTKALLGKAVRCYESLILKAEGKVESDFFCQLGHFNLLLEDYPKALSAYQRYYSLQSDYWKNAAFLYGLGLVYFHYNAFQWAIKAFQEVLYVDPSFCRAKEIHLRLGLMFKVNTDYESSLKHFQLALVDCNPCTLSNAEIQFHIAHLYETQRKYHSAKEAYEQLLQTENLSAQVKATVLQQLGWMHHTVDLLGDKATKESYAIQYLQKSLEADPNSGQSWYFLGRCYSSIGKVQDAFISYRQSIDKSEASADTWCSIGVLYQQQNQPMDALQAYICAVQLDHGHAAAWMDLGTLYESCNQPQDAIKCYLNATRSKSCSNTSALAARIKYLQNTSDNWSGGHAVSHPPVQQQAHSWCLTPQKLQHLEQLRANRNNLNPAQKLMLEQLESQFVLMQQHQMRPTGVAQVRSTGIPNGPTADSSLPTNSVSGQQPQLALTRVPSVSQPGVRPACPGQPLANGPFSAGHVPCSTSRTLGSTDTILIGNNHITGSGSNGNVPYLQRNALTLPHNRTNLTSSAEEPWKNQLSNSTQGLHKGQSSHSAGPNGERPLSSTGPSQHLQAAGSGIQNQNGHPTLPSNSVTQGAALNHLSSHTATSGGQQGITLTKESKPSGNILTVPETSRHTGETPNSTASVEGLPNHVHQMTADAVCSPSHGDSKSPGLLSSDNPQLSALLMGKANNNVGTGTCDKVNNIHPAVHTKTDNSVASSPSSAISTATPSPKSTEQTTTNSVTSLNSPHSGLHTINGEGMEESQSPMKTDLLLVNHKPSPQIIPSMSVSIYPSSAEVLKACRNLGKNGLSNSSILLDKCPPPRPPSSPYPPLPKDKLNPPTPSIYLENKRDAFFPPLHQFCTNPNNPVTVIRGLAGALKLDLGLFSTKTLVEANNEHMVEVRTQLLQPADENWDPTGTKKIWHCESNRSHTTIAKYAQYQASSFQESLREENEKRSHHKDHSDSESTSSDNSGRRRKGPFKTIKFGTNIDLSDDKKWKLQLHELTKLPAFVRVVSAGNLLSHVGHTILGMNTVQLYMKVPGSRTPGHQENNNFCSVNINIGPGDCEWFVVPEGYWGVLNDFCEKNNLNFLMGSWWPNLEDLYEANVPVYRFIQRPGDLVWINAGTVHWVQAIGWCNNIAWNVGPLTACQYKLAVERYEWNKLQSVKSIVPMVHLSWNMARNIKVSDPKLFEMIKYCLLRTLKQCQTLREALIAAGKEIIWHGRTKEEPAHYCSICEVEVFDLLFVTNESNSRKTYIVHCQDCARKTSGNLENFVVLEQYKMEDLMQVYDQFTLAPPLPSASS

SEQ ID NO: 7421 - protein, 1429 aa, Homo Sapiens
MAAGKASGESEEASPSLTAEEREALGGLDSRLFGFVRFHEDGARTKALLGKAVRCYESLILKAEGKVESDFFCQLGHFNLLLEDYPKALSAYQRYYSLQSDYWKNAAFLYGLGLVYFHYNAFQWAIKAFQEVLYVDPSFCRAKEIHLRLGLMFKVNTDYESSLKHFQLALVDCNPCTLSNAEIQFHIAHLYETQRKYHSAKEAYEQLLQTENLSAQVKATVLQQLGWMHHTVDLLGDKATKESYAIQYLQKSLEADPNSGQSWYFLGRCYSSIGKVQDAFISYRQSIDKSEASADTWCSIGVLYQQQNQPMDALQAYICAVQLDHGHAAAWMDLGTLYESCNQPQDAIKCYLNATRSKSCSNTSALAARIKYLQAQLCNLPQGSLQNKTKLLPSIEEAWSLPIPAELTSRQGAMNTAQQACKPHHPNTEPVLGLSQTPISQQSLPLHMIPSSQVDDLSSPAKRKRTSSPTKNTSDNWSGGHAVSHPPVQQQAHSWCLTPQKLQHLEQLRANRNNLNPAQKLMLEQLESQFVLMQQHQMRPTGVAQVRSTGIPNGPTADSSLPTNSVSGQQPQLALTRVPSVSQPGVRPACPGQPLANGPFSAGHVPCSTSRTLGSTDTILIGNNHITGSGSNGNVPYLQRNALTLPHNRTNLTSSAEEPWKNQLSNSTQGLHKGQSSHSAGPNGERPLSSTGPSQHLQAAGSGIQNQNGHPTLPSNSVTQGAALNHLSSHTATSGGQQGITLTKESKPSGNILTVPETSRHTGETPNSTASVEGLPNHVHQMTADAVCSPSHGDSKSPGLLSSDNPQLSALLMGKANNNVGTGTCDKVNNIHPAVHTKTDNSVASSPSSAISTATPSPKSTEQTTTNSVTSLNSPHSGLHTINGEGMEESQSPMKTDLLLVNHKPSPQIIPSMSVSIYPSSAEVLKACRNLGKNGLSNSSILLDKCPPPRPPSSPYPPLPKDKLNPPTPSIYLENKRDAFFPPLHQFCTNPNNPVTVIRGLAGALKLDLGLFSTKTLVEANNEHMVEVRTQLLQPADENWDPTGTKKIWHCESNRSHTTIAKYAQYQASSFQESLREENEKRSHHKDHSDSESTSSDNSGRRRKGPFKTIKFGTNIDLSDDKKWKLQLHELTKLPAFVRVVSAGNLLSHVGHTILGMNTVQLYMKVPGSRTPGHQENNNFCSVNINIGPGDCEWFVVPEGYWGVLNDFCEKNNLNFLMGSWWPNLEDLYEANVPVYRFIQRPGDLVWINAGTVHWVQAIGWCNNIAWNVGPLTACQYKLAVERYEWNKLQSVKSIVPMVHLSWNMARNIKVSDPKLFEMIKYCLLRTLKQCQTLREALIAAGKEIIWHGRTKEEPAHYCSICEVEVFDLLFVTNESNSRKTYIVHCQDCARKTSGNLENFVVLEQYKMEDLMQVYDQFTLAPPLPSASS

SEQ ID NO: 7422 - protein, 1401 aa, Homo Sapiens
MKSCGVSLATAAAAAAAFGDEEKKMAAGKASGESEEASPSLTAEEREALGGLDSRLFGFVRFHEDGARTKALLGKAVRCYESLILKAEGKVESDFFCQLGHFNLLLEDYPKALSAYQRYYSLQSDYWKNAAFLYGLGLVYFHYNAFQWAIKAFQEVLYVDPSFCRAKEIHLRLGLMFKVNTDYESSLKHFQLALVDCNPCTLSNAEIQFHIAHLYETQRKYHSAKEAYEQLLQTENLSAQVKATVLQQLGWMHHTVDLLGDKATKESYAIQYLQKSLEADPNSGQSWYFLGRCYSSIGKVQDAFISYRQSIDKSEASADTWCSIGVLYQQQNQPMDALQAYICAVQLDHGHAAAWMDLGTLYESCNQPQDAIKCYLNATRSKSCSNTSALAARIKYLQAQLCNLPQGSLQNKTKLLPSIEEAWSLPIPAELTSRQGAMNTAQQNTSDNWSGGHAVSHPPVQQQAHSWCLTPQKLQHLEQLRANRNNLNPAQKLMLEQLESQFVLMQQHQMRPTGVAQVRSTGIPNGPTADSSLPTNSVSGQQPQLALTRVPSVSQPGVRPACPGQPLANGPFSAGHVPCSTSRTLGSTDTILIGNNHITGSGSNGNVPYLQRNALTLPHNRTNLTSSAEEPWKNQLSNSTQGLHKGQSSHSAGPNGERPLSSTGPSQHLQAAGSGIQNQNGHPTLPSNSVTQGAALNHLSSHTATSGGQQGITLTKESKPSGNILTVPETSRHTGETPNSTASVEGLPNHVHQMTADAVCSPSHGDSKSPGLLSSDNPQLSALLMGKANNNVGTGTCDKVNNIHPAVHTKTDNSVASSPSSAISTATPSPKSTEQTTTNSVTSLNSPHSGLHTINGEGMEESQSPMKTDLLLVNHKPSPQIIPSMSVSIYPSSAEVLKACRNLGKNGLSNSSILLDKCPPPRPPSSPYPPLPKDKLNPPTPSIYLENKRDAFFPPLHQFCTNPNNPVTVIRGLAGALKLDLGLFSTKTLVEANNEHMVEVRTQLLQPADENWDPTGTKKIWHCESNRSHTTIAKYAQYQASSFQESLREENEKRSHHKDHSDSESTSSDNSGRRRKGPFKTIKFGTNIDLSDDKKWKLQLHELTKLPAFVRVVSAGNLLSHVGHTILGMNTVQLYMKVPGSRTPGHQENNNFCSVNINIGPGDCEWFVVPEGYWGVLNDFCEKNNLNFLMGSWWPNLEDLYEANVPVYRFIQRPGDLVWINAGTVHWVQAIGWCNNIAWNVGPLTACQYKLAVERYEWNKLQSVKSIVPMVHLSWNMARNIKVSDPKLFEMIKYCLLRTLKQCQTLREALIAAGKEIIWHGRTKEEPAHYCSICEVEVFDLLFVTNESNSRKTYIVHCQDCARKTSGNLENFVVLEQYKMEDLMQVYDQFTLAPPLPSASS

SEQ ID NO: 7423 - protein, 224 aa, Homo Sapiens
MKSCGVSLATAAAAAAAFGDEEKKMAAGKASGESEEASPSLTAEEREALGGLDSRLFGFVRFHEDGARTKALLGKAVRCYESLILKAEGKVESDFFCQLGHFNLLLEDYPKALSAYQRYYSLQSDYWKNAAFLYGLGLVYFHYNAFQWAIKAFQEVLYVDPSFCRAKEIHLRLGLMFKVNTDYESSLKHFQLALVDCNPCTLSNAEIQFHIAHLYETQVGCITL

SEQ ID NO: 7424 - protein, 161 aa, Homo Sapiens
  misc_feature (1)..(1): Xaa can be any naturally occurring amino acid
XARNIKVSDPKLFEMIKIFSLSPNFRAEKCLRDHLVQPLRSNGEPEPLRFTGEYCLLRTLKQCQTLREALIAAGKEIIWHGRTKEEPAHYCSICEVEVFDLLFVTNESNSRKTYIVHCQDCARKTSGNLENFVVLEQYKMEDLMQVYDQFTLAPPLPSASS

SEQ ID NO: 7425 - protein, 999 aa, Homo Sapiens
  misc_feature (1)..(1): Xaa can be any naturally occurring amino acid
XGTLYESCNQPQDAIKCYLNATRSKSCSNTSALAARIKYLQNTSDNWSGGHAVSHPPVQQQAHSWCLTPQKLQHLEQLRANRNNLNPAQKLMLEQLESQFVLMQQHQMRPTGVAQVRSTGIPNGPTADSSLPTNSVSGQQPQLALTRVPSVSQPGVRPACPGQPLANGPFSAGHVPCSTSRTLGSTDTILIGNNHITGSGSNGNVPYLQRNALTLPHNRTNLTSSAEEPWKNQLSNSTQGLHKGQSSHSAGPNGERPLSSTGPSQHLQAAGSGIQNQNGHPTLPSNSVTQGAALNHLSSHTATSGGQQGITLTKESKPSGNILTVPETSRHTGETPNSTASVEGLPNHVHQMTADAVCSPSHGDSKSPGLLSSDNPQLSALLMGKANNNVGTGTCDKVNNIHPAVHTKTDNSVASSPSSAISTATPSPKSTEQTTTNSVTSLNSPHSGLHTINGEGMEESQSPMKTDLLLVNHKPSPQIIPSMSVSIYPSSAEVLKACRNLGKNGLSNSSILLDKCPPPRPPSSPYPPLPKDKLNPPTPSIYLENKRDAFFPPLHQFCTNPNNPVTVIRGLAGALKLDLGLFSTKTLVEANNEHMVEVRTQLLQPADENWDPTGTKKIWHCESNRSHTTIAKYAQYQASSFQESLREENEKRSHHKDHSDSESTSSDNSGRRRKGPFKTIKFGTNIDLSDDKKWKLQLHELTKLPAFVRVVSAGNLLSHVGHTILGMNTVQLYMKVPGSRTPGHQENNNFCSVNINIGPGDCEWFVVPEGYWGVLNDFCEKNNLNFLMGSWWPNLEDLYEANVPVYRFIQRPGDLVWINAGTVHWVQAIGWCNNIAWNVGPLTACQYKLAVERYEWNKLQSVKSIVPMVHLSWNMARNIKVSDPKLFEMIKYCLLRTLKQCQTLREALIAAGKEIIWHGRTKEEPAHYCSICEVEVFDLLFVTNESNSRKTYIVHCQDCARKTSGNLENFVVLEQYKMEDLMQVYDQFTLAPPLPSASS

SEQ ID NO: 7426 - protein, 224 aa, Homo Sapiens
  misc_feature (1)..(1): Xaa can be any naturally occurring amino acid
XLQAYICAVQLDHGHAAAWMDLGTLYESCNQPQDAIKCYLNATRSKSCSNTSALAARIKYLQAQLCNLPQGSLQNKTKLLPSIEEAWSLPIPAELTSRQGAMNTAQQNTSDNWSGGHAVSHPPVQQQAHSWCLTPQKLQMRPTGVAQVRSTGIPNGPTADSSLPTNSVSGQQPQLALTRVPSVSQPGVRPACPGQPLANGPFSAGHVPCSTSRTLGSTDTILIG

SEQ ID NO: 7427 - protein, 1044 aa, Homo Sapiens
  misc_feature (1)..(1): Xaa can be any naturally occurring amino acid
XNKTKLLPSIEEAWSLPIPAELTSRQGAMNTAQQACKPHHPNTEPVLGLSQTPISQQSLPLHMIPSSQVDDLSSPAKRKRTSSPTKNTSDNWSGGHAVSHPPVQQQAHSWCLTPQKLQHLEQLRANRNNLNPAQKLMLEQLESQFVLMQQHQMRPTGVAQVRSTGIPNGPTADSSLPTNSVSGQQPQLALTRVPSVSQPGVRPACPGQPLANGPFSAGHVPCSTSRTLGSTDTILIGNNHITGSGSNGNVPYLQRNALTLPHNRTNLTSSAEEPWKNQLSNSTQGLHKGQSSHSAGPNGERPLSSTGPSQHLQAAGSGIQNQNGHPTLPSNSVTQGAALNHLSSHTATSGGQQGITLTKESKPSGNILTVPETSRHTGETPNSTASVEGLPNHVHQMTADAVCSPSHGDSKSPGLLSSDNPQLSALLMGKANNNVGTGTCDKVNNIHPAVHTKTDNSVASSPSSAISTATPSPKSTEQTTTNSVTSLNSPHSGLHTINGEGMEESQSPMKTDLLLVNHKPSPQIIPSMSVSIYPSSAEVLKACRNLGKNGLSNSSILLDKCPPPRPPSSPYPPLPKDKLNPPTPSIYLENKRDAFFPPLHQFCTNPNNPVTVIRGLAGALKLDLGLFSTKTLVEANNEHMVEVRTQLLQPADENWDPTGTKKIWHCESNRSHTTIAKYAQYQASSFQESLREENEKRSHHKDHSDSESTSSDNSGRRRKGPFKTIKFGTNIDLSDDKKWKLQLHELTKLPAFVRVVSAGNLLSHVGHTILGMNTVQLYMKVPGSRTPGHQENNNFCSVNINIGPGDCEWFVVPEGYWGVLNDFCEKNNLNFLMGSWWPNLEDLYEANVPVYRFIQRPGDLVWINAGTVHWVQAIGWCNNIAWNVGPLTACQYKLAVERYEWNKLQSVKSIVPMVHLSWNMARNIKVSDPKLFEMIKYCLLRTLKQCQTLREALIAAGKEIIWHGRTKEEPAHYCSICEVEVFDLLFVTNESNSRKTYIVHCQDCARKTSGNLENFVVLEQYKMEDLMQVYDQFTLAPPLPSASS

SEQ ID NO: 7428 - protein, 941 aa, Homo Sapiens
MAGAAAAVAAGAAAGAAAAAVSVAAPGRASAPPPPPPVYCVCRQPYDVNRFMIECDICKDWFHGSCVGVEEHHAVDIDLYHCPNCAVLHGSSLMKKRRNWHRHDYTEIDDGSKPVQAGTRTFIKELRSRVFPSADEIIIKMHGSQLTQRYLEKHGFDVPIMVPKLDDLGLRLPSPTFSVMDVERYVGGDKVIDVIDVARQADSKMTLHNYVKYFMNPNRPKVLNVISLEFSDTKMSELVEVPDIAKKLSWVENYWPDDSVFPKPFVQKYCLMGVQDSYTDFHIDFGGTSVWYHVLWGEKIFYLIKPTDENLARYESWSSSVTQSEVFFGDKVDKCYKCVVKQGHTLFVPTGWIHAVLTSQDCMAFGGNFLHNLNIGMQLRCYEMEKRLKTPDLFKFPFFEAICWFVAKNLLETLKELREDGFQPQTYLVQGVKALHTALKLWMKKELVSEHAFEIPDNVRPGHLIKELSKVIRAIEEENGKPVKSQGIPIVCPVSRSSNEATSPYHSRRKMRKLRDHNVRTPSNLDILELHTREVLKRLEMCPWEEDILSSKLNGKFNKHLQPSSTVPEWRAKDNDLRLLLTNGRIIKDERQPFADQSLYTADSENEEDKRRTKKAKMKIEESSGVEGVEHEESQKPLNGFFTRVKSELRSRSSGYSDISESEDSGPECTALKSIFTTEESESSGDEKKQEITSNFKEESNVMRNFLQKSQKPSRSEIPIKRECPTSTSTEEEAIQGMLSMAGLHYSTCLQRQIQSTDCSGERNSLQDPSSCHGSNHEVRQLYRYDKPVECGYHVKTEDPDLRTSSWIKQFDTSRFHPQDLSRSQKCIRKEGSSEISQRVQSRNYVDSSGSSLQNGKYMQNSNLTSGACQISNGSLSPERPVGETSFSVPLHPTKRPASNPPPISNQATKGKRPKKGMATAKQRLGKILKLNRNGHARFFV

SEQ ID NO: 7429 - protein, 404 aa, Homo Sapiens
  misc_feature (1)..(1): Xaa can be any naturally occurring amino acid
XAKNLLETLKELREDGFQPQTYLVQGVKALHTALKLWMKKELVSEHAFEIPDNVRPGHLIKELSKVIRAIEEENGKPVKSQGIPIVCPVSRSSNEATSPYHSRRKMRKLRDHNVRTPSNLDILELHTREVLKRLEMCPWEEDILSSKLNGKFNKHLQPSSTVPEWRAKDNDLRLLLTNGRIIKDERQPFADQSLYTADSENEEDKRRTKKAKMKIEESSGVEGVEHEESQKPLNGFFTRVKSELRSRSSGYSDISESEDSGPECTALKSIFTTEESESSGDEKKQEITSNFKEESNVMRNFLQKSQKPSRSEIPIKRECPTSTSTEEEAIQGMLSMAGLHYSTCLQRQIQSTDCSGERNSLQDPSSCHGSNHEVRQLYRYDKPVECETRSHLCCPDWSPTPELK

SEQ ID NO: 7430 - protein, 39 aa, Homo Sapiens
MLLLAAAFLVAFVLLLYMVSPLISPKPLALPGAHVVFFR

SEQ ID NO: 7431 - protein, 155 aa, Homo Sapiens
MLLLAAAFLVAFVLLLYMVSPLISPKPLALPGAHVVVTGGSSGIGKCIAIECYKQGAFITLVARNEDKLLQAKKEIEMHSINDKQVVLCISVDVSQDYNQVENVIKQAQEKLGPVDMLVNCAGMAVSGKFEDLERLMSINYLGSVYPSRAVITTM

SEQ ID NO: 7432 - protein, 332 aa, Homo Sapiens
MLLLAAAFLVAFVLLLYMVSPLISPKPLALPGAHVVVTGGSSGIGKCIAIECYKQGAFITLVARNEDKLLQAKKEIEMHSINDKQVVLCISVDVSQDYNQVENVIKQAQEKLGPVDMLVNCAGMAVSGKFEDLEVSTFERLMSINYLGSVYPSRAVITTMKERRVGRIVFVSSQAGQLGLFGFTAYSASKFAIRGLAEALQMEVKPYNVYITVAYPPDTDTPGFAEENRTKPLETRLISETTSVCKPEQVAKQIVKDAIQGNFNSSLGSDGYMLSALTCGMAPVTSITEGLQQVVTMGLFRTIALFYLGSFDSIVRRCMMQREKSENADKTA

SEQ ID NO: 7433 - protein, 332 aa, Homo Sapiens; identical to SEQ ID NO: 7432

SEQ ID NO: 7434 - protein, 298 aa, Homo Sapiens
MLLLAAAFLVAFVLLLYMVSPLISPKPLALPGAHVVVTGGSSGIGKCIAIECYKQGAFITLVARNEDKLLQAKKEIEMHSINDKQVVLCISVDVSQDYNQVENVIKQAQEKLGPVDMLVNCAGMAVSGKFEDLEVSTFERLMSINYLGSVYPSRAVITTMKERRVGRIVFVSSQAGQLGLFGFTAYSASKFAIRGLAEALQMEVKPYNVYITVAYPPDTDTPGFAEENRTKPLETRLISETTSVCKPEQVAKQIVKDAIVVTMGLFRTIALFYLGSFDSIVRRCMMQREKSENADKTA

SEQ ID NO: 7435 - protein, 268 aa, Homo Sapiens
MLLLAAAFLVAFVLLLYMVSPLISPKPLALPGAHVVVTGGSSGIGKCIAIECYKQGAFITLVARNEDKLLQAKKEIEMHSINDKQVVLCISVDVSQDYNQVENVIKQAQEKLGPVDMLVNCAGMAVSGKFEDLEVSTFEVKPYNVYITVAYPPDTDTPGFAEENRTKPLETRLISETTSVCKPEQVAKQIVKDAIQGNFNSSLGSDGYMLSALTCGMAPVTSITEGLQQVVTMGLFRTIALFYLGSFDSIVRRCMMQREKSENADKTA

SEQ ID NO: 7436 - protein, 39 aa, Homo Sapiens
MLLLAAAFLVAFVLLLYMVSPLISPKPLALPGAHVVWEG

SEQ ID NO: 7437 - protein, 352 aa, Homo Sapiens
MAGTICFIMWVLFITDTVWSRSVRQVYEVHDSDDWTIHDFECPMECFCPPSFPTALYCENRGLKEIPAIPSRIWYLYLQNNLIETIPEKPFENATQLRWINLNKNKITNYGIEKGALSQLKKLLFLFLEDNELEEVPSPLPRSLEQLQLARNKVSRIPQGTFSNLENLTLLDLQNNKLVDNAFQRDTFKGLKNLMQLNMAKNALRNMPPRLPANTMQLFLDNNSIEGIPENYFNVIPKVAFLRLNHNKLSDEGLPSRGFDVSSILDLQLSHNQLTKVPRISAHLQHLHLDHNKIKSVNVSVICPSPSMLPAERDSFSYGPHLRYLRLDGNEIKPPIPMALMTCFRLLQAVII

SEQ ID NO: 7438 - protein, 287 aa, Homo Sapiens
DPSPPLPWWDKSRLLFHGDWHMDIEQANLHQLATEFVFKGDLDINVRTASKYDDCCFLHLPDLCMTLDLQWLCHGNPHDHHSVTLRAPEFLPEVPLGQLHDSYRAFRSENLNLSIKMDLTRHSGTISQPRILLYSSTLRWMQNFWATWTSVTRPICRGKLFNNLKPSKKKLGQHYKQLSYTALFPQLQVHYWASFAQQRGIQIECSQGHVFTRGTQRLIPQAGTVMRRLISDWSVTQMVSDLSQVTVHLMASPTEENADHCLDPLVTKTHLLSLSSLTYQRHSNRTA

SEQ ID NO: 7439 - protein, 2235 aa, Homo Sapiens
MPLFFSALLVLLLVALSALFLGRWLVVRLATKWCQRKLQAELKIGSFRFFWIQNVSLKFQQHQQTVEIDNLWISSKLLSHDLPHYVALCFGEVRIRTDLQKVSDLSAPFSQSAGVDQKELSFSPSLLKIFCQLFSIHVDAINIMVLKVDTSESLWHIQISRSRFLLDSDGKRLICEVSLCKINSKVLKSGQLEDTCLVELSLALDLCLKVGISSRHLTAITVDVWTLHAELHEGLFQSQLLCQGPSLASKPVPCSEVTENLVEPTLPGLFLLQQLPDQVKVKMENTSVVLSMNSQKRHLTWTLKLLQFLYHRDEDQLPLRSFTANSDMAQMSTELLLEDGLLLSQSRQRIVCLNSLKASVQVTTIDLSASLVLNTCIIHYRHQEFSHWLHLLALETQGSSSPVLKQRKKRTFPQILAPIIFSTSISNVNISIQLGDTPPFALGFNSISLDYQHLRPQSIHQRGVLTVDHLCWRVGSDSHIQRAPHPPNMHVWGEALVLDSFTLQGSYNQPLGLSSTQSDTLFLDCTIRGLQVEASDTCAQCLSRILSLMGPQSGKSAVSRHSSFGESVSLLWKVDLKVEDMNLFTLSALVGASEVRLDTLTILGSAETSTVGIQGLVLALVKSVTEKMQPCCKAPDIPTPVLSLSMLSITYHSSIRSLEVQCGAGLTLLWSPPDHMYLYQHVLATLQCRDLLRATVFPETVPSLALETSGTTSELEGRAPEPLPPKRLLNLTLEVSTAKLTAFVAEDKFITLAAESVSLSRHGGSLQAYCPELAAGFDGNSIFNFKEVEVQLLPELEEMILHRNPFPALQTLRNRVWLLSFGSVSVEFPYQYDFSRTLDEAVGVQKWLKGLHQGTRAWASPSPVPLPPDLLLKVEHFSWVFLDDVFEVKLHDNYELMKDESKESAKRLQLLDAKVAALRKQHGELLPARKIEELYASLERKNIEIYIQRSRRLYGNTPMRRALLTWSLAGLELVALADASFHGPEHVVEQVQELDPGSPFPPEGLDLVIQWCRMLKCNVKSFLVRIRDYPRYLFEIRDWRLMGRLVGTEQSGQPCSRRRQILHLGLPWGNVAVERNMPPLKFYHDFHSEIFQYTVVWGPCWDPAWTLIGQCVDLLTKPSADPSPPLPWWDKSRLLFHGDWHMDIEQANLHQLATEDPYNTTENMHWEWSHLSFHWKPGQFVFKGDLDINVRTASKYDDCCFLHLPDLCMTLDLQWLCHGNPHDHHSVTLRAPEFLPEVPLGQLHDSYRAFRSENLNLSIKMDLTRHSGTISQPRILLYSSTLRWMQNFWATWTSVTRPICRGKLFNNLKPSKKKLGQHYKQLSYTALFPQLQVHYWASFAQQRGIQIECSQGHVFTRGTQRLIPQAGTVMRRLISDWSVTQMVSDLSQVTVHLMASPTEENADHCLDPLVTKTHLLSLSSLTYQRHSNRTAEEELSARDGDPTFHTHQLHLVDLRISWTTTNRDIAFGLYDGYKKAAVLKRNLSTEALKGLKIDPQMPAKKPKRGVPTSASAPPRVNTPSFSGQPDKGSSGGAYMLQKLIEETDRFVVFTEEESGMSDQLCGIAACQTDDIYNRNCLIELVNCQMVLRGAETEGCVIVSAAKAQLLQCQHHPAWYGDTLKQKTSWTCLLDGMQYFATTESSPTEQDGRQLWLEVKNIEEHRQRSLDSVQELMESGQAVGGMVTTTTDWNQPAEAQQAQQVQRIISRCNCRMYYISYSHDIDPELATQIKPPEVLENQEKEDLLKKQEGAVDTFTLIHHELEISTNPAQYAMILDIVNNLLLHVEPKRKEHSEKKQRVRFQLEISSNPEEQRSSILHLQEAVRQHVAQIRQLEKQMYSIMKSLQDDSKNENLLDLNQKLQLQLNQEKANLQLESEELNILIRCFKDFQLQRANKMELRKQQEDVSVVRRTEFYFAQARWRLTEEDGQLGIAELELQRFLYSKVNKSDDTAEHLLELGWFTMNNLLPNAVYKVVLRPQSSCQSGRQLALRLFSKVRPPVGGISVKEHFEVNVVPLTIQLTHQFFHRMMGFFFPGRSVEDDEVGDEEDKSKLVTTGIPVVKPRQLIATDDAVPLGPGKGVAQGLTRSSGVRRSFRKSPEHPVDDIDKMKERAAMNNSFIYIKIPQVPLCVSYKGEKNSVDWGDLNLVLPCLEYHNNTWTWLDFAMAVKRDSRKALVAQVIKEKLRLKSATGSEVRGKLETKSDLNMQQQEEEEKARLLIGLSVGDKNPGKKSIFGRRK

SEQ ID NO: 7440 - protein, 86 aa, Homo Sapiens
MPLFFSALLVLLLVALSALFLGRWLVVRLATKWCQRKLQAELKIGSFRFFWIQNVSLKFQQHQQTVTLCGIVLWRSAYQNGPTESF

SEQ ID NO: 7441 - protein, 2092 aa, Homo Sapiens
MVLKVDTSESLWHIQISRSRFLLDSDGKRLICEVSLCKINSKVLKSGQLEDTCLVELSLALDLCLKVGISSRHLTAITVDVWTLHAELHEGLFQSQLLCQGPSLASKPVPCSEVTENLVEPTLPGLFLLQQLPDQVKVKMENTSVVLSMNSQKRHLTWTLKLLQFLYHRDEDQLPLRSFTANSDMAQMSTELLLEDGLLLSQSRQRIVCLNSLKASVQVTTIDLSASLVLNTCIIHYRHQEFSHWLHLLALETQGSSSPVLKQRKKRTFPQILAPIIFSTSISNVNISIQLGDTPPFALGFNSISLDYQHLRPQSIHQRGVLTVDHLCWRVGSDSHIQRAPHPPNMHVWGEALVLDSFTLQGSYNQPLGLSSTQSDTLFLDCTIRGLQVEASDTCAQCLSRILSLMGPQSGKSAVSRHSSFGESVSLLWKVDLKVEDMNLFTLSALVGASEVRLDTLTILGSAETSTVGIQGLVLALVKSVTEKMQPCCKAPDIPTPVLSLSMLSITYHSSIRSLEVQCGAGLTLLWSPPDHMYLYQHVLATLQCRDLLRATVFPETVPSLALETSGTTSELEGRAPEPLPPKRLLNLTLEVSTAKLTAFVAEDKFITLAAESVSLSRHGGSLQAYCPELAAGFDGNSIFNFKEVEVQLLPELEEMILHRNPFPALQTLRNRVWLLSFGSVSVEFPYQYDFSRTLDEAVGVQKWLKGLHQGTRAWASPSPVPLPPDLLLKVEHFSWVFLDDVFEVKLHDNYELMKDESKESAKRLQLLDAKVAALRKQHGELLPARKIEELYASLERKNIEIYIQRSRRLYGNTPMRRALLTWSLAGLELVALADASFHGPEHVVEQVQELDPGSPFPPEGLDLVIQWCRMLKCNVKSFLVRIRDYPRYLFEIRDWRLMGRLVGTEQSGQPCSRRRQILHLGLPWGNVAVERNMPPLKFYHDFHSEIFQYTVVWGPCWDPAWTLIGQCVDLLTKPSADPSPPLPWWDKSRLLFHGDWHMDIEQANLHQLATEDPYNTTENMHWEWSHLSFHWKPGQFVFKGDLDINVRTASKYDDCCFLHLPDLCMTLDLQWLCHGNPHDHHSVTLRAPEFLPEVPLGQLHDSYRAFRSENLNLSIKMDLTRHSGTISQPRILLYSSTLRWMQNFWATWTSVTRPICRGKLFNNLKPSKKKLGQHYKQLSYTALFPQLQVHYWASFAQQRGIQIECSQGHVFTRGTQRLIPQAGTVMRRLISDWSVTQMVSDLSQVTVHLMASPTEENADHCLDPLVTKTHLLSLSSLTYQRHSNRTAEEELSARDGDPTFHTHQLHLVDLRISWTTTNRDIAFGLYDGYKKAAVLKRNLSTEALKGLKIDPQMPAKKPKRGVPTSASAPPRVNTPSFSGQPDKGSSGGAYMLQKLIEETDRFVVFTEEESGMSDQLCGIAACQTDDIYNRNCLIELVNCQMVLRGAETEGCVIVSAAKAQLLQCQHHPAWYGDTLKQKTSWTCLLDGMQYFATTESSPTEQDGRQLWLEVKNIEEHRQRSLDSVQELMESGQAVGGMVTTTTDWNQPAEAQQAQQVQRIISRCNCRMYYISYSHDIDPELATQIKPPEVLENQEKEDLLKKQEGAVDTFTLIHHELEISTNPAQYAMILDIVNNLLLHVEPKRKEHSEKKQRVRFQLEISSNPEEQRSSILHLQEAVRQHVAQIRQLEKQMYSIMKSLQDDSKNENLLDLNQKLQLQLNQEKANLQLESEELNILIRCFKDFQLQRANKMELRKQQEDVSVVRRTEFYFAQARWRLTEEDGQLGIAELELQRFLYSKVNKSDDTAEHLLELGWFTMNNLLPNAVYKAILRPQSSCQSGRQLALRLFSKVRPPVGGISVKEHFEVNVVPLTIQLTHQFFHRMMGFFFPGRSVEDDEVGDEEDKSKLVTTGIPVVKPRQLIATDDAVPLGPGKGVAQGLTRSSGVRRSFRKSPEHPVDDIDKMKERAAMNNSFIYIKIPQVPLCVSYKGEKNSVDWGDLNLVLPCLEYHNNTWTWLDFAMAVKRDSRKALVAQVIKEKLRLKSATGSEVRGKLETKSDLNMQQQEEEEKARLLIGLSVGDKNPGKKSIFGRRK

SEQ ID NO: 7442 - protein, 2092 aa, Homo Sapiens
MVLKVDTSESLWHIQISRSRFLLDSDGKRLICEVSLCKINSKVLKSGQLEDTCLVELSLALDLCLKVGISSRHLTAITVDVWTLHAELHEGLFQSQLLCQGPSLASKPVPCSEVTENLVEPTLPGLFLLQQLPDQVKVKMENTSVVLSMNSQKRHLTWTLKLLQFLYHRDEDQLPLRSFTANSDMAQMSTELLLEDGLLLSQSRQRIVCLNSLKASVQVTTIDLSASLVLNTCIIHYRHQEFSHWLHLLALETQGSSSPVLKQRKKRTFPQILAPIIFSTSISNVNISIQLGDTPPFALGFNSISLDYQHLRPQSIHQRGVLTVDHLCWRVGSDSHIQRAPHPPNMHVWGEALVLDSFTLQGSYNQPLGLSSTQSDTLFLDCTIRGLQVEASDTCAQCLSRILSLMGPQSGKSAVSRHSSFGESVSLLWKVDLKVEDMNLFTLSALVGASEVRLDTLTILGSAETSTVGIQGLVLALVKSVTEKMQPCCKAPDIPTPVLSLSMLSITYHSSIRSLEVQCGAGLTLLWSPPDHMYLYQHVLATLQCRDLLRATVFPETVPSLALETSGTTSELEGRAPEPLPPKRLLNLTLEVSTAKLTAFVAEDKFITLAAESVSLSRHGGSLQAYCPELAAGFDGNSIFNFKEVEVQLLPELEEMILHRNPFPALQTLRNRVWLLSFGSVSVEFPYQYDFSRTLDEAVGVQKWLKGLHQGTRAWASPSPVPLPPDLLLKVEHFSWVFLDDVFEVKLHDNYELMKDESKESAKRLQLLDAKVAALRKQHGELLPARKIEELYASLERKNIEIYIQRSRRLYGNTPMRRALLTWSLAGLELVALADASFHGPEHVVEQVQELDPGSPFPPEGLDLVIQWCRMLKCNVKSFLVRIRDYPRYLFEIRDWRLMGRLVGTEQSGQPCSRRRQILHLGLPWGNVAVERNMPPLKFYHDFHSEIFQYTVVWGPCWDPAWTLIGQCVDLLTKPSADPSPPLPWWDKSRLLFHGDWHMDIEQANLHQLATEDPYNTTENMHWEWSHLSFHWKPGQFVFKGDLDINVRTASKYDDCCFLHLPDLCMTLDLQWLCHGNPHDHHSVTLRAPEFLPEVPLGQLHDSYRAFRSENLNLSIKMDLTRHSGTISQPRILLYSSTLRWMQNFWATWTSVTRPICRGKLFNNLKPSKKKLGQHYKQLSYTALFPQLQVHYWASFAQQRGIQIECSQGHVFTRGTQRLIPQAGTVMRRLISDWSVTQMVSDLSQVTVHLMASPTEENADHCLDPLVTKTHLLSLSSLTYQRHSNRTAEEELSARDGDPTFHTHQLHLVDLRISWTTTNRDIAFGLYDGYKKAAVLKRNLSTEALKGLKIDPQMPAKKPKRGVPTSASAPPRVNTPSFSGQPDKGSSGGAYMLQKLIEETDRFVVFTEEESGMSDQLCGIAACQTDDIYNRNCLIELVNCQMVLRGAETEGCVIVSAAKAQLLQCQHHPAWYGDTLKQKTSWTCLLDGMQYFATTESSPTEQDGRQLWLEVKNIEEHRQRSLDSVQELMESGQAVGGMVTTTTDWNQPAEAQQAQQVQRIISRCNCRMYYISYSHDIDPELATQIKPPEVLENQEKEDLLKKQEGAVDTFTLIHHELEISTNPAQYAMILDIVNNLLLHVEPKRKEHSEKKQRVRFQLEISSNPEEQRSSILHLQEAVRQHVAQIRQLEKQMYSIMKSLQDDSKNENLLDLNQKLQLQLNQEKANLQLESEELNILIRCFKDFQLQRANKMELRKQQEDVSVVRRTEFYFAQARWRLTEEDGQLGIAELELQRFLYSKVNKSDDTAEHLLELGWFTMNNLLPNAVYKVVLRPQSSCQSGRQLALRLFSKVRPPVGGISVKEHFEVNVVPLTIQLTHQFFHRMMGFFFPGRSVEDDEVGDEEDKSKLVTTGIPVVKPRQLIATDDAVPLGPGKGVAQGLTRSSGVRRSFRKSPEHPVDDIDKMKERAAMNNSFIYIKIPQVPLCVSYKGEKNSVDWGDLNLVLPCLEYHNNTWTWLDFAMAVKRDSRKALVAQVIKEKLRLKSATGSEVRGKLETKSDLNMQQQEEEEKARLLIGLSVGDKNPGKKSIFGRRK

SEQ ID NO: 7443 - protein, 21 aa, Homo Sapiens
  misc_feature (1)..(1): Xaa can be any naturally occurring amino acid
XQGPSLASKPVPCSAARPGQG

SEQ ID NO: 7444 - protein, 1072 aa, Homo Sapiens
MAPPTGVLSSLLLLVTIAGCARKQCSEGRTYSNAVISPNLETTRIMRVSHTFPVVDCTAACCDLSSCDLAWWFEGRCYLVSCPHKENCEPKKMGPIRSYLTFVLRPVQRPAQLLDYGDMMLNRGSPSGIWGDSPEDIRKDLTFLGKDWGLEEMSEYSDDYRELEKDLLQPSGKQEPRGSAEYTDWGLLPGSEGAFNSSVGDSPAVPAETQQDPELHYLNESASTPAPKLPERSVLLPLPTTPSSGEVLEKEKASQLQEQSSNSSGKEVLMPSHSLPPASLELSSVTVEKSPVLTVTPGSTEHSIPTPPTSAAPSESTPSELPISPTTAPRTVKELTVSAGDNLIITLPDNEVELKAFVAPAPPVETTYNYEWNLISHPTDYQGEIKQGHKQTLNLSQLSVGLYVFKVTVSSENAFGEGFVNVTVKPARRVNLPPVAVVSPQLQELTLPLTSALIDGSQSTDDTEIVSYHWEEINGPFIEEKTSVDSPVLRLSNLDPGNYSFRLTVTDSDGATNSTTAALIVNNAVDYPPVANAGPNHTITLPQNSITLNGNQSSDDHQIVLYEWSLGPGSEGKHVVMQGVQTPYLHLSAMQEGDYTFQLKVTDSSRQQSTAVVTVIVQPENNRPPVAVAGPDKELIFPVESATLDGSSSSDDHGIVFYHWEHVRGPSAVEMENIDKAIATVTGLQVGTYHFRLTVKDQQGLSSTSTLTVAVKKENNSPPRARAGGRHVLVLPNNSITLDGSRSTDDQRIVSYLWIRDGQSPAAGDVIDGSDHSVALQLTNLVEGVYTFHLRVTDSQGASDTDTATVEVQPDPRKSGLVELTLQVGVGQLTEQRKDTLVRQLAVLLNVLDSDIKVQKIRAHSDLSTVIVFYVQSRPPFKVLKAAEVARNLHMRLSKEKADFLLFKVLRVDTAGCLLKCSGHGHCDPLTKRCICSHLWMENLIQRYIWDGESNCEWSIFYVTVLAFTLIVLTGGFTWLCICCCKRQKRTKIRKKTKYTILDNMDEQERMELRPKYGIKHRSTEHNSSLMVSESEFDSDQDTIFSREKMERGNPKVSMNGSIRNGASFSYCSKDR

SEQ ID NO: 7445 - protein, 1011 aa, Homo Sapiens
MAPPTGVLSSLLLLVTIAGCARKQCSEGRTYSNAVISPNLETTRIMRVSHTFPVVDCTAACCDLSSCDLAWWFEGRCYLVSCPHKENCEPKKMGPIRSYLTFVLRPVQRPAQLLDYGDMMLNRGSPSGIWGDSPEDIRKDLTFLGKDWGLEEMSEYSDDYRELEKDLLQPSGKQEPRGSAEYTDWGLLPGSEGAFNSSVGDSPAVPAETQQDPELHYLNESASTPAPKLPERSVLLPLPTTPSSGEVLEKEKASQLQEQSSNSSGKEVLMPSHSLPPASLELSSVTVEKSPVLTVTPGSTEHSIPTPPTSAAPSESTPSELPISPTTAPRTVKELTVSAGDNLIITLPDNEVELKAFVAPAPPVETTYNYEWNLISHPTDYQGEIKQGHKQTLNLSQLSVGLYVFKVTVSSENAFGEGFVNVTVKPARRVNLPPVAVVSPQLQELTLPLTSALIDGSQSTDDTEIVSYHWEEINGPFIEEKTSVDSPVLRLSNLDPGNYSFRLTVTDSDGATNSTTAALIVNNAVDYPPVANAGPNHTITLPQNSITLNGNQSSDDHQIVLYEWSLGPGSEGKHVVMQGVQTPYLHLSAMQEGDYTFQLKVTDSSRQQSTAVVTVIVQPENNRPPVAVAGPDKELIFPVESATLDGSSSSDDHGIVFYHWEHVRGPSAVEMENIDKAIATVTGLQVGTYHFRLTVKDQQGLSSTSTLTVAVKKENNSPPRARAGGRHVLVLPNNSITLDGSRSTDDQRIVSYLWIRDGQSPAAGDVIDGSDHSVALQLTNLVEGVYTFHLRVTDSQGASDTDTATVEVQPDPRKSGLVELTLQVGVGQLTEQRKDTLVRQLAVLLNVLDSDIKVQKIRAHSDLSTVIVFYVQSRPPFKVLKAAEVARNLHMRLSKEKADFLLFKVLRVDTAGCLLKCSGHGHCDPLTKRCICSHLWMENLIQRYIWDGESNCGIKHRSTEHNSSLMVSESEFDSDQDTIFSREKMERGNPKVSMNGSIRNGASFSYCSKDR

SEQ ID NO: 7446 - protein, 1072 aa, Homo Sapiens; identical to SEQ ID NO: 7444

SEQ ID NO: 7447 - protein, 483 aa, Homo Sapiens
MQEGDYTFQLKVTDSSRQQSTAVVTVIVQPENNRPPVAVAGPDKELIFPVESATLDGSSSSDDHGIVFYHWEHVRGPSAVEMENIDKAIATVTGLQVGTYHFRLTVKDQQGLSSTSTLTVAVKKENNSPPRARAGGRHVLVLPNNSITLDGSRSTDDQRIVSYLWIRDGQSPAAGDVIDGSDHSVALQLTNLVEGVYTFHLRVTDSQGASDTDTATVEVQPDPRKSGLVELTLQVGVGQLTEQRKDTLVRQLAVLLNVLDSDIKVQKIRAHSDLSTVIVFYVQSRPPFKVLKAAEVARNLHMRLSKEKADFLLFKVLRVDTAGCLLKCSGHGHCDPLTKRCICSHLWMENLIQRYIWDGESNCEWSIFYVTVLAFTLIVLTGGFTWLCICCCKRQKRTKIRKKTKYTILDNMDEQERMELRPKYGIKHRSTEHNSSLMVSESEFDSDQDTIFSREKMERGNPKVSMNGSIRNGASFSYCSKDR

SEQ ID NO: 7448 - protein, 1027 aa, Homo Sapiens
MRVSHTFPVVDCTAACCDLSSCDLAWWFEGRCYLVSCPHKENCEPKKMGPIRSYLTFVLRPVQRPAQLLDYGDMMLNRGSPSGIWGDSPEDIRKDLTFLGKDWGLEEMSEYSDDYRELEKDLLQPSGKQEPRGSAEYTDWGLLPGSEGAFNSSVGDSPAVPAETQQDPELHYLNESASTPAPKLPERSVLLPLPTTPSSGEVLEKEKASQLQEQSSNSSGKEVLMPSHSLPPASLELSSVTVEKSPVLTVTPGSTEHSIPTPPTSAAPSESTPSELPISPTTAPRTVKELTVSAGDNLIITLPDNEVELKAFVAPAPPVETTYNYEWNLISHPTDYQGEIKQGHKQTLNLSQLSVGLYVFKVTVSSENAFGEGFVNVTVKPARRVNLPPVAVVSPQLQELTLPLTSALIDGSQSTDDTEIVSYHWEEINGPFIEEKTSVDSPVLRLSNLDPGNYSFRLTVTDSDGATNSTTAALIVNNAVDYPPVANAGPNHTITLPQNSITLNGNQSSDDHQIVLYEWSLGPGSEGKHVVMQGVQTPYLHLSAMQEGDYTFQLKVTDSSRQQSTAVVTVIVQPENNRPPVAVAGPDKELIFPVESATLDGSSSSDDHGIVFYHWEHVRGPSAVEMENIDKAIATVTGLQVGTYHFRLTVKDQQGLSSTSTLTVAVKKENNSPPRARAGGRHVLVLPNNSITLDGSRSTDDQRIVSYLWIRDGQSPAAGDVIDGSDHSVALQLTNLVEGVYTFHLRVTDSQGASDTDTATVEVQPDPRKSGLVELTLQVGVGQLTEQRKDTLVRQLAVLLNVLDSDIKVQKIRAHSDLSTVIVFYVQSRPPFKVLKAAEVARNLHMRLSKEKADFLLFKVLRVDTAGCLLKCSGHGHCDPLTKRCICSHLWMENLIQRYIWDGESNCEWSIFYVTVLAFTLIVLTGGFTWLCICCCKRQKRTKIRKKTKYTILDNMDEQERMELRPKYGIKHRSTEHNSSLMVSESEFDSDQDTIFSREKMERGNPKVSMNGSIRNGASFSYCSKDR

SEQ ID NO: 7449 - protein, 1063 aa, Homo Sapiens
MTRLGWPSPCCARKQCSEGRTYSNAVISPNLETTRIMRVSHTFPVVDCTAACCDLSSCDLAWWFEGRCYLVSCPHKENCEPKKMGPIRSYLTFVLRPVQRPAQLLDYGDMMLNRGSPSGIWGDSPEDIRKDLTFLGKDWGLEEMSEYSDDYRELEKDLLQPSGKQEPRGSAEYTDWGLLPGSEGAFNSSVGDSPAVPAETQQDPELHYLNESASTPAPKLPERSVLLPLPTTPSSGEVLEKEKASQLQEQSSNSSGKEVLMPSHSLPPASLELSSVTVEKSPVLTVTPGSTEHSIPTPPTSAAPSESTPSELPISPTTAPRTVKELTVSAGDNLIITLPDNEVELKAFVAPAPPVETTYNYEWNLISHPTDYQGEIKQGHKQTLNLSQLSVGLYVFKVTVSSENAFGEGFVNVTVKPARRVNLPPVAVVSPQLQELTLPLTSALIDGSQSTDDTEIVSYHWEEINGPFIEEKTSVDSPVLRLSNLDPGNYSFRLTVTDSDGATNSTTAALIVNNAVDYPPVANAGPNHTITLPQNSITLNGNQSSDDHQIVLYEWSLGPGSEGKHVVMQGVQTPYLHLSAMQEGDYTFQLKVTDSSRQQSTAVVTVIVQPENNRPPVAVAGPDKELIFPVESATLDGSSSSDDHGIVFYHWEHVRGPSAVEMENIDKAIATVTGLQVGTYHFRLTVKDQQGLSSTSTLTVAVKKENNSPPRARAGGRHVLVLPNNSITLDGSRSTDDQRIVSYLWIRDGQSPAAGDVIDGSDHSVALQLTNLVEGVYTFHLRVTDSQGASDTDTATVEVQPDPRKSGLVELTLQVGVGQLTEQRKDTLVRQLAVLLNVLDSDIKVQKIRAHSDLSTVIVFYVQSRPPFKVLKAAEVARNLHMRLSKEKADFLLFKVLRVDTAGCLLKCSGHGHCDPLTKRCICSHLWMENLIQRYIWDGESNCEWSIFYVTVLAFTLIVLTGGFTWLCICCCKRQKRTKIRKKTKYTILDNMDEQERMELRPKYGIKHRSTEHNSSLMVSESEFDSDQDTIFSREKMERGNPKVSMNGSIRNGASFSYCSKDR

SEQ ID NO: 7450 - protein, 82 aa, Homo Sapiens
ILLTVLTCYFWKKNQKLEYKYSKLVMNATLKDCDLPAADSCAIMEGEDVEDDLIFTSKKSLFGKIKSFTSKVSGSSPLGAES

SEQ ID NO: 7451 - protein, 62 aa, Homo Sapiens
MAEPGHSHHLSARVRGRTERRIPRLWRLLLWAGTAFQVTQGTGPELHACKEPSPATPGSFWI

SEQ ID NO: 7452 - protein, 91 aa, Homo Sapiens
MAEPGHSHHLSARVRGRTERRIPRLWRLLLWAGTAFQVTQGTGPELHACKESEYHYEYTACDSTGSRWRVAVPHTPGLCTSLPDPIKGTEC

SEQ ID NO: 7453 - protein, 152 aa, Homo Sapiens
MAEPGHSHHLSARVRGRTERRIPRLWRLLLWAGTAFQVTQGTGPELHACKESEYHYEYTACDSTGSRWRVAVPHTPGLCTSLPDPIKGTECSFSCNAGEFLDMKDQSCKPCAEGRYSLGTGIRFDEWDELPHGFASLSANMELDDSAAESTG

SEQ ID NO: 7454 - protein, 156 aa, Homo Sapiens
MAEPGHSHHLSARVRGRTERRIPRLWRLLLWAGTAFQVTQGTGPELHACKESEYHYEYTACDSTGSRWRVAVPHTPGLCTSLPDPIKGTECSFSCNAGEFLDMKDQSCKPCAEGRYSLGTGIRFDEWDELPHGFASLSANMELDDSAAESTGNCTS

SEQ ID NO: 7455 - protein, 205 aa, Homo Sapiens
MAEPGHSHHLSARVRGRTERRIPRLWRLLLWAGTAFQVTQGTGPELHACKESEYHYEYTACDSTGSRWRVAVPHTPGLCTSLPDPIKGTECSFSCNAGEFLDMKDQSCKPCAEGRYSLGTGIRFDEWDELPHGFASLSANMELDDSAAESTGNCTSSKWVPRGDYIASNTDECTATLMYAVNLKQSGTVNFEYYYPDSSIIFEFF

SEQ ID NO: 7456 - protein, 1013 aa, Homo Sapiens
MAEPGHSHHLSARVRGRTERRIPRLWRLLLWAGTAFQVTQGTGPELHACKESEYHYEYTACDSTGSRWRVAVPHTPGLCTSLPDPIKGTECSFSCNAGEFLDMKDQSCKPCAEGRYSLGTGIRFDEWDELPHGFASLSANMELDDSAAESTGNCTSSKWVPRGDYIASNTDECTATLMYAVNLKQSGTVNFEYYYPDSSIIFEFFVQNDQCQPNADDSRWMKTTEKGWEFHSVELNRGNNVLYWRTTAFSVWTKVPKPVLVRNIAITGVAYTSECFPCKPGTYADKQGSSFCKLCPANSYSNKGETSCHQCDPDKYSEKGSSSCNVRPACTDKDYFYTHTACDANGETQLMYKWAKPKICSEDLEGAVKLPASGVKTHCPPCNPGFFKTNNSTCQPCPYGSYSNGSDCTRCPAGTEPAVGFEYKWWNTLPTNMETTVLSGINFEYKGMTGWEVAGDHIYTAAGASDNDFMILTLVVPGFRPPQSVMADTENKEVARITFVFETLCSVNCELYFMVGVNSRTNTPVETWKGSKGKQSYTYIIEENTTTSFTWAFQRTTFHEASRKYTNDVAKIYSINVTNVMNGVASYCRPCALEASDVGSSCTSCPAGYYIDRDSGTCHSCPTNTILKAHQPYGVQACVPCGPGTKNNKIHSLCYNDCTFSRNTPTRTFNYNFSALANTVTLAGGPSFTSKGLKYFHHFTLSLCGNQGRKMSVCTDNVTDLRIPEGESGFSKSITAYVCQAVIIPPEVTGYKAGVSSQPVSLADRLIGVTTDMTLDGITSPAELFHLESLGIPDVIFFYRSNDVTQSCSSGRSTTIRVRCSPQKTVPGSLLLPGTCSDGTCDGCNFHFLWESAAACPLCSVADYHAIVSSCVAGIQKTTYVWREPKLCSGGISLPEQRVTICKTIDFWLKVGISAGTCTAILLTVLTCYFWKKNQKLEYKYSKLVMNATLKDCDLPAADSCAIMEGEDVEDDLIFTSKKSLFGKIKSFTSKRTPDGFDSVPLKTSSGGLDMDL

SEQ ID NO: 7457 - protein, 901 aa, Homo Sapiens
MAEPGHSHHLSARVRGRTERRIPRLWRLLLWAGTAFQVTQGTGPELHACKESEYHYEYTACDSTGSRWRVAVPHTPGLCTSLPDPIKGTECSFSCNAGEFLDMKDQSCKPCAEGRYSLGTGIRFDEWDELPHGFASLSANMELDDSAAESTGNCTSSKWVPRGDYIASNTDECTATLMYAVNLKQSGTVNFEYYYPDSSIIFEFFVQNDQCQPNADDSRWMKTTEKGWEFHSVELNRGNNVLYWRTTAFSVWTKVPKPVLVRNIAITEKGSSSCNVRPACTDKDYFYTHTACDANGETQLMYKWAKPKICSEDLEGAVKLPASGVKTHCPPCNPGFFKTNNSTCQPCPYGSYSNGSDCTRCPAGTEPAVGFEYKWWNTLPTNMETTVLSGINFEYKGMTGWEVAGDHIYTAAGASDNDFMILTLVVPGFRPPQSVMADTENKEVARITFVFETLCSVNCELYFMVGVNSRTNTPVETWKGSKGKQSYTYIIEENTTTSFTWAFQRTTFHEASRKYTNDVAKIYSINVTNVMNGVASYCRPCALEASDVGSSCTSCPAGYYIDRDSGTCHSCPTNTILKAHQPYGVQACVPCGPGTKNNKIHSLCYNDCTFSRNTPTRTFNYNFSALANTVTLAGGPSFTSKGLKYFHHFTLSLCGNQGRKMSVCTDNVTDLRIPEGESGFSKSITAYVCQAVIIPPEVTGYKAGVSSQPVSLADRLIGVTTDMTLDGITSPAELFHLESLGIPDVIFFYRSNDVTQSCSSGRSTTIRVRCSPQKTVPGSLLLPGTCSDGTCDGCNFHFLWESAAACPLCSVADYHAIVSSCVAGIQKTTYVWREPKLCSGGISLPEQRVTICKTIDFWLKVGISAGTCTAILLTVLTCYFWKKNQKLEYKYSKLVMNATLK

SEQ ID NO: 7458 - protein, 926 aa, Homo Sapiens
MAEPGHSHHLSARVRGRTERRIPRLWRLLLWAGTAFQVTQGTGPELHACKESEYHYEYTACDSTGSRWRVAVPHTPGLCTSLPDPIKGTECSFSCNAGEFLDMKDQSCKPCAEGRYSLGTGIRFDEWDELPHGFASLSANMELDDSAAESTGNCTSSKWVPRGDYIASNTDECTATLMYAVNLKQSGTVNFEYYYPDSSIIFEFFVQNDQCQPNADDSRWMKTTEKGWEFHSVELNRGNNVLYWRTTAFSVWTKVPKPVLTQLMYKWAKPKICSEDLEGAVKLPASGVKTHCPPCNPGFFKTNNSTCQPCPYGSYSNGSDCTRCPAGTEPAVGFEYKWWNTLPTNMETTVLSGINFEYKGMTGWEVAGDHIYTAAGASDNDFMILTLVVPGFRPPQSVMADTENKEVARITFVFETLCSVNCELYFMVGVNSRTNTPVETWKGSKGKQSYTYIIEENTTTSFTWAFQRTTFHEASRKYTNDVAKIYSINVTNVMNGVASYCRPCALEASDVGSSCTSCPAGYYIDRDSGTCHSCPTNTILKAHQPYGVQACVPCGPGTKNNKIHSLCYNDCTFSRNTPTRTFNYNFSALANTVTLAGGPSFTSKGLKYFHHFTLSLCGNQGRKMSVCTDNVTDLRIPEGESGFSKSITAYVCQAVIIPPEVTGYKAGVSSQPVSLADRLIGVTTDMTLDGITSPAELFHLESLGIPDVIFFYRSNDVTQSCSSGRSTTIRVRCSPQKTVPGSLLLPGTCSDGTCDGCNFHFLWESAAACPLCSVADYHAIVSSCVAGIQKTTYVWREPKLCSGGISLPEQRVTICKTIDFWLKVGISAGTCTAILLTVLTCYFWKKNQKLEYKYSKLVMNATLKDCDLPAADSCAIMEGEDVEDDLIFTSKKSLFGKIKSFTSKRTPDGFDSVPLKTSSGGLDMDL

SEQ ID NO: 7459 - protein, 838 aa, Homo Sapiens
MYAFYSLLIYIFYSLFRRDGGAAAAAEPGDPAQRARKPRGRRRPDLPAPELWTELTGLAASSEPEDGSEGAAEGRAAAVSLEEALLRLAEFLSVQLGAEESCGGPADLGQSGEVPSLLTVTSQLLALLAWLRSPRGRQALLQGTQPAPRVRPPSPDGSTSQEESPSHFTAVPGEPLGDETQGQQPLQLEEDQRAWQRLEQLILGQLEELKQQLEQQEEELGRLRLGVGATDSEKRVQHLTLENEALKQSLSLMRDLLLHWGPGPPIRAPQEEAEALLELQGRLQEAQDTTEALRAQLGVQEVQLQGLQGALQQLQQETEQNCRRELQQMHGQLAGLRARMASLRQGCGDLRGLVSTFTQSCQGSLSEARGQVSWALGALSSGGPGTQLPEGQQGPPAGCPGRLPELKGNIRVLCRLRPGTSSSLVSVEPGPGGTVTTCYRGRHRRFRLDWVFPPDASQEEVFRELEPAVLSCLRGYSVCIFTYGQTGTGKTYSMEGPPEDPGIVPRALQSLFREMGAGRQHRVTLSMVEIYNEAVRDLLAPGPPERLAVRQGPEGQGGIQVAGLTHWDVPNLETLHQMLKLGRSNRATAATAMNQRSSRSHALVTLTLRAASPPRAPGTAGTLHLVDLAGSERARKAGAAGPPRGDPDGARRLREAQTINRSLLALGGVMAALRAHRPHVPFRDSQLTRLLQPALGPGTTAVLLLQVGAGAGQVCACRSPPTRARPPAPLARRSPRGRRISGRQSAPSSSPTEWVKWSWGQPGAAGSRAPPGRLLPSAPTLRSPGPPAPLRRPLAVLHAPVPTTARARLSRPQRACPSSPGSRPCPWGLRPGLCWQRR

SEQ ID NO: 7460 - protein, 744 aa, Homo Sapiens
MYAFYSLLIYIFYSLFRRDGGAAAAAEPGDPAQRARKPRGRRRPDLPAPELWTELTGLAASSEPEDGSEGAAEGRAAAVSLEEALLRLAEFLSVQLGAEESCGGPADLGQSGEVPSLLTVTSQLLALLAWLRSPRGRQALLQGTQPAPRVRPPSPDGSTSQEESPSHFTAVPGEPLGDETQGQQPLQLEEDQRAWQRLEQLILGQLEELKQQLEQQEEELGRLRLGVGATDSEKRVQHLTLENEALKQSLSLMRDLLLHWGPGPPIRAPQEEAEALLELQGRLQEAQDTTEALRAQLQQETEQNCRRELQQMHGQLAGLRARMASLRQGCGDLRGLVSTFTQSCQGSLSEARGQVSWALGALSSGGPGTQLPEGQQGPPAGCPGRLPELKGNIRVLCRLRPGTSSSLVSVEPGPGGTVTTCYRGRHRRFRLDWVFPPDASQEEVFRELEPAVLSCLRGYSVCIFTYGQTGTGKTYSMEGPPEDPGIVPRALQSLFREMGAGRQHRVTLSMVEIYNEAVRDLLAPGPPERLAVRQGPEGQGGIQVAGLTHWDVPNLETLHQMLKLGRSNRATAATAMNQRSSRSHALVTLTLRAASPPRAPGTAGTLHLVDLAGSERARKAGAAGPPRGDPDGARRLREAQTINRSLLALGGVMAALRAHRPHVPFRDSQLTRLLQPALGPGTTAVLLLQISTRPEDLGETVCSLKFADRVGQVELGPARRRRVPRSSGTPSSLSTDTPLTGTPC

SEQ ID NO: 7461 - protein, 791 aa, Homo Sapiens
MYAFYSLLIYIFYSLFRRDGGAAAAAEPGDPAQRARKPRGRRRPDLPAPELWTELTGLAASSEPEDGSEGAAEGRAAAVSLEEALLRLAEFLSVQLGAEESCGGPADLGQSGEVPSLLTVTSQLLALLAWLRSPRGRQALLQGTQPAPRVRPPSPDGSTSQEESPSHFTAVPGEPLGDETQGQQPLQLEEDQRAWQRLEQLILGQLEELKQQLEQQEEELGRLRLGVGATDSEKRVQHLTLENEALKQSLSLMRDLLLHWGPGPPIRAPQEEAEALLELQGRLQEAQDTTEALRAQLGVQEVQLQGLQGALQQLQQETEQNCRRELQQMHGQLAGLRARMASLRQGCGDLRGLVSTFTQSCQGSLSEARGQVSWALGALSSGGPGTQLPEGQQGPPAGCPGRLPELKGNIRVLCRLRPGTSSSLVSVEPGPGGTVTTCYRGRHRRFRLDWVFPPDASQEEVFRELEPAVLSCLRGYSVCIFTYGQTGTGKTYSMEGPPEDPGIVPRALQSLFREMGAGRQHRVTLSMVEIYNEAVRDLLAPGPPERLAVRQGPEGQGGIQVAGLTHWDVPNLETLHQMLKLGRSNRATAATAMNQRSSRSHALVTLTLRAASPPRAPGTAGTLHLVDLAGSERARKAGAAGPPRGDPDGARRLREAQTINRSLLALGGVMAALRAHRPHVPFRDSQLTRLLQPALGPGTTAVLLLQISTRPEDLGETVCSLKFADRVGQVELGPARRRRVPRSSGTPSSLSTDTPLTGTPCTPTPSPGSPPCPSPDNGSGSALAPAEGLPL

SEQ ID NO: 7462 - protein, 325 aa, Homo Sapiens
MSMSPTVIILACLGFFLDQSVWAHVGGQDKPFCSAWPSAVVPQGGHVTLRCHYRRGFNIFTLYKKDGVPVPELYNRIFWNSFLISPVTPAHAGTYRCRGFHPHSPTEWSAPSNPLVIMVTGLYEKPSLTARPGPTVRAGENVTLSCSSQSSFDIYHLSREGEAHELRLPAVPSINGTFQADFPLGPATHGETYRCFGSFHGSPYEWSDPSDPLPVSVTDAAVMNQEPAGHRTVNREDSDEQDPQEVTYAQLDHCIFTQRKITGPSQRSKRPSTDTSVCIELPNAEPRALSPAHEHHSQALMGSSRETTALSQTQLASSNVPAAGI

SEQ ID NO: 7463 - protein, 342 aa, Homo Sapiens
MSMSPTVIILACLGFFLDQSVWAHVGGQDKPFCSAWPSAVVPQGGHVTLRCHYRRGFNIFTLYKKDGVPVPELYNRIFWNSFLISPVTPAHAGTYRCRGFHPHSPTEWSAPSNPLVIMVTGLYEKPSLTARPGPTVRAGENVTLSCSSQSSFDIYHLSREGEAHELRLPAVPSINGTFQADFPLGPATHGETYRCFGSFHGSPYEWSDPSDPLPVSVTGNPSSSWPSPTEPSFKTDAAVMNQEPAGHRTVNREDSDEQDPQEVTYAQLDHCIFTQRKITGPSQRSKRPSTDTSVCIELPNAEPRALSPAHEHHSQALMGSSRETTALSQTQLASSNVPAAGI

SEQ ID NO: 7464 - protein, 273 aa, Homo Sapiens
MSMSPTVIILACLGFFLDQSVWAHVGGQDKPFCSAWPSAVVPQGGHVTLRCHYRRGFNIFTLYKKDGVPVPELYNRIFWNSFLISPVTPAHAGTYRCRGFHPHSPTEWSAPSNPLVIMVTGLYEKPSLTARPGPTVRAGENVTLSCSSQSSFDIYHLSREGEAHELRLPAVPSINGTFQADFPLGPATHGETYRCFGSFHGSPYEWSDPSDPLPVSVTGNPSSSWPSPTEPSFKTGIARHLHAVIRYSVAIILFTILPFFLLHRWCSKKKMLL

SEQ ID NO: 7465 - protein, 230 aa, Homo Sapiens
MSMSPTVIILACLGFFLDQSVWAHVGLYEKPSLTARPGPTVRAGENVTLSCSSQSSFDIYHLSREGEAHELRLPAVPSINGTFQADFPLGPATHGETYRCFGSFHGSPYEWSDPSDPLPVSVTDAAVMNQEPAGHRTVNREDSDEQDPQEVTYAQLDHCIFTQRKITGPSQRSKRPSTDTSVCIELPNAEPRALSPAHEHHSQALMGSSRETTALSQTQLASSNVPAAGI

SEQ ID NO: 7466 - protein, 247 aa, Homo Sapiens
MSMSPTVIILACLGFFLDQSVWAHVGLYEKPSLTARPGPTVRAGENVTLSCSSQSSFDIYHLSREGEAHELRLPAVPSINGTFQADFPLGPATHGETYRCFGSFHGSPYEWSDPSDPLPVSVTGNPSSSWPSPTEPSFKTDAAVMNQEPAGHRTVNREDSDEQDPQEVTYAQLDHCIFTQRKITGPSQRSKRPSTDTSVCIELPNAEPRALSPAHEHHSQALMGSSRETTALSQTQLASSNVPAAGI

SEQ ID NO: 7467 - protein, 416 aa, Homo Sapiens
MSPSHVVVNVSTARSGPLTTSSAPVSRAESLRPGSRSCTMSMSPTVIILACLGFFLDQSVWAHVGGQDKPFCSAWPSAVVPQGGHVTLRCHYRRGFNIFTLYKKDGVPVPELYNRIFWNSFLISPVTPAHAGTYRCRGFHPHSPTEWSAPSNPLVIMVTGLYEKPSLTARPGPTVRAGENVTLSCSSQSSFDIYHLSREGEAHELRLPAVPSINGTFQADFPLGPATHGETYRCFGSFHGSPYEWSDPSDPLPVSVTGNPSSSWPSPTEPSFKTGIARHLHAVIRYSVAIILFTILPFFLLHRWCSKKKDAAVMNQEPAGHRTVNREDSDEQDPQEVTYAQLDHCIFTQRKITGPSQRSKRPSTDTSVCIELPNAEPRALSPAHEHHSQALMGSSRETTALSQTQLASSNVPAAGI

SEQ ID NO: 7468 - protein, 398 aa, Homo Sapiens
  misc_feature (1)..(1): Xaa can be any naturally occurring amino acid
XMSPTVIILACLGFFLDQSVWAHVGGQDKPFCSAWPSAVVPQGGHVTLRCHYRRGFNIFTLYKKDGVPVPELYNRIFWNSFLISPVTPAHAGTYRCRGFHPHSPTEWSAPSNPLVIMVTGLYEKPSLTARPGPTVRAGENVTLSCSSQSSFDIYHLSREGEAHELRLPAVPSINGTFQADFPLGPATHGETYRCFGSFHGSPYEWSDPSDPLPVSVTGNPSSSWPSPTEPSFKTGIARHLHAVIRYSVAIILFTILPFFLLHRWCSKKKVSLTKQRPENSGPCAEAGWEHADAAVMNQEPAGHRTVNREDSDEQDPQEVTYAQLDHCIFTQRKITGPSQRSKRPSTDTSVCIELPNAEPRALSPAHEHHSQALMGSSRETTALSQTQLASSNVPAAGI

SEQ ID NO: 7469 - protein, 139 aa, Homo Sapiens
MAPKLITVLCLGFCLNQKICPHAGAQDKFSLSAWPSPVVPLGGRVTLSCHSHLRFVIWTIFQTTGTRSHELHTGLSNNITISPVTPEHAGTYRCVGIYKHASKWSAESNSLKIIVTAFSLHPGGPHDEAGREVDPLLQL

SEQ ID NO: 7470 - protein, 133 aa, Homo Sapiens
MAPKLITVLCLGFCLNQKICPHAGAQDKFSLSAWPSPVVPLGGRVTLSCHSHLRFVIWTIFQTTGTRSHELHTGLSNNITISPVTPEHAGTYRCVGIYKHASKWSAESNSLKIIVTGGPHDEAGREVDPLLQL

SEQ ID NO: 7471 - protein, 133 aa, Homo Sapiens; identical to SEQ ID NO: 7470

SEQ ID NO: 7472 - protein, 352 aa, Homo Sapiens
MAPKLITVLCLGFCLNQKICPHAGAQDKFSLSAWPSPVVPLGGRVTLSCHSHLRFVIWTIFQTTGTRSHELHTGLSNNITISPVTPEHAGTYRCVGIYKHASKWSAESNSLKIIVTGLFTKPSISAHPSSLVHAGARVSLRCHSELAFDEFILYKEGHIQHSQQLDQGMEAGIHYVEAVFSMGPVTPAHAGAYRCCGCFSHSRYEWSAPSDPLDIVITGKYKKPSLSTQVDPMMRLGEKLTLFCSSEISFDQYHLFRHGVAHGQWLSGGQRHREAFQANFSVGRATPVPGGTYRCYGSFNDSPYKPPVTRCNFTPQETLRVLLCHSQNPPLNLTHLALKDSPATCICSLDSQ

SEQ ID NO: 7473 - protein, 365 aa, Homo Sapiens
MAPKLITVLCLGFCLNQKICPHAGAQDKFSLSAWPSPVVPLGGRVTLSCHSHLRFVIWTIFQTTGTRSHELHTGLSNNITISPVTPEHAGTYRCVGIYKHASKWSAESNSLKIIVTGLFTKPSISAHPSSLVHAGARVSLRCHSELAFDEFILYKEGHIQHSQQLDQGMEAGIHYVEAVFSMGPVTPAHAGAYRCCGCFSHSRYEWSAPSDPLDIVITGKYKKPSLSTQVDPMMRLGEKLTLFCSSEISFDQYHLFRHGVAHGQWLSGGQRHREAFQANFSVGRATPVPGGTYRCYGSFNDSPYKPPVTRCNFTPQETLRVLLCHSQNPPLNLTPPWQTQSPRKANGRMKRSLQQKRHRRSYMPS

SEQ ID NO: 7474 - protein, 191 aa, Homo Sapiens
MLRMRVPALLVLLFCFRGRAGPSPHFLQQPEDLVVLLGEEARLPCALGAYWGLVQWTKSGLALGGQRDLPGWSRYWISGNAANGQHDLHIRPVELEDEASYECQATQAGLRSRPAQLHVLVPPEAPQVLGGPSVSLVAGVPANLTCRSRGDARPTPELLWFRDGVLLDGATFHQTLLKEGTPGSVESTLTL

SEQ ID NO: 7475 - protein, 633 aa, Homo Sapiens
MLRMRVPALLVLLFCFRGRAGPSPHFLQQPEDLVVLLGEEARLPCALGAYWGLVQWTKSGLALGGQRDLPGWSRYWISGNAANGQHDLHIRPVELEDEASYECQATQAGLRSRPAQLHVLVPPEAPQVLGGPSVSLVAGVPANLTCRSRGDARPTPELLWFRDGVLLDGATFHQTLLKEGTPGSVESTLTLTPFSHDDGATFVCRARSQALPTGRDTAITLSLQYPPEVTLSASPHTVQEGEKVIFLCQATAQPPVTGYRWAKGGSPVLGARGPRLEVVADASFLTEPVSCEVSNAVGSANRSTALDVLFGPILQAKPEPVSVDVGEDASFSCAWRGNPLPRVTWTRRGGAQVLGSGATLRLPSVGPEDAGDYVCRAEAGLSGLRGGAAEARLTVNAPPVVTALHSAPAFLRGPARLQCLVFASPAPDAVVWSWDEGFLEAGSQGRFLVETFPAPESRGGLGPGLISVLHISGTQESDFSRSFNCSARNRLGEGGAQASLGRRDLLPTVRIVAGVAAATTTLLMVITGVALCCWRHSKASASFSEQKNLMRIPGSSDGSSSRGPEEEETGSREDRGPIVHTDHSDLVLEEEGTLETKDPTNGYYKVRGVSPPASPDSRVTSFQWKSPGISNLP

SEQ ID NO: 7476 - protein, 708 aa, Homo Sapiens
MLRMRVPALLVLLFCFRGRAGPSPHFLQQPEDLVVLLGEEARLPCALGAYWGLVQWTKSGLALGGQRDLPGWSRYWISGNAANGQHDLHIRPVELEDEASYECQATQAGLRSRPAQLHVLVPPEAPQVLGGPSVSLVAGVPANLTCRSRGDARPTPELLWFRDGVLLDGATFHQTLLKEGTPGSVESTLTLTPFSHDDGATFVCRARSQALPTGRDTAITLSLQYPPEVTLSASPHTVQEGEKVIFLCQATAQPPVTGYRWAKGGSPVLGARGPRLEVVADASFLTEPVSCEVSNAVGSANRSTALDVLFGPILQAKPEPVSVDVGEDASFSCAWRGNPLPRVTWTRRGGAQVLGSGATLRLPSVGPEDAGDYVCRAEAGLSGLRGGAAEARLTVNAPPVVTALHSAPAFLRGPARLQCLVFASPAPDAVVWSWDEGFLEAGSQGRFLVETFPAPESRGGLGPGLISVLHISGTQESDFSRSFNCSARNRLGEGGAQASLGRRDLLPTVRIVAGVAAATTTLLMVITGVALCCWRHSKASASFSEQKNLMRIPGSSDGSSSRGPEEEETGSREDRGPIVHTDHSDLVLEEEGTLETKDPTNGYYKVRGVSVSLSLGEAPGGGLFLPPPSPLGPPGTPTFYDFNPHLGMVPPCRLYRARAGYLTTPHPRAFTSYIKPTSFGPPDLAPGTPPFPYAAFPTPSHPRLQTHV

SEQ ID NO: 7477 - protein, 673 aa, Homo Sapiens
MLRMRVPALLVLLFCFRGRAGPSPHFLQQPEDLVVLLGEEARLPCALGAYWGLVQWTKSGLALGGQRDLPGWSRYWISGNAANGQHDLHIRPVELEDEASYECQATQAGLRSRPAQLHVLVPPEAPQVLGGPSVSLVAGVPANLTCRSRGDARPTPELLWFRDGVLLDGATFHQTLLKEGTPGSVESTLTLTPFSHDDGATFVCRARSQALPTGRDTAITLSLQYPPEVTLSASPHTVQEGEKVIFLCQATAQPPVTGYRWAKGGSPVLGARGPRLEVVADASFLTEPVSCEVSNAVGSANRSTALDVLFGPILQAKPEPVSVDVGEDASFSCAWRGNPLPRVTWTRRGGAQVLGSGATLRLPSVGPEDAGDYVCRAEAGLSGLRGGAAEARLTVNAPPVVTALHSAPAFLRGPARLQCLVFASPAPDAVVWSWDEGFLEAGSQGRFLVETFPAPESRGGLGPGLISVLHISGTQESDFSRSFNCSARNRLGEGGAQASLGRRASASFSEQKNLMRIPGSSDGSSSRGPEEEETGSREDRGPIVHTDHSDLVLEEEGTLETKDPTNGYYKVRGVSVSLSLGEAPGGGLFLPPPSPLGPPGTPTFYDFNPHLGMVPPCRLYRARAGYLTTPHPRAFTSYIKPTSFGPPDLAPGTPPFPYAAFPTPSHPRLQTHV

SEQ ID NO: 7478 - protein, 583 aa, Homo Sapiens
MLRMRVPALLVLLFCFRGRAGWSRYWISGNAANGQHDLHIRPVELEDEASYECQATQAGLRSRPAQLHVLVPPEAPQVLGGPSVSLVAGVPANLTCRSRGDARPTPELLWFRDGVLLDGATFHQTLLKEGTPGSVESTLTLTPFSHDDGATFVCRARSQALPTGRDTAITLSLQYPPEVTLSASPHTVQEGEKVIFLCQATAQPPVTGYRWAKGGSPVLGARGPRLEVVADASFLTEPVSCEVSNAVGSANRSTALDVLFGPILQAKPEPVSVDVGEDASFSCAWRGNPLPRVTWTRRGGAQVLGSGATLRLPSVGPEDAGDYVCRAEAGLSGLRGGAAEARLTVNAPPVVTALHSAPAFLRGPARLQCLVFASPAPDAVVWSWDEGFLEAGSQGRFLVETFPAPESRGGLGPGLISVLHISGTQESDFSRSFNCSARNRLGEGGAQASLGRRDLLPTVRIVAGVAAATTTLLMVITGVALCCWRHSKASASFSEQKNLMRIPGSSDGSSSRGPEEEETGSREDRGPIVHTDHSDLVLEEEGTLETKDPTNGYYKVRGVSPPASPDSRVTSFQWKSPGISNLP

SEQ ID NO: 7479 - protein, 138 aa, Homo Sapiens
MNSLVSWQLLLFLCATHFGEPLEKVASVGNSRPTGQQLESLGLLAPGEQSLPCTERKPAATARLSRRGTSLSPPPESSGSPQQPGLSAPHSRQIPAPQGAVLVQREKDLPNYNWNSFGLRFGKREAAPGNHGRSAGRG

SEQ ID NO: 7480 - protein, 144 aa, Homo Sapiens [sequence omitted]

SEQ ID NO: 7481 - protein, 708 aa, Homo Sapiens
MAAAAVAAAAAAAAAASLQVLEMESMETAAAGSAGLAAEVRGSGTVDFGPGPGISAMEASGGDPGPEAEDFECSSHCSELSWRQNEQRRQGLFCDITLCFGGAGGREFRAHRSVLAAATEYFTPLLSGQFSESRSGRVEMRKWSSEPGPEPDTVEAVIEYMYTGRIRVSTGSVHEVLELADRFLLIRLKEFCGEFLKKKLHLSNCVAIHSLAHMYTLSQLALKAADMIRRNFHKVIQDEEFYTLPFHLIRDWLSDLEITVDSEEVLFETVLKWVQRNAEERERYFEELFKLLRLSQMKPTYLTRHVKPERLVANNEVCVKLVADAVERHALRAENIQSGTCQHPTSHVSLLPRYGQNMDVIMVIGGVSEGGDYLSECVGYFVDEDRWVNLPHIHNHLDGHAVAVTESYVYVAGSMEPGFAKTVERYNPNLNTWEHVCSLMTRKHSFGLTEVKGKLYSIGGHGNFSPGFKDVTVYNPELDKWHNLESAPKILRDVKALAIEDRFVYIAARTPVDRDTEDGLKAVITCYDTETRQWQDVESLPLIDNYCFFQMSVVNSNFYQTASCCPKSYCLENEEAVRKIASQVSDEILESLPPEVLSIEGAAICYYKDDVFIIGGWKNSDDIDKQYRKEAYRYCAERKRWMLLPPMPQPRCRATACHVRIPYRYLHGTQRYPMPQNLMWQKDRIRQMQEIHRHALNMRRVPSSQIEC

SEQ ID NO: 7482 - protein, 235 aa, Homo Sapiens
MAEEQEFTQLCKLPAQPSHPHCVNNTYRSAQHSQALLRGLLALRDSGILFDVVLVVEGRHIEAHRILLAASCDYFRGMFAGGLKEMEQEEVLIHGVSYNAMCQILHFIYTSELELSLSNVQETLVAACQLQIPEIIHFCCDFLMSWVDEENILDVYRLAELFDLSRLTEQLDTYILKNFVAFSRTDKYRQLPLEKVYSLLSSNRLEVSCETEVYEGALLYHYSLEQVQADQISLH

SEQ ID NO: 7483 - protein, 634 aa, Homo Sapiens
MAEEQEFTQLCKLPAQPSHPHCVNNTYRSAQHSQALLRGLLALRDSGILFDVVLVVEGRHIEAHRILLAASCDYFRGMFAGGLKEMEQEEVLIHGVSYNAMCQILHFIYTSELELSLSNVQETLVAACQLQIPEIIHFCCDFLMSWVDEENILDVYRLAELFDLSRLTEQLDTYILKNFVAFSRTDKYRQLPLEKVYSLLSSNRLEVSCETEVYEGALLYHYSLEQVQADQISLHEPPKLLETVRFPLMEAEVLQRLHDKLDPSPLRDTVASALMYHRNESLQPSLQSPQTELRSDFQCVVGFGGIHSTPSTVLSDQAKYLNPLLGEWKHFTASLAPRMSNQGIAVLNNFVYLIGGDNNVQGFRAESRCWRYDPRHNRWFQIQSLQQEHADLSVCVVGRYIYAVAGRDYHNDLNAVERYDPATNSWAYVAPLKREVYAHAGATLEGKMYITCGRRGEDYLKETHCYDPGSNTWHTLADGPVRRAWHGMATLLNKLYVIGGSNNDAGYRRDVHQVACYSCTSGQWSSVCPLPAGHGEPGIAVLDNRIYVLGGRSHNRGSRTGYVHIYDVEKDCWEEGPQLDNSISGLAACVLTLPRSLLLEPPRGTPDRSQADPDFASEVMSVSDWEEFDNSSED

SEQ ID NO: 7484 - protein, 158 aa, Homo Sapiens
MAEEQEFTQLCKLPAQPSHPHCVNNTYRSAQHSQALLRGLLALRDSGILFDVVLVVEGRHIEAHRILLAASCDYFRGMFAGGLKEMEQEEVLIHGVSYNAMCQILHFIYTSELELSLSNVQETLVAACQLQMLFTSPGLNGCHSLCRSQKLSISAVIS

SEQ ID NO: 7485 - protein, 225 aa, Homo Sapiens
MFAGGLKEMEQEEVLIHGVSYNAMCQILHFIYTSELELSLSNVQETLVAACQLQIPEIIHFCCDFLMSWVDEENILDVYRLAELFDLSRLTEQLDTYILKNFVAFSRTDKYRQLPLEKVYSLLSSNRLEVSCETEVYEGALLYHYSLEQVQADQISLHEPPKLLETVRFPLMEAEVLQRLHDKLDPSPLRDTVASALMYHRNESLQPSLQSPQTELRSDFQCVVG

SEQ ID NO: 7486 - protein, 252 aa, Homo Sapiens
MGLGSSCHLSLPKRAEALLCSRKATVVRDLVAVRMAEEQEFTQLCKLPAQPSHPHCVNNTYRSAQHSQALLRGLLALRDSGILFDVVLVVEGRHIEAHRILLAASCDYFRGMFAGGLKEMEQEEVLIHGVSYNAMCQILHFIYTSELELSLSNVQETLVAACQLQIPEIIHFCCDFLMSWVDEENILDVYRLAELFDLSRLTEQLDTYILKNFVAFSRTDKYRQLPLEKVYSLLSSNRLEVSCETEVYEGAL

SEQ ID NO: 7487 - protein, 107 aa, Homo Sapiens
MPPPWHPPPRLLAVCLLTTTQATVVRDLVAVRMAEEQEFTQLCKLPAQPSHPHCVNNTYRSAQHSQALLRGLLALRDSGILFDVVLVVEGRHIEAHRILLAASCDYF

SEQ ID NO: 7488 - protein, 295 aa, Homo Sapiens
MPPPWHPPPRLLAVCLLTTTQATVVRDLVAVRMAEEQEFTQLCKLPAQPSHPHCVNNTYRSAQHSQALLRGLLALRDSGILFDVVLVVEGRHIEAHRILLAASCDYFRGMFAGGLKEMEQEEVLIHGVSYNAMCQILHFIYTSELELSLSNVQETLVAACQLQIPEIIHFCCDFLMSWVDEENILDVYRLAELFDLSRLTEQLDTYILKNFVAFSRTDKYRQLPLEKVYSLLSSNRLEVSCETEVYEGALLYHYSLEQVQADQISLHEPPKLLETVRFPLMEAEVLQRLHDKLDP

SEQ ID NO: 7489 - protein, 56 aa, Homo Sapiens
MWFLVLCLALSLGGTALVFWNPTPRILNAFSASASALASPKIASKRTPYPSSTLRP

SEQ ID NO: 7490 - protein, 262 aa, Homo Sapiens
MWFLVLCLALSLGGTGAAPPIQSRIVGGWECEQHSQPWQAALYHFSTFQCGGILVHRQWVLTAAHCISDNYQLWLGRHNLFDDENTAQFVHVSESFPHPGFNMSLLENHTRQADEDYSHDLMLLRLTEPADTITDAVKVVELPTEEPEVGSTCLASGWGSIEPENFSFPDDLQCVDLKILPNDECKKAHVQKVTDFMLCVGHLEGGKDTCVGDSGGPLMCDGVLQGVTSWGYVPCGTPNKPSVAVRVLSYVKWIEDTIAENS

SEQ ID NO: 7491 - protein, 143 aa, Homo Sapiens
MRAPHLHLSAASGARALAKLLPLLMAQLWAAEAALLPQNDTRLDPEAYGSPCARGSQPWQVSLFNGLSFHCAGVLVDQSWVLTAAHCGNKPLWARVGDDHLLLLQGEQLRRTTRSVVHPKYHQGSGPILPRRTDEHDLMLLKL

SEQ ID NO: 7492 - protein, 276 aa, Homo Sapiens
MRAPHLHLSAASGARALAKLLPLLMAQLWAAEAALLPQNDTRLDPEAYGSPCARGSQPWQVSLFNGLSFHCAGVLVDQSWVLTAAHCGNKPLWARVGDDHLLLLQGEQLRRTTRSVVHPKYHQGSGPILPRRTDEHDLMLLKLARPVVLGPRVRALQLPYRCAQPGDQCQVAGWGTTAARRVKYNKGLTCSSITILSPKECEVFYPGVVTNNMICAGLDRGQDPCQSDSGGPLVCDETLQGILSWGVYPCGSAQHPAVYTQICKYMSWINKVIRSN

SEQ ID NO: 7493 - protein, 276 aa, Homo Sapiens; identical to SEQ ID NO: 7492

SEQ ID NO: 7494 - protein, 276 aa, Homo Sapiens; identical to SEQ ID NO: 7492

SEQ ID NO: 7495 - protein, 43 aa, Homo Sapiens
MTTCCFFRESSSAGPLALLSIPSTTRAQAPSCQGERMSTISCC

SEQ ID NO: 7496 - protein, 282 aa, Homo Sapiens
MQRLRWLRDWKSSGRGLTAAKEPGARSSPLQAMRILQLILLALATGLVGGETRIIKGFECKPHSQPWQAALFEKTRLLCGATLIAPRWLLTAAHCLKPRYIVHLGQHNLQKEEGCEQTRTATESFPHPGFNNSLPNKDHRNDIMLVKMASPVSITWAVRPLTLSSRCVTAGTSCLISGWGSTSSPQLRLPHTLRCANITIIEHQKCENAYPGNITDTMVCASVQEGGKDSCQGDSGGPLVCNQSLQGIISWGQDPCAITRKPGVYTKVCKYVDWIQETMKNN

SEQ ID NO: 7497 - protein, 116 aa, Homo Sapiens
MQRLRWLRDWKSSGRGLTAAKEPGARSSPLQAMRILQLILLALATGLVGGETRIIKGFECKPHSQPWQAALFEKTRLLCGATLIAPRWLLTAAHCLKPWPLHSSPGAAQPPEGGGL

SEQ ID NO: 7498 - protein, 68 aa, Homo Sapiens
MRILQLILLALATGLVGGETRIIKGFECKPHSQPWQAALFEKTRLLCGATLIAPRWLLTAAHCLKPRY

SEQ ID NO: 7499 - protein, 170 aa, Homo Sapiens
MRILQLILLALATGLVGGETRIIKGFECKPHSQPWQAALFEKTRLLCGATLIAPRWLLTAAHCLKPRYIVHLGQHNLQKEEGCEQTRTATESFPHPGFNNSLPNKDHRNDIMLVKMASPVSITWAVRPLTLSSRCVTAGTSCLISGWGSTSSPQLRLPHTLRCANITIIE

SEQ ID NO: 7500 - protein, 250 aa, Homo Sapiens
MRILQLILLALATGLVGGETRIIKGFECKPHSQPWQAALFEKTRLLCGATLIAPRWLLTAAHCLKPRYIVHLGQHNLQKEEGCEQTRTATESFPHPGFNNSLPNKDHRNDIMLVKMASPVSITWAVRPLTLSSRCVTAGTSCLISGWGSTSSPQLRLPHTLRCANITIIEHQKCENAYPGNITDTMVCASVQEGGKDSCQGDSGGPLVCNQSLQGIISWGQDPCAITRKPGVYTKVCKYVDWIQETMKNN

SEQ ID NO: 7501 - protein, 250 aa, Homo Sapiens; identical to SEQ ID NO: 7500

SEQ ID NO: 7502 - protein, 275 aa, Homo Sapiens
MRILQLILLALATGLVGGETRIIKGFECKPHSQPWQAALFEKTRLLCGATLIAPRWLLTAAHCLKPWVSLTSPTHVSPDLSSSNYCLSHLSRYIVHLGQHNLQKEEGCEQTRTATESFPHPGFNNSLPNKDHRNDIMLVKMASPVSITWAVRPLTLSSRCVTAGTSCLISGWGSTSSPQLRLPHTLRCANITIIEHQKCENAYPGNITDTMVCASVQEGGKDSCQGDSGGPLVCNQSLQGIISWGQDPCAITRKPGVYTKVCKYVDWIQETMKNN

SEQ ID NO: 7503 - protein, 109 aa, Homo Sapiens
MRILQLILLALATVRLPHTLRCANITIIEHQKCENAYPGNITDTMVCASVQEGGKDSCQGDSGGPLVCNQSLQGIISWGQDPCAITRKPGVYTKVCKYVDWIQETMKNN

SEQ ID NO: 7504 - protein, 141 aa, Homo Sapiens
  misc_feature (1)..(1): Xaa can be any naturally occurring amino acid
XNSLPNKDHRNDIMLVKMASPVSITWAVRPLTLSSRCVTAGTSCLISGWGSTSSPQLRLPHTLRCANITIIEHQKCENAYPGNITDTMVCASVQEGGKDSCQSLQGIISWGQDPCAITRKPGVYTKVCKYVDWIQETMKNN

SEQ ID NO: 7505 - protein, 79 aa, Homo Sapiens
MGLSIFLLLCVLGEFSRSRERAGLRLDPFTPMRRPHHPPHLSSGPQPGGEEERGFLCASIYLQLSGAQPGSHTEDFQWH

SEQ ID NO: 7506 - protein, 79 aa, Homo Sapiens; identical to SEQ ID NO: 7505

SEQ ID NO: 7507 - protein, 111 aa, Homo Sapiens
MGLSIFLLLCVLGLSQAATPKIFNGTECGRNSQPWQVGLFEGTSLRCGGVLIDHRWVLTAAHCSGRPIPGSAPVPQPLHRLPCHLPWCVSRENHEQHGVCRRRPGAGCLPG

SEQ ID NO: 7508 - protein, 248 aa, Homo Sapiens
MGLSIFLLLCVLGLSQAATPKIFNGTECGRNSQPWQVGLFEGTSLRCGGVLIDHRWVLTAAHCSGSRYWVRLGEHSLSQLDWTEQIRHSGFSVTHPGYLGASTSHEHDLRLLRLRLPVRVTSSVQPLPLPNDCATAGTECHVSGWGITNHPRNPFPDLLQCLNLSIVSHATCHGVYPGRITSNMVCAGGVPGQDACQGDSGGPLVCGGVLQGLVSWGSVGPCGQDGIPGVYTYICKYVDWIRMIMRNN

SEQ ID NO: 7509 - protein, 248 aa, Homo Sapiens; identical to SEQ ID NO: 7508

SEQ ID NO: 7510 - protein, 254 aa, Homo Sapiens
MGLSIFLLLCVLGLSQAATPKIFNGTECGRNSQPWQVGLFEGTSLRCGGVLIDHRWVLTAAHCSGSRYWVRLGEHSLSQLDWTEQIRHSGFSVTHPGYLGASTSHEHDLRLLRLRLPVRVTSSVQPLPLPNDCATAGTECHVSGWGITNHPRNPFPDLLQCLNLSIVSHATCHGVYPGRITSNMVCAGGVPGQDACQGDSGGPLVCGGVLQGLVSWGSVGPCGQDGIPGVYTYICNSTLVGLGTSWNFNSCQPF

SEQ ID NO: 7511 - protein, 177 aa, Homo Sapiens
MGLSIFLLLCVLGLSQAATPKIFNGTECGRNSQPWQVGLFEGTSLRCGGVLIDHRWVLTAAHCSGSRYWVRLGEHSLSQLDWTEQIRHSGFSVTHPGYLGASTSHEHDLRLLRLRLPVRVTSSVQPLPLPNDCATAGTECHVSGWGITNHPRSKGPRARGQGSGWVQVWDAGREVES

SEQ ID NO: 7512 - protein, 98 aa, Homo Sapiens
MGLIYKCLPEKVTVNIETRCLPGVFQGSQHQWDQWVSPRWLHLLPPLSALAGCPTSARAATLWGSPGPPQMGPHCRTLSKGGAQSLPRQARPRACGSW

SEQ ID NO: 7513 - protein, 98 aa, Homo Sapiens; identical to SEQ ID NO: 7512

SEQ ID NO: 7514 - protein, 93 aa, Homo Sapiens
MWPLALVIASLTLALSGGEDFKEPSQGPRDVMAASRPEAFPKGLTLEPRPEKGGICGCLAPGTILGLKVGWLFSSGDTPWIHARATPECHTLG

SEQ ID NO: 7515 - protein, 93 aa, Homo Sapiens; identical to SEQ ID NO: 7514

SEQ ID NO: 7516 - protein, 99 aa, Homo Sapiens
MWPLALVIASLTLALSGGVSQESSKVLNTNGTSGFLPGGYTCFPHSQPWQAALLVQGRLLCGGVLVHPKWVLTAAHCLKEGLKVYLGKHALGRVEAGEQ

SEQ ID NO: 7517 - protein, 180 aa, Homo Sapiens
MWPLALVIASLTLALSGGVSQESSKVLNTNGTSGFLPGGYTCFPHSQPWQAALLVQGRLLCGGVLVHPKWVLTAAHCLKEGLKVYLGKHALGRVEAGEQVREVVHSIPHPEYRRSPTHLNHDHDIMLLELQSPVQLTGYIQTLPLSHNNRLTPGTTCRVSGWGTTTSPQGMHPHRWPEAP

SEQ ID NO: 7518 - protein, 277 aa, Homo Sapiens
MWPLALVIASLTLALSGGVSQESSKVLNTNGTSGFLPGGYTCFPHSQPWQAALLVQGRLLCGGVLVHPKWVLTAAHCLKEGLKVYLGKHALGRVEAGEQVREVVHSIPHPEYRRSPTHLNHDHDIMLLELQSPVQLTGYIQTLPLSHNNRLTPGTTCRVSGWGTTTSPQVNYPKTLQCANIQLRSDEECRQVYPGKITDNMLCAGTKEGGKDSCEGDSGGPLVCNRTLYGIVSWGDFPCGQPDRPGVYTRVSRYVLWIRETIRKYETQQQKWLKGPQ

SEQ ID NO: 7519 - protein, 204 aa, Homo Sapiens
MWPLALVIASLTLALSGGVSQESSKVLNTNGTSGFLPGGYTCFPHSQPWQAALLVQGRLLCGGVLVHPKWVLTAAHCLKEGLKVYLGKHALGRVEAVNYPKTLQCANIQLRSDEECRQVYPGKITDNMLCAGTKEGGKDSCEGDSGGPLVCNRTLYGIVSWGDFPCGQPDRPGVYTRVSRYVLWIRETIRKYETQQQKWLKGPQ

SEQ ID NO: 7520 - protein, 125 aa, Homo Sapiens
MWPLALVIASLTLALSGVNYPKTLQCANIQLRSDEECRQVYPGKITDNMLCAGTKEGGKDSCEGDSGGPLVCNRTLYGIVSWGDFPCGQPDRPGVYTRVSRYVLWIRETIRKYETQQQKWLKGPQ

SEQ ID NO: 7521 - protein, 267 aa, Homo Sapiens
MSLRVLGSGTWPSAPKMFLLLTALQVLAIAMTQSQEDENKIIGGHTCTRSSQPWQAALLAGPRRRFLCGGALLSGQWVITAAHCGRPILQVALGKHNLRRWEATQQVLRVVRQVTHPNYNSRTHDNDLMLLQLQQPARIGRAVRPIEVTQACASPGTSCRVSGWGTISSPIARYPASLQCVNINISPDEVCQKAYPRTITPGMVCAGVPQGGKDSCQGDSGGPLVCRGQLQGLVSWGMERCALPGYPGVYTNLCKYRSWIEETMRDK

SEQ ID NO: 7522 - protein, 267 aa, Homo Sapiens; identical to SEQ ID NO: 7521

SEQ ID NO: 7523 - protein, 43 aa, Homo Sapiens
MRVRLGEHNLRKRDGPEQLRTTSRVIPHPRYEARSHRNDIMLL

SEQ ID NO: 7524 - protein, 256 aa, Homo Sapiens
MWLLLTLSFLLASTAAQDGDKLLEGDECAPHSQPWQVALYERGRFNCGASLISPHWVLSAAHCQSRFMRVRLGEHNLRKRDGPEQLRTTSRVIPHPRYEARSHRNDIMLLRLVQPARLNPQVRPAVLPTRCPHPGEACVVSGWGLVSHNEPGTAGSPRSQVSLPDTLHCANISIISDTSCDKSYPGRLTNTMVCAGAEGRGAESCEGDSGGPLVCGGILQGIVSWGDVPCDNTTKPGVYTKVCHYLEWIRETMKRN

SEQ ID NO: 7525 - protein, 120 aa, Homo Sapiens
MWLLLTLSFLLASTAQDGDKLLEGDECAPHSQPWQVALYERGRFNCGASLISPHWVLSAAHCQSRFMRVRLGEHNLRKRDGPEQLRTTSRVIPHPRYEARSHRNDIMLLRLVQPARLNPQ

SEQ ID NO: 7526 - protein, 160 aa, Homo Sapiens
MWLLLTLSFLLASTAQDGDKLLEGDECAPHSQPWQVALYERGRFNCGASLISPHWVLSAAHCQSRFMRVRLGEHNLRKRDGPEQLRTTSRVIPHPRYEARSHRNDIMLLRLVQPARLNPQVRPAVLPTRCPHPGEACVVSGWGLVSHNEPGTAGSPRSQG

SEQ ID NO: 7527 - protein, 255 aa, Homo Sapiens
MWLLLTLSFLLASTAQDGDKLLEGDECAPHSQPWQVALYERGRFNCGASLISPHWVLSAAHCQSRFMRVRLGEHNLRKRDGPEQLRTTSRVIPHPRYEARSHRNDIMLLRLVQPARLNPQVRPAVLPTRCPHPGEACVVSGWGLVSHNEPGTAGSPRSQVSLPDTLHCANISIISDTSCDKSYPGRLTNTMVCAGAEGRGAESCEGDSGGPLVCGGILQGIVSWGDVPCDNTTKPGVYTKVCHYLEWIRETMKRN

SEQ ID NO: 7528 - protein, 23 aa, Homo Sapiens
MSLLKHQSLRPDEDSSHDLMLLR

SEQ ID NO: 7529 - protein, 44 aa, Homo Sapiens
MSLLKHQSLRPDEDSSHDLMLLRLSEPAKITDVVKVLGLPTQEP

SEQ ID NO: 7530 - protein, 159 aa, Homo Sapiens
MSLLKHQSLRPDEDSSHDLMLLRLSEPAKITDVVKVLGLPTQEPALGTTCYASGWGSIEPEEFLRPRSLQCVSLHLLSNDMCARAYSEKVTEFMLCAGLWTGGKDTCGGDSGGPLVCNGVLQGITSWGPEPCALPEKPAVYTKVVHYRKWIKDTIAANP

SEQ ID NO: 7531 - protein, 69 aa, Homo Sapiens
MWDLVLSIALSVGCTGAVPLIQSRIVGGWECEKHSQPWQVAVYSHGWAHCGGVLVHPQWVLTAAHCLKK

SEQ ID NO: 7532 - protein, 122 aa, Homo Sapiens
MWDLVLSIALSVGCTGAVPLIQSRIVGGWECEKHSQPWQVAVYSHGWAHCGGVLVHPQWVLTAAHCLKKACQDHRCCEGPGPAHPGASTGDHLLRLRLGQHRTRGVLAPQESSVCEPPSPVQ

SEQ ID NO: 7533 - protein, 164 aa, Homo Sapiens
MWDLVLSIALSVGCTGAVPLIQSRIVGGWECEKHSQPWQVAVYSHGWAHCGGVLVHPQWVLTAAHCLKKNSQVWLGRHNLFEPEDTGQRVPVSHSFPHPLYNMSLLKHQSLRPDEDSSHDLMLLRLSEPAKITDVVKVLGLPTQEPALGTTCYASGWGSIEPEE

SEQ ID NO: 7534 - protein, 261 aa, Homo Sapiens
MWDLVLSIALSVGCTGAVPLIQSRIVGGWECEKHSQPWQVAVYSHGWAHCGGVLVHPQWVLTAAHCLKKNSQVWLGRHNLFEPEDTGQRVPVSHSFPHPLYNMSLLKHQSLRPDEDSSHDLMLLRLSEPAKITDVVKVLGLPTQEPALGTTCYASGWGSIEPEEFLRPRSLQCVSLHLLSNDMCARAYSEKVTEFMLCAGLWTGGKDTCGGDSGGPLVCNGVLQGITSWGPEPCALPEKPAVYTKVVHYRKWIKDTIAANP

SEQ ID NO: 7535 - protein, 223 aa, Homo Sapiens
MWDLVLSIALSVGCTGAVPLIQSRIVGGWECEKHSQPWQVAVYSHGWAHCGGVLVHPQWVLTAAHCLKKNSQVWLGRHNLFEPEDTGQRVPVSHSFPHPLYNMSLLKHQSLRPDEDSSHDLMLLRLSEPAKITDVVKVLGLPTQEPALGTTCYASGWGSIEPEEFLRPRSLQCVSLHLLSNDMCARAYSEKVTEFMLCAGLWTGGKDTCGVSHPYSQHLEGKG

SEQ ID NO: 7536 - protein, 49 aa, Homo Sapiens
MWDLVLSIALSVGCTGIARSGWVGTTCLSLKTQARGSLSATASHTRSTI

SEQ ID NO: 7537 - protein, 49 aa, Homo Sapiens; identical to SEQ ID NO: 7536

SEQ ID NO: 7538 - protein, 49 aa, Homo Sapiens; identical to SEQ ID NO: 7536

SEQ ID NO: 7539 - protein, 51 aa, Homo Sapiens
  misc_feature (1)..(1): Xaa can be any naturally occurring amino acid
XEKVTEFMLCAGLWTGGKDTCGHNSPIPVLSTCLLGTCYVTSIAVDPGKQQ

SEQ ID NO: 7540 - protein, 184 aa, Homo Sapiens
  misc_feature (1)..(1): Xaa can be any naturally occurring amino acid
XPDEDSSHDLMLLRLSEPAKITDVVKVLGLPTQEPALGTTCYASGWGSIEPEEFLRPRSLQCVSLHLLSNDMCARAYSEKVTEFMLCAGLWTGGKDTCGESGAVDGAGQKKDRAWLRVILGVHLSVMVCFKVSHHGALSHVPCLKSLLCTPRWCITGSGSRTPSQPTPECPCPTPTSSKFKSTS

SEQ ID NO: 7541 - protein, 172 aa, Homo Sapiens
MWVPVVFLTLAVCGGVLVHPQWVLTAAHCIRNKSVILLGRHSLFHPEDTGQVFQVSHSFPHPLYDMSLLKNRFLRPGDDSSHDLMLLRLSEPAELTDAVKVMDLPTQEPALGTTCYASGWGSIEPEEFLTPKKLQCVDLHVISNDVCAQVHPQKVTKFMLCAGRWTGGKSTC

SEQ ID NO: 7542 - protein, 173 aa, Homo Sapiens [sequence omitted]

SEQ ID NO: 7543 - protein, 218 aa, Homo Sapiens
MWVPVVFLTLSVTWIGAAPLILSRIVGGWECEKHSQPWQVLVASRGRAVCGGVLVHPQWVLTAAHCIRKPGDDSSHDLMLLRLSEPAELTDAVKVMDLPTQEPALGTTCYASGWGSIEPEEFLTPKKLQCVDLHVISNDVCAQVHPQKVTKFMLCAGRWTGGKSTCSGDSGGPLVCNGVLQGITSWGSEPCALPERPSLYTKVVHYRKWIKDTIVANP

SEQ ID NO: 7544 - protein, 195 aa, Homo Sapiens
MWVPVVFLTLSVTWIGAAPLILSRIVGGWECEKHSQPWQVLVASRGRAVCGGVLVHPQWVLTAAHCIRKPGDDSSHDLMLLRLSEPAELTDAVKVMDLPTQEPALGTTCYASGWGSIEPEEFLTPKKLQCVDLHVISNDVCAQVHPQKVTKFMLCAGRWTGGKSTCSWVILITELTMPALPMVLHGSLVPWRGGV

SEQ ID NO: 7545 - protein, 90 aa, Homo Sapiens
MWVPVVFLTLSVTWIGAAPLILSRIVGGWECEKHSQPWQVLVASRGRAVCGGVLVHPQWVLTAAHCIRNKSVILLGRHSLFHPEDTGQAR

SEQ ID NO: 7546 - protein, 261 aa, Homo Sapiens
MWVPVVFLTLSVTWIGAAPLILSRIVGGWECEKHSQPWQVLVASRGRAVCGGVLVHPQWVLTAAHCIRNKSVILLGRHSLFHPEDTGQVFQVSHSFPHPLYDMSLLKNRFLRPGDDSSHDLMLLRLSEPAELTDAVKVMDLPTQEPALGTTCYASGWGSIEPEEFLTPKKLQCVDLHVISNDVCAQVHPQKVTKFMLCAGRWTGGKSTCSGDSGGPLVCNGVLQGITSWGSEPCALPERPSLYTKVVHYRKWIKDTIVANP

SEQ ID NO: 7547 - protein, 227 aa, Homo Sapiens
MWVPVVFLTLSVTWIGAAPLILSRIVGGWECEKHSQPWQVLVASRGRAVCGGVLVHPQWVLTAAHCIRNKSVILLGRHSLFHPEDTGQVFQVSHSFPHPLYDMSLLKNRFLRPGDDSSHDLMLLRLSEPAELTDAVKVMDLPTQEPALGTTCYASGWGSIEPEEFLTPKKLQCVDLHVISNDVCAQVHPQKVTKFMLCAGRWTGGKSTCSVSHPYSQDLEGKGEWGP

SEQ ID NO: 7548 - protein, 238 aa, Homo Sapiens
MWVPVVFLTLSVTWIGAAPLILSRIVGGWECEKHSQPWQVLVASRGRAVCGGVLVHPQWVLTAAHCIRNKSVILLGRHSLFHPEDTGQVFQVSHSFPHPLYDMSLLKNRFLRPGDDSSHDLMLLRLSEPAELTDAVKVMDLPTQEPALGTTCYASGWGSIEPEEFLTPKKLQCVDLHVISNDVCAQVHPQKVTKFMLCAGRWTGGKSTCSWVILITELTMPALPMVLHGSLVPWRGGV

SEQ ID NO: 7549 - protein, 220 aa, Homo Sapiens
MWVPVVFLTLSVTWIGAAPLILSRIVGGWECEKHSQPWQVLVASRGRAVCGGVLVHPQWVLTAAHCIRNKSVILLGRHSLFHPEDTGQVFQVSHSFPHPLYDMSLLKNRFLRPGDDSSIEPEEFLTPKKLQCVDLHVISNDVCAQVHPQKVTKFMLCAGRWTGGKSTCSGDSGGPLVCNGVLQGITSWGSEPCALPERPSLYTKVVHYRKWIKDTIVANP

SEQ ID NO: 7550 - protein, 124 aa, Homo Sapiens
MWVPVVFLTLSVTWIGAAPLILSRIVGGWECEKHSQPWQVLVASRGRAVCGGVLVHPQWVLTAAHCIRNKSVILLGRHSLFHPEDTGQVFQVSHSFPHPLYDMSLLKNRFLRPGDDSTLNQRSS

SEQ ID NO: 7551 - protein, 104 aa, Homo Sapiens
MWVPVVFLTLSVTWIGERGHGWGDAGEGASPDCQAEALSPPTQHPSPDRELGSFLSLPAPLQAHTPSPSILQQSSLPHQVPAPSHLPQNFLPIAQPAPCSQLLY

SEQ ID NO: 7552 - protein, 262 aa, Homo Sapiens
  misc_feature (1)..(1): Xaa can be any naturally occurring amino acid
XFLTLSVTWIGAAPLILSRIVGGWECEKHSQPWQVLVASRGRAVCGGVLVHPQWVLTAAHCIRNKSVILLGRHSLFHPEDTGQVFQVSHSFPHPLYDMSLLKNRFLRPGDDSSHDLMLLRLSEPAELTDAVKVMDLPTQEPALGTTCYASGWGSIEPEECTPGPDVLTPKKLQCVDLHVISNDVCAQVHPQKVTKFMLCAGRWTGGKSTCSGDSGGPLVCNGVLQGITSWGSEPCALPERPSLYTKVVHYRKWIKDTIVANP

SEQ ID NO: 7553 - protein, 75 aa, Homo Sapiens
MATAGNPWGWFLGYLILGVAGSLVSGSCSQIINGEDCSPHSQPWQAALVMENELFCSGVLVHPQWVLSAAHCFQK

SEQ ID NO: 7554 - protein, 254 aa, Homo Sapiens
MATAGNPWGWFLGYLILGVAGSLVSGSCSQIINGEDCSPHSQPWQAALVMENELFCSGVLVHPQWVLSAAHCFQNSYTIGLGLHSLEADQEPGSQMVEASLSVRHPEYNRPLLANDLMLIKLDESVSESDTIRSISIASQCPTAGNSCLVSGWGLLANGRMPTVLQCVNVSVVSEEVCSKLYDPLYHPSMFCAGGGQDQKDSCNGDSGGPLICNGYLQGLVSFGKAPCGQVGVPGVYTNLCKFTEWIEKTVQAS

SEQ ID NO: 7555 - protein, 110 aa, Homo Sapiens
MENELFCSGVLVHPQWVLSAAHCFQNSYTIGLGLHSLEADQEPGSQMVEASLSVRHPEYNRPLLANDLMLIKLDESVSESDTIRSISIASQCPTAGNSCLVSGWGLLANG

SEQ ID NO: 7556 - protein, 71 aa, Homo Sapiens
MVEASLSVRHPEYNRPLLANDLMLIKLDESVSESDTIRSISIASQCPTAGNSCLVSGWGLLANECLPCCSA

SEQ ID NO: 7557 - protein, 71 aa, Homo Sapiens; identical to SEQ ID NO: 7556

SEQ ID NO: 7558 - protein, 205 aa, Homo Sapiens
MATARPPWMWVLCALITALLLGVTEHVLANNDVSCDHPSNTVPSGSNQDLGAGAGEDARSDDSSSRIINGSDCDMHTQPWQAALLLRPNQLYCGAVLVHPQWLLTAAHCRKKVFRVRLGHYSLSPVYESGQQMFQGVKSIPHPGYSHPGHSNDLMLIKLNRRIRPTKDVRPINVSSHCPSAGTKCLVSGWGTTKSPQVHFPKVLQ

SEQ ID NO: 7559 - protein, 293 aa, Homo Sapiens
MATARPPWMWVLCALITALLLGVTEHVLANNDVSCDHPSNTVPSGSNQDLGAGAGEDARSDDSSSRIINGSDCDMHTQPWQAALLLRPNQLYCGAVLVHPQWLLTAAHCRKKVFRVRLGHYSLSPVYESGQQMFQGVKSIPHPGYSHPGHSNDLMLIKLNRRIRPTKDVRPINVSSHCPSAGTKCLVSGWGTTKSPQVHFPKVLQCLNISVLSQKRCEDAYPRQIDDTMFCAGDKAGRDSCQGDSGGPVVCNGSLQGLVSWGDYPCARPNRPGVYTNLCKFTKWIQETIQANS

SEQ ID NO: 7560 - protein, 293 aa, Homo Sapiens; identical to SEQ ID NO: 7559

SEQ ID NO: 7561 - protein, 293 aa, Homo Sapiens; identical to SEQ ID NO: 7559

SEQ ID NO: 7562 - protein, 69 aa, Homo Sapiens
MADPATRHLTPTKLPSTPRATCSVVGSLSIHCGSSQLPTAKNRIFRSSWGSITFGKGRVPRSRVLLSGL

SEQ ID NO: 7563 - protein, 244 aa, Homo Sapiens
MKKLMVVLSLIAAAWAEEQNKLVHGGPCDKTSHPYQAALYTSGHLLCGGVLIHPLWVLTAAHCKKPNLQVFLGKHNLRQRESSQEQSSVVRAVIHPDYDAASHDQDIMLLRLARPAKLSELIQPLPLERDCSANTTSCHILGWGKTADGDFPDTIQCAYIHLVSREECEHAYPGQITQNMLCAGDEKYGKDSCQGDSGGPLVCGDHLRGLVSWGNIPCGSKEKPGVYTNVCRYTNWIQKTIQAK

SEQ ID NO: 7564 - protein, 244 aa, Homo Sapiens; identical to SEQ ID NO: 7563

SEQ ID NO: 7565 - protein, 244 aa, Homo Sapiens; identical to SEQ ID NO: 7563

SEQ ID NO: 7566 - protein, 40 aa, Homo Sapiens
MKKLMVVLSLIAAGIFRSSWGSITFGKGRVPRSRVLLSGL

SEQ ID NO: 7567 - protein, 40 aa, Homo Sapiens; identical to SEQ ID NO: 7566

SEQ ID NO: 7568 - protein, 137 aa, Homo Sapiens
MLLRLARPAKLSELIQPLPLERDCSANTTSCHILGWGKTADGDFPDTIQCAYIHLVSREECEHAYPGQITQNMLCAGDEKYGKDSCQGDSGGPLVCGDHLRGLVSWGNIPCGSKEKPGVYTNVCRYTNWIQKTIQAK

SEQ ID NO: 7569 - protein, 253 aa, Homo Sapiens
MARSLLLPLQILLLSLALETAGEEAQGDKIIDGAPCARGSHPWQVALLSGNQLHCGGVLVNERWVLTAAHCKMNEYTVHLGSDTLGDRRAQRIKASKSFRHPGYSTQTHVNDLMLVKLNSQARLSSMVKKVRLPSRCEPPGTTCTVSGWGTTTSPDVTFPSDLMCVDVKLISPQDCTKVYKDLLENSMLCAGIPDSKKNACNGDSGGPLVCRGTLQGLVSWGTFPCGQPNDPGVYTQVCKFTKWINDTMKKHR

SEQ ID NO: 7570 - protein, 253 aa, Homo Sapiens; identical to SEQ ID NO: 7569

SEQ ID NO: 7571 - protein, 66 aa, Homo Sapiens
MARSLLLPLQILLLSLALETAGEEVSTPCTWAVIRWATGELRGSRPRSHSATPATPHRPMLMTSCS

SEQ ID NO: 7572 - protein, 69 aa, Homo Sapiens
MNEYTVHLGSDTLGDRRAQRIKASKSFRHPGYSTQTHVNDLMLVKLNSQARLSSMVKKVRLPSRCEPPG

SEQ ID NO: 7573 - protein, 181 aa, Homo Sapiens
MNEYTVHLGSDTLGDRRAQRIKASKSFRHPGYSTQTHVNDLMLVKLNSQARLSSMVKKVRLPSRCEPPGTTCTVSGWGTTTSPDVTFPSDLMCVDVKLISPQDCTKVYKDLLENSMLCAGIPDSKKNACNGDSGGPLVCRGTLQGLVSWGTFPCGQPNDPGVYTQVCKFTKWINDTMKKHR

SEQ ID NO: 7574 - protein, 305 aa, Homo Sapiens
MGRPRPRAAKTWMFLLLLGGAWAACGSLDLLTKLYAENLPCVHLNPQWPSQPSHCPRGWRSNPLPPAAGHSRAQEDKVLGGHECQPHSQPWQAALFQGQQLLCGGVLVGGNWVLTAAHCKKPKYTVRLGDHSLQNKDGPEQEIPVVQSIPHPCYNSSDVEDHNHDLMLLQLRDQASLGSKVKPISLADHCTQPGQKCTVSGWGTVTSPRENFPDTLNCAEVKIFPQKKCEDAYPGQITDGMVCAGSSKGADTCQGDSGGPLVCDGALQGITSWGSDPCGRSDKPGVYTNICRYLDWIKKIIGSKG

SEQ ID NO: 7575 - protein, 119 aa, Homo Sapiens
MGRPRPRAAKTWMFLLLLGGAWAENFPDTLNCAEVKIFPQKKCEDAYPGQITDGMVCAGSSKGADTCQGDSGGPLVCDGALQGITSWGSDPCGRSDKPGVYTNICRYLDWIKKIIGSKG

SEQ ID NO: 7576 - protein, 97 aa, Homo Sapiens
MGRPRPRAAKTWMFLLLLGGAWAGHSRAQEDKVLGGHECQPHSQPWQAALFQGQQLLCGGVLVGGNWVLTAAHCKKPKYTVRLGDHSLQNKDGPEQE

SEQ ID NO: 7577 - protein, 260 aa, Homo Sapiens
MGRPRPRAAKTWMFLLLLGGAWAGHSRAQEDKVLGGHECQPHSQPWQAALFQGQQLLCGGVLVGGNWVLTAAHCKKPKYTVRLGDHSLQNKDGPEQEIPVVQSIPHPCYNSSDVEDHNHDLMLLQLRDQASLGSKVKPISLADHCTQPGQKCTVSGWGTVTSPRENFPDTLNCAEVKIFPQKKCEDAYPGQITDGMVCAGSSKGADTCQGDSGGPLVCDGALQGITSWGSDPCGRSDKPGVYTNICRYLDWIKKIIGSKG

SEQ ID NO: 7578 - protein, 32 aa, Homo Sapiens
MGRPRPRAAKTWMFLLLLGGAWAGRFWRPPGV

SEQ ID NO: 7579 - protein, 32 aa, Homo Sapiens; identical to SEQ ID NO: 7578

SEQ ID NO: 7580 - protein, 139 aa, Homo Sapiens
MLLQLRDQASLGSKVKPISLADHCTQPGQKCTVSGWGTVTSPRENFPDTLNCAEVKIFPQKKCEDAYPGQITDGMVCAGSSKGADTCQGDSGGPLVCDGALQGITSWGSDPCGRSDKPGVYTNICRYLDWIKKIIGSKG

SEQ ID NO: 7581 - protein, 54 aa, Homo Sapiens
  misc_feature (1)..(1): Xaa can be any naturally occurring amino acid
XLLLLGGAWAGNTQYAWETTAYRIKMAQSKKYLWFSPSHTPATTAAMWRTTTMI

SEQ ID NO: 7582 - protein, 250 aa, Homo Sapiens
MKLGLLCALLSLLAGHGWADTRAIGAEECRPNSQPWQAGLFHLTRLFCGATLISDRWLLTAAHCRKPYLWVRLGEHHLWKWEGPEQLFRVTDFFPHPGFNKDLSANDHNDDIMLIRLPRQARLSPAVQPLNLSQTCVSPGMQCLISGWGAVSSPKALFPVTLQCANISILENKLCHWAYPGHISDSMLCAGLWEGGRGSCQGDSGGPLVCNGTLAGVVSGGAEPCSRPRRPAVYTSVCHYLDWIQEIMEN

SEQ ID NO: 7583 - protein, 61 aa, Homo Sapiens
MKLGLLCALLSLLAGICGSALESTTSGNGRVRSSCSGLRTSSPTLASTRTSAPMTTMMTSC

SEQ ID NO: 7584 - protein, 148 aa, Homo Sapiens
MILFKQATYFISLFATVSCGCLTQLYENAFFRGGDVASMYTPNAQYCQMRCTFHPRCLLFSFLPASSINDMEKRFGCFLKDSVTGTLPKVHRTGAVSGHSLKQCGHQISACHRDIYKGVDMRGVNFNVSKVSSVEECQKRCTSNIRCQ

SEQ ID NO: 7585 - protein, 638 aa, Homo Sapiens
MILFKQATYFISLFATVSCGCLTQLYENAFFRGGDVASMYTPNAQYCQMRCTFHPRCLLFSFLPASSINDMEKRFGCFLKDSVTGTLPKVHRTGAVSGHSLKQCGHQISACHRDIYKGVDMRGVNFNVSKVSSVEECQKRCTSNIRCQFFSYATQTFHKAEYRNNCLLKYSPGGTPTAIKVLSNVESGFSLKPCALSEIGCHMNIFQHLAFSDVDVARVLTPDAFVCRTICTYHPNCLFFTFYTNVWKIESQRNVCLLKTSESGTPSSSTPQENTISGYSLLTCKRTLPEPCHSKIYPGVDFGGEELNVTFVKGVNVCQETCTKMIRCQFFTYSLLPEDCKEEKCKCFLRLSMDGSPTRIAYGTQGSSGYSLRLCNTGDNSVCTTKTSTRIVGGTNSSWGEWPWQVSLQVKLTAQRHLCGGSLIGHQWVLTAAHCFDGLPLQDVWRIYSGILNLSDITKDTPFSQIKEIIIHQNYKVSEGNHDIALIKLQAPLNYTEFQKPICLPSKGDTSTIYTNCWVTGWGFSKEKGEIQNILQKVNIPLVTNEECQKRYQDYKITQRMVCAGYKEGGKDACKGDSGGPLVCKHNGMWRLVGITSWGEGCARREQPGVYTKVAEYMDWILEKTQSSDGKAQMQSPA

SEQ ID NO: 7586 - protein, 141 aa, Homo Sapiens
MYTPNAQYCQMRCTFHPRCLLFSFLPASSINDMEKRFGCFLKDSVTGTLPKVHRTGAVSGHSLKQCGHQISACHRDIYKGVDMRGVNFNVSKVSSVEECQKRCTSNIRCQFFSYATQTFHKAEYRNNCLLKYSPGGTPTAI

SEQ ID NO: 7587 - protein, 514 aa, Homo Sapiens
MYTPNAQYCQMRCTFHPRCLLFSFLPASSINDMEKRFGCFLKDSVTGTLPKVHRTGAVSGHSLKQCGHQISACHRDIYKGVDMRGVNFNVSKVSSVEECQKRCTSNIRCQFFSYATQTFHKAEYRNNCLLKYSPGGTPTAIKVLSNVESGFSLKPCALSEIGCHMNIFQHLAFSDVDVARVLTPDAFVCRTICTYHPNCLFFTFYTNVWKIESQRNVCLLKTSESGTPSSSTPQENTISGYSLLTCKRTLPEPCHSKIYPGVDFGGEELNVTFVKGVNVCQETCTKMIRCQFFTYSLLPEDCKEEKCKCFLRLSMDGSPTRIAYGTQGSSGYSLRLCNTGDNSVCTTKTSTRIVGGTNSSWGEWPWQVSLQVKLTAQRHLCGGSLIGHQWVLTAAHCFDGLPLQDVWRIYSGILNLSDITKDTPFSQIKEIIIHQNYKVSEGNHDIALIKLQAPLNYTEFQKPICLPSKGDTSTIYTNCWVTGWGFSKEKGRFRWSLSLQTQWNVAFGGHHQLG

SEQ ID NO: 7588 - protein, 686 aa, Homo Sapiens
  misc_feature (1)..(1): Xaa can be any naturally occurring amino acid
XSEDCEVAGYRVLKGTEAVIIPYALHRDPRYFPNPEEFQPERFFPENAQGRHPYAYVPFSAGPRNCIGCLTQLYENAFFRGGDVASMYTPNAQYCQMRCTFHPRCLLFSFLPASSINDMEKRFGCFLKDSVTGTLPKVHRTGAVSGHSLKQCGHQISACHRDIYKGVDMRGVNFNVSKVSSVEECQKRCTSNIRCQFFSYATQTFHKAEYRNNCLLKYSPGGTPTAIKVLSNVESGFSLKPCALSEIGCHMNIFQHLAFSDVDVARVLTPDAFVCRTICTYHPNCLFFTFYTNVWKIESQRNVCLLKTSESGTPSSSTPQENTISGYSLLTCKRTLPEPCHSKIYPGVDFGGEELNVTFVKGVNVCQETCTKMIRCQFFTYSLLPEDCKEEKCKCFLRLSMDGSPTRIAYGTQGSSGYSLRLCNTGDNSVCTTKTSTRIVGGTNSSWGEWPWQVSLQVKLTAQRHLCGGSLIGHQWVLTAAHCFDGLPLQDVWRIYSGILNLSDITKDTPFSQIKEIIIHQNYKVSEGNHDIALIKLQAPLNYTEFQKPICLPSKGDTSTIYTNCWVTGWGFSKEKGEIQNILQKVNIPLVTNEECQKRYQDYKITQRMVCAGYKEGGKDACKGDSGGPLVCKHNGMWRLVGITSWGEGCARREQPGVYTKVAEYMDWILEKTQSSDGKAQMQSPA

SEQ ID NO: 7589 - protein, 91 aa, Homo Sapiens
MARGERIYRAVKDLFLHEPEQMLWNAFPPSGRELSYTSRSQMPGETISRNLQETRREKKCWERSTERHEVRGTEDQRRQERSPGTFSKPKI

SEQ ID NO: 7590 - protein, 352 aa, Homo Sapiens
MARGRKMSKPRAVEAAAAAAAVAATAPGPEMVERRGPGRPRTDGENVFTGQSKIYSYMSPNKCSGMRFPLQEENSVTHHEVKCQGKPLAGIYRKREEKRNAGNAVRSAMKSEEQKIKDARKGPLVPFPNQKSEAAEPPKTPPSSCDSTNAAIAKQALKKPIKGKQAPRKKAQGKTQQNRKLTDFYPVRRSSRKSKAELQSEERKRIDELIESGKEEGMKIDLIDGKGRGVIATKQFSRGDFVVEYHGDLIEITDAKKREALYAQDPSTGCYMYYFQYLSKTYCVDATRETNRLGRLINHSKCGNCQTKLHDIDGVPHLILIASRDIAAGEELLYDYGDRSKASIEAHPWLKH

SEQ ID NO: 7591 - protein, 299 aa, Homo Sapiens
MRWLWLLLFPDSPVTLREVLPSQPWRLRGCSDLRGENVFTGQSKIYSYMSPNKCSGMRFPLQEENSVTHHEVKCQGKPLAGIYRKREEKRNAGNAVRSAMKSEEQKIKDARKGPLVPFPNQKSEAAEPPKTPPSSCDSTNAAIAKQALKKPIKGKQAPRKKAQGKTQQNRKLTDFYPVRRSSRKSKAELQSEERKRIDELIESGKEEGMKIDLIDGKGRGVIATKQFSRGDFVVEYHGDLIEITDAKKREALYAQDPSTGCYMYYFQYLSKTYCVDATRETNRLGRLINHSKCGNCQTK

SEQ ID NO: 7592 - protein, 322 aa, Homo Sapiens
MVERRGPGRPRTDGENVFTGQSKIYSYMSPNKCSGMRFPLQEENSVTHHEVKCQGKPLAGIYRKREEKRNAGNAVRSAMKSEEQKIKDARKGPLVPFPNQKSEAAEPPKTPPSSCDSTNAAIAKQALKKPIKGKQAPRKKAQGKTQQNRKLTDFYPVRRSSRKSKAELQSEERKRIDELIESGKEEGMKIDLIDGKGRGVIATKQFSRGDFVVEYHGDLIEITDAKKREALYAQDPSTGCYMYYFQYLSKTYCVDATRETNRLGRLINHSKCGNCQTKLHDIDGVPHLILIASRDIAAGEELLYDYGDRSKASIEAHPWLKH

SEQ ID NO: 7593 - protein, 1749 aa, Homo Sapiens
MQAMDPAAADLYEEDGKDLDFYDFEPLPTLPEDEENVSLADILSLRDRGLSEQEAWAVCLECSLSMRSVAHAAIFQSLCITPDTLAFNTSGNVCFMEQLSDDPEGAFVPPEFDVTGNTFEAHIYSLGATLKAALEYVAEPTLEPRLSQDLEALLSRMQAEDPGDRPDLESIIALCEEKLQLTSSCRVCRSLSAVGRRVLSIESFGALQDVSESSWRERPAPGNAGPRRPPGDPSTDPEVLPTPEGPESETSRGPRASPTKALLSTPVRNGESHSREGLAGLVLDAERTLGELDRDALRRSRLRKVQTFPRLLSDSPEATLCLPLTRGKSQLPISELFSPDPRKAFLDRKNGLSSFQAQPKCRLWPEQEPEHQLGRVPCAGRSTDRGPGVPGSPGQPETSHPSQGPAEAPADPRDASGEAQTPRDDERIPEGARQLESAAAEQWVSLQDLLSQLGRPFREYELWALCLACLRALQTRPEHPAYLCLDSVLVAEDGAVLFQPPPANGSYDSFFLAPELAEERLVTEKASVYCVAAVLWTAAKFSVPRNHKLALPRRLKTLLLDMARRSAPERPSAAEAIKVCGSYLLQRGMDSRKILAHLRASICQVYQEEETISLQNAFSVVELKPSVAPAPEPSPGFLPVNSDTGLVAVPGPVPGQHPCGEEATQLPAAFTSEATHFKPIVLAQNASVARDQPALAQEESEERGGQREGEGEEKLSLEAHAGSPSLKTPDGPVPGPGPQGAAPEPLGASVQRDSAQGRPCPPPQAPANQPEGASSAAPGSPVPAPPTKASALPVEQGPAEPIPPGVASGGLRPDALGPTTAHHGPRHPPKPPRSKATERPGQEPEGPGATPAGERDDQSPDSVPERPRPADRRLCLPCVDASPLPGRTACPSLQEATRLIQEEFAFDGYLDNGLEALIMGEYIFALKDLTFATFCGAISEKFCDLYWDEKLLQNLFKVVNGQASPSPSTAEEAGSQLEGSQSPRSPSSKRPSLHRLGKEKPAMARTSSRAPCSPTSVSDVDSDALSRGNFEVGFRPQRSVKAERAQQPEAGEDRRPAGGASDVEAVTRLARSKGVGPALSPGPAGFQSCSPGWCSAFYEADCFGADVHNYVKDLGRQQADGALPDAQSPELEQQLMMEKRNYRKTLKFYQKLLQKEKRNKGSDVKTMLSKLKGQLEEMKSRVQFLSLVKKYLQVMYAERWGLEPCTLPVIVNIAAAPCDTLDFSPLDESSSLIFYNVNKHPGGRQKARILQAGTPLGLMAYLYSSDAFLEGYVQQFLYTFRYFCTPHDFLHFLLDRINSTLTRAHQDPTSTFTKIYRRSLCVLQAWVEDCYAVDFPRNSGLLGKLEDFISSKILPLDGSAKHLLGLLEVGMDRRAEGNPRGTDLENPREAEEDARPFNALCKRLSEDGISRKSFPWRLPRGNGLVLPPHKERPYTIAAALPKPCFLEDFYGPCAKTSEKGPYFLTEYSTHQLFSQLTLLQQELFQKCHPVHFLNSRALGVMDKSTAIPKASSSESLSAKTCSLFLPNYVQDKYLLQLLRNADDVSTWVAAEIVTSHTSKLQVNLLSKFLLIAKSCYEQRNFATAMQILSGLEHLAVRQSPAWRILPAKIAEVMEELKAVEVFLKSDSLCLMEGRRFRAQPTLPSAHLLAMHIQQLETGGFTMTNGAHRWSKLRNIAKVVSQVHAFQENPYTFSPDPKLQSYLKQRIARFSGADISTLAADSRANFHQVSSEKHSRKIQDKLRRMKATFQ

SEQ ID NO: 7594 - protein, 1141 aa, Homo Sapiens
MRSVAHAAIFQSLCITPDTLAFNTSGNVCFMEQLSDDPEGAFVPPEFDVTGNTFEAHIYSLGATLKAALEYVAEPTLEPRLSQDLEALLSRMQAEDPGDRPDLESIIALCEEKLQLTSSCRVCRSLSAVGRRVLSIESFGALQDVSESSWRERPAPGNAGPRRPPGDPSTDPEVLPTPEGPESETSRGPRASPTKALLSTPVRNGESHSREGLAGLVLDAERTLGELDRDALRRSRLRKVQTFPRLLSDSPEATLCLPLTRGKSQLPISELFSPDPRKAFLDRKNGLSSFQAQPKCRLWPEQEPEHQLGRVPCAGRSTDRGPGVPGSPGQPETSHPSQGPAEAPADPRDASGEAQTPRDDERIPEGARQLESAAAEQWVSLQDLLSQLGRPFREYELWALCLACLRALQTRPEHPAYLCLDSVLVAEDGAVLFQPPPANGSYDSFFLAPELAEERLVTEKASVYCVAAVLWTAAKFSVPRNHKLALPRRLKTLLLDMARRSAPERPSAAEAIKVCGSYLLQRGMDSRKILAHLRASICQVYQEEETISLQNAFSVVELKPSVAPAPEPSPGFLPVNSDTGLVAVPGPVPGQHPCGEEATQLPAAFTSEATHFKPIVLAQNASVARDQPALAQEESEERGGQREGEGEEKLSLEAHAGSPSLKTPDGPVPGPGPQGAAPEPLGASVQRDSAQGRPCPPPQAPANQPEGASSAAPGSPVPAPPTKASALPVEQGPAEPIPPGVASGGLRPDALGPTTAHHGPRHPPKPPRSKATERPGQEPEGPGATPAGERDDQSPDSVPERPRPADRRLCLPCVDASPLPGRTACPSLQEATRLIQEEFAFDGYLDNGLEALIMGEYIFALKDLTFATFCGAISEKFCDLYWDEKLLQNLFKVVNGQASPSPSTAEEAGSQLEGSQSPRSPSSKRPSLHRLGKEKPAMARTSSRAPCSPTSVSDVDSDALSRGNFEVGFRPQRSVKAERAQQPEAGEDRRPAGGASDVEAVTRLARSKGVGPALSPGPAGFQSCSPGWCSAFYEADCFGADVHNYVKDLGRQQADGALPDAQSPELEQQLMMEKRNYRKTLKFYQKLLQKEKRNKGSDVKTMLSKLKGQLEEMKSRVQFLSLVKKYLQASGLRAPLCPVRQ

SEQ ID NO: 7595 - protein, 391 aa, Homo Sapiens
MKLITILFLCSRLLLSLTQESQSEEIDCNDKDLFKAVDAALKKYNSQNQSNNQFVLYRITEATKTVGSDTFYSFKYEIKEGDCPVQSGKTWQDCEYKDAAKAATGECTATVGKRSSTKFSVATQTCQITPAEGPVVTAQYDCLGCVHPISTQSPDLEPILRHGIQYFNNNTQHSSLFMLNEVKRAQRQDTGECTDNAYIDIQLRIASFSQNCDIYPGKDFVQPPTKICVGCPRDIPTNSPELEETLTHTITKLNAENNATFYFKIDNVKKARVQVVAGKKYFIDFVARETTCSKESNEELTESCETKKLGQSLDCNAEVYVVPWEKKIYPTVNCQPLGMISLMKRPPGFSPFRSSRIGEIKEETTSHLRSCEYKGRPPKAGAEPASEREVS

SEQ ID NO: 7596 - protein, 427 aa, Homo Sapiens
MKLITILFLCSRLLLSLTQESQSEEIDCNDKDLFKAVDAALKKYNSQNQSNNQFVLYRITEATKTVGSDTFYSFKYEIKEGDCPVQSGKTWQDCEYKDAAKAATGECTATVGKRSSTKFSVATQTCQITPAEGPVVTAQYDCLGCVHPISTQSPDLEPILRHGIQYFNNNTQHSSLFMLNEVKRAQRQVVAGLNFRITYSIVQTNCSKENFLFLTPDCKSLWNGDTGECTDNAYIDIQLRIASFSQNCDIYPGKDFVQPPTKICVGCPRDIPTNSPELEETLTHTITKLNAENNATFYFKIDNVKKARVQVVAGKKYFIDFVARETTCSKESNEELTESCETKKLGQSLDCNAEVYVVPWEKKIYPTVNCQPLGMISLMKRPPGFSPFRSSRIGEIKEETTSHLRSCEYKGRPPKAGAEPASEREVS

SEQ ID NO: 7597 - protein, 644 aa, Homo Sapiens
MKLITILFLCSRLLLSLTQESQSEEIDCNDKDLFKAVDAALKKYNSQNQSNNQFVLYRITEATKTVGSDTFYSFKYEIKEGDCPVQSGKTWQDCEYKDAAKAATGECTATVGKRSSTKFSVATQTCQITPAEGPVVTAQYDCLGCVHPISTQSPDLEPILRHGIQYFNNNTQHSSLFMLNEVKRAQRQVVAGLNFRITYSIVQTNCSKENFLFLTPDCKSLWNGDTGECTDNAYIDIQLRIASFSQNCDIYPGKDFVQPPTKICVGCPRDIPTNSPELEETLTHTITKLNAENNATFYFKIDNVKKARVQVVAGKKYFIDFVARETTCSKESNEELTESCETKKLGQSLDCNAEVYVVPWEKKIYPTVNCQPLGMISLMKRPPGFSPFRSSRIGEIKEETTVSPPHTSMAPAQDEERDSGKEQGHTRRHDWGHEKQRKHNLGHGHKHERDQGHGHQRGHGLGHGHEQQHGLGHGHKFKLDDDLEHQGGHVLDHGHKHKHGHGHGKHKNKGKKNGKHNGWKTEHLASSSEDSTTPSAQTQEKTEGPTPIPSLAKPGVTVTFSDFQDSDLIATMMPPISPAPIQSDDDWIPDIQIDPNGLSFNPISDFPDTTSPKCPGRPWKSVSEINPTTQMKESYYFDLTDGLS

SEQ ID NO: 7598 - protein, 427 aa, Homo Sapiens; identical to SEQ ID NO: 7596

SEQ ID NO: 7599 - protein, 644 aa, Homo Sapiens; identical to SEQ ID NO: 7597

SEQ ID NO: 7600 - protein, 458 aa, Homo Sapiens
MLFQEATAFENMTKDWNYLEGSQKDCYRDTMLDSYENTVPQGSFLQLSMMPQRAGNDPPGVSNASEMEMEISNMREKFLMSVTKLVESKSYNSKVFSKEKYFQTIKEVKEAKEKGKKSSRDYRRAAKYDVISVQGTEKLIEATHGERDRIRYYVHKEELFDILHDTHLSIGHGGRTRMLKELQGKYGNVTKEVIVLYLTLCKQCHQKNPVPKRGLAPKPMTFKDIDSTCQVEILDMQSSADGEFKFILYYQDHSTKFIILRPLRTKQAHEVVSVLLDIFTILGTPSVLDSDSGVEFTNQVVHELNELWPDLKIVSGKYHPGQSQGSLEGASRDVKNMISTWMQSNHSCHWAKGLRFMQMVRNQAFDVSLQQSPFEAMFGYKAKFGLYSSNLPRETVATLQTEEELEIAEEQLENSLWIRQEERAEIGADRSDMDDDMDPTPEASEPSTSQGTSGLLCW

SEQ ID NO: 7601 - protein, 410 aa, Homo Sapiens
MMPQRAGNDPPGVSNASEMEMEISNMREKFLMSVTKLVESKSYNSKVFSKEKYFQTIKEVKEAKEKGKKSSRDYRRAAKYDVISVQGTEKLIEATHGERDRIRYYVHKEELFDILHDTHLSIGHGGRTRMLKELQGKYGNVTKEVIVLYLTLCKQCHQKNPVPKRGLAPKPMTFKDIDSTCQVEILDMQSSADGEFKFILYYQDHSTKFIILRPLRTKQAHEVVSVLLDIFTILGTPSVLDSDSGVEFTNQVVHELNELWPDLKIVSGKYHPGQSQGSLEGASRDVKNMISTWMQSNHSCHWAKGLRFMQMVRNQAFDVSLQQSPFEAMFGYKAKFGLYSSNLPRETVATLQTEEELEIAEEQLENSLWIRQEERAEIGADRSDMDDDMDPTPEASEPSTSQGTSGLLCW

SEQ ID NO: 7602 - protein, 492 aa, Homo Sapiens
MPSFLVPSLVSSPVLLKLLFSPGPKTIWSLWQQPMLFQEATAFENMTKDWNYLEGSQKDCYRDTMLDSYENTVPQGSFLQLSMMPQRAGNDPPGVSNASEMEMEISNMREKFLMSVTKLVESKSYNSKVFSKEKYFQTIKEVKEAKEKGKKSSRDYRRAAKYDVISVQGTEKLIEATHGERDRIRYYVHKEELFDILHDTHLSIGHGGRTRMLKELQGKYGNVTKEVIVLYLTLCKQCHQKNPVPKRGLAPKPMTFKDIDSTCQVEILDMQSSADGEFKFILYYQDHSTKFIILRPLRTKQAHEVVSVLLDIFTILGTPSVLDSDSGVEFTNQVVHELNELWPDLKIVSGKYHPGQSQGSLEGASRDVKNMISTWMQSNHSCHWAKGLRFMQMVRNQAFDVSLQQSPFEAMFGYKAKFGLYSSNLPRETVATLQTEEELEIAEEQLENSLWIRQEERAEIGADRSDMDDDMDPTPEASEPSTSQGTSGLLCW

SEQ ID NO: 7603 - protein, 492 aa, Homo Sapiens; identical to SEQ ID NO: 7602

SEQ ID NO: 7604 - protein, 462 aa, Homo Sapiens
MGTQALQGFLFLLFLPLLQPRGASAGSLHSPGLSECFQVNGADYRGHQNRTGPRGAGRPCLFWDQTQQHSYSSASDPHGRWGLGAHNFCRNPDGDVQPWCYVAETEEGIYWRYCDIPSCHMPGYLGCFVDSGAPPALSGPSGTSTKLTVQVCLRFCRMKGYQLAGVEAGYACFCGSESDLARGRLAPATDCDQICFGHPGQLCGGDGRLGVYEVSVGSCQGNWTAPQGVIYSPDFPDEYGPDRNCSWALGPPGAALELTFRLFELADPRDRLELRDAASGSLLRAFDGARPPPSGPLRLGTAALLLTFRSDARGHAQGFALTYRGLQDAAEDPEAPEGSAQTPAAPLDGANVSCSPRPGAPPAAIGARVFSTVTAVSVLLLLLLGLLRPLRRRSCLLAPGKGPPALGASRGPRRSWAVWYQQPRGVALPCSPGDPQAEGSAAGYRPLSASSQSSLRSLISAL

SEQ ID NO: 7605 - protein, 420 aa, Homo Sapiens
MGTQALQGFLFLLFLPLLQPRGASAGSLHSPGLSECFQVNGADYRGHQNRTGPRGAGRPCLFWDQTQQHSYSSASDPHGRWGLGAHNFCRNPDGDVQPWCYVAETEEGIYWRYCDIPSCHMPGYLGCFVDSGAPPALSGPSGTSTKLTVQVCLRFCRMKGYQLAGVEAGYACFCGSESDLARGRLAPATDCDQICFGHPGQLCGGDGRLGVYEVSVGSCQGNWTAPQGVIYSPDFPDEYGPDRNCSWALGPPGAALELTFRLFELADPRDRLELRDAASGSLLRAFDGARPPPSGPLRLGTAALLLTFRSDARGHAQGFALTYRGLQDAAEDPEAPEGSAQTPAAPLDGANVSCSPRPGAPPAAIGGAVCWLREKGPRRWGLPGAPGEAGLCGTNSPEGWPCPAPPGTPRLRVLPRATGL

SEQ ID NO: 7606 - protein, 399 aa, Homo Sapiens
MGTQALQGFLFLLFLPLLQPRGASAGSLHSPGLSECFQVNGADYRGHQNRTGPRGAGRPCLFWDQTQQHSYSSASDPHGRWGLGAHNFCRNPDGDVQPWCYVAETEEGIYWRYCDIPSCHMPGYLGCFVDSGAPPALSGPSGTSTKLTVQVCLRFCRMKGYQLAGVEAGYACFCGSESDLARGRLAPATDCDQICFGHPGQLCGGDGRLGVYEVSVGSCQGNWTAPQGVIYSPDFPDEYGPDRNCSWALGPPGAALELTFRLFELADPRDRLELRDAASGSLLRAFDGARPPPSGPLRLGTAALLLTFRSDARGHAQGFALTYRGLQDAAEDPEAPEGSAQTPAAPLDGANVSCSPRPGAPPAAIGGEAGARDGSESGSRPLAPILTAAVCPQPGSSRR

SEQ ID NO: 7607 - protein, 424 aa, Homo Sapiens
MGTQALQGFLFLLFLPLLQPRGASAGSLHSPGLSECFQVNGADYRGHQNRTGPRGAGRPCLFWDQTQQHSYSSASDPHGRWGLGAHNFCRNPDGDVQPWCYVAETEEGIYWRYCDIPSCHMPGYLGCFVDSGAPPALSGPSGTSTKLTVQVCLRFCRMKGYQLAGVEAGYACFCGSESDLARGRLAPATDCDQICFGHPGQLCGGDGRLGVYEVSVGSCQGNWTAPQGVIYSPDFPDEYGPDRNCSWALGPPGAALELTFRLFELADPRDRLELRDAASGSLLRAFDGARPPPSGPLRLGTAALLLTFRSDARGHAQGFALTYRGLQDAAEDPEAPEGSAQTPAAPLDGANVSCSPRPGAPPAAIGARVFSTVTAVSVLLLLLLGLLRPLRRRCGALGQGLRADRWWGAGAPEGNRARKELLGS

SEQ ID NO: 7608 - protein, 381 aa, Homo Sapiens
MGTQALQGFLFLLFLPLLQPRGASAGSLHSPGLSECFQVNGADYRGHQNRTGPRGAGRPCLFWDQTQQHSYSSASDPHGRWGLGAHNFCRNPDGDVQPWCYVAETEEGIYWRYCDIPSCHMPGYLGCFVDSGAPPALSGPSGTSTKLTVQVCLRFCRMKGYQLCGGDGRLGVYEVSVGSCQGNWTAPQGVIYSPDFPDEYGPDRNCSWALGPPGAALELTFRLFELADPRDRLELRDAASGSLLRAFDGARPPPSGPLRLGTAALLLTFRSDARGHAQGFALTYRGLQDAAEDPEAPEGSAQTPAAPLDGANVSCSPRPGAPPAAIGGAVCWLREKGPRRWGLPGAPGEAGLCGTNSPEGWPCPAPPGTPRLRVLPRATGL

SEQ ID NO: 7609 - protein, 423 aa, Homo Sapiens
MGTQALQGFLFLLFLPLLQPRGASAGSLHSPGLSECFQVNGADYRGHQNRTGPRGAGRPCLFWDQTQQHSYSSASDPHGRWGLGAHNFCRNPDGDVQPWCYVAETEEGIYWRYCDIPSCHMPGYLGCFVDSGAPPALSGPSGTSTKLTVQVCLRFCRMKGYQLCGGDGRLGVYEVSVGSCQGNWTAPQGVIYSPDFPDEYGPDRNCSWALGPPGAALELTFRLFELADPRDRLELRDAASGSLLRAFDGARPPPSGPLRLGTAALLLTFRSDARGHAQGFALTYRGLQDAAEDPEAPEGSAQTPAAPLDGANVSCSPRPGAPPAAIGARVFSTVTAVSVLLLLLLGLLRPLRRRSCLLAPGKGPPALGASRGPRRSWAVWYQQPRGVALPCSPGDPQAEGSAAGYRPLSASSQSSLRSLISAL

SEQ ID NO: 7610 - protein, 85 aa, Homo Sapiens
MKIPVLPAVVLLSLLVLHSAQGATLGGPEEESTIENYASRPEAFKADEFLNWHALFESIKRKLPFLNWDAFPKLKGLRSATPDAQ

SEQ ID NO: 7611 - protein, 99 aa, Homo Sapiens
MKIPVLPAVVLLSLLVLHSAQGATLGGPEEESTIENYASRPEAFNTPFLNIDKLRSAFKADEFLNWHALFESIKRKLPFLNWDAFPKLKGLRSATPDAQ

SEQ ID NO: 7612 - protein, 153 aa, Homo Sapiens
EEKGGASLSPQYVSYNQSSYTQWDLQPDTDYEIHLFKERMFRHQMAVKTNGTVKDKEDTQVDSEARPMKDETFGEYSDNEEKAFGSSQPSLNGDIKPLGSDDSLADYGGSVDVQFNEDGSFIGQYSGKKEKEAAGGNDSSGATSPINPAVALE

SEQ ID NO: 7613 - protein, 90 aa, Homo Sapiens
MVVALRYVWPLLLCSPCLLIQIPEELMEPPVITEQSPRRLVVFPTDDISLKCEASGKPEVQFRWTRDGVHFKPKEELGVTVYQSPHSGSF

SEQ ID NO: 7614 - protein, 128 aa, Homo Sapiens
MVVALRYVWPLLLCSPCLLIQIPEELMEPPVITEQSPRRLVVFPTDDISLKCEASGKPEVQFRWTRDGVHFKPKEELGVTVYQSPHSGSFTITGNNSNFAQRFQGIYRCFASNKLGTAMSHEIRLMAE

SEQ ID NO: 7615 - protein, 1248 aa, Homo Sapiens
MVVALRYVWPLLLCSPCLLIQIPEELMEPPVITEQSPRRLVVFPTDDISLKCEASGKPEVQFRWTRDGVHFKPKEELGVTVYQSPHSGSFTITGNNSNFAQRFQGIYRCFASNKLGTAMSHEIRLMAEGAPKWPKETVKPVEVEEGESVVLPCNPPPSAEPLRIYWMNSKILHIKQDERVTMGQNGNLYFANVLTSDNHSDYICHAHFPGTRTIIQKEPIDLRVKATNSMIDRKPRLLFPTNSSSHLVALQGQPLVLECIAEGFPTPTIKWLRPSGPMPADRVTYQNHNKTLQLLKVGEEDDGEYRCLAENSLGSARHAYYVTVEAAPYWLHKPQSHLYGPGETARLDCQVQGRPQPEVTWRINGIPVEELAKDQKYRIQRGALILSNVQPSDTMVTQCEARNRHGLLLANAYIYVVQLPAKILTADNQTYMAVQGSTAYLLCKAFGAPVPSVQWLDEDGTTVLQDERFFPYANGTLGIRDLQANDTGRYFCLAANDQNNVTIMANLKVKDATQITQGPRSTIEKKGSRVTFTCQASFDPSLQPSITWRGDGRDLQELGDSDKYFIEDGRLVIHSLDYSDQGNYSCVASTELDVVESRAQLLVVGSPGPVPRLVLSDLHLLTQSQVRVSWSPAEDHNAPIEKYDIEFEDKEMAPEKWYSLGKVPGNQTSTTLKLSPYVHYTFRVTAINKYGPGEPSPVSETVVTPEAAPEKNPVDVKGEGNETTNMVITWKPLRWMDWNAPQVQYRVQWRPQGTRGPWQEQIVSDPFLVVSNTSTFVPYEIKVQAVNSQGKGPEPQVTIGYSGEDYPQAIPELEGIEILNSSAVLVKWRPVDLAQVKGHLRGYNVTYWREGSQRKHSKRHIHKDHVVVPANTTSVILSGLRPYSSYHLEVQAFNGRGSGPASEFTFSTPEGVPGHPEALHLECQSNTSLLLRWQPPLSHNGVLTGYVLSYHPLDEGGKGQLSFNLRDPELRTHNLTDLSPHLRYRFQLQATTKEGPGEAIVREGGTMALSGISDFGNISATAGENYSVVSWVPKEGQCNFRFHILFKALGEEKGGASLSPQYVSYNQSSYTQWDLQPDTDYEIHLFKERMFRHQMAVKTNGTGRVRLPPAGFATEGWFIGFVSAIILLLLVLLILCFIKRSKGGKYSVKDKEDTQVDSEARPMKDETFGEYSDNEEKAFGSSQPSLNGDIKPLGSDDSLADYGGSVDVQFNEDGSFIGQYSGKKEKEAAGGNDSSGATSPINPAVALE

SEQ ID NO: 7616 - protein, 1248 aa, Homo Sapiens; identical to SEQ ID NO: 7615

SEQ ID NO: 7617 - protein, 84 aa, Homo Sapiens
MVVALRYVWPLLLCSPCLLIQIPEEYEGHHVMEPPVITEQSPRRLVVFPTDDISLKCEASGKPEVQFRWTRDGVHFKPKEELGV

SEQ ID NO: 7618 - protein, 151 aa, Homo Sapiens
MVVALRYVWPLLLCSPCLLIQIPEEYEGHHVMEPPVITEQSPRRLVVFPTDDISLKCEASGKPEVQFRWTRDGVHFKPKEELGVTVYQSPHSGSFTITGNNSNFAQRFQGIYRCFASNKLGTAMSHEIRLMAEGAPKWPKETVKPVEVEEG

SEQ ID NO: 7619 - protein, 1253 aa, Homo Sapiens
MVVALRYVWPLLLCSPCLLIQIPEEYEGHHVMEPPVITEQSPRRLVVFPTDDISLKCEASGKPEVQFRWTRDGVHFKPKEELGVTVYQSPHSGSFTITGNNSNFAQRFQGIYRCFASNKLGTAMSHEIRLMAEGAPKWPKETVKPVEVEEGESVVLPCNPPPSAEPLRIYWMNSKILHIKQDERVTMGQNGNLYFANVLTSDNHSDYICHAHFPGTRTIIQKEPIDLRVKATNSMIDRKPRLLFPTNSSSHLVALQGQPLVLECIAEGFPTPTIKWLRPSGPMPADRVTYQNHNKTLQLLKVGEEDDGEYRCLAENSLGSARHAYYVTVEAAPYWLHKPQSHLYGPGETARLDCQVQGRPQPEVTWRINGIPVEELAKDQKYRIQRGALILSNVQPSDTMVTQCEARNRHGLLLANAYIYVVQLPAKILTADNQTYMAVQGSTAYLLCKAFGAPVPSVQWLDEDGTTVLQDERFFPYANGTLGIRDLQANDTGRYFCLAANDQNNVTIMANLKVKDATQITQGPRSTIEKKGSRVTFTCQASFDPSLQPSITWRGDGRDLQELGDSDKYFIEDGRLVIHSLDYSDQGNYSCVASTELDVVESRAQLLVVGSPGPVPRLVLSDLHLLTQSQVRVSWSPAEDHNAPIEKYDIEFEDKEMAPEKWYSLGKVPGNQTSTTLKLSPYVHYTFRVTAINKYGPGEPSPVSETVVTPEAAPEKNPVDVKGEGNETTNMVITWKPLRWMDWNAPQVQYRVQWRPQGTRGPWQEQIVSDPFLVVSNTSTFVPYEIKVQAVNSQGKGPEPQVTIGYSGEDYPQAIPELEGIEILNSSAVLVKWRPVDLAQVKGHLRGYNVTYWREGSQRKHSKRHIHKDHVVVPANTTSVILSGLRPYSSYHLEVQAFNGRGSGPASEFTFSTPEGVPGHPEALHLECQSNTSLLLRWQPPLSHNGVLTGYVLSYHPLDEGGKGQLSFNLRDPELRTHNLTDLSPHLRYRFQLQATTKEGPGEAIVREGGTMALSGISDFGNISATAGENYSVVSWVPKEGQCNFRFHILFKALGEEKGGASLSPQYVSYNQSSYTQWDLQPDTDYEIHLFKERMFRHQMAVKTNGTGRVRLPPAGFATEGWFIGFVSAIILLLLVLLILCFIKRSKGGKYSVKDKEDTQVDSEARPMKDETFGEYSDNEEKAFGSSQPSLNGDIKPLGSDDSLADYGGSVDVQFNEDGSFIGQYSGKKEKEAAGGNDSSGATSPINPAVALE

SEQ ID NO: 7620 - protein, 1257 aa, Homo Sapiens
MVVALRYVWPLLLCSPCLLIQIPEEYEGHHVMEPPVITEQSPRRLVVFPTDDISLKCEASGKPEVQFRWTRDGVHFKPKEELGVTVYQSPHSGSFTITGNNSNFAQRFQGIYRCFASNKLGTAMSHEIRLMAEGAPKWPKETVKPVEVEEGESVVLPCNPPPSAEPLRIYWMNSKILHIKQDERVTMGQNGNLYFANVLTSDNHSDYICHAHFPGTRTIIQKEPIDLRVKATNSMIDRKPRLLFPTNSSSHLVALQGQPLVLECIAEGFPTPTIKWLRPSGPMPADRVTYQNHNKTLQLLKVGEEDDGEYRCLAENSLGSARHAYYVTVEAAPYWLHKPQSHLYGPGETARLDCQVQGRPQPEVTWRINGIPVEELAKDQKYRIQRGALILSNVQPSDTMVTQCEARNRHGLLLANAYIYVVQLPAKILTADNQTYMAVQGSTAYLLCKAFGAPVPSVQWLDEDGTTVLQDERFFPYANGTLGIRDLQANDTGRYFCLAANDQNNVTIMANLKVKDATQITQGPRSTIEKKGSRVTFTCQASFDPSLQPSITWRGDGRDLQELGDSDKYFIEDGRLVIHSLDYSDQGNYSCVASTELDVVESRAQLLVVGSPGPVPRLVLSDLHLLTQSQVRVSWSPAEDHNAPIEKYDIEFEDKEMAPEKWYSLGKVPGNQTSTTLKLSPYVHYTFRVTAINKYGPGEPSPVSETVVTPEAAPEKNPVDVKGEGNETTNMVITWKPLRWMDWNAPQVQYRVQWRPQGTRGPWQEQIVSDPFLVVSNTSTFVPYEIKVQAVNSQGKGPEPQVTIGYSGEDYPQAIPELEGIEILNSSAVLVKWRPVDLAQVKGHLRGYNVTYWREGSQRKHSKRHIHKDHVVVPANTTSVILSGLRPYSSYHLEVQAFNGRGSGPASEFTFSTPEGVPGHPEALHLECQSNTSLLLRWQPPLSHNGVLTGYVLSYHPLDEGGKGQLSFNLRDPELRTHNLTDLSPHLRYRFQLQATTKEGPGEAIVREGGTMALSGISDFGNISATAGENYSVVSWVPKEGQCNFRFHILFKALGEEKGGASLSPQYVSYNQSSYTQWDLQPDTDYEIHLFKERMFRHQMAVKTNGTGRVRLPPAGFATEGWFIGFVSAIILLLLVLLILCFIKRSKGGKYSVKDKEDTQVDSEARPMKDETFGEYRSLESDNEEKAFGSSQPSLNGDIKPLGSDDSLADYGGSVDVQFNEDGSFIGQYSGKKEKEAAGGNDSSGATSPINPAVALE

SEQ ID NO: 7621 - protein, 190 aa, Homo Sapiens
  misc_feature (1)..(1): Xaa can be any naturally occurring amino acid
XDPSLQPSITWRGDGRDLQELGDSDKYFIEDGRLVIHSLDYSDQGNYSCVASTELDVVESRAQLLVVEYDIEFEDKEMAPEKWYSLGKVPGNQTSTTLKLSPYVHYTFRVTAINKYGPGEPSPVSETVVTPEAAPEKNPVDVKGEGNETTNMVITWKPLRWMDWNAPQVQYRVQWRPQGTRGPWQEQIVS

SEQ ID NO: 7622 - protein, 232 aa, Homo Sapiens
ETPSSEPMEEEEDDDLELFGGYDSFRSYNSSVGSESSSYLEESSEAENEDREAGELPTSPLHLLSPGTPRSLDGSGSEPAVCEMCGIVGTREAFFSKTKRFCSVSCSRSYSSNSKKASILARLQGKPPTKKAKVLHKAAWSAKIGAFLHSQGTGQLADGTPTGQDALVLGFDWGKFLKDHSYKAAPVSCFKHGIGCCFGMKALKMTPAMTSGATWEQWMSTPLAGVPSTARS

SEQ ID NO: 7623 - protein, 705 aa, Homo Sapiens
MEKPRSIEETPSSEPMEEEEDDDLELFGGYDSFRSYNSSVGSESSSYLEESSEAENEDREAGELPTSPLHLLSPGTPRSLDGSGSEPAVCEMCGIVGTREAFFSKTKRFCSVSCSRSYSSNSKKASILARLQGKPPTKKAKVLHKAAWSAKIGAFLHSQGTGQLADGTPTGQDALVLGFDWGKFLKDHSYKAAPVSCFKHVPLYDQWEDVMKGMKVEVLNSDAVLPSRVYWIASVIQTAGYRVLLRYEGFENDASHDFWCNLGTVDVHPIGWCAINSKILVPPRTIHAKFTDWKGYLMKRLVGSRTLPVDFHIKMVESMKYPFRQGMRLEVVDKSQVSRTRMAVVDTVIGGRLRLLYEDGDSDDDFWCHMWSPLIHPVGWSRRVGHGIKMSERRSDMAHHPTFRKIYCDAVPYLFKKVRAVYTEGGWFEEGMKLEAIDPLNLGNICVATVCKVLLDGYLMICVDGGPSTDGLDWFCYHASSHAIFPATFCQKNDIELTPPKGYEAQTFNWENYLEKTKSKAAPSRLFNMDCPNHGFKVGMKLEAVDLMEPRLICVATVKRVVHRLLSIHFDGWDSEYDQWVDCESPDIYPVGWCELTGYQLQPPVAAEPATPLKAKEATKKKKKQFGKKRKRIPPTKTRPLRQGSKKPLLEDDPQGARKISSEPVPGEIIAVRVKEEHLDVASPDKASSPELPVSVENIKQETDD

SEQ ID NO: 7624 - protein, 614 aa, Homo Sapiens
MEKPRSIEETPSSEPMEEEEDDDLELFGGYDSFRSYNSSVGSESSSYLEESSEAENEDREAGELPTSPLHLLSPGTPRSLDGSGSEPAVCEMCGIVGTREAFFSKTKRFCSVSCSRSYSSNSKKASILARLQGKPPTKKAKVLHKAAWSAKIGAFLHSQGTGQLADGTPTGQDALVLGFDWGKFLKDHSYKAAPVSCFKHVPLYDQWEDVMKGMKVEVLNSDAVLPSRVYWIASVIQTAGYRVLLRYEGFENDASHDFWCNLGTVDVHPIGWCAINSKILVPPRTIHAKFTDWKGYLMKRLVGSRTLPVDFHIKMVESMKYPFRQGMRLEVVDKSQVSRTRMAVVDTVIGGRLRLLYEDGDSDDDFWCHMWSPLIHPVGWSRRVGHGIKMSERRSDMAHHPTFRKIYCDAVPYLFKKVRAVYTEGGWFEEGMKLEAIDPLNLGNICVATVCKVLLDGYLMICVDGGPSTDGLDWFCYHASSHAIFPATFCQKNDIELTPPKGYEAQTFNWENYLEKTKSKAAPSRLFNMDCPNHGFKVGMKLEAVDLMEPRLICVATVKRVVHRLLSIHFDGWDSEYDQWVDCESPDIYPVGWCELTGYQLQPPVAAGKLPRSL

SEQ ID NO: 7625 - protein, 40 aa, Homo Sapiens
MEKPRSIERWGVAVLPRLVSNSWVQAIHLPQPPKVLGLQM

SEQ ID NO: 7626 - protein, 288 aa, Homo Sapiens
  misc_feature (1)..(1): Xaa can be any naturally occurring amino acid
XRPHLQNQWRKRKMTTWSCLVAMIVSGVITAVWAVRAAPIWRSQVKQKMRIGKQGNCRPPRCICSALGLLAPWMAVVLSQGKPPTKKAKVLHKAAWSAKIGAFLHSQGTGQLADGTPTGQDALVLGFDWGKFLKDHSYKAAPVSCFKHVPLYDQWEDVMKGMKVEVLNSDAVLPSRVYWIASVIQTAGYRVLLRYEGFENDASHDFWCNLGTVDVHPIGWCAINSKILVPPRTIHAKFTDWKGYLMKRLVGSRTLPVDFHIKVGSEPLTDVPPSALPFFCILHATHWS

SEQ ID NO: 7627 - protein, 127 aa, Homo Sapiens
MKFTTLLFLAAVAGALVYAEDASSDSTGADPAQEAGTSKPNEEISGPAEPASPPETTTTAQETSAAAVQGTAKVTSSRQELNPLKQALAKAGKGMHGGVPGGKQFIENGSEFAQKLLKKFSLLKPWA

SEQ ID NO: 7628 - protein, 138 aa, Homo Sapiens
MKFTTLLFLAAVAGALVYAEDASSDSTGADPAQEAGTSKPNEEISGPAEPASPPETTTTAQETSAAAVQGTAKVTSSRQELNPLKSIVEKSILLTEQALAKAGKGMHGGVPGGKQFIENGSEFAQKLLKKFSLLKPWA

SEQ ID NO: 7629 - protein, 85 aa, Homo Sapiens
PAQEAGTSKPNEEISGPAEPASPPETTTTAQETSAAAVQGTAKVTSSRQELNPLKQALAKAGKGMHGGVPGGKQFIESECIPRWK

SEQ ID NO: 7630 - protein, 126 aa, Homo Sapiens
MRIASISKSLTMVALAKLWEAGKLDLDIPVQHYVPEFPEKEYEGEKVSVTTRLLISHLSGIRHYEKDIKKVKEEKAYKALKMMKENVAFEQEKEGKSNEKNDFTKFKTEQENEAKCRNSKPGKKKN

SEQ ID NO: 7631 - protein, 547 aa, Homo Sapiens
MYRLMSAVTARAAAPGGLASSCGRRGVHQRAGLPPLGHGWVGGLGLGLGLALGVKLAGGLRGAAPAQSPAAPDPEASPLAEPPQEQSLAPWSPQTPAPPCSRCFARAIESSRDLLHRIKDEVGAPGIVVGVSVDGKEVWSEGLGYADVENRVPCKPETVMRIASISKSLTMVALAKLWEAGKLDLDIPVQHYVPEFPEKEYEGEKVSVTTRLLISHLSGIRHYEKDIKKVKEEKAYKALKMMKENVAFEQEKEGKSNEKNDFTKFKTEQENEAKCRNSKPGKKKNDFEQGELYLREKFENSIESLRLFKNDPLFFKPGSQFLYSTFGYTLLAAIVERASGCKYLDYMQKIFHDLDMLTTVQEENEPVIYNRARFYVYNKKKRLVNTPYVDNSYKWAGGGFLSTVGDLLKFGNAMLYGYQVGLFKNSNENLLPGYLKPETMVMMWTPVPNTEMSWDKEGKYAMAWGVVERKQTYGSCRKQRHYASHTGGAVGASSVLLVLPEELDTETINNKVPPRGIIVSIICNMQSVGLNSTALKIALEFDKDRSD

SEQ ID NO: 7632 - protein, 373 aa, Homo Sapiens
MYRLMSAVTARAAAPGGLASSCGRRGVHQRAGLPPLGHGWVGGLGLGLGLALGVKLAGGLRGAAPAQSPAAPDPEASPLAEPPQEQSLAPWSPQTPAPPCSRCFARAIESSRDLLHRIKDEVGAPGIVVGVSVDGKEVWSEGLGYADVENRVPCKPETVMRIASISKSLTMVALAKLWEAGKLDLDIPVQHYVPEFPEKEYEGEKVSVTTRLLISHLSGIRHYEKDIKKVKEEKAYKALKMMKENVAFEQEKEGKSNEKNDFTKFKTEQENEAKCRNSKPGKKKNDFEQGELYLREKFENSIESLRLFKNDPLFFKPGSQFLYSTFGYTLLAAIVERASGCKYLDYMQKIFHDLDMLTTVQEENEPVIYNRAR

SEQ ID NO: 7633 - protein, 525 aa, Homo Sapiens
MWEAQFLGLLFLQPLWVAPVKPLQPGAEVPVVWAQEGAPAQLPCSPTIPLQDLSLLRRAGVTWQHQPDSGPPAAAPGHPLAPGPHPAAPSSWGPRPRRYTVLSVGPGGLRSGRLPLQPRVQLDERGRQRGDFSLWLRPARRADAGEYRAAVHLRDRALSCRLRLRLGQASMTASPPGSLRASDWVILNCSFSRPDRPASVHWFRNRGQGRVPVRESPHHHLAESFLFLPQVSPMDSGPWGCILTYRDGFNVSIMYNLTVLGLEPPTPLTVYAGAGSRVGLPCRLPAGVGTRSFLTAKWTPPGGGPDLLVTGDNGDFTLRLEDVSQAQAGTYTCHIHLQEQQLNATVTLAIITVTPKSFGSPGSLGKLLCEVTPVSGQERFVWSSLDTPSQRSFSGPWLEAQEAQLLSQPWQCQLYQGERLLGAAVYFTELSSPGAQRSGRAPGALPAGHLLLFLILGVLSLLLLVTGAFGFHLWRRQWRPRRFSALEQGIHPPQAQSKIEELEQEPEPEPEPEPEPEPEPEPEQL

SEQ ID NO: 7634 - protein, 360 aa, Homo Sapiens
MWEAQFLGLLFLQPLWVAPVKPLQPGAEVPVVWAQEGAPAQLPCSPTIPLQDLSLLRRAGVTWQHQPDSGPPAAAPGHPLAPGPHPAAPSSWGPRPRRYTVLSVGPGGLRSGRLPLQPRVQLDERGRQRGDFSLWLRPARRADAGEYRAAVHLRDRALSCRLRLRLGQASMTASPPGSLRASDWVILNCSFSRPDRPASVHWFRNRGQGRVPVRESPHHHLAESFLFLPQVSPMDSGPWGCILTYRDGFNVSIMYNLTVLGLEPPTPLTVYAGAGSRVGLPCRLPAGVGTRSFLTAKWTPPGGGPDLLVTGDNGDFTLRLEDVSQAQAGTYTCHIHLQEQQLNATVTLAIITGQPQVGKE

SEQ ID NO: 7635 - protein, 77 aa, Homo Sapiens
MEREMGALPRPSISAEPGTVISPGSHVTFMCRGPVGVQTFRLEREDRAKYKDSYNVFRLGPSESEARFHIDSVSEGN

SEQ ID NO: 7636 - protein, 89 aa, Homo Sapiens
MEREMVLCLAQTIHTQEGALPRPSISAEPGTVISPGSHVTFMCRGPVGVQTFRLEREDRAKYKDSYNVFRLGPSESEARFHIDSVSEGN

SEQ ID NO: 7637 - protein, 152 aa, Homo Sapiens
MSPHLTALLGLVLCLAQTIHTQEGALPRPSISAEPGTVISPGSHVTFMCRGPVGVQTFRLEREDRAKYKDSYNVFRLGPSESEARFHIDSVSEGNAGLYRCLYYKPPGWSEHSDFLELLVKESSGGPDSPDTEPGSSAGTVPGTEASGFDAP

SEQ ID NO: 7638 - protein, 135 aa, Homo Sapiens
MSPHLTALLGLVLCLAQTIHTQEGALPRPSISAEPGTVISPGSHVTFMCRGPVGVQTFRLEREDRAKYKDSYNVFRLGPSESEARFHIDSVSEGNAGLYRCLYYKPPGWSEHSDFLELLVKGTVPGTEASGFDAP

SEQ ID NO: 7639 - protein, 123 aa, Homo Sapiens
MRFFVPLFLVGILFPAILAKQFTKCELSQLLKDIDGYGGIALPELICTMFHTSGYDTQAIVENNESTEYGLFQISNKLWCKSSQVPQSRNICDISCDKFLDDDITDDIMCAKKILDIKGIDYW

SEQ ID NO: 7640 - protein, 142 aa, Homo Sapiens
MRFFVPLFLVGILFPAILAKQFTKCELSQLLKDIDGYGGIALPELICTMFHTSGYDTQAIVENNESTEYGLFQISNKLWCKSSQVPQSRNICDISCDKFLDDDITDDIMCAKKILDIKGIDYWLAHKALCTEKLEQWLCEKL

SEQ ID NO: 7641 - protein, 217 aa, Homo Sapiens
MLIGGNIEVHVNPGDGTGLRKALLHAPTGTCSDGQAHSISLVRNRRIITVQLDENNPVEMKLGTLVESRTINVSNLYVGGIPEGEGTSLLTMRRSFHGCIKNLIFNLELLDFNSAVGMSKSTWTPAGCQKGLSWLPMQRTKLLPEPRAFPVGAASFTISQVQSAKEGLGQRELKWGLAVKVPAKAGAGAGAGAVLKIRAGTGRERVPQATQMTRPNP

SEQ ID NO: 7642 - protein, 3075 aa, Homo Sapiens
MRGGVLLVLLLCVAAQCRQRGLFPAILNLASNAHISTNATCGEKGPEMFCKLVEHVPGRPVRNPQCRICDGNSANPRERHPISHAIDGTNNWWQSPSIQNGREYHWVTITLDLRQVFQVAYVIIKAANAPRPGNWILERSLDGTTFSPWQYYAVSDSECLSRYNITPRRGPPTYRADDEVICTSYYSRLVPLEHGEIHTSLINGRPSADDLSPKLLEFTSARYIRLRLQRIRTLNADLMTLSHREPKELDPIVTRRYYYSIKDISVGGMCICYGHASSCPWDETTKKLQCQCEHNTCGESCNRCCPGYHQQPWRPGTVSSGNTCEACNCHNKAKDCYYDESVAKQKKSLNTAGQFRGGGVCINCLQNTMGINCETCIDGYYRPHKVSPYEDEPCRPCNCDPVGSLSSVCIKDDLHSDLHNGKQPGQCPCKEGYTGEKCDRCQLGYKDYPTCVSCGCNPVGSASDEPCTGPCVCKENVEGKACDRCKPGFYNLKEKNPRGCSECFCFGVSDVCSSLSWPVGQVNSMSGWLVTDLISPRKIPSQQDALGGRHQVSINNTAVMQRLAPKYYWAAPEAYLGNKLTAFGGFLKYTVSYDIPVETVDSNLMSHADVIIKGNGLTLSTQAEGLSLQPYEEYLNVVRLVPENFQDFHSKRQIDRDQLMTVLANVTHLLIRANYNSAKMALYRLESVSLDIASSNAIDLVVAADVEHCECPQGYTGTSCESCLSGYYRVDGILFGGICQPCECHGHAAECNVHGVCIACAHNTTGVHCEQCLPGFYGEPSRGTPGDCQPCACPLTIASNNFSPTCHLNDGDEVVCDWCAPGYSGAWCERCADGYYGNPTVPGESCVPCDCSGNVDPSEAGHCDSVTGECLKCLGNTDGAHCERCADGFYGDAVTAKNCRACECHVKGSHSAVCHLETGLCDCKPNVTGQQCDQCLHGYYGLDSGHGCRPCNCSVAGSVSDGCTDEGQCHCVPGVAGKRCDRCAHGFYAYQDGSCTPCDCPHTQNTCDPETGECVCPPHTQGVKCEECEDGHWGYDAEVGCQACNCSLVGSTHHRCDVVTGHCQCKSKFGGRACDQCSLGYRDFPDCVPCDCDLRGTSGDACNLEQGLCGCVEETGACPCKENVFGPQCNECREGTFALRADNPLGCSPCFCSGLSHLCSELEDYVRTPVTLGSDQPLLRVVSQSNLRGTTEGVYYQAPDFLLDAATVRQHIRAEPFYWRLPQQFQGDQLMAYGGKLKYSVAFYSLDGVGTSNFEPQVLIKGGRIRKQVIYMDAPAPENGVRQEQEVAMRENFWKYFNSVSEKPVTREDFMSVLSDIEYILIKASYGQGLQQSRISDISMEVGRKAEKLHPEEEVASLLENCVCPPGTVGFSCQDCAPGYHRGKLPAGSDRGPRPLVAPCVPCSCNNHSDTCDPNTGKCLNCGDNTAGDHCDVCTSGYYGKVTGSASDCALCACPHSPPASFSPTCVLEGDHDFRCDACLLGYEGKHCERCSSSYYGNPQTPGGSCQKCDCNPHGSVHGDCDRTSGQCVCRLGASGLRCDECEPRHILMETDCVSCDDECVGVLLNDLDEIGDAVLSLNLTGIIPVPYGILSNLENTTKYLQESLLKENMQKDLGKIKLEGVAEETDNLQKKLTRMLASTQKVNRATERIFKESQDLAIAIERLQMSITEIMEKTTLNQTLDEDFLLPNSTLQNMQQNGTSLLEIMQIRDFTQLHQNATLELKAAEDLLSQIQENYQKPLEELEVLKEAASHVLSKHNNELKAAEALVREAEAKMQESNHLLLMVNANLREFSDKKLHVQEEQNLTSELIVQGRGLIDAAAAQTDAVQDALEHLEDHQDKLLLWSAKIRHHIDDLVMHMSQRNAVDLVYRAEDHAAEFQRLADVLYSGLENIRNVSLNATSAAYVHYNIQSLIEESEELARDAHRTVTETSLLSESLVSNGKAAVQRSSRFLKEGNNLSRKLPGIALELSELRNKTNRFQENAVEITRQTNESLLILRAIPKGIRDKGAKTKELATSASQSAVSTLRDVAGLSQELLNTSASLSRVNTTLRETHQLLQDSTMATLLAGRKVKDVEIQANLLFDRLKPLKMLEENLSRNLSEIKLLISQARKQAASIKVAVSADRDCIRAYQPQISSTNYNTLTLNVKTQEPDNLLFYLGSSTASDFLAVEMRRGRVAFLWDLGSGSTRLEFPDFPIDDNRWHSIHVARFGNIGSLSVKEMSSNQKSPTKTSKSPGTANVLDVNNSTLMFVGGLGGQIKKSPAVKVTHFKGCLGEAFLNGKSIGLWNYIEREGKCRGCFGSSQNEDPSFHFDGSGYSVVEKSLPATVTQIIMLFNTFSPNGLLLYLGSYGTKDFLSIELFRGRVKVMTDLGSGPITLLTDRRYNNGTWYKIAFQRNRKQGVLAVIDAYNTSNKETKQGETPGASSDLNRLDKDPIYVGGLPRSRVVRRGVTTKSFVGCIKNLEISRSTFDLLRNSYGVRKGCLLEPIRSVSFLKGGYIELPPKSLSPESEWLVTFATTNSSGIILAALGGDVEKRGDREEAHVPFFSVMLIGGNIEVHVNPGDGTGLRKALLHAPTGTCSDGQAHSISLVRNRRIITVQLDENNPVEMKLGTLVESRTINVSNLYVGGIPEGEGTSLLTMRRSFHGCIKNLIFNLELLDFNSAVGHEQVDLDTCWLSERPKLAPDAEDSKLLPEPRAFPEQCVVDAALEYVPGAHQFGLTQNSHFILPFNQSAVRKKLSVELSIRTFASSGLIYYMAHQNQADYAVLQLHGGRLHFMFDLGKGRTKVSHPALLSDGKWHTVKTDYVKRKGFITVDGRESPMVTVVGDGTMLDVEGLFYLGGLPSQYQARKIGNITHSIPACIGDVTVNSKQLDKDSPVSAFTVNRCYAVAQEGTYFDGSGYAALVKEGYKVQSDVNITLEFRTSSQNGVLLGISTAKVDAIGLELVDGKVLFHVNNGAGRITAAYEPKTATVLCDGKWHTLQANKSKHRITLIVDGNAVGAESPHTQSTSVDTNNPIYVGGYPAGVKQKCLRSQTSFRGCLRKLALIKSPQVQSFDFSRAFELHGVFLHSCPGTES

SEQ ID NO: 7643 - protein, 3122 aa, Homo Sapiens
MPGAAGVLLLLLLSGGLGGVQAQRPQQQRQSQAHQQRGLFPAVLNLASNALITTNATCGEKGPEMYCKLVEHVPGQPVRNPQCRICNQNSSNPNQRHPITNAIDGKNTWWQSPSIKNGIEYHYVTITLDLQQVFQIAYVIVKAANSPRPGNWILERSLDDVEYKPWQYHAVTDTECLTLYNIYPRTGPPSYAKDDEVICTSFYSKIHPLENGEIHISLINGRPSADDPSPELLEFTSARYIRLRFQRIRTLNADLMMFAHKDPREIDPIVTRRYYYSVKDISVGGMCICYGHARACPLDPATNKSRCECEHNTCGDSCDQCCPGFHQKPWRAGTFLTKTECEACNCHGKAEECYYDENVARRNLSLNIRGKYIGGGVCINCTQNTAGINCETCTDGFFRPKGVSPNYPRPCQPCHCDPIGSLNEVCVKDEKHARRGLAPGSCHCKTGFGGVSCDRCARGYTGYPDCKACNCSGLGSKNEDPCFGPCICKENVEGGDCSRCKSGFFNLQEDNWKGCDECFCSGVSNRCQSSYWTYGKIQDMSGWYLTDLPGRIRVAPQQDDLDSPQQISISNAEARQALPHSYYWSAPAPYLGNKLPAVGGQLTFTISYDLEEEEEDTERVLQLMIILEGNDLSISTAQDEVYLHPSEEHTNVLLLKEESFTIHGTHFPVRRKEFMTVLANLKRVLLQITYSFGMDAIFRLSSVNLESAVSYPTDGSIAAAVEVCQCPPGYTGSSCESCWPRHRRVNGTIFGGICEPCQCFGHAESCDDVTGECLNCKDHTGGPYCDKCLPGFYGEPTKGTSEDCQPCACPLNIPSNNFSPTCHLDRSLGLICDGCPVGYTGPRCERCAEGYFGQPSVPGGSCQPCQCNDNLDFSIPGSCDSLSGSCLICKPGTTGRYCELCADGYFGDAVDAKNCQPCRCNAGGSFSEVCHSQTGQCECRANVQGQRCDKCKAGTFGLQSARGCVPCNCNSFGSKSFDCEESGQCWCQPGVTGKKCDRCAHGYFNFQEGGCTACECSHLGNNCDPKTGRCICPPNTIGEKCSKCAPNTWGHSITTGCKACNCSTVGSLDFQCNVNTGQCNCHPKFSGAKCTECSRGHWNYPRCNLCDCFLPGTDATTCDSETKKCSCSDQTGQCTCKVNVEGIHCDRCRPGKFGLDAKNPLGCSSCYCFGTTTQCSEAKGLIRTWVTLKAEQTILPLVDEALQHTTTKGIVFQHPEIVAHMDLMREDLHLEPFYWKLPEQFEGKKLMAYGGKLKYAIYFEAREETGFSTYNPQVIIRGGTPTHARIIVRHMAAPLIGQLTRHEIEMTEKEWKYYGDDPRVHRTVTREDFLDILYDIHYILIKATYGNFMRQSRISEISMEVAEQGRGTTMTPPADLIEKCDCPLGYSGLSCEACLPGFYRLRSQPGGRTPGPTLGTCVPCQCNGHSSLCDPETSICQNCQHHTAGDFCERCALGYYGIVKGLPNDCQQCACPLISSSNNFSPSCVAEGLDDYRCTACPRGYEGQYCERCAPGYTGSPGNPGGSCQECECDPYGSLPVPCDPVTGFCTCRPGATGRKCDGCKHWHAREGWECVFCGDECTGLLLGDLARLEQMVMSINLTGPLPAPYKMLYGLENMTQELKHLLSPQRAPERLIQLAEGNLNTLVTEMNELLTRATKVTADGEQTGQDAERTNTRAKSLGEFIKELARDAEAVNEKAIKLNETLGTRDEAFERNLEGLQKEIDQMIKELRRKNLETQKEIAEDELVAAEALLKKVKKLFGESRGENEEMEKDLREKLADYKNKVDDAWDLLREATDKIREANRLFAVNQKNMTALEKKKEAVESGKRQIENTLKEGNDILDEANRLADEINSIIDYVEDIQTKLPPMSEELNDKIDDLSQEIKDRKLAEKVSQAESHAAQLNDSSAVLDGILDEAKNISFNATAAFKAYSNIKDYIDEAEKVAKEAKDLAHEATKLATGPRGLLKEDAKGCLQKSFRILNEAKKLANDVKENEDHLNGLKTRIENADARNGDLLRTLNDTLGKLSAIPNDTAAKLQAVKDKARQANDTAKDVLAQITELHQNLDGLKKNYNKLADSVAKTNAVVKDPSKNKIIADADATVKNLEQEADRLIDKLKPIKELEDNLKKNISEIKELINQARKQANSIKVSVSSGGDCIRTYKPEIKKGSYNNIVVNVKTAVADNLLFYLGSAKFIDFLAIEMRKGKVSFLWDVGSGVGRVEYPDLTIDDSYWYRIVASRTGRNGTISVRALDGPKASIVPSTHHSTSPPGYTILDVDANAMLFVGGLTGKLKKADAVRVITFTGCMGETYFDNKPIGLWNFREKEGDCKGCTVSPQVEDSEGTIQFDGEGYALVSRPIRWYPNISTVMFKFRTFSSSALLMYLATRDLRDFMSVELTDGHIKVSYDLGSGMASVVSNQNHNDGKWKSFTLSRIQKQANISIVDIDTNQEENIATSSSGNNFGLDLKADDKIYFGGLPTLRNLSMKARPEVNLKKYSGCLKDIEISRTPYNILSSPDYVGVTKGCSLENVYTVSFPKPGFVELSPVPIDVGTEINLSFSTKNESGIILLGSGGTPAPPRRKRRQTGQAYYAILLNRGRLEVHLSTGARTMRKIVIRPEPNLFHDGREHSVHVERTRGIFTVQVDENRRYMQNLTVEQPIEVKKLFVGGAPPEFQPSPLRNIPPFEGCIWNLVINSVPMDFARPVSFKNADIGRCAHQKLREDEDGAAPAEIVIQPEPVPTPAFPTPTPVLTHGPCAAESEPALLIGSKQFGLSRNSHIAIAFDDTKVKNRLTIELEVRTEAESGLLFYMARINHADFATVQLRNGLPYFSYDLGSGDTHTMIPTKINDGQWHKIKIMRSKQEGILYVDGASNRTISPKKADILDVVGMLYVGGLPINYTTRRIGPVTYSIDGCVRNLHMAEAPADLEQPTSSFHVGTCFANAQRGTYFDGTGFAKAVGGFKVGLDLLVEFEFRTTTTTGVLLGISSQKMDGMGIEMIDEKLMFHVDNGAGRFTAVYDAGVPGHLCDGQWHKVTANKIKHRIELTVDGNQVEAQSPNPASTSADTNDPVFVGGFPDDLKQFGLTTSIPFRGCIRSLKLTKGTGKPLEVNFAKALELRGVQPVSCPAN

SEQ ID NO: 7644 - protein, 3121 aa, Homo Sapiens
MPGAAGVLLLLLLSGGLGGVQAQRPQQQRQSQAHQQRGLFPAVLNLASNALITTNATCGEKGPEMYCKLVEHVPGQPVRNPQCRICNQNSSNPNQRHPITNAIDGKNTWWQSPSIKNGIEYHYVTITLDLQQVFQIAYVIVKAANSPRPGNWILERSLDDVEYKPWQYHAVTDTECLTLYNIYPRTGPPSYAKDDEVICTSFYSKIHPLENGEIHISLINGRPSADDPSPELLEFTSARYIRLRFQRIRTLNADLMMFAHKDPREIDPIVTRRYYYSVKDISVGGMCICYGHARACPLDPATNKSRCECEHNTCGDSCDQCCPGFHQKPWRAGTFLTKTECEACNCHGKAEECYYDENVARRNLSLNIRGKYIGGGVCINCTQNTAGINCETCTDGFFRPKGVSPNYPRPCQPCHCDPIGSLNEVCVKDEKHARRGLAPGSCHCKTGFGGVSCDRCARGYTGYPDCKACNCSGLGSKNEDPCFGPCICKENVEGGDCSRCKSGFFNLQEDNWKGCDECFCSGVSNRCQSSYWTYGKIQDMSGWYLTDLPGRIRVAPQQDDLDSPQQISISNAEARQALPHSYYWSAPAPYLGNKLPAVGGQLTFTISYDLEEEEEDTERVLQLMIILEGNDLSISTAQDEVYLHPSEEHTNVLLLKEESFTIHGTHFPVRRKEFMTVLANLKRVLLQITYSFGMDAIFRLSSVNLESAVSYPTDGSIAAAVEVCQCPPGYTGSSCESCWPRHRRVNGTIFGGICEPCQCFGHAESCDDVTGECLNCKDHTGGPYCDKCLPGFYGEPTKGTSEDCQPCACPLNIPSNNFSPTCHLDRSLGLICDGCPVGYTGPRCERCAEGYFGQPSVPGGSCQPCQCNDNLDFSIPGSCDSLSGSCLICKPGTTGRYCELCADGYFGDAVDAKNCQPCRCNAGGSFSEVCHSQTGQCECRANVQGQRCDKCKAGTFGLQSARGCVPCNCNSFGSKSFDCEESGQCWCQPGVTGKKCDRCAHGYFNFQEGGCTACECSHLGNNCDPKTGRCICPPNTIGEKCSKCAPNTWGHSITTGCKACNCSTVGSLDFQCNVNTGQCNCHPKFSGAKCTECSRGHWNYPRCNLCDCFLPGTDATTCDSETKKCSCSDQTGQCTCKVNVEGIHCDRCRPGKFGLDAKNPLGCSSCYCFGTTTQCSEAKGLIRTWVTLKAEQTILPLVDEALQHTTTKGIVFQHPEIVAHMDLMREDLHLEPFYWKLPEQFEGKKLMAYGGKLKYAIYFEAREETGFSTYNPQVIIRGGTPTHARIIVRHMAAPLIGQLTRHEIEMTEKEWKYYGDDPRVHRTVTREDFLDILYDIHYILIKATYGNFMRQSRISEISMEVAEQGRGTTMTPPADLIEKCDCPLGYSGLSCEACLPGFYRLRSQPGGRTPGPTLGTCVPCQCNGHSSLCDPETSICQNCQHHTAGDFCERCALGYYGIVKGLPNDCQQCACPLISSSNNFSPSCVAEGLDDYRCTACPRGYEGQYCERCAPGYTGSPGNPGGSCQECECDPYGSLPVPCDPVTGFCTCRPGATGRKCDGCKHWHAREGWECVFCGDECTGLLLGDLARLEQMVMSINLTGPLPAPYKMLYGLENMTQELKHLLSPQRAPERLIQLAEGNLNTLVTEMNELLTRATKVTADGEQTGQDAERTNTRAKSLGEFIKELARDAEAVNEKAIKLNETLGTRDEAFERNLEGLQKEIDQMIKELRRKNLETQKEIAEDELVAAEALLKKVKKLFGESRGENEEMEKDLREKLADYKNKVDDAWDLLREATDKIREANRLFAVNQKNMTALEKKKEAVESGKRQIENTLKEGNDILDEANRLADEINSIIDYVEDIQTKLPPMSEELNDKIDDLSQEIKDRKLAEKVSQAESHAAQLNDSSAVLDGILDEAKNISFNATAAFKAYSNIKDYIDEAEKVAKEAKDLAHEATKLATGPRGLLKEDAKGCLQKSFRILNEAKKLANDVKENEDHLNGLKTRIENADARNGDLLRTLNDTLGKLSAIPNDTAAKLQAVKDKARQANDTAKDVLAQITELHQNLDGLKKNYNKLADSVAKTNAVVKDPSKNTVADADATVKNLEQEADRLIDKLKPIKELEDNLKKNISEIKELINQARKQANSIKVSVSSGGDCIRTYKPEIKKGSYNNIVVNVKTAVADNLLFYLGSAKFIDFLAIEMRKGKVSFLWDVGSGVGRVEYPDLTIDDSYWYRIVASRTGRNGTISVRALDGPKASIVPSTHHSTSPPGYTILDVDANAMLFVGGLTGKLKKADAVRVITFTGCMGETYFDNKPIGLWNFREKEGDCKGCTVSPQVEDSEGTIQFDGEGYALVSRPIRWYPNISTVMFKFRTFSSSALLMYLATRDLRDFMSVELTDGHIKVSYDLGSGMASVVSNQNHNDGKWKSFTLSRIQKQANISIVDIDTNQEENIATSSSGNNFGLDLKADDKIYFGGLPTLRNLSMKARPEVNLKKYSGCLKDIEISRTPYNILSSPDYVGVTKGCSLENVYTVSFPKPGFVELSPVPIDVGTEINLSFSTKNESGIILLGSGGTPAPPRRKRRQTGQAYYAILLNRGRLEVHLSTGARTMRKIVIRPEPNLFHDGREHSVHVERTRGIFTVQVDENRRYMQNLTVEQPIEVKKLFVGGAPPEFQPSPLRNIPPFEGCIWNLVINSVPMDFARPVSFKNADIGRCAHQKLREDEDGAAPAEIVIQPEPVPTPAFPTPTPVLTHGPCAAESEPALLIGSKQFGLSRNSHIAIAFDDTKVKNRLTIELEVRTEAESGLLFYMARINHADFATVQLRNGLPYFSYDLGSGDTHTMIPTKINDGQWHKIKIMRSKQEGILYVDGASNRTISPKKADILDVVGMLYVGGLPINYTTRRIGPVTYSIDGCVRNLHMAEAPADLEQPTSSFHVGTCFANAQRGTYFDGTGFAKAVGGFKVGLDLLVEFEFRTTTTTGVLLGISSQKMDGMGIEMIDEKLMFHVDNGAGRFTAVYDAGVPGHLCDGQWHKVTANKIKHRIELTVDGNQVEAQSPNPASTSADTNDPVFVGGFPDDLKQFGLTTSIPFRGCIRSLKLTKGTGKPLEVNFAKALELRGVQPVSCPAN

SEQ ID NO: 7645 - protein, 3118 aa, Homo Sapiens
MPGAAGVLLLLLLSGGLGGVQAQRPQQQRQSQAHQQRGLFPAVLNLASNALITTNATCGEKGPEMYCKLVEHVPGQPVRNPQCRICNQNSSNPNQRHPITNAIDGKNTWWQSPSIKNGIEYHYVTITLDLQQVFQIAYVIVKAANSPRPGNWILERSLDDVEYKPWQYHAVTDTECLTLYNIYPRTGPPSYAKDDEVICTSFYSKIHPLENGEIHISLINGRPSADDPSPELLEFTSARYIRLRFQRIRTLNADLMMFAHKDPREIDPIVTRRYYYSVKDISVGGMCICYGHARACPLDPATNKSRCECEHNTCGDSCDQCCPGFHQKPWRAGTFLTKTECEACNCHGKAEECYYDENVARRNLSLNIRGKYIGGGVCINCTQNTAGINCETCTDGFFRPKGVSPNYPRPCQPCHCDPIGSLNEVCVKDEKHARRGLAPGSCHCKTGFGGVSCDRCARGYTGYPDCKACNCSGLGSKNEDPCFGPCICKENVEGGDCSRCKSGFFNLQEDNWKGCDECFCSGVSNRCQSSYWTYGKIQDMSGWYLTDLPGRIRVAPQQDDLDSPQQISISNAEARQALPHSYYWSAPAPYLGNKLPAVGGQLTFTISYDLEEEEEDTERVLQLMIILEGNDLSISTAQDEVYLHPSEEHTNVLLLKEESFTIHGTHFPVRRKEFMTVLANLKRVLLQITYSFGMDAIFRLSSVNLESAVSYPTDGSIAAAVEVCQCPPGYTGSSCESCWPRHRRVNGTIFGGICEPCQCFGHAESCDDVTGECLNCKDHTGGPYCDKCLPGFYGEPTKGTSEDCQPCACPLNIPSNNFSPTCHLDRSLGLICDGCPVGYTGPRCERCAEGYFGQPSVPGGSCQPCQCNDNLDFSIPGSCDSLSGSCLICKPGTTGRYCELCADGYFGDAVDAKNCQPCRCNAGGSFSEVCHSQTGQCECRANVQGQRCDKCKAGTFGLQSARGCVPCNCNSFGSKSFDCEESGQCWCQPGVTGKKCDRCAHGYFNFQEGGCTACECSHLGNNCDPKTGRCICPPNTIGEKCSKCAPNTWGHSITTGCKACNCSTVGSLDFQCNVNTGQCNCHPKFSGAKCTECSRGHWNYPRCNLCDCFLPGTDATTCDSETKKCSCSDQTGQCTCKVNVEGIHCDRCRPGKFGLDAKNPLGCSSCYCFGTTTQCSEAKGLIRTWVTLKAEQTILPLVDEALQHTTTKGIVFQHPEIVAHMDLMREDLHLEPFYWKLPEQFEGKKLMAYGGKLKYAIYFEAREETGFSTYNPQVIIRGGTPTHARIIVRHMAAPLIGQLTRHEIEMTEKEWKYYGDDPRVHRTVTREDFLDILYDIHYILIKATYGNFMRQSRISEISMEVAEQGRGTTMTPPADLIEKCDCPLGYSGLSCEACLPGFYRLRSQPGGRTPGPTLGTCVPCQCNGHSSLCDPETSICQNCQHHTAGDFCERCALGYYGIVKGLPNDCQQCACPLISSSNNFSPSCVAEGLDDYRCTACPRGYEGQYCERCAPGYTGSPGNPGGSCQECECDPYGSLPVPCDPVTGFCTCRPGATGRKCDGCKHWHAREGWECVFCGDECTGLLLGDLARLEQMVMSINLTGPLPAPYKMLYGLENMTQELKHLLSPQRAPERLIQLAEGNLNTLVTEMNELLTRATKVTADGEQTGQDAERTNTRAKSLGEFIKELARDAEAVNEKAIKLNETLGTRDEAFERNLEGLQKEIDQMIKELRRKNLETQKEIAEDELVAAEALLKKVKKLFGESRGENEEMEKDLREKLADYKNKVDDAWDLLREATDKIREANRLFAVNQKNMTALEKKKEAVESGKRQIENTLKEGNDILDEANRLADEINSIIDYVEDIQTKLPPMSEELNDKIDDLSQEIKDRKLAEKVSQAESHAAQLNDSSAVLDGILDEAKNISFNATAAFKAYSNIKDYIDEAEKVAKEAKDLAHEATKLATGPRGLLKEDAKGCLQKSFRILNEAKKLANDVKENEDHLNGLKTRIENADARNGDLLRTLNDTLGKLSAIPNDTAAKLQAVKDKARQANDTAKDVLAQITELHQNLDGLKKNYNKLADSVAKTNAVVKDPSKNNAVADADATVKNLEQEADRLIDKLKPIKELEDNLKKNISEIKELINQARKQANSIKVSVSSGGDCIRTYKPEIKKGSYNNIVVNVKTAVADNLLFYLGSAKFIDFLAIEMRKGKVSFLWDVGSGVGRVEYPDLTIDDSYWYRIVASRTGRNGTISVRALDGPKASIVPSTHHSTSPPGYTILDVDANAMLFVGGLTGKLKKADAVRVITFTGCMGETYFDNKPIGLWNFREKEGDCKGCTVSPQVEDSEGTIQFDGEGYALVSRPIRWYPNISTVMFKFRTFSSSALLMYLATRDLRDFMSVELTDGHIKVSYDLGSGMASVVSNQNHNDGKWKSFTLSRIQKQANISIVDIDTNQEENIATSSSGNNFGLDLKADDKIYFGGLPTLRNLRPEVNLKKYSGCLKDIEISRTPYNILSSPDYVGVTKGCSLENVYTVSFPKPGFVELSPVPIDVGTEINLSFSTKNESGIILLGSGGTPAPPRRKRRQTGQAYYAILLNRGRLEVHLSTGARTMRKIVIRPEPNLFHDGREHSVHVERTRGIFTVQVDENRRYMQNLTVEQPIEVKKLFVGGAPPEFQPSPLRNIPPFEGCIWNLVINSVPMDFARPVSFKNADIGRCAHQKLREDEDGAAPAEIVIQPEPVPTPAFPTPTPVLTHGPCAAESEPALLIGSKQFGLSRNSHIAIAFDDTKVKNRLTIELEVRTEAESGLLFYMARINHADFATVQLRNGLPYFSYDLGSGDTHTMIPTKINDGQWHKIKIMRSKQEGILYVDGASNRTISPKKADILDVVGMLYVGGLPINYTTRRIGPVTYSIDGCVRNLHMAEAPADLEQPTSSFHVGTCFANAQRGTYFDGTGFAKAVGGFKVGLDLLVEFEFRTTTTTGVLLGISSQKMDGMGIEMIDEKLMFHVDNGAGRFTAVYDAGVPGHLCDGQWHKVTANKIKHRIELTVDGNQVEAQSPNPASTSADTNDPVFVGGFPDDLKQFGLTTSIPFRGCIRSLKLTKGTGKPLEVNFAKALELRGVQPVSCPAN

SEQ ID NO: 7646 - protein, 184 aa, Homo Sapiens
  misc_feature (1)..(1): Xaa can be any naturally occurring amino acid
XCRCNAGGSFSEVCHSQTGQCECRANVQGQRCDKCKPNMWRDPEKRFCVLCDCDPVGSVSPQCDITGRCVCKSGFVGKQCNLGRQVHQQEEQPRRAQRVLGSPQRWAIGSSSGCPRGAYRAPAPAGTFGLQSARGCVPCNCNSFGSKSFDCEESGQCWCQPGVTGKKCDRCAHGYFNFQEGGCT

SEQ ID NO: 7647 - protein, 94 aa, Homo Sapiens
LVRSASFSRGGQLSFTDLGLPPTDHLQASFGFQTFQPSGILLDHQTWTRNLQVTLEDGYIELSTSDSGGPIFKSPQTYMDGLLHYVSVISDNSG

SEQ ID NO: 7648 - protein, 3333 aa, Homo Sapiens
MAAAARPRGRALGPVLPPTPLLLLVLRVLPACGATARDPGAAAGLSLHPTYFNLAEAARIWATATCGERGPGEGRPQPELYCKLVGGPTAPGSGHTIQGQFCDYCNSEDPRKAHPVTNAIDGSERWWQSPPLSSGTQYNRVNLTLDLGQLFHVAYILIKFANSPRPDLWVLERSVDFGSTYSPWQYFAHSKVDCLKEFGREANMAVTRDDDVLCVTEYSRIVPLENGEVVVSLINGRPGAKNFTFSHTLREFTKATNIRLRFLRTNTLLGHLISKAQRDPTVTRRYYYSIKDISIGGQCVCNGHAEVCNINNPEKLFRCECQHHTCGETCDRCCTGYNQRRWRPAAWEQSHECEACNCHGHASNCYYDPDVERQQASLNTQGIYAGGGVCINCQHNTAGVNCEQCAKGYYRPYGVPVDAPDGCIPCSCDPEHADGCEQGSGRCHCKPNFHGDNCEKCAIGYYNFPFCLRIPIFPVSTPSSEDPVAGDIKGCDCNLEGVLPEICDAHGRCLCRPGVEGPRCDTCRSGFYSFPICQACWCSALGSYQMPCSSVTGQCECRPGVTGQRCDRCLSGAYDFPHCQGSSSACDPAGTINSNLGYCQCKLHVEGPTCSRCKLLYWNLDKENPSGCSECKCHKAGTVSGTGECRQGDGDCHCKSHVGGDSCDTCEDGYFALEKSNYFGCQGCQCDIGGALSSMCSGPSGVCQCREHVVGKVCQRPENNYYFPDLHHMKYEIEDGSTPNGRDLRFGFDPLAFPEFSWRGYAQMTSVQNDVRITLNVGKSSGSLFRVILRYVNPGTEAVSGHITIYPSWGAAQSKEIIFLPSKEPAFVTVPGNGFADPFSITPGIWVACIKAEGVLLDYLVLLPRDYYEASVLQLPVTEPCAYAGPPQENCLLYQHLPVTRFPCTLACEARHFLLDGEPRPVAVRQPTPAHPVMVDLSGREVELHLRLRIPQVGHYVVVVEYSTEAAQLFVVDVNVKSSGSVLAGQVNIYSCNYSVLCRSAVIDHMSRIAMYELLADADIQLKGHMARFLLHQVCIIPIEEFSAEYVRPQVHCIASYGRFVNQSATCVSLAHETPPTALILDVLSGRPFPHLPQQSSPSVDVLPGVTLKAPQNQVTLRGRVPHLGRYVFVIHFYQAAHPTFPAQVSVDGGWPRAGSFHASFCPHVLGCRDQVIAEGQIEFDISEPEVAATVKVPEGKSLVLVRVLVVPAENYDYQILHKKSMDKSLEFITNCGKNSFYLDPQTASRFCKNSARSLVAFYHKGALPCECHPTGATGPHCSPEGGQCPCQPNVIGRQCTRCATGHYGFPRCKPCSCGRRLCEEMTGQCRCPPRTVRPQCEVCETHSFSFHPMAGCEGCNCSRRGTIEAAMPECDRDSGQCRCKPRITGRQCDRCASGFYRFPECVPCNCNRDGTEPGVCDPGTGACLCKENVEGTECNVCREGSFHLDPANLKGCTSCFCFGVNNQCHSSHKRRTKFVDMLGWHLETADRVDIPVSFNPGSNSMVADLQELPATIHSASWVAPTSYLGDKVSSYGGYLTYQAKSFGLPGDMVLLEKKPDVQLTGQHMSIIYEETNTPRPDRLHHGRVHVVEGNFRHASSRAPVSREELMTVLSRLADVRIQGLYFTETQRLTLSEVGLEEASDTGSGRIALAVEICACPPAYAGDSCQGCSPGYYRDHKGLYTGRCVPCNCNGHSNQCQDGSGICVNCQHNTAGEHCERCQEGYYGNAVHGSCRACPCPHTNSFATGCVVNGGDVRCSCKAGYTGTQCERCAPGYFGNPQKFGGSCQPCSCNSNGQLGSCHPLTGDCINQEPKDSSPAEECDDCDSCVMTLLNDLATMGEQLRLVKSQLQGLSASAGLLEQMRHMETQAKDLRNQLLNYRSAISNHGSKIEGLERELTDLNQEFETLQEKAQVNSRKAQTLNNNVNRATQSAKELDVKIKNVIRNVHILLKQISGTDGEGNNVPSGDFSREWAEAQRMMRELRNRNFGKHLREAEADKRESQLLLNRIRTWQKTHQGENNGLANSIRDSLNEYEAKLSDLRARLQEAAAQAKQANGLNQENERALGAIQRQVKEINSLQSDFTKYLTTADSSLLQTNIALQLMEKSQKEYEKLAASLNEARQELSDKVRELSRSAGKTSLVEEAEKHARSLQELAKQLEEIKRNASGDELVRCAVDAATAYENILNAIKAAEDAANRAASASESALQTVIKEDLPRKAKTLSSNSDKLLNEAKMTQKKLKQEVSPALNNLQQTLNIVTVQKEVIDTNLTTLRDGLHGIQRGDIDAMISSAKSMVRKANDITDEVLDGLNPIQTDVERIKDTYGRTQNEDFKKALTDADNSVNKLTNKLPDLWRKIESINQQLLPLGNISDNMDRIRELIQQARDAASKVAVPMRFNGKSGVEVRLPNDLEDLKGYTSLSLFLQRPNSRENGGTENMFVMYLGNKDASRDYIGMAVVDGQLTCVYNLGDREAELQVDQILTKSETKEAVMDRVKFQRIYQFARLNYTKGATSSKPETPGVYDMDGRNSNTLLNLDPENVVFYVGGYPPDFKLPSRLSFPPYKGCIELDDLNENVLSLYNFKKTFNLNTTEVEPCRRRKEESDKNYFEGTGYARVPTQPHAPIPTFGQTIQTTVDRGLLFFAENGDRFISLNIEDGKLMVRYKLNSELPKERGVGDAINNGRDHSIQIKIGKLQKRMWINVDVQNTIIDGEVFDFSTYYLGGIPIAIRERFNISTPAFRGCMKNLKKTSGVVRLNDTVGVTKKCSEDWKLVRSASFSRGGQLSFTDLGLPPTDHLQASFGFQTFQPSGILLDHQTWTRNLQVTLEDGYIELSTSDSGGPIFKSPQTYMDGLLHYVSVISDNSGLRLLIDDQLLRNSKRLKHISSSRQSLRLGGSNFEGCISNVFVQRLSLSPEVLDLTSNSLKRDVSLGGCSLNKPPFLMLLKGSTRFNKTKTFRINQLLQDTPVASPRSVKVWQDACSPLPKTQANHGALQFGDIPTSHLLFKLPQELLKPRSQFAVDMQTTSSRGLVFHTGTKNSFMALYLSKGRLVFALGTDGKKLRIKSKEKCNDGKWHTVVFGHDGEKGRLVVDGLRAREGSLPGNSTISIRAPVYLGSPPSGKPKSLPTNSFVGCLKNFQLDSKPLYTPSSSFGVSSCLGGPLEKGIYFSEEGGHVVLAHSVLLGPEFKLVFSIRPRSLTGILIHIGSQPGKHLCVYLEAGKVTASMDSGAGGTSTSVTPKQSLCDGQWHSVAVTIKQHILHLELDTDSSYTAGQIPFPPASTQEPLHLGGAPANLTTLRIPVWKSFFGCLRNIHVNHIPVPVTEALEVQGPVSLNGCPDQ

SEQ ID NO: 7649 - protein, 3277 aa, Homo Sapiens
MAAAARPRGRALGPVLPPTPLLLLVLRVLPACGATARDPGAAAGLSLHPTYFNLAEAARIWATATCGERGPGEGRPQPELYCKLVGGPTAPGSGHTIQGQFCDYCNSEDPRKAHPVTNAIDGSERWWQSPPLSSGTQYNRVNLTLDLGQLFHVAYILIKFANSPRPDLWVLERSVDFGSTYSPWQYFAHSKVDCLKEFGREANMAVTRDDDVLCVTEYSRIVPLENGEVVVSLINGRPGAKNFTFSHTLREFTKATNIRLRFLRTNTLLGHLISKAQRDPTVTRRYYYSIKDISIGGQCVCNGHAEVCNINNPEKLFRCECQHHTCGETCDRCCTGYNQRRWRPAAWEQSHECEACNCHGHASNCYYDPDVERQQASLNTQGIYAGGGVCINCQHNTAGVNCEQCAKGYYRPYGVPVDAPDGCIPCSCDPEHADGCEQGSGRCHCKPNFHGDNCEKCAIGYYNFPFCLRIPIFPVSTPSSEDPVAGDIKGCDCNLEGVLPEICDAHGRCLCRPGVEGPRCDTCRSGFYSFPICQACWCSALGSYQMPCSSVTGQCECRPGVTGQRCDRCLSGAYDFPHCQGSSSACDPAGTINSNLGYCQCKLHVEGPTCSRCKLLYWNLDKENPSGCSECKCHKAGTVSGTGECRQGDGDCHCKSHVGGDSCDTCEDGYFALEKSNYFGCQGCQCDIGGALSSMCSGPSGVCQCREHVVGKVCQRPENNYYFPDLHHMKYEIEDGSTPNGRDLRFGFDPLAFPEFSWRGYAQMTSVQNDVRITLNVGKSSGSLFRVILRYVNPGTEAVSGHITIYPSWGAAQSKEIIFLPSKEPAFVTVPGNGFADPFSITPGIWVACIKAEGVLLDYLVLLPRDYYEASVLQLPVTEPCAYAGPPQENCLLYQHLPVTRFPCTLACEARHFLLDGEPRPVAVRQPTPAHPVMVDLSGREVELHLRLRIPQVGHYVVVVEYSTEAAQLFVVDVNVKSSGSVLAGQVNIYSCNYSVLCRSAVIDHMSRIAMYELLADADIQLKGHMARFLLHQVCIIPIEEFSAEYVRPQVHCIASYGRFVNQSATCVSLAHETPPTALILDVLSGRPFPHLPQQSSPSVDVLPGVTLKAPQNQVTLRGRVPHLGRYVFVIHFYQAAHPTFPAQVSVDGGWPRAGSFHASFCPHVLGCRDQVIAEGQIEFDISEPEVAATVKVPEGKSLVLVRVLVVPAENYDYQILHKKSMDKSLEFITNCGKNSFYLDPQTASRFCKNSARSLVAFYHKGALPCECHPTGATGPHCSPEGGQCPCQPNVIGRQCTRCATGHYGFPRCKPCSCGRRLCEEMTGQCRCPPRTVRPQCEVCETHSFSFHPMAGCEGCNCSRRGTIEAAMPECDRDSGQCRCKPRITGRQCDRCASGFYRFPECVPCNCNRDGTEPGVCDPGTGACLCKENVEGTECNVCREGSFHLDPANLKGCTSCFCFGVNNQCHSSHKRRTKFVDMLGWHLETADRVDIPVSFNPGSNSMVADLQELPATIHSASWVAPTSYLGDKVSSYGGYLTYQAKSFGLPGDMVLLEKKPDVQLTGQHMSIIYEETNTPRPDRLHHGRVHVVEGNFRHASSRAPVSREELMTVLSRLADVRIQGLYFTETQRLTLSEVGLEEASDTGSGRIALAVEICACPPAYAGDSCQGCSPGYYRDHKGLYTGRCVPCNCNGHSNQCQDGSGICVNCQHNTAGEHCERCQEGYYGNAVHGSCRACPCPHTNSFATGCVVNGGDVRCSCKAGYTGTQCERCAPGYFGNPQKFGGSCQPCSCNSNGQLGSCHPLTGDCINQEPKDSSPAEECDDCDSCVMTLLNDLATMGEQLRLVKSQLQGLSASAGLLEQMRHMETQAKDLRNQLLNYRSAISNHGSKIEGLERELTDLNQEFETLQEKAQVNSRKAQTLNNNVNRATQSAKELDVKIKNVIRNVHMLNRIRTWQKTHQGENNGLANSIRDSLNEYEAKLSDLRARLQEAAAQAKQANGLNQENERALGAIQRQVKEINSLQSDFTKYLTTADSSLLQTNIALQLMEKSQKEYEKLAASLNEARQELSDKVRELSRSAGKTSLVEEAEKHARSLQELAKQLEEIKRNASGDELVRCAVDAATAYENILNAIKAAEDAANRAASASESALQTVIKEDLPRKAKTLSSNSDKLLNEAKMTQKKLKQEVSPALNNLQQTLNIVTVQKEVIDTNLTTLRDGLHGIQRGDIDAMISSAKSMVRKANDITDEVLDGLNPIQTDVERIKDTYGRTQNEDFKKALTDADNSVNKLTNKLPDLWRKIESINQQLLPLGNISDNMDRIRELIQQARDAASKVAVPMRFNGKSGVEVRLPNDLEDLKGYTSLSLFLQRPNSRENGGTENMFVMYLGNKDASRDYIGMAVVDGQLTCVYNLGDREAELQVDQILTKSETKEAVMDRVKFQRIYQFARLNYTKGATSSKPETPGVYDMDGRNSNTLLNLDPENVVFYVGGYPPDFKLPSRLSFPPYKGCIELDDLNENVLSLYNFKKTFNLNTTEVEPCRRRKEESDKNYFEGTGYARVPTQPHAPIPTFGQTIQTTVDRGLLFFAENGDRFISLNIEDGKLMVRYKLNSELPKERGVGDAINNGRDHSIQIKIGKLQKRMWINVDVQNTIIDGEVFDFSTYYLGGIPIAIRERFNISTPAFRGCMKNLKKTSGVVRLNDTVGVTKKCSEDWKLVRSASFSRGGQLSFTDLGLPPTDHLQASFGFQTFQPSGILLDHQTWTRNLQVTLEDGYIELSTSDSGGPIFKSPQTYMDGLLHYVSVISDNSGLRLLIDDQLLRNSKRLKHISSSRQSLRLGGSNFEGCISNVFVQRLSLSPEVLDLTSNSLKRDVSLGGCSLNKPPFLMLLKGSTRFNKTKTFRINQLLQDTPVASPRSVKVWQDACSPLPKTQANHGALQFGDIPTSHLLFKLPQELLKPRSQFAVDMQTTSSRGLVFHTGTKNSFMALYLSKGRLVFALGTDGKKLRIKSKEKCNDGKWHTVVFGHDGEKGRLVVDGLRAREGSLPGNSTISIRAPVYLGSPPSGKPKSLPTNSFVGCLKNFQLDSKPLYTPSSSFGVSSCLGGPLEKGIYFSEEGGHVVLAHSVLLGPEFKLVFSIRPRSLTGILIHIGSQPGKHLCVYLEAGKVTASMDSGAGGTSTSVTPKQSLCDGQWHSVAVTIKQHILHLELDTDSSYTAGQIPFPPASTQEPLHLGGAPANLTTLRIPVWKSFFGCLRNIHVNHIPVPVTEALEVQGPVSLNGCPDQ

SEQ ID NO: 7650 - protein, 576 aa, Homo Sapiens
MAAAARPRGRALGPVLPPTPLLLLVLRVLPACGATARDPGAAAGLSLHPTYFNLAEAARIWATATCGERGPGEGRPQPELYCKLVGGPTAPGSGHTIQGQFCDYCNSEDPRKAHPVTNAIDGSERWWQSPPLSSGTQYNRVNLTLDLGQLFHVAYILIKFANSPRPDLWVLERSVDFGSTYSPWQYFAHSKVDCLKEFGREANMAVTRDDDVLCVTEYSRIVPLENGEVVVSLINGRPGAKNFTFSHTLREFTKATNIRLRFLRTNTLLGHLISKAQRDPTVTRRYYYSIKDISIGGQCVCNGHAEVCNINNPEKLFRCECQHHTCGETCDRCCTGYNQRRWRPAAWEQSHECEACNCHGHASNCYYDPDVERQQASLNTQGIYAGGGVCINCQHNTAGVNCEQCAKGYYRPYGVPVDAPDGCIPCSCDPEHADGCEQGSGRCHCKPNFHGDNCEKCAIGYYNFPFCLRIPIFPVSTPSSEDPVAGDIKGCDCNLEGVLPEICDAHGRCLCRPGVEGPRCDTCRSGFYSFPICQGPSEKVAIYKPESRPSAETEPASTWILDFPASRTGEINFYCL

SEQ ID NO: 7651 - protein, 1724 aa, Homo Sapiens
MPPAVRRSACSMGWLWIFGAALGQCLGYSSQQQRVPFLQPPGQSQLQASYVEFRPSQGCSPGYYRDHKGLYTGRCVPCNCNGHSNQCQDGSGICVNCQHNTAGEHCERCQEGYYGNAVHGSCRACPCPHTNSFATGCVVNGGDVRCSCKAGYTGTQCERCAPGYFGNPQKFGGSCQPCSCNSNGQLGSCHPLTGDCINQEPKDSSPAEECDDCDSCVMTLLNDLATMGEQLRLVKSQLQGLSASAGLLEQMRHMETQAKDLRNQLLNYRSAISNHGSKIEGLERELTDLNQEFETLQEKAQVNSRKAQTLNNNVNRATQSAKELDVKIKNVIRNVHILLKQISGTDGEGNNVPSGDFSREWAEAQRMMRELRNRNFGKHLREAEADKRESQLLLNRIRTWQKTHQGENNGLANSIRDSLNEYEAKLSDLRARLQEAAAQAKQANGLNQENERALGAIQRQVKEINSLQSDFTKYLTTADSSLLQTNIALQLMEKSQKEYEKLAASLNEARQELSDKVRELSRSAGKTSLVEEAEKHARSLQELAKQLEEIKRNASGDELVRCAVDAATAYENILNAIKAAEDAANRAASASESALQTVIKEDLPRKAKTLSSNSDKLLNEAKMTQKKLKQEVSPALNNLQQTLNIVTVQKEVIDTNLTTLRDGLHGIQRGDIDAMISSAKSMVRKANDITDEVLDGLNPIQTDVERIKDTYGRTQNEDFKKALTDADNSVNKLTNKLPDLWRKIESINQQLLPLGNISDNMDRIRELIQQARDAASKVAVPMRFNGKSGVEVRLPNDLEDLKGYTSLSLFLQRPNSRENGGTENMFVMYLGNKDASRDYIGMAVVDGQLTCVYNLGDREAELQVDQILTKSETKEAVMDRVKFQRIYQFARLNYTKGATSSKPETPGVYDMDGRNSNTLLNLDPENVVFYVGGYPPDFKLPSRLSFPPYKGCIELDDLNENVLSLYNFKKTFNLNTTEVEPCRRRKEESDKNYFEGTGYARVPTQPHAPIPTFGQTIQTTVDRGLLFFAENGDRFISLNIEDGKLMVRYKLNSELPKERGVGDAINNGRDHSIQIKIGKLQKRMWINVDVQNTIIDGEVFDFSTYYLGGIPIAIRERFNISTPAFRGCMKNLKKTSGVVRLNDTVGVTKKCSEDWKLVRSASFSRGGQLSFTDLGLPPTDHLQASFGFQTFQPSGILLDHQTWTRNLQVTLEDGYIELSTSDSGGPIFKSPQTYMDGLLHYVSVISDNSGLRLLIDDQLLRNSKRLKHISSSRQSLRLGGSNFEGCISNVFVQRLSLSPEVLDLTSNSLKRDVSLGGCSLNKPPFLMLLKGSTRFNKTKTFRINQLLQDTPVASPRSVKVWQDACSPLPKTQANHGALQFGDIPTSHLLFKLPQELLKPRSQFAVDMQTTSSRGLVFHTGTKNSFMALYLSKGRLVFALGTDGKKLRIKSKEKCNDGKWHTVVFGHDGEKGRLVVDGLRAREGSLPGNSTISIRAPVYLGSPPSGKPKSLPTNSFVGCLKNFQLDSKPLYTPSSSFGVSSCLGGPLEKGIYFSEEGGHVVLAHSVLLGPEFKLVFSIRPRSLTGILIHIGSQPGKHLCVYLEAGKVTASMDSGAGGTSTSVTPKQSLCDGQWHSVAVTIKQHILHLELDTDSSYTAGQIPFPPASTQEPLHLGGAPANLTTLRIPVWKSFFGCLRNIHVNHIPVPVTEALEVQGPVSLNGCPDQ

SEQ ID NO: 7652 - protein, 1668 aa, Homo Sapiens
MPPAVRRSACSMGWLWIFGAALGQCLGYSSQQQRVPFLQPPGQSQLQASYVEFRPSQGCSPGYYRDHKGLYTGRCVPCNCNGHSNQCQDGSGICVNCQHNTAGEHCERCQEGYYGNAVHGSCRACPCPHTNSFATGCVVNGGDVRCSCKAGYTGTQCERCAPGYFGNPQKFGGSCQPCSCNSNGQLGSCHPLTGDCINQEPKDSSPAEECDDCDSCVMTLLNDLATMGEQLRLVKSQLQGLSASAGLLEQMRHMETQAKDLRNQLLNYRSAISNHGSKIEGLERELTDLNQEFETLQEKAQVNSRKAQTLNNNVNRATQSAKELDVKIKNVIRNVHMLNRIRTWQKTHQGENNGLANSIRDSLNEYEAKLSDLRARLQEAAAQAKQANGLNQENERALGAIQRQVKEINSLQSDFTKYLTTADSSLLQTNIALQLMEKSQKEYEKLAASLNEARQELSDKVRELSRSAGKTSLVEEAEKHARSLQELAKQLEEIKRNASGDELVRCAVDAATAYENILNAIKAAEDAANRAASASESALQTVIKEDLPRKAKTLSSNSDKLLNEAKMTQKKLKQEVSPALNNLQQTLNIVTVQKEVIDTNLTTLRDGLHGIQRGDIDAMISSAKSMVRKANDITDEVLDGLNPIQTDVERIKDTYGRTQNEDFKKALTDADNSVNKLTNKLPDLWRKIESINQQLLPLGNISDNMDRIRELIQQARDAASKVAVPMRFNGKSGVEVRLPNDLEDLKGYTSLSLFLQRPNSRENGGTENMFVMYLGNKDASRDYIGMAVVDGQLTCVYNLGDREAELQVDQILTKSETKEAVMDRVKFQRIYQFARLNYTKGATSSKPETPGVYDMDGRNSNTLLNLDPENVVFYVGGYPPDFKLPSRLSFPPYKGCIELDDLNENVLSLYNFKKTFNLNTTEVEPCRRRKEESDKNYFEGTGYARVPTQPHAPIPTFGQTIQTTVDRGLLFFAENGDRFISLNIEDGKLMVRYKLNSELPKERGVGDAINNGRDHSIQIKIGKLQKRMWINVDVQNTIIDGEVFDFSTYYLGGIPIAIRERFNISTPAFRGCMKNLKKTSGVVRLNDTVGVTKKCSEDWKLVRSASFSRGGQLSFTDLGLPPTDHLQASFGFQTFQPSGILLDHQTWTRNLQVTLEDGYIELSTSDSGGPIFKSPQTYMDGLLHYVSVISDNSGLRLLIDDQLLRNSKRLKHISSSRQSLRLGGSNFEGCISNVFVQRLSLSPEVLDLTSNSLKRDVSLGGCSLNKPPFLMLLKGSTRFNKTKTFRINQLLQDTPVASPRSVKVWQDACSPLPKTQANHGALQFGDIPTSHLLFKLPQELLKPRSQFAVDMQTTSSRGLVFHTGTKNSFMALYLSKGRLVFALGTDGKKLRIKSKEKCNDGKWHTVVFGHDGEKGRLVVDGLRAREGSLPGNSTISIRAPVYLGSPPSGKPKSLPTNSFVGCLKNFQLDSKPLYTPSSSFGVSSCLGGPLEKGIYFSEEGGHVVLAHSVLLGPEFKLVFSIRPRSLTGILIHIGSQPGKHLCVYLEAGKVTASMDSGAGGTSTSVTPKQSLCDGQWHSVAVTIKQHILHLELDTDSSYTAGQIPFPPASTQEPLHLGGAPANLTTLRIPVWKSFFGCLRNIHVNHIPVPVTEALEVQGPVSLNGCPDQ

SEQ ID NO: 7653 - protein, 59 aa, Homo Sapiens
  misc_feature (1)..(1): Xaa can be any naturally occurring amino acid
XAGQVNIYSCNYRCDAMNSLLSPQRLCQVPGCIAQGKRLILSNVRGCTPTFATHLQNWG

SEQ ID NO: 7654 - protein, 1147 aa, Homo Sapiens
  misc_feature (1)..(1): Xaa can be any naturally occurring amino acid
XFATGCVVNGGDVRCSCKAGYTGTQCERCAPGYFGNPQKFGGSCQPCSCNSNGQLGSCHPLTGDCINQEPKDSSPAEECDDCDSCVMTLLNDLATMGEQLRLVKSQLQGLSASAGLLEQMRHMETQAKDLRNQLLNYRSAISNHGSKIEGLERELTDLNQEFETLQEKAQVNSRKAQTLNNNVNRATQSAKELDVKIKNVIRNVHILLKQISGTDGEGNNVPSGDFSREWAEAQRMMRELRNRNFGKHLREAEADKRESQLLLNRIRTWQKTHQGENNGLANSIRDSLNEYEAKLSDLRARLQEAAAQAKQANGLNQENERALGAIQRQVKEINSLQSDFTKYLTTADSSLLQTNIALQLMEKSQKEYEKLAASLNEARQELSDKVRELSRSAGKTSLVEEAEKHARSLQELAKQLEEIKRNASGDELVRCAVDAATAYENILNAIKAAEDAANRAASASESALQTVIKEDLPRKAKTLSSNSDKLLNEAKMTQKKLKQEVSPALNNLQQTLNIVTVQKEVIDTNLTTLRDGLHGIQRGDIDAMISSAKSMVRKANDITDEVLDGLNPIQTDVERIKDTYGRTQNEDFKKALTDADNSVNKLTNKLPDLWRKIESINQQLLPLGNISDNMDRIRELIQQARDAASKVAVPMRFNGKSGVEVRLPNDLEDLKGYTSLSLFLQRPNSRENGGTENMFVMYLGNKDASRDYIGMAVVDGQLTCVYNLGDREAELQVDQILTKSETKEAVMDRVKFQRIYQFARLNYTKGATSSKPETPGVYDMDGRNSNTLLNLDPENVVFYVGGYPPDFKLPSRLSFPPYKGCIELDDLNENVLSLYNFKKTFNLNTTEVEPCRRRKEESDKNYFEGTGYARVPTQPHAPIPTFGQTIQTTVDRGLLFFAENGDRFISLNIEDGKLMVRYKLNSELPKERGVGDAINNGRDHSIQIKIGKLQKRMWINVDVQNTIIDGEVFDFSTYYLGGIPIAIRERFNISTPAFRGCMKNLKKTSGVVRLNDTVGVTKKCSEDWKLVRSASFSRGGQLSFTDLGLPPTDHLQASFGFQTFQPSGILLDHQTWTRNLQVTLEDGYIELSTSDSGGPIFKSPQTYMDGLLHYVSVISDNSGLRQEGCLRPRVRDQSWKHSETMSLRKLK

SEQ ID NO: 7655 - protein, 134 aa, Homo Sapiens
  misc_feature (1)..(1): Xaa can be any naturally occurring amino acid
XFSEEGGHVVLAHSVLLGPEFKLVFSIRPRSLTGILIHIGSQPGKHLCVYLEAGKVTASMDSGAGGTSTSVTPKQSLCDGQWHSVAANLTTLRIPVWKSFFGCLRNIHVNHIPVPVTEALEVQGPVSLNGCPDQ

SEQ ID NO: 7656 - protein, 37 aa, Homo Sapiens
  misc_feature (1)..(1): Xaa can be any naturally occurring amino acid
XGWTEGPGGKFAWKLHHQHQSASLPGITSIRETKGAG

SEQ ID NO: 7657 - protein, 81 aa, Homo Sapiens
MALSSAWRSVLPLWLLWSAACSRAASGDDNAFPFDIEGSSAVGRQDPPETSEPRVALGRLPPAAEKCNAGFFHTLSGECVP

SEQ ID NO: 7658 - protein, 88 aa, Homo Sapiens
MALSSAWRSVLPLWLLWSAACSRAASGDDNAFPFDIEGSSAVGRQDPPETSEPRVALGRLPPAAEKCNAGFFHTLSGECVPCDCNGNS

SEQ ID NO: 7659 - protein, 107 aa, Homo Sapiens
MALSSAWRSVLPLWLLWSAACSRAASGDDNAFPFDIEGSSAVGRQDPPETSEPRVALGRLPPAAEKCNAGFFHTLSGECVPCDCNGNSNECLDGSGYCVHCQRNTTG

SEQ ID NO: 7660 - protein, 1823 aa, Homo Sapiens
MALSSAWRSVLPLWLLWSAACSRAASGDDNAFPFDIEGSSAVGRQDPPETSEPRVALGRLPPAAEKCNAGFFHTLSGECVPCDCNGNSNECLDGSGYCVHCQRNTTGEHCEKCLDGYIGDSIRGAPQFCQPCPCPLPHLANFAESCYRKNGAVRCICNENYAGPNCERCAPGYYGNPLLIGSTCKKCDCSGNSDPNLIFEDCDEVTGQCRNCLRNTTGFKCERCAPGYYGDARIAKNCAVCNCGGGPCDSVTGECLEEGFEPPTGMDCPTISCDKCVWDLTDDLRLAALSIEEGKSGVLSVSSGAAAHRHVNEINATIYLLKTKLSERENQYALRKIQINNAENTMKSLLSDVEELVEKENQASRKGQLVQKESMDTINHASQLVEQAHDMRDKIQEINNKMLYYGEEHELSPKEISEKLVLAQKMLEEIRSRQPFFTQRELVDEEADEAYELLSQAESWQRLHNETRTLFPVVLEQLDDYNAKLSDLQEALDQALNYVRDAEDMNRATAARQRDHEKQQERVREQMEVVNMSLSTSADSLTTPRLTLSELDDIIKNASGIYAEIDGAKSELQVKLSNLSNLSHDLVQEAIDHAQDLQQEANELSRKLHSSDMNGLVQKALDASNVYENIVNYVSEANETAEFALNTTDRIYDAVSGIDTQIIYHKDESENLLNQARELQAKAESSSDEAVADTSRRVGGALARKSALKTRLSDAVKQLQAAERGDAQQRLGQSRLITEEANRTTMEVQQATAPMANNLTNWSQNLQHFDSSAYNTAVNSARDAVRNLTEVVPQLLDQLRTVEQKRPASNVSASIQRIRELIAQTRSVASKIQVSMMFDGQSAVEVHSRTSMDDLKAFTSLSLYMKPPVKRPELTETADQFILYLGSKNAKKEYMGLAIKNDNLVYVYNLGTKDVEIPLDSKPVSSWPAYFSIVKIERVGKHGKVFLTVPSLSSTAEEKFIKKGEFSGDDSLLDLDPEDTVFYVGGVPSNFKLPTSLNLPGFVGCLELATLNNDVISLYNFKHIYNMDPSTSVPCARDKLAFTQSRAASYFFDGSGYAVVRDITRRGKFGQVTRFDIEVRTPADNGLILLMVNGSMFFRLEMRNGYLHVFYDFGFSGGPVHLEDTLKKAQINDAKYHEISIIYHNDKKMILVVDRRHVKSMDNEKMKIPFTDIYIGGAPPEILQSRALRAHLPLDINFRGCMKGFQFQKKDFNLLEQTETLGVGYGCPEDSLISRRAYFNGQSFIASIQKISFFDGFEGGFNFRTLQPNGLLFYYASGSDVFSISLDNGTVIMDVKGIKVQSVDKQYNDGLSHFVISSVSPTRYELIVDKSRVGSKNPTKGKIEQTQASEKKFYFGGSPISAQYANFTGCISNAYFTRVDRDVEVEDFQRYTEKVHTSLYECPIESSPLFLLHKKGKNLSKPKASQNKKGGKSKDAPSWDPVALKLPERNTPRNSHCHLSNSPRAIEHAYQYGGTANSRQEFEHLKGDFGAKSQFSIRLRTRSSHGMIFYVSDQEENDFMTLFLAHGRLVYMFNVGHKKLKIRSQEKYNDGLWHDVIFIRERSSGRLVIDGLRVLEESLPPTEATWKIKGPIYLGGVAPGKAVKNVQINSIYSFSGCLSNLQLNGASITSASQTFSVTPCFEGPMETGTYFSTEGGYVVLDESFNIGLKFEIAFEVRPRSSSGTLVHGHSVNGEYLNVHMKNGQVIVKVNNGIRDFSTSVTPKQSLCDGRWHRITVIRDSNVVQLDVDSEVNHVVGPLNPKPIDHREPVFVGGVPESLLTPRLAPSKPFTGCIRHFVIDGHPVSFSKAALVSGAVSINSCPAA

SEQ ID NO: 7661 - protein, 1816 aa, Homo Sapiens
MALSSAWRSVLPLWLLWSAACSRAASGDDNAFPFDIEGSSAVGRQDPPETSEPRVALGRLPPAAEKCNAGFFHTLSGECVPCDCNGNSNECLDGSGYCVHCQRNTTGEHCEKCLDGYIGDSIRGAPQFCQPCPCPLPHLANFAESCYRKNGAVRCICNENYAGPNCERCAPGYYGNPLLIGSTCKKCDCSGNSDPNLIFEDCDEVTGQCRNCLRNTTGFKCERCAPGYYGDARIAKNCAVCNCGGGPCDSVTGECLEEGFEPPTGCDKCVWDLTDDLRLAALSIEEGKSGVLSVSSGAAAHRHVNEINATIYLLKTKLSERENQYALRKIQINNAENTMKSLLSDVEELVEKENQASRKGQLVQKESMDTINHASQLVEQAHDMRDKIQEINNKMLYYGEEHELSPKEISEKLVLAQKMLEEIRSRQPFFTQRELVDEEADEAYELLSQAESWQRLHNETRTLFPVVLEQLDDYNAKLSDLQEALDQALNYVRDAEDMNRATAARQRDHEKQQERVREQMEVVNMSLSTSADSLTTPRLTLSELDDIIKNASGIYAEIDGAKSELQVKLSNLSNLSHDLVQEAIDHAQDLQQEANELSRKLHSSDMNGLVQKALDASNVYENIVNYVSEANETAEFALNTTDRIYDAVSGIDTQIIYHKDESENLLNQARELQAKAESSSDEAVADTSRRVGGALARKSALKTRLSDAVKQLQAAERGDAQQRLGQSRLITEEANRTTMEVQQATAPMANNLTNWSQNLQHFDSSAYNTAVNSARDAVRNLTEVVPQLLDQLRTVEQKRPASNVSASIQRIRELIAQTRSVASKIQVSMMFDGQSAVEVHSRTSMDDLKAFTSLSLYMKPPVKRPELTETADQFILYLGSKNAKKEYMGLAIKNDNLVYVYNLGTKDVEIPLDSKPVSSWPAYFSIVKIERVGKHGKVFLTVPSLSSTAEEKFIKKGEFSGDDSLLDLDPEDTVFYVGGVPSNFKLPTSLNLPGFVGCLELATLNNDVISLYNFKHIYNMDPSTSVPCARDKLAFTQSRAASYFFDGSGYAVVRDITRRGKFGQVTRFDIEVRTPADNGLILLMVNGSMFFRLEMRNGYLHVFYDFGFSGGPVHLEDTLKKAQINDAKYHEISIIYHNDKKMILVVDRRHVKSMDNEKMKIPFTDIYIGGAPPEILQSRALRAHLPLDINFRGCMKGFQFQKKDFNLLEQTETLGVGYGCPEDSLISRRAYFNGQSFIASIQKISFFDGFEGGFNFRTLQPNGLLFYYASGSDVFSISLDNGTVIMDVKGIKVQSVDKQYNDGLSHFVISSVSPTRYELIVDKSRVGSKNPTKGKIEQTQASEKKFYFGGSPISAQYANFTGCISNAYFTRVDRDVEVEDFQRYTEKVHTSLYECPIESSPLFLLHKKGKNLSKPKASQNKKGGKSKDAPSWDPVALKLPERNTPRNSHCHLSNSPRAIEHAYQYGGTANSRQEFEHLKGDFGAKSQFSIRLRTRSSHGMIFYVSDQEENDFMTLFLAHGRLVYMFNVGHKKLKIRSQEKYNDGLWHDVIFIRERSSGRLVIDGLRVLEESLPPTEATWKIKGPIYLGGVAPGKAVKNVQINSIYSFSGCLSNLQLNGASITSASQTFSVTPCFEGPMETGTYFSTEGGYVVLDESFNIGLKFEIAFEVRPRSSSGTLVHGHSVNGEYLNVHMKNGQVIVKVNNGIRDFSTSVTPKQSLCDGRWHRITVIRDSNVVQLDVDSEVNHVVGPLNPKPIDHREPVFVGGVPESLLTPRLAPSKPFTGCIRHFVIDGHPVSFSKAALVSGAVSINSCPAA

SEQ ID NO: 7662 - protein, 1816 aa, Homo Sapiens; identical to SEQ ID NO: 7661

SEQ ID NO: 7663 - protein, 1816 aa, Homo Sapiens; identical to SEQ ID NO: 7661

SEQ ID NO: 7664 - protein, 331 aa, Homo Sapiens
MALSSAWRSVLPLWLLWSAACSRAASGDDNAFPFDIEGSSAVGRQDPPETSEPRVALGRLPPAAEKCNAGFFHTLSGECVPCDCNGNSNECLDGSGYCVHCQRNTTGEHCEKCLDGYIGDSIRGAPQFCQPCPCPLPHLANFAESCYRKNGAVRCICNENYAGPNCERCAPGYYGNPLLIGSTCKKCDCSGNSDPNLIFEDCDEVTGQCRNCLRNTTGFKCERCAPGYYGDARIAKNCAVCNCGGGPCDSVTGECLEEGFEPPTGMDCPTISCDKCVWDLTDDLRLAALSIEEGKSGVLSVSSGAAAHRHVNEINATIYLLKTKLSERENQ

SEQ ID NO: 7665 - protein, 129 aa, Homo Sapiens
MALSSAWRSVLPLWLLWSAACSRAASGDDNAFPFDIEGSSAVGRQDPPETSEPRVALGRLPPAAEKCNAGFFHTLSGECVPCDCNGNSNECLDGSGYCVTTDGEDPGFSASALSFILSSQGAREARAPT

SEQ ID NO: 7666 - protein, 120 aa, Homo Sapiens
MALSSAWRSVLPLWLLWSAACSRAASGDDNAFPFDIEGSSAVGRQDPPETSEPRVALGRLPPAAEVQCPCHCHPAGAPAPPRAVPHSSFSLSPPLSSPQCLESFTWARSVRKLEIKSFPL

SEQ ID NO: 7667 - protein, 120 aa, Homo Sapiens; identical to SEQ ID NO: 7666

SEQ ID NO: 7668 - protein, 120 aa, Homo Sapiens; identical to SEQ ID NO: 7666

SEQ ID NO: 7669 - protein, 178 aa, Homo Sapiens
  misc_feature (1)..(1): Xaa can be any naturally occurring amino acid
XIFEDCDEVTGQCRNCLRNTTGFKCERCAPGYYGDARIAKNCAVCNCGGGPCDSVTGECLEEGFEPPTGMDCPTISCDKCVWDLTDDLRLAALSIEEGKSGVLSVSSGAAAHRHVNEINATIYLLKTKLSERENQYALRKIQINNAENTMKSLLSDVEELVEKHWNKPRRRLELQEGV

SEQ ID NO: 7670 - protein, 188 aa, Homo Sapiens
  misc_feature (1)..(1): Xaa can be any naturally occurring amino acid
XKNASGIYAEIDGAKSELQVKLSNLSNLSHDLVQEAIDHAQDLQQEANELSRKLHSSDMNGLVQKALDASNVYENIVNYVSEANETAEFALNTTDRIYDAVSGIDTQIIYHKDESENLLNQARELQAKAESSSDEAVADTSRRVGGALARKSALKTRLSDAVKQLQAAERGKHQRELKSHLLIHWSVR

SEQ ID NO: 7671 - protein, 187 aa, Homo Sapiens
  misc_feature (1)..(1): Xaa can be any naturally occurring amino acid
XSTCKKCDCSGNSDPNLIFEDCDEVTGQCRNCLRNTTGFKCERCAPGYYGDARIAKNCAVCNCGGGPCDSVTGECLEEGFEPPTGCDKCVWDLTDDLRLAALSIEEGKSGVLSVSSGAAAHRHVNEINATIYLLKTKLSERENQYALRKIQINNAENTMKSLLSDVEELVEKHWNKPRRRLELQEGV

SEQ ID NO: 7672 - protein, 38 aa, Homo Sapiens
CVPGAYNFPYCEGAVWWDGTSVAAEGAGRCVFSGRPCG

SEQ ID NO: 7673 - protein, 3695 aa, Homo Sapiens
MAKRLCAGSALCVRGPRGPAPLLLVGLALLGAARAREEAGGGFSLHPPYFNLAEGARIAASATCGEEAPARGSPRPTEDLYCKLVGGPVAGGDPNQTIRGQYCDICTAANSNKAHPASNAIDGTERWWQSPPLSRGLEYNEVNVTLDLGQVFHVAYVLIKFANSPRPDLWVLERSMDFGRTYQPWQFFASSKRDCLERFGPQTLERITRDDAAICTTEYSRIVPLENGEIVVSLVNGRPGAMNFSYSPLLREFTKATNVRLRFLRTNTLLGHLMGKALRDPTVTRRYYYSIKDISIGGRCVCHGHADACDAKDPTDPFRLQCTCQHNTCGGTCDRCCPGFNQQPWKPATANSANECQSCNCYGHATDCYYDPEVDRRRASQSLDGTYQGGGVCIDCQHHTTGVNCERCLPGFYRSPNHPLDSPHVCRRCNCESDFTDGTCEDLTGRCYCRPNFSGERCDVCAEGFTGFPSCYPTPSSSNDTREQVLPAGQIVNCDCSAAGTQGNACRKDPRVGRCLCKPNFQGTHCELCAPGFYGPGCQPCQCSSPGVADDRCDPDTGQCRCRVGFEGATCDRCAPGYFHFPLCQLCGCSPAGTLPEGCDEAGRCLCQPEFAGPHCDRCRPGYHGFPNCQACTCDPRGALDQLCGAGGLCRCRPGYTGTACQECSPGFHGFPSCVPCHCSAEGSLHAACDPRSGQCSCRPRVTGLRCDTCVPGAYNFPYCEAGSCHPAGLAPVDPALPEAQVPCMCRAHVEGPSCDRCKPGFWGLSPSNPEGCTRCSCDLRGTLGGVAECQPGTGQCFCKPHVCGQACASCKDGFFGLDQADYFGCRSCRCDIGGALGQSCEPRTGVCRCRPNTQGPTCSEPARDHYLPDLHHLRLELEEAATPEGHAVRFGFNPLEFENFSWRGYAQMAPVQPRIVARLNLTSPDLFWLVFRYVNRGAMSVSGRVSVREEGRSATCANCTAQSQPVAFPPSTEPAFITVPQRGFGEPFVLNPGTWALRVEAEGVLLDYVVLLPSAYYEAALLQLRVTEACTYRPSAQQSGDNCLLYTHLPLDGFPSAAGLEALCRQDNSLPRPCPTEQLSPSHPPLITCTGSDVDVQLQVAVPQPGRYALVVEYANEDARQEVGVAVHTPQRAPQQGLLSLHPCLYSTLCRGTARDTQDHLAVFHLDSEASVRLTAEQARFFLHGVTLVPIEEFSPEFVEPRVSCISSHGAFGPNSAACLPSRFPKPPQPIILRDCQVIPLPPGLPLTHAQDLTPAMSPAGPRPRPPTAVDPDAEPTLLREPQATVVFTTHVPTLGRYAFLLHGYQPAHPTFPVEVLINAGRVWQGHANASFCPHGYGCRTLVVCEGQALLDVTHSELTVTVRVPKGRWLWLDYVLVVPENVYSFGYLREEPLDKSYDFISHCAAQGYHISPSSSSLFCRNAAASLSLFYNNGARPCGCHEVGATGPTCEPFGGQCPCHAHVIGRDCSRCATGYWGFPNCRPCDCGARLCDELTGQCICPPRTIPPDCLLCQPQTFGCHPLVGCEECNCSGPGIQELTDPTCDTDSGQCKCRPNVTGRRCDTCSPGFHGYPRCRPCDCHEAGTAPGVCDPLTGQCYCKENVQGPKCDQCSLGTFSLDAANPKGCTRCFCFGATERCRSSSYTRQEFVDMEGWVLLSTDRQVVPHERQPGTEMLRADLRHVPEAVPEAFPELYWQAPPSYLGDRVSSYGGTLRYELHSETQRGDVFVPMESRPDVVLQGNQMSITFLEPAYPTPGHVHRGQLQLVEGNFRHTETRNTVSREELMMVLASLEQLQIRALFSQISSAVFLRRVALEVASPAGQGALASNVELCLCPASYRGDSCQECAPGFYRDVKGLFLGRCVPCQCHGHSDRCLPGSGVCVDCQHNTEGAHCERCQAGFVSSRDDPSAPCVSCPCPLSVPSNNFAEGCVLRGGRTQCLCKPGYAGASCERCAPGFFGNPLVLGSSCQPCDCSGNGDPNLLFSDCDPLTGACRGCLRHTTGPRCEICAPGFYGNALLPGNCTRCDCTPCGTEACDPHSGHCLCKAGVTGRRCDRCQEGHFGFDGCGGCRPCACGPAAEGSECHPQSGQCHCRPGTMGPQCRECAPGYWGLPEQGCRRCQCPGGRCDPHTGRCNCPPGLSGERCDTCSQQHQVPVPGGPVGHSIHCEVCDHCVVLLLDDLERAGALLPAIHEQLRGINASSMAWARLHRLNASIADLQSQLRSPLGPRHETAQQLEVLEQQSTSLGQDARRLGGQAVGTRDQASQLLAGTEATLGHAKTLLAAIRAVDRTLSELMSQTGHLGLANASAPSGEQLLRTLAEVERLLWEMRARDLGAPQAAAEAELAAAQRLLARVQEQLSSLWEENQALATQTRDRLAQHEAGLMDLREALNRAVDATREAQELNSRNQERLEEALQRKQELSRDNATLQATLHAARDTLASVFRLLHSLDQAKEELERLAASLDGARTPLLQRMQTFSPAGSKLRLVEAAEAHAQQLGQLALNLSSIILDVNQDRLTQRAIEASNAYSRILQAVQAAEDAAGQALQQADHTWATVVRQGLVDRAQQLLANSTALEEAMLQEQQRLGLVWAALQGARTQLRDVRAKKDQLEAHIQAAQAMLAMDTDETSKKIAHAKAVAAEAQDTATRVQSQLQAMQENVERWQGQYEGLRGQDLGQAVLDAGHSVSTLEKTLPQLLAKLSILENRGVHNASLALSASIGRVRELIAQARGAASKVKVPMKFNGRSGVQLRTPRDLADLAAYTALKFYLQGPEPEPGQGTEDRFVMYMGSRQATGDYMGVSLRDKKVHWVYQLGEAGPAVLSIDEDIGEQFAAVSLDRTLQFGHMSVTVERQMIQETKGDTVAPGAEGLLNLRPDDFVFYVGGYPSTFTPPPLLRFPGYRGCIEMDTLNEEVVSLYNFERTFQLDTAVDRPCARSKSTGDPWLTDGSYLDGTGFARISFDSQISTTKRFEQELRLVSYSGVLFFLKQQSQFLCLAVQEGSLVLLYDFGAGLKKAVPLQPPPPLTSASKAIQVFLLGGSRKRVLVRVERATVYSVEQDNDLELADAYYLGGVPPDQLPPSLRRLFPTGGSVRGCVKGIKALGKYVDLKRLNTTGVSAGCTADLLVGRAMTFHGHGFLRLALSNVAPLTGNVYSGFGFHSAQDSALLYYRASPDGLCQVSLQQGRVSLQLLRTEVKTQAGFADGAPHYVAFYSNATGVWLYVDDQLQQMKPHRGPPPELQPQPEGPPRLLLGGLPESGTIYNFSGCISNVFVQRLLGPQRVFDLQQNLGSVNVSTGCAPALQAQTPGLGPRGLQATARKASRRSRQPARHPACMLPPHLRTTRDSYQFGGSLSSHLEFVGILARHRNWPSLSMHVLPRSSRGLLLFTARLRPGSPSLALFLSNGHFVAQMEGLGTRLRAQSRQRSRPGRWHKVSVRWEKNRILLVTDGARAWSQEGPHRQHQGAEHPQPHTLFVGGLPASSHSSKLPVTVGFSGCVKRLRLHGRPLGAPTRMAGVTPCILGPLEAGLFFPGSGGVITLDLPGATLPDVGLELEVRPLAVTGLIFHLGQARTPPYLQLQVTEKQVLLRADDGAGEFSTSVTRPSVLCDGQWHRLAVMKSGNVLRLEVDAQSNHTVGPLLAAAAGAPAPLYLGGLPEPMAVQPWPPAYCGCMRRLAVNRSPVAMTRSVEVHGAVGASGCPAA

SEQ ID NO: 7674 - protein, 241 aa, Homo Sapiens
RLRFLRTNTLLGHLMGKALRDPTVTRRYYYSIKDISIGGRCVCHGHADACDAKDPTDPFSSPNLSGHNRQLPCCPSPDLHSSQAGTKAQDGDGRVGAANTPHLLCPVCLLSGAAEGTAEHPPPGSPSQDGQQPWCWHRHIPGPHPESSVRLQCTCQHNTCGGTCDRCCPGFNQQPWKPATANSANECQSCNCYGHATDCYYDPEVDRRRASQSLDGTYQGGGVCIDCQHHTTGVNCERCLP

SEQ ID NO: 7675 - protein, 1810 aa, Homo Sapiens
MDCPLSAPTPPPPLVRFFRAPLPACVPPTLLPVLPAALCRARVRAQEPEFSYGCAEGSCYPATGDLLIGRAQKLSVTSTCGLHKPEPYCIVSHLQEDKKCFICNSQDPYHETLNPDSHLIENVVTTFAPNRLKIWWQSENGVENVTIQLDLEAEFHFTHLIMTFKTFRPAAMLIERSSDFGKTWGVYRYFAYDCEASFPGISTGPMKKVDDIICDSRYSDIEPSTEGEVIFRALDPAFKIEDPYSPRIQNLLKITNLRIKFVKLHTLGDNLLDSRMEIREKYYYAVYDMVVRGNCFCYGHASECAPVDGFNEEVEGMVHGHCMCRHNTKGLNCELCMDFYHDLPWRPAEGRNSNACKKCNCNEHSISCHFDMAVYLATGNVSGGVCDDCQHNTMGRNCEQCKPFYYQHPERDIRDPNFCERCTCDPAGSQNEGICDSYTDFSTGLIAGQCRCKLNVEGEHCDVCKEGFYDLSSEDPFGCKSCACNPLGTIPGGNPCDSETGHCYCKRLVTGQHCDQCLPEHWGLSNDLDGCRPCDCDLGGALNNSCFAESGQCSCRPHMIGRQCNEVEPGYYFATLDHYLYEAEEANLGPGVSIVERQYIQDRIPSWTGAGFVRVPEGAYLEFFIDNIPYSMEYDILIRYEPQLPDHWEKAVITVQRPGRIPTSSRCGNTIPDDDNQVVSLSPGSRYVVLPRPVCFEKGTNYTVRLELPQYTSSDSDVESPYTLIDSLVLMPYCKSLDIFTVGGSGDGVVTNSAWETFQRYRCLENSRSVVKTPMTDVCRNIIFSISALLHQTGLACECDPQGSLSSVCDPNGGQCQCRPNVVGRTCNRCAPGTFGFGPSGCKPCECHLQGSVNAFCNPVTGQCHCFQGVYARQCDRCLPGHWGFPSCQPCQCNGHADDCDPVTGECLNCQDYTMGHNCERCLAGYYGDPIIGSGDHCRPCPCPDGPDSGRQFARSCYQDPVTLQLACVCDPGYIGSRCDDCASGYFGNPSEVGGSCQPCQCHNNIDTTDPEACDKETGRCLKCLYHTEGEHCQFCRFGYYGDALQQDCRKCVCNYLGTVQEHCNGSDCQCDKATGQCLCLPNVIGQNCDRCAPNTWQLASGTGCDPCNCNAAHSFGPSCNEFTGQCQCMPGFGGRTCSECQELFWGDPDVECRACDCDPRGIETPQCDQSTGQCVCVEGVEGPRCDKCTRGYSGVFPDCTPCHQCFALWDVIIAELTNRTHRFLEKAKALKISGVIGPYRETVDSVERKVSEIKDILAQSPAAEPLKNIGNLFEEAEKLIKDVTEMMAQVEVKLSDTTSQSNSTAKELDSLQTEAESLDNTVKELAEQLEFIKNSDIRGALDSITKYFQMSLEAEERVNASTTEPNSTVEQSALMRDRVEDVMMERESQFKEKQEEQARLLDELAGKLQSLDLSAAAEMTCGTPPGASCSETECGGPNCRTDEGERKCGGPGCGGLVTVAHNAWQKAMDLDQDVLSALAEVEQLSKMVSEAKLRADEAKQSAEDILLKTNATKEKMDKSNEELRNLIKQIRNFLTQDSADLDSIEAVANEVLKMEMPSTPQQLQNLTEDIRERVESLSQVEVILQHSAADIARAEMLLEEAKRASKSATDVKVTADMVKEALEEAEKAQVAAEKAIKQADEDIQGTQNLLTSIESETAASEETLFNASQRISELERNVEELKRKAAQNSGEAEYIEKVVYTVKQSAEDVKKTLDGELDEKYKKVENLIAKKTEESADARRKAEMLQNEAKTLLAQANSKLQLLKDLERKYEDNQRYLEDKAQELARLEGEVRSLLKDISQKVAVYSTCL

SEQ ID NO: 7676 - protein, 91 aa, Homo Sapiens
MGLLQLLAFSFLALCRARVRAQEPEFSYGCAEGSCYPATGDLLIGRAQKLSVTSTCGLHKPEPYCIVSHLQEDKKCFICNSQDPYHETLNP

SEQ ID NO: 7677 - protein, 1786 aa, Homo Sapiens
MGLLQLLAFSFLALCRARVRAQEPEFSYGCAEGSCYPATGDLLIGRAQKLSVTSTCGLHKPEPYCIVSHLQEDKKCFICNSQDPYHETLNPDSHLIENVVTTFAPNRLKIWWQSENGVENVTIQLDLEAEFHFTHLIMTFKTFRPAAMLIERSSDFGKTWGVYRYFAYDCEASFPGISTGPMKKVDDIICDSRYSDIEPSTEGEVIFRALDPAFKIEDPYSPRIQNLLKITNLRIKFVKLHTLGDNLLDSRMEIREKYYYAVYDMVVRGNCFCYGHASECAPVDGFNEEVEGMVHGHCMCRHNTKGLNCELCMDFYHDLPWRPAEGRNSNACKKCNCNEHSISCHFDMAVYLATGNVSGGVCDDCQHNTMGRNCEQCKPFYYQHPERDIRDPNFCERCTCDPAGSQNEGICDSYTDFSTGLIAGQCRCKLNVEGEHCDVCKEGFYDLSSEDPFGCKSCACNPLGTIPGGNPCDSETGHCYCKRLVTGQHCDQCLPEHWGLSNDLDGCRPCDCDLGGALNNSCFAESGQCSCRPHMIGRQCNEVEPGYYFATLDHYLYEAEEANLGPGVSIVERQYIQDRIPSWTGAGFVRVPEGAYLEFFIDNIPYSMEYDILIRYEPQLPDHWEKAVITVQRPGRIPTSSRCGNTIPDDDNQVVSLSPGSRYVVLPRPVCFEKGTNYTVRLELPQYTSSDSDVESPYTLIDSLVLMPYCKSLDIFTVGGSGDGVVTNSAWETFQRYRCLENSRSVVKTPMTDVCRNIIFSISALLHQTGLACECDPQGSLSSVCDPNGGQCQCRPNVVGRTCNRCAPGTFGFGPSGCKPCECHLQGSVNAFCNPVTGQCHCFQGVYARQCDRCLPGHWGFPSCQPCQCNGHADDCDPVTGECLNCQDYTMGHNCERCLAGYYGDPIIGSGDHCRPCPCPDGPDSGRQFARSCYQDPVTLQLACVCDPGYIGSRCDDCASGYFGNPSEVGGSCQPCQCHNNIDTTDPEACDKETGRCLKCLYHTEGEHCQFCRFGYYGDALQQDCRKCVCNYLGTVQEHCNGSDCQCDKATGQCLCLPNVIGQNCDRCAPNTWQLASGTGCDPCNCNAAHSFGPSCNEFTGQCQCMPGFGGRTCSECQELFWGDPDVECRACDCDPRGIETPQCDQSTGQCVCVEGVEGPRCDKCTRGYSGVFPDCTPCHQCFALWDVIIAELTNRTHRFLEKAKALKISGVIGPYRETVDSVERKVSEIKDILAQSPAAEPLKNIGNLFEEAEKLIKDVTEMMAQVEVKLSDTTSQSNSTAKELDSLQTEAESLDNTVKELAEQLEFIKNSDIRGALDSITKYFQMSLEAEERVNASTTEPNSTVEQSALMRDRVEDVMMERESQFKEKQEEQARLLDELAGKLQSLDLSAAAEMTCGTPPGASCSETECGGPNCRTDEGERKCGGPGCGGLVTVAHNAWQKAMDLDQDVLSALAEVEQLSKMVSEAKLRADEAKQSAEDILLKTNATKEKMDKSNEELRNLIKQIRNFLTQDSADLDSIEAVANEVLKMEMPSTPQQLQNLTEDIRERVESLSQVEVILQHSAADIARAEMLLEEAKRASKSATDVKVTADMVKEALEEAEKAQVAAEKAIKQADEDIQGTQNLLTSIESETAASEETLFNASQRISELERNVEELKRKAAQNSGEAEYIEKVVYTVKQSAEDVKKTLDGELDEKYKKVENLIAKKTEESADARRKAEMLQNEAKTLLAQANSKLQLLKDLERKYEDNQRYLEDKAQELARLEGEVRSLLKDISQKVAVYSTCL

SEQ ID NO: 7678 - protein, 850 aa, Homo Sapiens
MGLLQLLAFSFLALCRARVRAQEPEFSYGCAEGSCYPATGDLLIGRAQKLSVTSTCGLHKPEPYCIVSHLQEDKKCFICNSQDPYHETLNPDSHLIENVVTTFAPNRLKIWWQSENGVENVTIQLDLEAEFHFTHLIMTFKTFRPAAMLIERSSDFGKTWGVYRYFAYDCEASFPGISTGPMKKVDDIICDSRYSDIEPSTEGEVIFRALDPAFKIEDPYSPRIQNLLKITNLRIKFVKLHTLGDNLLDSRMEIREKYYYAVYDMVVRGNCFCYGHASECAPVDGFNEEVEGMVHGHCMCRHNTKGLNCELCMDFYHDLPWRPAEGRNSNACKKCNCNEHSISCHFDMAVYLATGNVSGGVCDDCQHNTMGRNCEQCKPFYYQHPERDIRDPNFCERCTCDPAGSQNEGICDSYTDFSTGLIAGQCRCKLNVEGEHCDVCKEGFYDLSSEDPFGCKSCACNPLGTIPGGNPCDSETGHCYCKRLVTGQHCDQCLPEHWGLSNDLDGCRPCDCDLGGALNNSCFAESGQCSCRPHMIGRQCNEVEPGYYFATLDHYLYEAEEANLGPGVSIVERQYIQDRIPSWTGAGFVRVPEGAYLEFFIDNIPYSMEYDILIRYEPQLPDHWEKAVITVQRPGRIPTSSRCGNTIPDDDNQVVSLSPGSRYVVLPRPVCFEKGTNYTVRLELPQYTSSDSDVESPYTLIDSLVLMPYCKSLDIFTVGGSGDGVVTNSAWETFQRYRCLENSRSVVKTPMTDVCRNIIFSISALLHQTGLACECDPQGSLSSVCDPNGGQCQCRPNVVGRTCNRCAPGTFGFGPSGCKRRFLKSIVMHSFRLTQPLWQGSIAAEPMLPS

SEQ ID NO: 7679 - protein, 183 aa, Homo Sapiens
MGLLQLLAFSFLETAGPGASLEWRSLETTPEPQGLSMGSPSSGKRRPPRAPAPRPQRSAGDPRACTHTHSRFPSSQISTRTLTPRMRGLPRARGFTCVALCRARVRAQEPEFSYGCAEGSCYPATGDLLIGRAQKLSVTSTCGLHKPEPYCIVSHLQEDKKCFICNSQDPYHETLNPDSHLIE

SEQ ID NO: 7680 - protein, 1798 aa, Homo Sapiens
MELTSRERGRGQPLPWELRLGLLLSVLAATLAQAPAPDVPGCSRGSCYPATGDLLVGRADRLTASSTCGLNGPQPYCIVSHLQDEKKCFLCDSRRPFSARDNPHSHRIQNVVTSFAPQRRAAWWQSENGIPAVTIQLDLEAEFHFTHLIMTFKTFRPAAMLVERSADFGRTWHVYRYFSYDCGADFPGVPLAPPRHWDDVVCESRYSEIEPSTEGEVIYRVLDPAIPIPDPYSSRIQNLLKITNLRVNLTRLHTLGDNLLDPRREIREKYYYALYELVVRGNCFCYGHASECAPAPGAPAHAEGMVHGACICKHNTRGLNCEQCQDFYRDLPWRPAEDGHSHACRKCECHGHTHSCHFDMAVYLASGNVSGGVCDGCQHNTAGRHCELCRPFFYRDPTKDLRDPAVCRSCDCDPMGSQDGGRCDSHDDPALGLVSGQCRCKEHVVGTRCQQCRDGFFGLSISDRLGCRRCQCNARGTVPGSTPCDPNSGSCYCKRLVTGRGCDRCLPGHWGLSHDLLGCRPCDCDVGGALDPQCDEGTGQCHCRQHMVGRRCEQVQPGYFRPFLDHLIWEAEDTRGQVLDVVERLVTPGETPSWTGSGFVRLQEGQTLEFLVASVPKAMDYDLLLRLEPQVPEQWAELELIVQRPGPVPAHSLCGHLVPKDDRIQGTLQPHARYLIFPNPVCLEPGISYKLHLKLVRTGGSAQPETPYSGPGLLIDSLVLLPRVLVLEMFSGGDAAALERQATFERYQCHEEGLVPSKTSPSEACAPLLISLSTLIYNGALPCQCNPQGSLSSECNPHGGQCLCKPGVVGRRCDLCAPGYYGFGPTGCQACQCSHEGALSSLCEKTSGQCLCRTGAFGLRCDRCQRGQWGFPSCRPCVCNGHADECNTHTGACLGCRDHTGGEHCERCIAGFHGDPRLPYGGQCRPCPCPEGPGSQRHFATSCHQDEYSQQIVCHCRAGYTGLRCEACAPGHFGDPSRPGGRCQLCECSGNIDPMDPDACDPHTGQCLRCLHHTEGPHCAHCKPGFHGQAARQSCHRCTCNLLGTNPQQCPSPDQCHCDPSSGQCPCLPNVQGPSCDRCAPNFWNLTSGHGCQPCACHPSRARGPTCNEFTGQCHCRAGFGGRTCSECQELHWGDPGLQCHACDCDSRGIDTPQCHRFTGHCSCRPGVSGVRCDQCARGFSGIFPACHPCHACFGDWDRVVQDLAARTQRLEQRAQELQQTGVLGAFESSFWHMQEKLGIVQGIVGARNTSAASTAQLVEATEELRREIGEATEHLTQLEADLTDVQDENFNANHALSGLERDRLALNLTLRQLDQHLDLLKHSNFLGAYDSIRHAHSQSAEAERRANTSALAVPSPVSNSASARHRTEALMDAQKEDFNSKHMANQRALGKLSAHTHTLSLTDINELVCGAPGDAPCATSPCGGAGCRDEDGQPRCGGLSCNGAAATADLALGRARHTQAELQRALAEGGSILSRVAETRRQASEAQQRAQAALDKANASRGQVEQANQELQELIQSVKDFLNQEGADPDSIEMVATRVLELSIPASAEQIQHLAGAIAERVRSLADVDAILARTVGDVRRAEQLLQDARRARSWAEDEKQKAETVQAALEEAQRAQGIAQGAIRGAVADTRDTEQTLYQVQERMAGAERALSSAGERARQLDALLEALKLKRAGNSLAASTAEETAGSAQGRAQEAEQLLRGPLGDQYQTVKALAERKAQGVLAAQARAEQLRDEARDLLQAAQDKLQRLQELEGTYEENERALESKAAQLDGLEARMRSVLQAINLQVQIYNTCQ

SEQ ID NO: 7681 - protein, 1798 aa, Homo Sapiens; identical to SEQ ID NO: 7680

SEQ ID NO: 7682 - protein, 151 aa, Homo Sapiens
MTFKTFRPAAMLVERSADFGRTWHVYRYFSYDCGADFPGVPLAPPRHWDDVVCESRYSEIEPSTEGEVIYRVLDPAIPIPDPYSSRIQNLLKITNLRVNLTRLHTLGDNLLDPRREIREKYYYALYELVVRGNCFCYGHASECAPAPGAPA

SEQ ID NO: 7683 - protein, 160 aa, Homo Sapiens
MNEIQAIAARLPNVDLVLSQTKQDIARARRLQAEAEEARSRAHAVEGQVEDVVGNLRQGTVALQEAQDTMQGTSRSLRLIQDRVAEVQQVLRPAEKLVTSMTKQLGDFWTRMEELRHQARQQGAEAVQAQQLAEGASEQALSAQEGFERIKQKYAELKDR

SEQ ID NO: 7684 - protein, 188 aa, Homo Sapiens
MRPFFLLCFALPGLLHAQQACSRGACYPPVGDLLVGRTRFLRASSTCGLTKPETYCTQYGEWQMKCCKCDSRQPHNYYSHRVENVASSSGPMRWWQSQNDVNPVSLQLDLDRRFQLQEVMMEFQGPMPAGMLIERSSDFGKTWRVYQYLAADCTSTFPRVRQGRPQSWQDVRCQSLPQRPNARLNGGK

SEQ ID NO: 7685 - protein, 1172 aa, Homo Sapiens [sequence omitted]

SEQ ID NO: 7686 - protein, 1172 aa, Homo Sapiens [sequence omitted]

SEQ ID NO: 7687 - protein, 1172 aa, Homo Sapiens [sequence omitted]

SEQ ID NO: 7688 - protein, 1761 aa, Homo Sapiens
MQFQLTLFLHLGWLSYSKAQDDCNRGACHPTTGDLLVGRNTQLMASSTCGLSRAQKYCILSYLEGEQKCFICDSRFPYDPYDQPNSHTIENVIVSFEPDREKKWWQSENGLDHVSIRLDLEALFRFSHLILTFKTFRPAAMLVERSTDYGHNWKVFKYFAKDCATSFPNITSGQAQGVGDIVCDSKYSDIEPSTGGEVVLKVLDPSFEIENPYSPYIQDLVTLTNLRINFTKLHTLGDALLGRRQNDSLDKYYYALYEMIVRGSCFCNGHASECRPMQKMRGDVFSPPGMVHGQCVCQHNTDGPNCERCKDFFQDAPWRPAADLQDNACRSCSCNSHSSRCHFDMTTYLASGGLSGGVCEDCQHNTEGQHCDRCRPLFYRDPLKTISDPYACIPCECDPDGTISGGICVSHSDPALGSVAGQCLCKENVEGAKCDQCKPNHYGLSATDPLGCQPCDCNPLGSLPFLTCDVDTGQCLCLSYVTGAHCEECTVGYWGLGNHLHGCSPCDCDIGGAYSNVCSPKNGQCECRPHVTGRSCSEPAPGYFFAPLNFYLYEAEEATTLQGLAPLGSETFGQSPAVHVVLGEPVPGNPVTWTGPGFARVLPGAGLRFAVNNIPFPVDFTIAIHYETQSAADWTVQIVVNPPGGSEHCIPKTLQSKPQSFALPAATRIMLLPTPICLEPDVQYSIDVYFSQPLQGESHAHSHVLVDSLGLIPQINSLENFCSKQDLDEYQLHNCVEIASAMGPQVLPGACERLIISMSAKLHDGAVACKCHPQGSVGSSCSRLGGQCQCKPLVVGRCCDRCSTGSYDLGHHGCHPCHCHPQGSKDTVCDQVTGQCPCHGEVSGRRCDRCLAGYFGFPSCHPCPCNRFAELCDPETGSCFNCGGFTTGRNCERCIDGYYGNPSSGQPCRPCLCPDDPSSNQYFAHSCYQNLWSSDVICNCLQGYTGTQCGECSTGFYGNPRISGAPCQPCACNNNIDVTDPESCSRVTGECLRCLHNTQGANCQLCKPGHYGSALNQTCRRCSCHASGVSPMECPPGGGACLCDPVTGACPCLPNVTGLACDRCADGYWNLVPGRGCQSCDCDPRTSQSSHCDQLTGQCPCKLGYGGKRCSECQENYYGDPPGRCIPCDCNRAGTQKPICDPDTGMCRCREGVSGQRCDRCARGHSQEFPTCLQCHLCFDQWDHTISSLSKAVQGLMRLAANMEDKRETLPVCEADFKDLRGNVSEIERILKHPVFPSGKFLKVKDYHDSVRRQIMQLNEQLKAVYEFQDLKDTIERAKNEADLLLEDLQEEIDLQSSVLNASIADSSENIKKYYHISSSAEKKINETSSTINTSANTRNDLLTILDTLTSKGNLSLERLKQIKIPDIQILNEKVCGDPGNVPCVPLPCGGALCTGRKGHRKCRGPGCHGSLTLSTNALQKAQEAKSIIRNLDKQVRGLKNQIESISEQAEVSKNNALQLREKLGNIRNQSDSEEENINLFIKKVKNFLLEENVPPEDIEKVANGVLDIHLPIPSQNLTDELVKIQKHMQLCEDYRTDENRLNEEADGAQKLLVKAKAAEKAANILLNLDKTLNQLQQAQITQGRANSTITQLTANITKIKKNVLQAENQTREMKSELELAKQRSGLEDGLSLLQTKLQRHQDHAVNAKVQAESAQHQAGSLEKEFVELKKQYAILQRKTSTTGLTKETLGKVKQLKDAAEKLAGDTEAKIRRITDLERKIQDLNLSRQAKADQLRILEDQVVAIKNEIVEQEKKYARCYS

SEQ ID NO: 7689 - protein, 1761 aa, Homo Sapiens; identical to SEQ ID NO: 7688

SEQ ID NO: 7690 - protein, 772 aa, Homo Sapiens
MQFQLTLFLHLGWLSYSKAQDDCNRGACHPTTGDLLVGRNTQLMASSTCGLSRAQKYCILSYLEGEQKCFICDSRFPYDPYDQPNSHTIENVIVSFEPDREKKWWQSENGLDHVSIRLDLEALFRFSHLILTFKTFRPAAMLVERSTDYGHNWKVFKYFAKDCATSFPNITSGQAQGVGDIVCDSKYSDIEPSTGGEVVLKVLDPSFEIENPYSPYIQDLVTLTNLRINFTKLHTLGDALLGRRQNDSLDKYYYALYEMIVRGSCFCNGHASECRPMQKMRGDVFSPPGMVHGQCVCQHNTDGPNCERCKDFFQDAPWRPAADLQDNACRSCSCNSHSSRCHFDMTTYLASGGLSGGVCEDCQHNTEGQHCDRCRPLFYRDPLKTISDPYACIPCECDPDGTISGGICVSHSDPALGSVAGQCLCKENVEGAKCDQCKPNHYGLSATDPLGCQPCDCNPLGSLPFLTCDVDTGQCLCLSYVTGAHCEECTVGYWGLGNHLHGCSPCDCDIGGAYSNVCSPKNGQCECRPHVTGRSCSEPAPGYFFAPLNFYLYEAEEATTLQGLAPLGSETFGQSPAVHVVLGEPVPGNPVTWTGPGFARVLPGAGLRFAVNNIPFPVDFTIAIHYETQSAADWTVQIVVNPPGGSEHCIPKTLQSKPQSFALPAATRIMLLPTPICLEPDVQYSIDVYFSQPLQGESHAHSHVLVDSAAVQWHNLGSLQPPPPECKQFSCFSFPSSWDYRHPPPHLANFCIFSRDGVSPHWPGWSQTPDLR

SEQ ID NO: 7691 - protein, 749 aa, Homo Sapiens
NIDVTDPESCSRVTGECLRCLHNTQGANCQLCKPGHYGSALNQTCRRCSCHASGVSPMECPPGGGACLCDPVTGACPCLPNVTGLACDRCADGYWNLVPGRGCQSCDCDPRTSQSSHCDQLTGQCPCKLGYGGKRCSECQENYYGDPPGRCIPCDCNRAGTQKPICDPDTGMCRCREGVSGQRCDRCARGHSQEFPTCLQCHLCFDQWDHTISSLSKAVQGLMRLAANMEDKRETLPVCEADFKDLRGNVSEIERILKHPVFPSGKFLKVKDYHDSVRRQIMQLNEQLKAVYEFQDLKDTIERAKNEADLLLEDLQEEIDLQSSVLNASIADSSENIKKYYHISSSAEKKINETSSTINTSANTRNDLLTILDTLTSKGNLSLERLKQIKIPDIQILNEKVCGDPGNVPCVPLPCGGALCTGRKGHRKCRGPGCHGSLTLSTNALQKAQEAKSIIRNLDKQVRGLKNQIESISEQAEVSKNNALQLREKLGNIRNQSDSEEENINLFIKKVKNFLLEENVPPEDIEKVANGVLDIHLPIPSQNLTDELVKIQKHMQLCEDYRTDENRLNEEADGAQKLLVKAKAAEKAANILLNLDKTLNQLQQAQITQGRANSTITQLTANITKIKKNVLQAENQTREMKSELELAKQRSGLEDGLSLLQTKLQRHQDHAVNAKVQAESAQHQAGSLEKEFVELKKQYAILQRKTSTTGLTKETLGKVKQLKDAAEKLAGDTEAKIRRITGCFQNSAR

SEQ ID NO: 7692 - protein, 38 aa, Homo Sapiens
MKNEFDKLVCNCKHNTYGVDCEKCLPFFNDRPWRRATA

SEQ ID NO: 7693 - protein, 1609 aa, Homo Sapiens
MRGSHRAAPALRPRGRLWPVLAVLAAAAAAGCAQAAMDECTDEGGRPQRCMPEFVNAAFNVTVVATNTCGTPPEEYCVQTGVTGVTKSCHLCDAGQPHLQHGAAFLTDYNNQADTTWWQSQTMLAGVQYPSSINLTLHLGKAFDITYVRLKFHTSRPESFAIYKRTREDGPWIPYQYYSGSCENTYSKANRGFIRTGGDEQQALCTDEFSDISPLTGGNVAFSTLEGRPSAYNFDNSPVLQEWVTATDIRVTLNRLNTFGDEVFNDPKVLKSYYYAISDFAVGGRCKCNGHASECMKNEFDKLVCNCKHNTYGVDCEKCLPFFNDRPWRRATAESASECLPCDCNGRSQECYFDPELYRSTGHGGHCTNCQDNTDGAHCERCRENFFRLGNNEACSSCHCSPVGSLSTQCDSYGRCSCKPGVMGDKCDRCQPGFHSLTEAGCRPCSCDPSGSIDECNIETGRCVCKDNVEGFNCERCKPGFFNLESSNPRGCTPCFCFGHSSVCTNAVGYSVYSISSTFQIDEDGWRAEQRDGSEASLEWSSERQDIAVISDSYFPRYFIAPAKFLGKQVLSYGQNLSFSFRVDRRDTRLSAEDLVLEGAGLRVSVPLIAQGNSYPSETTVKYVFRLHEATDYPWRPALTPFEFQKLLNNLTSIKIRGTYSERSAGYLDDVTLASARPGPGVPATWVESCTCPVGYGGQFCEMCLSGYRRETPNLGPYSPCVLCACNGHSETCDPETGVCNCRDNTAGPHCEKCSDGYYGDSTAGTSSDCQPCPCPGGSSCAVVPKTKEVVCTNCPTGTTGKRCELCDDGYFGDPLGRNGPVRLCRLCQCSDNIDPNAVGNCNRLTGECLKCIYNTAGFYCDRCKDGFFGNPLAPNPADKCKACNCNLYGTMKQQSSCNPVTGQCECLPHVTGQDCGACDPGFYNLQSGQGCERCDCHALGSTNGQCDIRTGQCECQPGITGQHCERCEVNHFGFGPEGCKPCDCHPEGSLSLQCKDDGRCECREGFVGNRCDQCEENYFYNRSWPGCQECPACYRLVKDKVADHRVKLQELESLIANLGTGDEMVTDQAFEDRLKEAEREVMDLLREAQDVKDVDQNLMDRLQRVNNTLSSQISRLQNIRNTIEETGNLAEQARAHVENTERLIEIASRELEKAKVAAANVSVTQPESTGDPNNMTLLAEEARKLAERHKQEADDIVRVAKTANDTSTEAYNLLLRTLAGENQTAFEIEELNRKYEQAKNISQDLEKQAARVHEEAKRAGDKAVEIYASVAQLSPLDSETLENEANNIKMEAENLEQLIDQKLKDYEDLREDMRGKELEVKNLLEKGKTEQQTADQLLARADAAKALAEEAAKKGRDTLQEANDILNNLKDFDRRVNDNKTAAEEALRKIPAINQTITEANEKTREAQQALGSAAADATEAKNKAHEAERIASAVQKNATSTKAEAERTFAEVTDLDNEVNNMLKQLQEAEKELKRKQDDADQDMMMAGMASQAAQEAEINARKAKNSVTSLLSIINDLLEQLGQLDTVDLNKLNEIEGTLNKAKDEMKVSDLDRKVSDLENEAKKQEAAIMDYNRDIEEIMKDIRNLEDIRKTLPSGCFNTPSIEKP

SEQ ID NO: 7694 - protein, 1193 aa, Homo Sapiens
MPALWLGCCLCFSLLLPAARATSRREVCDCNGKSRQCIFDRELHRQTGNGFRCLNCNDNTDGIHCEKCKNGFYRHRERDRCLPCNCNSKGSLSARCDNSGRCSCKPGVTGARCDRCLPGFHMLTDAGCTQDQRLLDSKCDCDPAGIAGPCDAGRCVCKPAVTGERCDRCRSGYYNLDGGNPEGCTQCFCYGHSASCRSSAEYSVHKITSTFHQDVDGWKAVQRNGSPAKLQWSQRHQDVFSSAQRLDPVYFVAPAKFLGNQQVSYGQSLSFDYRVDRGGRHPSAHDVILEGAGLRITAPLMPLGKTLPCGLTKTYTFRLNEHPSNNWSPQLSYFEYRRLLRNLTALRIRATYGEYSTGYIDNVTLISARPVSGAPAPWVEQCICPVGYKGQFCQDCASGYKRDSARLGPFGTCIPCNCQGGGACDPDTGDCYSGDENPDIECADCPIGFYNDPHDPRSCKPCPCHNGFSCSVMPETEEVVCNNCPPGVTGARCELCADGYFGDPFGEHGPVRPCQPCQCNNNVDPSASGNCDRLTGRCLKCIHNTAGIYCDQCKAGYFGDPLAPNPADKCRACNCNPMGSEPVGCRSDGTCVCKPGFGGPNCEHGAFSCPACYNQVKIQMDQFMQQLQRMEALISKAQGGDGVVPDTELEGRMQQAEQALQDILRDAQISEGASRSLGLQLAKVRSQENSYQSRLDDLKMTVERVRALGSQYQNRVRDTHRLITQMQLSLAESEASLGNTNIPASDHYVGPNGFKSLAQEATRLAESHVESASNMEQLTRETEDYSKQALSLVRKALHEGVGSGSGSPDGAVVQGLVEKLEKTKSLAQQLTREATQAEIEADRSYQHSLRLLDSVSRLQGVSDQSFQVEEAKRIKQKADSLSSLVTRHMDEFKRTQKNLGNWKEEAQQLLQNGKSGREKSDQLLSRANLAKSRAQEALSMGNATFYEVESILKNLREFDLQVDNRKAEAEEAMKRLSYISQKVSDASDKTQQAERALGSAAADAQRAKNGAGEALEISSEIEQEIGSLNLEANVTADGALAMEKGLASLKSEMREVEGELERKELEFDTNMDAVQMVITEAQKVDTRAKNAGVTIQDTLNTLDGLLHLMDQPLSVDEEGLVLLEQKLSRAKTQINSQLRPMMSELEERARQQRGHLHLLETSIDGILADVKNLENIRDNLPPGCYNTQALEQQ

SEQ ID NO: 7695 - protein, 1111 aa, Homo Sapiens
MPALWLGCCLCFSLLLPAARATSRREVCDCNGKSRQCIFDRELHRQTGNGFRCLNCNDNTDGIHCEKCKNGFYRHRERDRCLPCNCNSKGSLSARCDNSGRCSCKPGVTGARCDRCLPGFHMLTDAGCTQDQRLLDSKCDCDPAGIAGPCDAGRCVCKPAVTGERCDRCRSGYYNLDGGNPEGCTQCFCYGHSASCRSSAEYSVHKITSTFHQDVDGWKAVQRNGSPAKLQWSQRHQDVFSSAQRLDPVYFVAPAKFLGNQQVSYGQSLSFDYRVDRGGRHPSAHDVILEGAGLRITAPLMPLGKTLPCGLTKTYTFRLNEHPSNNWSPQLSYFEYRRLLRNLTALRIRATYGEYSTGYIDNVTLISARPVSGAPAPWVEQCICPVGYKGQFCQDCASGYKRDSARLGPFGTCIPCNCQGGGACDPDTGDCYSGDENPDIECADCPIGFYNDPHDPRSCKPCPCHNGFSCSVMPETEEVVCNNCPPGVTGARCELCADGYFGDPFGEHGPVRPCQPCQCNNNVDPSASGNCDRLTGRCLKCIHNTAGIYCDQCKAGYFGDPLAPNPADKCRACNCNPMGSEPVGCRSDGTCVCKPGFGGPNCEHGAFSCPACYNQVKIQMDQFMQQLQRMEALISKAQGGDGVVPDTELEGRMQQAEQALQDILRDAQISEGASRSLGLQLAKVRSQENSYQSRLDDLKMTVERVRALGSQYQNRVRDTHRLITQMQLSLAESEASLGNTNIPASDHYVGPNGFKSLAQEATRLAESHVESASNMEQLTRETEDYSKQALSLVRKALHEGVGSGSGSPDGAVVQGLVEKLEKTKSLAQQLTREATQAEIEADRSYQHSLRLLDSVSRLQGVSDQSFQVEEAKRIKQKADSLSSLVTRHMDEFKRTQKNLGNWKEEAQQLLQNGKSGREKSDQLLSRANLAKSRAQEALSMGNATFYEVESILKNLREFDLQVDNRKAEAEEAMKRLSYISQKVSDASDKTQQAERALGSAAADAQRAKNGAGEALEISSEIEQEIGSLNLEANVTADGALAMEKGLASLKSEMREVEGELERKELEFDTNMDAVQMVITEAQKVDTRAKNAGVTIQDTLNTLDGLLHLMGM

SEQ ID NO: 7696 - protein, 1575 aa, Homo Sapiens
MAAAALLLGLALLAPRAAGAGMGACYDGAGRPQRCLPVFENAAFGRLAQASHTCGSPPEDFCPHVGAAGAGAHCQRCDAADPQRHHNASYLTDFHSQDESTWWQSPSMAFGVQYPTSVNITLRLGKAYEITYVRLKFHTSRPESFAIYKRSRADGPWEPYQFYSASCQKTYGRPEGQYLRPGEDERVAFCTSEFSDISPLSGGNVAFSTLEGRPSAYNFEESPGLQEWVTSTELLISLDRLNTFGDDIFKDPKVLQSYYYAVSDFSVGGRCKCNGHASECGPDVAGQLACRCQHNTTGTDCERCLPFFQDRPWARGTAEAAHECLPCNCSGRSEECTFDRELFRSTGHGGRCHHCRDHTAGPHCERCQENFYHWDPRMPCQPCDCQSAGSLHLQCDDTGTCACKPTVTGWKCDRCLPGFHSLSEGGCRPCTCNPAGSLDTCDPRSGRCPCKENVEGNLCDRCRPGTFNLQPHNPAGCSSCFCYGHSKVCASTAQFQVHHILSDFHQGAEGWWARSVGGSEHPPQWSPNGVLLSPEDEEELTAPEKFLGDQRFSYGQPLILTFRVPPGDSPLPVQLRLEGTGLALSLRHSSLSGPQDAGHPREVELRFHLQETSEDVAPPLPPFHFQRLLANLTSLRLRVSPGPSPAGPVFLTEVRLTSARPGLSPPASWVEICSCPTGYTGQFCESCAPGYKREMPQGGPYASCVPCTCNQHGTCDPNTGICVCSHHTEGPSCERCLPGFYGNPFAGQADDCQPCPCPGQSACTTIPESREVVCTHCPPGQRGRRCEVCDDGFFGDPLGLFGHPQPCHQCQCSGNVDPNAVGNCDPLSGHCLRCLHNTTGDHCEHCQEGFYGSALAPRPADKCMPCSCHPQGSVSEQMPCDPVTGQCSCLPHVTARDCSRCYPGFFDLQPGRGCRSCKCHPLGSQEDQCHPKTGQCTCRPGVTGQACDRCQLGFFGFSIKGCRACRCSPLGAASAQCHENGTCVCRPGFEGYKCDRCHDNFFLTADGTHCQQCPSCYALVKEEAAKLKARLTLTEGWLQGSDCGSPWGPLDILLGEAPRGDVYQGHHLLPGAREAFLEQMMSLEGAVKAAREQLQRLNKGARCAQAGSQKTCTQLADLEAVLESSEEEILHAAAILASLEIPQEGPSQPTKWSHLATEARALARSHRDTATKIAATAWRALLASNTSYALLWNLLEGRVALETQRDLEDRYQEVQAAQKALRTAVAEVLPEAESVLATVQQVGADTAPYLALLASPGALPQKSRAEDLGLKAKALEKTVASWQHMATEAARTLQTAAQATLRQTEPLTKLHQEARAALTQASSSVQAATVTVMGARTLLADLEGMKLQFPRPKDQAALQRKADSVSDRLLADTRKKTKQAERMLGNAAPLSSSAKKKGREAEVLAKDSAKLAKALLRERKQAHRRASRLTSQTQATLQQASQQVLASEARRQELEEAERVGAGLSEMEQQIRESRISLEKDIETLSELLARLGSLDTHQAPAQALNETQWALERLRLQLGSPGSLQRKLSLLEQESQQQELQIQGFESDLAEIRADKQNLEAILHSLPENCASWQ

SEQ ID NO: 7697 - protein, 257 aa, Homo Sapiens
  misc_feature (1)..(1): Xaa can be any naturally occurring amino acid
XTLQTAAQATLRQTEPLTKLHQEARAALTQASSSVQAATVTVMGARTLLADLEDTRKKTKQAERMLGNAAPLSSSAKKKGREAEVLAKDSAKLAKALLRERKQAHRRASRLTSQTQATLQQASQQVLASEARRQELEEAERVGAGLSEMEQQIRESRISLEKDIETLSELLARLGSLDTHQAPAQALNETQWALERLRLQLGSPGSLQRKLSLLEQESQQQELQIQGFESDLAEIRADKQNLEAILHSLPENCASWQ

SEQ ID NO: 7698 - protein, 180 aa, Homo Sapiens
MPRQLSAAAALFASLAVILHDGSQMRAKAFPETRDYSQPTAAATVQDIKKPVQQPAKQAPHQTLAARFMDGHITFQTAATVKIPTTTPATTKNTATTSPITYTLVTTQATPNNSHTAPPVTEVTVGPSLAPYSLPPTITPPAHTTGTSSSTVSHTTGNTTQPSNQTTLPATLSIALHKST

SEQ ID NO: 7699 - protein, 416 aa, Homo Sapiens
MPRQLSAAAALFASLAVILHDGSQMRAKAFPETRDYSQPTAAATVQDIKKPVQQPAKQAPHQTLAARFMDGHITFQTAATVKIPTTTPATTKNTATTSPITYTLVTTQATPNNSHTAPPVTEVTVGPSLAPYSLPPTITPPAHTTGTSSSTVSHTTGNTTQPSNQTTLPATLSIALHKSTTGQKPVQPTHAPGTTAAAHNTTRTAAPASTVPGPTLAPQPSSVKTGIYQVLNGSRLCIKAEMGIQLIVQDKESVFSPRRYFNIDPNATQASGNCGTRKSNLLLNFQGGFVNLTFTKDEESYYISEVGAYLTVSDPETIYQGIKHAVVMFQTAVGHSFKCVSEQSLQLSAHLQVKTTDVQLQAFDFEDDHFGNVDECSSDYTIVLPVIGAIVVGLCLMGMGVYKIRLRCQSSGYQRI

SEQ ID NO: 7700 - protein, 143 aa, Homo Sapiens
MRAKAFPETRDYSQPTAAATVQDIKKPVQQPAKQAPHQTLAARFMDGHITFQTAATVKIPTTTPATTKNTATTSPITYTLVTTQATPNNSHTAPPVTEVTVGPSLAPYSLPPTITPPAHTTGTSSSTVSHTTGNTTQPSNQTT

SEQ ID NO: 7701 - protein, 392 aa, Homo Sapiens
MRAKAFPETRDYSQPTAAATVQDIKKPVQQPAKQAPHQTLAARFMDGHITFQTAATVKIPTTTPATTKNTATTSPITYTLVTTQATPNNSHTAPPVTEVTVGPSLAPYSLPPTITPPAHTTGTSSSTVSHTTGNTTQPSNQTTLPATLSIALHKSTTGQKPVQPTHAPGTTAAAHNTTRTAAPASTVPGPTLAPQPSSVKTGIYQVLNGSRLCIKAEMGIQLIVQDKESVFSPRRYFNIDPNATQASGNCGTRKSNLLLNFQGGFVNLTFTKDEESYYISEVGAYLTVSDPETIYQGIKHAVVMFQTAVGHSFKCVSEQSLQLSAHLQVKTTDVQLQAFDFEDDHFGNVDECSSDYTIVLPVIGAIVVGLCLMGMGVYKIRLRCQSSGYQRI

SEQ ID NO: 7702 - protein, 690 aa, Homo Sapiens
MLPRGRPRALGAAALLLLLLLLGFLLFDGRLRRAAALDGDPGAGPGDHNRSDCGPQPPPPPKCELLHVAIVCAGHNSSRDVITLVKSMLFYRKNPLHLHLVTDAVARNILETLFHTWMVPAVRVSFYHADQLKPQVSWIPNKHYSGLYGLMKLVLPSALPAELARVIVLDTDVTFASDISELWALFAHFSDTQAIGLVENQSDWYLGNLWKNHRPWPALGRGFNTGVILLRLDRLRQAGWEQMWRLTARRELLSLPATSLADQDIFNAVIKEHPGLVQRLPCVWNVQLSDHTLAERCYSEASDLKVIHWNSPKKLRVKNKHVEFFRNFYLTFLEYDGNLLRRELFVCPSQPPPGAEQLQQALAQLDEEDPCFEFRQQQLTVHRVHVTFLPHEPPPPRPHDVTLVAQLSMDRLQMLEALCRHWPGPMSLALYLTDAEAQQFLHFVEASPVLAARQDVAYHVVYREGPLYPVNQLRNVALAQALTPYVFLSDIDFLPAYSLYDYLRASIEQLGLGSRRKAALVVPAFETLRYRFSFPHSKVELLALLDAGTLYTFRYHEWPRGHAPTDYARWREAQAPYRVQWAANYEPYVVVPRDCPRYDPRFVGFGWNKVAHIVELDAQEYELLVLPEAFTIHLPHAPSLDISRFRSSPTYRDCLQALKDEFHQDLSRHHGAAALKYLPALQQPQSPARG

SEQ ID NO: 7703 - protein, 721 aa, Homo Sapiens
MLPRGRPRALGAAALLLLLLLLGFLLFGGDLGCERREPGGRAGAPGCFPGPLMPRVPPDGRLRRAAALDGDPGAGPGDHNRSDCGPQPPPPPKCELLHVAIVCAGHNSSRDVITLVKSMLFYRKNPLHLHLVTDAVARNILETLFHTWMVPAVRVSFYHADQLKPQVSWIPNKHYSGLYGLMKLVLPSALPAELARVIVLDTDVTFASDISELWALFAHFSDTQAIGLVENQSDWYLGNLWKNHRPWPALGRGFNTGVILLRLDRLRQAGWEQMWRLTARRELLSLPATSLADQDIFNAVIKEHPGLVQRLPCVWNVQLSDHTLAERCYSEASDLKVIHWNSPKKLRVKNKHVEFFRNFYLTFLEYDGNLLRRELFVCPSQPPPGAEQLQQALAQLDEEDPCFEFRQQQLTVHRVHVTFLPHEPPPPRPHDVTLVAQLSMDRLQMLEALCRHWPGPMSLALYLTDAEAQQFLHFVEASPVLAARQDVAYHVVYREGPLYPVNQLRNVALAQALTPYVFLSDIDFLPAYSLYDYLRASIEQLGLGSRRKAALVVPAFETLRYRFSFPHSKVELLALLDAGTLYTFRYHEWPRGHAPTDYARWREAQAPYRVQWAANYEPYVVVPRDCPRYDPRFVGFGWNKVAHIVELDAQEYELLVLPEAFTIHLPHAPSLDISRFRSSPTYRDCLQALKDEFHQDLSRHHGAAALKYLPALQQPQSPARG

SEQ ID NO: 7704 - protein, 721 aa, Homo Sapiens; identical to SEQ ID NO: 7703

SEQ ID NO: 7705 - protein, 721 aa, Homo Sapiens; identical to SEQ ID NO: 7703

SEQ ID NO: 7706 - protein, 158 aa, Homo Sapiens
WNSPKKLRVKNKHVEFFRNFYLTFLEYDGNLLRRELFVCPSQPPPGAEQLQQALAQLDEEDPCFEFRQQQLTVHRVHVTFLPHEPPPPRPHDVTLVAQLSMDRTWPTMWCTVRGPYTPSTSFATWPWPRPSRLTSSSVTLTSCLPILSTTTSGPPLSS

SEQ ID NO: 7707 - protein, 109 aa, Homo Sapiens
  misc_feature (1)..(1): Xaa can be any naturally occurring amino acid
XLLDAGTLYTFRNMSSWCCPRPSPSICPTLQAWTSPASAPAPPIVTASRPSRTNSTRTCPATMGLLPSNTSQPCSSPRALPEAEAGPALPLILALGRHQGNLPSAIPAI

SEQ ID NO: 7708 - protein, 166 aa, Homo Sapiens
IPRSPQPLGGSHRTPSSRRDSDGANSVASYENEEPACEDADEDEDDYHNPGYLVVLPDSTPATSTAAPSAPALSTPGIRDSAFSMESIDDYVNVPESGESAEASLDGSREYVNVSQELHPGAAKTEPVEAESVLEPGLPGTAELGSWKWLWGPHMASCPCSSLTTA

SEQ ID NO: 7709 - protein, 269 aa, Homo Sapiens
MEATAASWQVAVPVLGGASRPLGPRGAASLLRAPLQMEEAILVPCVLGLLLLPILAMLMALCVHCHRLPGSYDSTSSDSLYPRGIQFKRPHTVAPWPPAYPPVTSYPPLSQPDLLPIPRSPQPLGGSHRTPSSRRDSDGANSVASYENEEPACEDADEDEDDYHNPGYLVVLPDSTPATSTAAPSAPALSTPGIRDSAFSMESIDDYVNVPESGESAEASLDGSREYVNVSQELHPGAAKTEPAALSSQEAEEVEEEGAPDYENLQELN

SEQ ID NO: 7710 - protein, 85 aa, Homo Sapiens
MEEAILVPCVLGLLLLPILAMLMALCVHCHRLPGSYDSTSSDSLYPRGIQFKRPHTVAPWPPAYPPVTSYPPLSQPDLLPIPHDP

SEQ ID NO: 7711 - protein, 85 aa, Homo Sapiens; identical to SEQ ID NO: 7710

SEQ ID NO: 7712 - protein, 233 aa, Homo Sapiens
MEEAILVPCVLGLLLLPILAMLMALCVHCHRLPGSYDSTSSDSLYPRGIQFKRPHTVAPWPPAYPPVTSYPPLSQPDLLPIPRSPQPLGGSHRTPSSRRDSDGANSVASYENEEPACEDADEDEDDYHNPGYLVVLPDSTPATSTAAPSAPALSTPGIRDSAFSMESIDDYVNVPESGESAEASLDGSREYVNVSQELHPGAAKTEPAALSSQEAEEVEEEGAPDYENLQELN

SEQ ID NO: 7713 - protein, 262 aa, Homo Sapiens
MEEAILVPCVLGLLLLPILAMLMALCVHCHRLPGSYDSTSSDSLYPRGIQFKRPHTVAPWPPAYPPVTSYPPLSQPDLLPIPRSPQPLGGSHRTPSSRRDSDGANSVASYENEGASGIRGAQAGWGVWGPSWTRLTPVSLPPEPACEDADEDEDDYHNPGYLVVLPDSTPATSTAAPSAPALSTPGIRDSAFSMESIDDYVNVPESGESAEASLDGSREYVNVSQELHPGAAKTEPAALSSQEAEEVEEEGAPDYENLQELN

SEQ ID NO: 7714 - protein, 252 aa, Homo Sapiens
MEEAILVPCVLGLLLLPILAMLMALCVHCHRLPGSYDSTSSDSLYPRGIQFKRPHTVAPWPPAYPPVTSYPPLSQPDLLPIPRSPQPLRDSDGANSVASYENEGASGIRGAQAGWGVWGPSWTRLTPVSLPPEPACEDADEDEDDYHNPGYLVVLPDSTPATSTAAPSAPALSTPGIRDSAFSMESIDDYVNVPESGESAEASLDGSREYVNVSQELHPGAAKTEPAALSSQEAEEVEEEGAPDYENLQELN

SEQ ID NO: 7715 - protein, 232 aa, Homo Sapiens
MEEAILVPCVLGLLLLPILAMLMALCVHCHRLPGSYDSTSSDSLYPRGIQFKRPHTVAPWPPAYPPVTSYPPLSQPDLLPIPSPQPLGGSHRTPSSRRDSDGANSVASYENEEPACEDADEDEDDYHNPGYLVVLPDSTPATSTAAPSAPALSTPGIRDSAFSMESIDDYVNVPESGESAEASLDGSREYVNVSQELHPGAAKTEPAALSSQEAEEVEEEGAPDYENLQELN

SEQ ID NO: 7716 - protein, 232 aa, Homo Sapiens; identical to SEQ ID NO: 7715

SEQ ID NO: 7717 - protein, 261 aa, Homo Sapiens
MEEAILVPCVLGLLLLPILAMLMALCVHCHRLPGSYDSTSSDSLYPRGIQFKRPHTVAPWPPAYPPVTSYPPLSQPDLLPIPSPQPLGGSHRTPSSRRDSDGANSVASYENEGASGIRGAQAGWGVWGPSWTRLTPVSLPPEPACEDADEDEDDYHNPGYLVVLPDSTPATSTAAPSAPALSTPGIRDSAFSMESIDDYVNVPESGESAEASLDGSREYVNVSQELHPGAAKTEPAALSSQEAEEVEEEGAPDYENLQELN

SEQ ID NO: 7718 - protein, 100 aa, Homo Sapiens
MSSGTELLWPGAALLVLLGVAASLCVRCSRPGAKRREDQQSFTGSRTYSLVGQAWPGPLADMAPTRKDKLLQFYPSLEDPASSRYQNFSKGSRHGSEEAY

SEQ ID NO: 7719 - protein, 58 aa, Homo Sapiens
MSSGTELLWPGAALLVLLGVAASLCVRCSRPGAKRSEKIYQQRSLREDQQSFTGSRTY

SEQ ID NO: 7720 - protein, 64 aa, Homo Sapiens
MSSGTELLWPGAALLVLLGVAASLCVRCSRPGAKRSEKIYQQRSLREDQQSFTGSRTYSLVGQA

SEQ ID NO: 7721 - protein, 100 aa, Homo Sapiens
MSSGTELLWPGAALLVLLGVAASLCVRCSRPGAKRSEKIYQQRSLREDQQSFTGSRTYSLVGQAWPGPLADMAPTRKDKLLQFYPSLEDPASSRYQNFSK

SEQ ID NO: 7722 - protein, 111 aa, Homo Sapiens
MSSGTELLWPGAALLVLLGVAASLCVRCSRPGAKRSEKIYQQRSLREDQQSFTGSRTYSLVGQAWPGPLADMAPTRKDKLLQFYPSLEDPASSRYQNFSKGSRHGSEEAYI

SEQ ID NO: 7723 - protein, 243 aa, Homo Sapiens
MSSGTELLWPGAALLVLLGVAASLCVRCSRPGAKRSEKIYQQRSLREDQQSFTGSRTYSLVGQAWPGPLADMAPTRKDKLLQFYPSLEDPASSRYQNFSKGSRHGSEEAYIDPIAMEYYNWGRFSKPPEDDDANSYENVLICKQKTTETGAQQEGIGGLCRGDLSLSLALKTGPTSGLCPSASPEEDEESEDYQNSASIHQWRESRKVMGQLQREASPGPVGSPDEEDGEPDYVNGEVAATEA

SEQ ID NO: 7724 - protein, 243 aa, Homo Sapiens; identical to SEQ ID NO: 7723

SEQ ID NO: 7725 - protein, 243 aa, Homo Sapiens; identical to SEQ ID NO: 7723

SEQ ID NO: 7726 - protein, 243 aa, Homo Sapiens; identical to SEQ ID NO: 7723

SEQ ID NO: 7727 - protein, 481 aa, Homo Sapiens
MGALARALPSILLALLLTSTPEALGANPGLVARITDKGLQYAAQEGLLALQSELLRITLPDFTGDLRIPHVGRGRYEFHSLNIHSCELLHSALRPVPGQGLSLSISDSSIRVQGRWKVRKSFFKLQGSFDVSVKGISISVNLLLGSESSGRPTVTASSCSSDIADVEVDMSGDLGWLLNLFHNQIESKFQKVLESRICEMIQKSVSSDLQPYLQTLPVTTEIDSFADIDYSLVEAPRATAQMLEVMFKGEIFHRNHRSPVTLLAAVMSLPEEHNKMVYFAISDYVFNTASLVYHEEGYLNFSITDDMIPPDSNIRLTTKSFRPFVPRLARLYPNMNLELQGSVPSAPLLNFSPGNLSVDPYMEIDAFVLLPSSSKEPVFRLSVATNVSATLTFNTSKITGFLKPGKVKVELKESKVGLFNAELLEALLNYYILNTFYPKFNDKLAEGFPLPLLKRVQLYDLGLQIHKDFLFLGANVQYMRV

SEQ ID NO: 7728 - protein, 255 aa, Homo Sapiens
MCYRKTEDFFTIWLDLNMFLPLGVDCWIDNTRVVYNRSSGLVSNAPGVQIRVPGFGKTYSVEYLDSSKLAGYLHTLVQNLVNNGYVRDETVRAAPYDWRLEPGQQEEYYRKLAGLVEEMHAAYGKPVFLIGHSLGCLHLLYFLLRQPQAWKDRFIDGFISLGAPWGGSIKPMLVLASGDNQGIPIMSSIKLKEEQRITTTSPWMFPSRMAWPEDHVFISTPSFNYTGRDFQRFFADLHFEEGWYMWLQSRDLLAG

SEQ ID NO: 7729 - protein, 93 aa, Homo Sapiens
MGPPGSPWQWVTLLLGLLLPPAAPFWLLNVLFPPHTTPKAELSNHTRPVILARSQAGQTRCGELDVLPQDRGLLHHLAGSQHVPTPWGRLLDR

SEQ ID NO: 7730 - protein, 440 aa, Homo Sapiens
MGPPGSPWQWVTLLLGLLLPPAAPFWLLNVLFPPHTTPKAELSNHTRPVILVPGCLGNQLEAKLDKPDVVNWMCYRKTEDFFTIWLDLNMFLPLGVDCWIDNTRVVYNRSSGLVSNAPGVQIRVPGFGKTYSVEYLDSSKLAGYLHTLVQNLVNNGYVRDETVRAAPYDWRLEPGQQEEYYRKLAGLVEEMHAAYGKPVFLIGHSLGCLHLLYFLLRQPQAWKDRFIDGFISLGAPWGGSIKPMLVLASGDNQGIPIMSSIKLKEEQRITTTSPWMFPSRMAWPEDHVFISTPSFNYTGRDFQRFFADLHFEEGWYMWLQSRDLLAGLPAPGVEVYCLYGVGLPTPRTYIYDHGFPYTDPVGVLYEDGDDTVATRSTELCGLWQGRQPQPVHLLPLHGIQHLNMVFSNLTLEHINAILLGAYRQGPPASPTASPEPPPPE

SEQ ID NO: 7731 - protein, 61 aa, Homo Sapiens
SPRPGRTALLMASSLLGLPGVAPSSPCWSWPQECLCPGMCFTEDGSARARARPPEAPPALP

SEQ ID NO: 7732 - protein, 138 aa, Homo Sapiens
VQIRVPGFGKTYSVEYLDSSKLAGYLHTLVQNLVNNGYVRDETVRAAPYDWRLEPGQQEEYYRKLAGLVEEMHAAYGKPVFLIGHSLGCLHLLYFLLRQPQAWKDRFIDGFISLGAPWGGSIKPMLVLASETGSHCIA

SEQ ID NO: 7733 - protein, 80 aa, Homo Sapiens
  misc_feature (1)..(1): Xaa can be any naturally occurring amino acid
XEYYRKLAGLVEEMHAAYGKPVFLIGHSLGCLHLLYFLLRQPQAWKDRFIDGFISLGAPWGGSIKPMLVLASGSGTRAQH

SEQ ID NO: 7734 - protein, 107 aa, Homo Sapiens
  misc_feature (1)..(1): Xaa can be any naturally occurring amino acid
XLPLGVDCWIDNTRVVYNRSSGLVSNAPGVQIRVPGFGKTYSVEYLDSSKLAGPPATACAPAAPARDTASQHGLQQPDPGAHQCHPAGCLPPGSPCIPDCQPRAPAS

SEQ ID NO: 7735 - protein, 176 aa, Homo Sapiens
MKPLLLAVSLGLIAALQAHHLLASDEEIQDVSGTWYLKAMTVDREFPEMNLESVTPMTLTTLEGGNLEAKVTMLISGRCQEVKAVLEKTDEPGKYTADGGKHVAYIIRSHVKDHYIFYCEGELHGKPVRGVKLVGRDPKNNLEALEDFEKAAGARGLSTESILIPRQSETCSPGSD

SEQ ID NO: 7736 - protein, 176 aa, Homo Sapiens; identical to SEQ ID NO: 7735

SEQ ID NO: 7737 - protein, 86 aa, Homo Sapiens
MRQGLLVLALVLVLVLVLAAGSQVQEWYPRESHALNWNKFSGFWYILATATDAQGFLPARDKRKLGASVVKVNKVGQLRVLLAFRR

SEQ ID NO: 7738 - protein, 187 aa, Homo Sapiens
MRQGLLVLALVLVLVLVLAAGSQVQEWYPRESHALNWNKFSGFWYILATATDAQGFLPARDKRKLGASVVKVNKVGQLRVLLAFRRGQGCGRAQPRHPGTSGHLWASLSVKGVKAFHVLSTDYSYGLVYLRLGRATQNYKNLLLFHRQNVSSFQSLKEFMDACDILGLSKAAVILPKDASRTHTILP

SEQ ID NO: 7739 - protein, 164 aa, Homo Sapiens
MRQGLLVLALVLVLVLVLAAGSQVQEWYPRESHALNWNKFSGFWYILATATDAQGFLPARDKRKLGASVVKVNKVGQLRVLLAFRRLKGCQSQEVILRKDGKKPVFGNACAYAAGPREGQEGDRQNVSSFQSLKEFMDACDILGLSKAAVILPKDASRTHTILP

SEQ ID NO: 7740 - protein, 200 aa, Homo Sapiens
MRQGLLVLALVLVLVLVLAAGSQVQEWYPRESHALNWNKFSGFWYILATATDAQGFLPARDKRKLGASVVKVNKVGQLRVLLAFRRLKGCQSQEVILRKDGKKPVFGNACAYAAGPREGQEGVKGVKAFHVLSTDYSYGLVYLRLGRATQNYKNLLLFHRQNVSSFQSLKEFMDACDILGLSKAAVILPKDASRTHTILP

SEQ ID NO: 7741 - protein, 75 aa, Homo Sapiens
MRQGLLVLALVLVLVLVLAAGSQVQEWYPRESHALNWNKGQEEAGGVRGKGEQSGPAPRAPRLQTIGRMFRASRV

SEQ ID NO: 7742 - protein, 37 aa, Homo Sapiens
  misc_feature (1)..(1): Xaa can be any naturally occurring amino acid
XTDAQGFLPARDKRKLGASVVKVNKVGQLRVLLAFRR

SEQ ID NO: 7743 - protein, 102 aa, Homo Sapiens
ALLNAFTATFELSDDGRFEVWNAMTRGQHCDTWSYVLIPAAQPGQFTVDHGVGRSWLLPPGTLDQFICLGRAQGLSDDNIVFPDVTGGALDLSSLPWVAAPA

SEQ ID NO: 7744 - protein, 192 aa, Homo Sapiens
MRLLCGLWLWLSLLKVLQAQTPTPLPLPPPMQSFQGNQFQGEWFVLGLAGNSFRPEHRALLNAFTATFELSDDGRFEVWNAMTRGQHCDTWSYVLIPAAQPGQFTVDHGVEPGADREETRVVDSDYTQFALMLSRRHTSRLAVLRISLLGRSWLLPPGTLDQFICLGRAQGLSDDNIVFPDVTGWSPQASVC

SEQ ID NO: 7745 - protein, 90 aa, Homo Sapiens
TFELSDDGRFEVWNAMTRGQHCDTWSYVLIPAAQPGQFTVDHGVDTRAGWPSSGSACWAGAGCCLPGRWTSSSAWAELRASRMTTSSSQM

SEQ ID NO: 7746 - protein, 184 aa, Homo Sapiens
MMSFLLGAILTLLWAPTAQAEVLLQPDFNAEKFSGLWYVVSMASDCRVFLGKKDHLSMSTRAIRPTEEGGLHVHMEFPGADGCNQVDAEYLKVGSEGHFRVPALGYLDVRIVDTDYSSFAVLYIYKELEGALSTMVQLYSRTQDVSPQALKSFQDFYPTLGLPKDMMVMLPQSDACNPESKEAP

SEQ ID NO: 7747 - protein, 200 aa, Homo Sapiens
MPLGLLWLGLALLGALHAQAQDSTSDLIPAPPLSKVPLQQNFQDNQFQGKWYVVGLAGNAILREDKDPQKMYATIYELKEDKSYNVTSVLFREKAQKCDYWIRTFVPGCQPGEFTLGNIKSYPGLTSYLVRVVSTNYNQHAMVFFKKVSQNREYFKITLYGRTKELTSELKENFIRFSKSLGLPENHIVFPVPIDQCIDG

SEQ ID NO: 7748 - protein, 198 aa, Homo Sapiens
MPLGLLWLGLALLGALHAQAQDSTSDLIPAPPLSKVPLQQNFQDNQFQGKWYVVGLAGNAILREDKDPQKMYATIYELKEDKSYNVTSVLFRKKKCDYWIRTFVPGCQPGEFTLGNIKSYPGLTSYLVRVVSTNYNQHAMVFFKKVSQNREYFKITLYGRTKELTSELKENFIRFSKSLGLPENHIVFPVPIDQCIDG

SEQ ID NO: 7749 - protein, 198 aa, Homo Sapiens; identical to SEQ ID NO: 7748

SEQ ID NO: 7750 - protein, 78 aa, Homo Sapiens
MDLIKRNSGWVFENPSIGVLELWVLATNFRDYAIIFTQLEFGDEPFNTVELYSLTETASQEAMGLFTKWSRSLGFLSQ

SEQ ID NO: 7751 - protein, 163 aa, Homo Sapiens
MGGLLLAAFLALVSVPRAQAVWLGRLDPEQLLGPWYVLAVASREKGFAMEKDMKNVVGVVVTLTPENNLRTLSSQHGLGGCDQSVMDLIKRNSGWVFENPSIGVLELWVLATNFRDYAIIFTQLEFGDEPFNTVELYSLTETASQEAMGLFTKWSRSLGFLSQ

SEQ ID NO: 7752 - protein, 152 aa, Homo Sapiens
MEELDRQKIGGFWREVGVASDQSLVLTAPKRVEGLFLTLSGSNLTVKVAYNSSGSCEIEKIVGSEIDSTGKFAFPGHREIHVLDTDYEGYAILRVSLMWRGRNFRVLKYFTRSLEDKDRLGFWKFRELTADTGLYLAARPGRCAELLKEELI

SEQ ID NO: 7753 - protein, 175 aa, Homo Sapiens
MPGAAEALPTVTVTLVAGAVPPASGALTAHCIGGFWREVGVASDQSLVLTAPKRVEGLFLTLSGSNLTVKVAYNSSGSCEIEKIVGSEIDSTGKFAFPGHREIHVLDTDYEGYAILRVSLMWRGRNFRVLKYFTRSLEDKDRLGFWKFRELTADTGLYLAARPGRCAELLKEELI

SEQ ID NO: 7754 - protein, 176 aa, Homo Sapiens [sequence omitted]

SEQ ID NO: 7755 - protein, 176 aa, Homo Sapiens
MALLLLSLGLSLIAAQEFDPHTVMQRNYNVARVSGVWYSIFMASDDLNRIKENGDLRVFVRNIEHLKNGSLIFDFEYMVQGECVAVVVVCEKTEKNGEYSINYEGQNTVAVSETDYRLFITFHLQNFRNGTETHTLALYETCEKYGLGSQNIIDLTNKDPCYSKHYRSPPRPPMRW

SEQ ID NO: 7756 - protein, 518 aa, Homo Sapiens
MDEKCSFCNLQREAVSDCIPSLDSSQSTPTEELSSQGQSNTDKIECQAENYLNALFRKKDLPQNCDPNIPLVAQELMKKMIRQFAIEYISKSGKTQENRNGSIGPSIVCKSIQMNQAENSLQEEQEGPLDLTVNRMQEQNTQQGDGVLDLSTKKTSIKSEESSICDPSSENSVAGRLHRNREDYVERSAEFADGLLSKALKDIQSGALDINKAGILYGIPQKTLLLHLEALPAGKPASFKNKTRDFHDSYSYKDSKETCAVLQKVALWARAQAERTEKSKLNLLETSEIKFPTASTYLHQLTLQKMVTQFKEKNESLQYETSNPTVQLKIPQLRVSSVSKSQPDGSGLLDVMYQVSKTSSVLEGSALQKLKNILPKQNKIECSGPVTHSSVDSYFLHGDLSPLCLNSKNGTVDGTSENTEDGLDRKDSKQPRKKRGRYRQYDHEIMEEAIAMVMSGKMSVSKAQGIYGVPHSTLEYKVKERSGTLKTPPKKKLRLPDTGLYNMTDSGTGSCKNSSKPV

SEQ ID NO: 7757 - protein, 318 aa, Homo Sapiens
MDKGRERMAAAAAAAAAAAAAAQCRSPRCAAERRGFRRELDSWRHRLMHCVGFESILEGLYGPRLRRDLSLFEDCEPEELTDWSMDEKCSFCNLQREAVSDCIPSLDSSQSTPTEELSSQGQSNTDKIECQAENYLNALFRKKDLPQNCDPNIPLVAQELMKKMIRQFAIEYISKSGKTQENRNGSIGPSIVCKSIQMNQAENSLQEEQEGPLDLTVNRMQEQNTQQGDGVLDLSTKKTSIKSEESSICDPSSENSVAGMLQVKTDEKLNVSDENTASCPLSPIKMCLNRPIEWNLNLTTASLTSCTVHNQNLKSEEK

SEQ ID NO: 7758 - protein, 602 aa, Homo Sapiens
MDKGRERMAAAAAAAAAAAAAAQCRSPRCAAERRGFRRELDSWRHRLMHCVGFESILEGLYGPRLRRDLSLFEDCEPEELTDWSMDEKCSFCNLQREAVSDCIPSLDSSQSTPTEELSSQGQSNTDKIECQAENYLNALFRKKDLPQNCDPNIPLVAQELMKKMIRQFAIEYISKSGKTQENRNGSIGPSIVCKSIQMNQAENSLQEEQEGPLDLTVNRMQEQNTQQGDGVLDLSTKKTSIKSEESSICDPSSENSVAGRLHRNREDYVERSAEFADGLLSKALKDIQSGALDINKAGILYGIPQKTLLLHLEALPAGKPASFKNKTRDFHDSYSYKDSKETCAVLQKVALWARAQAERTEKSKLNLLETSEIKFPTASTYLHQLTLQKMVTQFKEKNESLQYETSNPTVQLKIPQLRVSSVSKSQPDGSGLLDVMYQVSKTSSVLEGSALQKLKNILPKQNKIECSGPVTHSSVDSYFLHGDLSPLCLNSKNGTVDGTSENTEDGLDRKDSKQPRKKRGRYRQYDHEIMEEAIAMVMSGKMSVSKAQGIYGVPHSTLEYKVKERSGTLKTPPKKKLRLPDTGLYNMTDSGTGSCKNSSKPV

SEQ ID NO: 7759 - protein, 1871 aa, Homo Sapiens
MDKGRERMAAAAAAAAAAAAAAQCRSPRCAAERRGFRRELDSWRHRLMHCVGFESILEGLYGPRLRRDLSLFEDCEPEELTDWSMDEKCSFCNLQREAVSDCIPSLDSSQSTPTEELSSQGQSNTDKIECQAENYLNALFRKKDLPQNCDPNIPLVAQELMKKMIRQFAIEYISKSGKTQENRNGSIGPSIVCKSIQMNQAENSLQEEQEGPLDLTVNRMQEQNTQQGDGVLDLSTKKTSIKSEESSICDPSSENSVAGSTVDAKSEEATKMEKRKSALNKVLESLCIHHQQQVLAMLKFLVQEQNAASLCCCNTSCVVSSESQKPLIEDDLCGLFCSCEYRLAERGCLQNEKQSPGLEPLPVCIKDLHCLSCQTVTVEHVKPVVNRGIADSYNSHRCCSGLLPNIHSTKSAFRSPLLSKEVCDLSVTLKDACRSRSPSPPPLSPIETEGFEKLKDVISEISALENNKLEANINQPPSLTPAEISSNKSDHQDKILKTKKSSNSYSLLSNDSNNSTTNHEKGETAVIFQDLMDRINEKLKSIETTDMTSLVKLSSSDYNTYNDLKLGDFITSLLHNAKASDYSFMELLSQHDKKVENKIIQTRFRKRQETLFAMRNSSDSPMFRRQSLQIKRELASLDENFTRKKYTEKSSRKLTQNNEISSSDKGEFYHDQGPSLQNSKRLQGKNHAETSFSPNYALQSLQLPLHSSETNLSFNEFSESFKTTSPEKMSIRKPQEKSADGKQFLQNDRKNPKLGNTQTLLRNDVSGLLSRTKRNIVPPGWYSVYVTNNYVFKKSPKAKKVSESTTKNDPVKNIHIESSHNIDLNKIAMNSNLQVVVKRLEDTISIAKKSWNNQPLSEGYKASKKLIEIDGKDQHADRNMTLTLNRMTCKEQSLSKSVVASGNIINSHCMPTVDLNNKRLENLKKSSILDMGRLISSVENVPAKYEGTESSSVSNYSSPIKLMFLSEVKSSEGVKYTLTSVGTSHSNVVLPSEKPTTHHVTEEKTETNEDISNANSENYHSSHYDTDTFQRELNKFSHAKETAGSSTMFIGDINSDKPQEEPKDNSSSATDPSFKRKPGRPKKIGPQVVKQIKRPIGRPPKPKIDQTNITVCQNEPFSAGRKSPECLISEVKEGIYKKSITVTVIYGRSRRTKRHVSEGRVNISNLMSLNNNAGDFPTEYNSPRNISEDKIDLGERISAVASLTTESEILGSGFEYVRPIKNKSVIPQPSKNIIRPNQKPLAISRKPGRPAKVKISGISVTINRTSPQEREVSISSCLPPLEQDNTSGKNLPEEKYDQQCTQMDKIRHTEADIFKNGSKRMIATVPLRHSIRDRKPSLHFLHSLASSSSLIYRNALLHKSYKLHLQKNKSQKEKHRHSKMKIAYKDTPRNRLSRNAKKCLEDNKLVPISEVSLDPIISSNPLLRWWATSASNDSLLEELNNRFEQITNAWVQVSGDEAENCIHKKREHIENDHFKVASPLETCLLELEVSPVKMLFQKKYDLNELCTWFMQTTETQSLSLVRKANARNPLEVINTRGIKLGTKYSDFNASPFRKHFKKFALSSPSKSAEKLHILHKVANSPLLNVKSNLAIARLKRTEFKRLHHERWKREGKLHNHGTVDWNSKRRNLRFFCQNQFLNKTEGETNADIPLQGKSIVDNQCVLPPEIRGDLQQRVVMPDFKIHASFENKFKSEAKENGTNCSQKDFQKGPRLENVCPNSWRSKTLKDCRIFLRKLNCLEHRNTFKLNTIIYSPESTDSGNTHQTHMEESKRFTLRSHSARQNSFKKQSKEIENANTNNPSADEFADHLGNSKLSKCVNFDKNPDSFEVLSNLNKRKRPPWKITEMSTKRHKRQSCNSGQMANYFSKSLACYK

SEQ ID NO: 7760 - protein, 79 aa, Homo Sapiens
MDKGRERMAAAAAAAAAAAAAAQCRSPRCAAERRGFRRELDSWRHRLMHCVGFESILEGLYGPRLRRDLSLFEGLYTIS

SEQ ID NO: 7761 - protein, 77 aa, Homo Sapiens
  misc_feature (1)..(1): Xaa can be any naturally occurring amino acid
XGRERMAAAAAAAAAAAAAAQCRSPRCAAERRGFRRELDSWRHRLMHCVGFESILEGLYGPRLRRDLSLFEGLYTIS

SEQ ID NO: 7762 - protein, 692 aa, Homo Sapiens
MGPWGWKLRWTVALLLAAAGTAVGDRCERNEFQCQDGKCISYKWVCDGSAECQDGSDESQETCLSVTCKSGDFSCGGRVNRCIPQFWRCDGQVDCDNGSDEQGCLTLCEGPNKFKCHSGECITLDKVCNMARDCRDWSDEPIKECGTNECLDNNGGCSHVCNDLKIGYECLCPDGFQLVAQRRCEDIDECQDPDTCSQLCVNLEGGYKCQCEEGFQLDPHTKACKAVGSIAYLFFTNRHEVRKMTLDRSEYTSLIPNLRNVVALDTEVASNRIYWSDLSQRMICSTQLDRAHGVSSYDTVISRDIQAPDGLAVDWIHSNIYWTDSVLGTVSVADTKGVKRKTLFRENGSKPRAIVVDPVHGFMYWTDWGTPAKIKKGGLNGVDIYSLVTENIQWPNGITLDLLSGRLYWVDSKLHSISSIDVNGGNRKTILEDEKRLAHPFSLAVFEDKVFWTDIINEAIFSANRLTGSDVNLLAENLLSPEDMVLFHNLTQPRGVNWCERTTLSNGGCQYLCLPAPQINPHSPKFTCACPDGMLLARDMRSCLTEAEAAVATQETSTVRLKVSSTAVRTQHTTTRPVPDTSRLPGATPGLTTVEIVTMSHQALGDVAGRGNEKKPSSVRALSIVLPIVLLVFLCLGVFLLWKNWRLKNINSINFDNPVYQKTTEDEVHICHNQDGYSYPSRQMVSLEDDVA

SEQ ID NO: 7763 - protein, 860 aa, Homo Sapiens [sequence omitted]

SEQ ID NO: 7764 - protein, 858 aa, Homo Sapiens
MGPWGWKLRWTVALLLAAAGTAVGDRCERNEFQCQDGKCISYKWVCDGSAECQDGSDESQETCLSVTCKSGDFSCGGRVNRCIPQFWRCDGQVDCDNGSDEQGCPPKTCSQDEFRCHDGKCISRQFVCDSDRDCLDGSDEASCPVLTCGPASFQCNSSTCIPQLWACDNDPDCEDGSDEWPQRCRGLYVFQGDSSPCSAFEFHCLSGECIHSSWRCDGGPDCKDKSDEENCAVATCRPDEFQCSDGNCIHGSRQCDREYDCKDMSDEVGCVNVTLCEGPNKFKCHSGECITLDKVCNMARDCRDWSDEPIKECGTNECLDNNGGCSHVCNDLKIGYECLCPDGFQLVAQRRCEDIDECQDPDTCSQLCVNLEGGYKCQCEEGFQLDPHTKACKAVGSIAYLFFTNRHEVRKMTLDRSEYTSLIPNLRNVVALDTEVASNRIYWSDLSQRMICSTQLDRAHGVSSYDTVISRDIQAPDGLAVDWIHSNIYWTDSVLGTVSVADTKGVKRKTLFRENGSKPRAIVVDPVHGFMYWTDWGTPAKIKKGGLNGVDIYSLVTENIQWPNGITLDLLSGRLYWVDSKLHSISSIDVNGGNRKTILEDEKRLAHPFSLAVFEDKVFWTDIINEAIFSANRLTGSDVNLLAENLLSPEDMVLFHNLTQPRGVNWCERTTLSNGGCQYLCLPAPQINPHSPKFTCACPDGMLLARDMRSCLTEAEAAVATQETSTVRLKVSSTAVRTQHTTTRPVPDTSRLPGATPGLTTVEIVTMSHQALGDVAGRGNEKKPSSVRALSIVLPIVLLVFLCLGVFLLWKNWRLKNINSINFDNPVYQKTTEDEVHICHNQDGYSYPSMVSLEDDVA

SEQ ID NO: 7765 - protein, 948 aa, Homo Sapiens
MGPWGWKLRWTVALLLAAAGTAVGDRCERNEFQCQDGKCISYKWVCDGSAECQDGSDESQETCLSVTCKSGDFSCGGRVNRCIPQFWRCDGQVDCDNGSDEQGCPPKTCSQDEFRCHDGKCISRQFVCDSDRDCLDGSDEASCPVLTCGPASFQCNSSTCIPQLWACDNDPDCEDGSDEWPQRCRGLYVFQGDSSPCSAFEFHCLSGECIHSSWRCDGGPDCKDKSDEENCAVATCRPDEFQCSDGNCIHGSRQCDREYDCKDMSDEVGCVNVTLCEGPNKFKCHSGECITLDKVCNMARDCRDWSDEPIKECGTNECLDNNGGCSHVCNDLKIGYECLCPDGFQLVAQRRCEDIDECQDPDTCSQLCVNLEGGYKCQCEEGFQLDPHTKACKAVGSIAYLFFTNRHEVRKMTLDRSEYTSLIPNLRNVVALDTEVASNRIYWSDLSQRMICSTQLDRAHGVSSYDTVISRDIQAPDGLAVDWIHSNIYWTDSVLGTVSVADTKGVKRKTLFRENGSKPRAIVVDPVHGFMYWTDWGTPAKIKKGGLNGVDIYSLVTENIQWPNGITLDLLSGRLYWVDSKLHSISSIDVNGGNRKTILEDEKRLAHPFSLAVFEDKVFWTDIINEAIFSANRLTGSDVNLLAENLLSPEDMVLFHNLTQPRGVNWCERTTLSNGGCQYLCLPAPQINPHSPKFTCACPDGMLLARDMRSCLTEAEAAVATQETSTVRLKVSSTAVRTQHTTTRPVPDTSRLPGATPGLTTVEIVTMSHQALGDVAGRGNEKKPSSVRALSIVLPIATELGLWSRGQLCDRACLSLQCSSSSFAWGSSFYGRTGGLRTSTASTLTTPSIRRPQRMRSTFATTRTATATPRDRWSVWRMTWREHLPGVPSLPRTLPETSPALFYSKTEKTKALPARALFYIFIHLGGRTGFGQCPCNGLGWDFGFFLSS

SEQ ID NO: 7766 - protein, 682 aa, Homo Sapiens
MGPWGWKLRWTVALLLAAAGTAVGDRCERNEFQCQDGKCISYKWVCDGSAECQDGSDESQETCLSVTCKSGDFSCGGRVNRCIPQFWRCDGQVDCDNGSDEQGCPVATCRPDEFQCSDGNCIHGSRQCDREYDCKDMSDEVGCVNVTLCEGPNKFKCHSGECITLDKVCNMARDCRDWSDEPIKECGTNECLDNNGGCSHVCNDLKIGYECLCPDGFQLVAQRRCEDIDECQDPDTCSQLCVNLEGGYKCQCEEGFQLDPHTKACKAVGSIAYLFFTNRHEVRKMTLDRSEYTSLIPNLRNVVALDTEVASNRIYWSDLSQRMICSTQLDRAHGVSSYDTVISRDIQAPDGLAVDWIHSNIYWTDSVLGTVSVADTKGVKRKTLFRENGSKPRAIVVDPVHGFMYWTDWGTPAKIKKGGLNGVDIYSLVTENIQWPNGITLDLLSGRLYWVDSKLHSISSIDVNGGNRKTILEDEKRLAHPFSLAVFEDKVFWTDIINEAIFSANRLTGSDVNLLAENLLSPEDMVLFHNLTQPREAEAAVATQETSTVRLKVSSTAVRTQHTTTRPVPDTSRLPGATPGLTTVEIVTMSHQALGDVAGRGNEKKPSSVRALSIVLPIVLLVFLCLGVFLLWKNWRLKNINSINFDNPVYQKTTEDEVHICHNQDGYSYPSRQMVSLEDDVA

SEQ ID NO: 7767 - protein, 819 aa, Homo Sapiens
MGPWGWKLRWTVALLLAAAGTAVGDRCERNEFQCQDGKCISYKWVCDGSAECQDGSDESQETCSPKTCSQDEFRCHDGKCISRQFVCDSDRDCLDGSDEASCPVLTCGPASFQCNSSTCIPQLWACDNDPDCEDGSDEWPQRCRGLYVFQGDSSPCSAFEFHCLSGECIHSSWRCDGGPDCKDKSDEENCAVATCRPDEFQCSDGNCIHGSRQCDREYDCKDMSDEVGCVNVTLCEGPNKFKCHSGECITLDKVCNMARDCRDWSDEPIKECGTNECLDNNGGCSHVCNDLKIGYECLCPDGFQLVAQRRCEDIDECQDPDTCSQLCVNLEGGYKCQCEEGFQLDPHTKACKAVGSIAYLFFTNRHEVRKMTLDRSEYTSLIPNLRNVVALDTEVASNRIYWSDLSQRMICSTQLDRAHGVSSYDTVISRDIQAPDGLAVDWIHSNIYWTDSVLGTVSVADTKGVKRKTLFRENGSKPRAIVVDPVHGFMYWTDWGTPAKIKKGGLNGVDIYSLVTENIQWPNGITLDLLSGRLYWVDSKLHSISSIDVNGGNRKTILEDEKRLAHPFSLAVFEDKVFWTDIINEAIFSANRLTGSDVNLLAENLLSPEDMVLFHNLTQPRGVNWCERTTLSNGGCQYLCLPAPQINPHSPKFTCACPDGMLLARDMRSCLTEAEAAVATQETSTVRLKVSSTAVRTQHTTTRPVPDTSRLPGATPGLTTVEIVTMSHQALGDVAGRGNEKKPSSVRALSIVLPIVLLVFLCLGVFLLWKNWRLKNINSINFDNPVYQKTTEDEVHICHNQDGYSYPSRQMVSLEDDVA

SEQ ID NO: 7768 - protein, 945 aa, Homo Sapiens
  misc_feature (1)..(1): Xaa can be any naturally occurring amino acid
XGRPGVPPRFLSQRRRQVPGPRSRLRDIHESPSVILGPPGEVPGFRCALWRHLRPHLVLGGALAPPAPIKFTEGPPATLKASVPYEVETLPQNLPAPPWSAAEIFSHVGDRCERNEFQCQDGKCISYKWVCDGSAECQDGSDESQETCLSVTCKSGDFSCGGRVNRCIPQFWRCDGQVDCDNGSDEQGCPPKTCSQDEFRCHDGKCISRQFVCDSDRDCLDGSDEASCPVLTCGPASFQCNSSTCIPQLWACDNDPDCEDGSDEWPQRCRGLYVFQGDSSPCSAFEFHCLSGECIHSSWRCDGGPDCKDKSDEENCAVATCRPDEFQCSDGNCIHGSRQCDREYDCKDMSDEVGCVNVTLCEGPNKFKCHSGECITLDKVCNMARDCRDWSDEPIKECGTNECLDNNGGCSHVCNDLKIGYECLCPDGFQLVAQRRCEDIDECQDPDTCSQLCVNLEGGYKCQCEEGFQLDPHTKACKAVGSIAYLFFTNRHEVRKMTLDRSEYTSLIPNLRNVVALDTEVASNRIYWSDLSQRMICSTQLDRAHGVSSYDTVISRDIQAPDGLAVDWIHSNIYWTDSVLGTVSVADTKGVKRKTLFRENGSKPRAIVVDPVHGFMYWTDWGTPAKIKKGGLNGVDIYSLVTENIQWPNGITLDLLSGRLYWVDSKLHSISSIDVNGGNRKTILEDEKRLAHPFSLAVFEDKVFWTDIINEAIFSANRLTGSDVNLLAENLLSPEDMVLFHNLTQPRGVNWCERTTLSNGGCQYLCLPAPQINPHSPKFTCACPDGMLLARDMRSCLTEAEAAVATQETSTVRLKVSSTAVRTQHTTTRPVPDTSRLPGATPGLTTVEIVTMSHQALGDVAGRGNEKKPSSVRALSIVLPIVLLVFLCLGVFLLWKNWRLKNINSINFDNPVYQKTTEDEVHICHNQDGYSYPSRQMVSLEDDVA

SEQ ID NO: 7769 - protein, 309 aa, Homo Sapiens
  misc_feature (1)..(1): Xaa can be any naturally occurring amino acid
XLDGSDEASCPVLTCGPASFQCNSSTCIPQLWACDNDPDCEDGSDEWPQRCRGLYVFQGDSSPCSAFEFHCLSGECIHSSWRCDGGPDCKDKSDEENCAVATCRPDEFQCSDGNCIHGSRQCDREYDCKDMSDEVGCVNVTLCEGPNKFKCHSGECITLDKVCNMARDCRDWSDEPIKECDIDECQDPDTCSQLCVNLEGGYKCQCEEGFQLDPHTKACKAVGSIAYLFFTNRHEVRKMTLDRSEYTSLIPNLRNVVALDTEVASNRIYWSDLSQRMICSTQLDRAHGVSSYDTVISRDIQAPDGLAVD

SEQ ID NO: 7770 - protein, 170 aa, Homo Sapiens
  misc_feature (1)..(1): Xaa can be any naturally occurring amino acid
XNVVALDTEVASNRIYWSDLSQRMICSTQLDRAHGVSSYDTVISRDIQAPDGLAVDWIHSNIYWTDSVLGTVSVADTKGVKRKTLFRENGSKPRAIVVDPVHGFMYWTDWGTPAKIKKGGLNGVDIYSLVTENIQWPNGITLGQSILDRYHQRSHFQCQPPHRFRCQLVG

SEQ ID NO: 7771 - protein, 272 aa, Homo Sapiens
MEACCLLQLPQRLLLLGAAALTATALETADLAELCGQTWQGDGLLLRSHAASRRFYFVAPDTDCGLWVQAAAPGDRIRFQFRFFLVYSLTPAPPALNTSSPAPADPCAPGSYLQFYEGPPGAPRPLGSPLCGLNIPVPVASSGPFLGLRLVTRGRQPRVDFVGEVTSFRLGPCGAYFRCQNGRCIPSSLVCDPWGMDNCGDGSDQGSWSPADCRGPSPVPSQTGSTDAHTSRSLTPSPALGSAGSLWIAAERSSPAGRDPTRQDAALEGSTE

SEQ ID NO: 7772 - protein, 272 aa, Homo Sapiens; identical to SEQ ID NO: 7771

SEQ ID NO: 7773 - protein, 77 aa, Homo Sapiens
MWHLKLCAVLMIFLLLLGQIDGSPIPEVSSAKRRPRRMTPFWRGVSLRPIGASCRDDSECITRLCRKRRCSLSVAQE

SEQ ID NO: 7774 - protein, 131 aa, Homo Sapiens
MFSTKALLLAGLISTALAGPWANICAGKSSNEIRTCDRHGCGQYSAQRSQRPHQGVDILCSAGSTVYAPFTGMIVGQEKPYQNKNAINNGVRISGREITTDTPIFNNYYPDQSAAVNIKTRSSTSKKMMTH

SEQ ID NO: 7775 - protein, 151 aa, Homo Sapiens
MFSTKALLLAGLISTALAGPWANICAGKSSNEIRTCDRHGCGQYSAQRSQRPHQGVDILCSAGSTVYAPFTGMIVGQEKPYQNKNAINNGVRISGRGFCVKMFYIKPIKYKGPIKKGEKLGTLLPLQKVYPGIQSHVHIENCDSSDPTAYL

SEQ ID NO: 7776 - protein, 111 aa, Homo Sapiens
MFSTKALLLAGLISTALAGPWANICAGKSSNEIRTCDRHGCGQYSAQRSQRPHQGVDILCSAGSTVYAPFTGMIVGQEKPYQNKNAINNGVRISGRGKRGGVYTWGASWRC

SEQ ID NO: 7777 - protein, 79 aa, Homo Sapiens
MIVGQEKPYQNKNAINNGVRISGRGFCVKMFYIKPIKYKGPIKKGEKLGTLLPLQKVYPGIQSHVHIENCDSSDPTAYL

SEQ ID NO: 7778 - protein, 64 aa, Homo Sapiens
MEQRLPPNSELVQAVLRLFQEPVPKAALHRHGRLSPRSARARVTVEWLRVRDDGSNRTSLIDSR

SEQ ID NO: 7779 - protein, 366 aa, Homo Sapiens
MQPLWLCWALWVLPLASPGAALTGEQLLGSLLRQLQLKEVPTLDRADMEELVIPTHVRAQYVALLQRSHGDRSRGKRFSQSFREVAGRFLALEASTHLLVFGMEQRLPPNSELVQAVLRLFQEPVPKAALHRHGRLSPRSARARVTVEWLRVRDDGSNRTSLIDSRLVSVHESGWKAFDVTEAVNFWQQLSRPRQPLLLQVSVQREHLGPLASGAHKLVRFASQGAPAGLGEPQLELHTLDLGDYGAQGDCDPEAPMTEGTRCCRQEMYIDLQGMKWAENWVLEPPGFLAYECVGTCRQPPEALAFKWPFLGPRQCIASETDSLPMIVSIKEGGRTRPQVVSLPNMRVQKCSCASDGALVPRRLQP

SEQ ID NO: 7780 - protein, 332 aa, Homo Sapiens
MWPLWLCWALWVLPLAGPGAALTEEQLLGSLLRQLQLSEVPVLDRADMEKLVIPAHVRAQYVVLLRRSHGDRSRGKRFSQSFREVAGRFLASEAALHRHGRLSPRSAQARVTVEWLRVRDDGSNRTSLIDSRLVSVHESGWKAFDVTEAVNFWQQLSRPRQPLLLQVSVQREHLGPLASGAHKLVRFASQGAPAGLGEPQLELHTLDLRDYGAQGDCDPEAPMTEGTRCCRQEMYIDLQGMKWAKNWVLEPPGFLAYECVGTCQQPPEALAFNWPFLGPRQCIASETASLPMIVSIKEGGRTRPQVVSLPNMRVQKCSCASDGALVPRRLQP

SEQ ID NO: 7781 - protein, 366 aa, Homo Sapiens
MWPLWLCWALWVLPLAGPGAALTEEQLLGSLLRQLQLSEVPVLDRADMEKLVIPAHVRAQYVVLLRRSHGDRSRGKRFSQSFREVAGRFLASEASTHLLVFGMEQRLPPNSELVQAVLRLFQEPVPKAALHRHGRLSPRSAQARVTVEWLRVRDDGSNRTSLIDSRLVSVHESGWKAFDVTEAVNFWQQLSRPRQPLLLQVSVQREHLGPLASGAHKLVRFASQGAPAGLGEPQLELHTLDLRDYGAQGDCDPEAPMTEGTRCCRQEMYIDLQGMKWAKNWVLEPPGFLAYECVGTCQQPPEALAFNWPFLGPRQCIASETASLPMIVSIKEGGRTRPQVVSLPNMRVQKCSCASDGALVPRRLQP

SEQ ID NO: 7782 - protein, 167 aa, Homo Sapiens
MHWGTLCGFLWLWPYLFYVQAVPIQKVQDDTKTLIKTIVTRINDISHTQSVSSKQKVTGLDFIPGLHPILTLSKMDQTLAVYQQILTSMPSRNVIQISNDLENLRDLLHVLAFSKSCHLPWASGLETLDSLGGVLEASGYSTEVVALSRLQGSLQDMLWQLDLSPGC

SEQ ID NO: 7783 - protein, 308 aa, Homo Sapiens
MDEQTGRLRLDTYCMSAKQIWAWSKCSGRLWDEHMKWMEGWTDRWTDGWMDGWMDEWSPTPALRSYGGGLSQQTFIFTDGEDEALARHTGNVVITNCSAAHSRQALSCKMAVEYDRFIESGRKWFCHVDDDNYVNLRALLRLLASYPHTRDVYVGKPSLDRPIQAMERVSENKVRPVHFWFATGGAGFCISRGLALKMSPWASGGHFMNTAERIRLPDDCTIGYIVEALLGVPLIRSGLFHSHLENLQQVPTSELHEQVTLSYGMFENKRNAVHVKGPFSVEADPSRFRSIHCHLYPDTPWCPRTAIF

SEQ ID NO: 7784 - protein, 248 aa, Homo Sapiens
MKGCLLKADFLLQTFIFTDGEDEALARHTGNVVITNCSAAHSRQALSCKMAVEYDRFIESGRKWFCHVDDDNYVNLRALLRLLASYPHTRDVYVGKPSLDRPIQAMERVSENKVRPVHFWFATGGAGFCISRGLALKMSPWASGGHFMNTAERIRLPDDCTIGYIVEALLGVPLIRSGLFHSHLENLQQVPTSELHEQVTLSYGMFENKRNAVHVKGPFSVEADPSRFRSIHCHLYPDTPWCPRTAIF

SEQ ID NO: 7785 - protein, 379 aa, Homo Sapiens
MLKRCGRRLLLALAGALLACLLVLTADPPPPPLPAERGRRALRSLAGPAGAAPAPGLGAAAAAPGALVRDVHSLSEYFSLLTRARRDAGPPPGAAPRPADGHPRPLAEPLAPRDVFIAVKTTKKFHRARLDLLLETWISRHKEMTFIFTDGEDEALARHTGNVVITNCSAAHSRQALSCKMAVEYDRFIESGRKWFCHVDDDNYVNLRALLRLLASYPHTRDVYVGKPSLDRPIQAMERVSENKVRPVHFWFATGGAGFCISRGLALKMSPWASGGHFMNTAERIRLPDDCTIGYIVEALLGVPLIRSGLFHSHLENLQQVPTSELHEQVTLSYGMFENKRNAVHVKGPFSVEADPSRFRSIHCHLYPDTPWCPRTAIF

SEQ ID NO: 7786 - protein, 361 aa, Homo Sapiens
MLKRCGRRLLLALAGALLACLLVLTADPPPPPLPAERGRRALRSLAGPAGAAPAPGLGAAAAAPGALVRDVHSLSEYFSLLTRARRDAGPPPGAAPRPADGHPRPLAEPLAPRDVFIAVKTTKKFHRARLDLLLETWISRHKEMTFIFTDGEDEALARHTGNVVITNCSAAHSRQALSCKMAVEYDRFIESGRKWFCHVDDDNYVNLRALLRLLASYPHTRDVYVGKPSLDRPIQAMERVSENKVRPVHFWFATGGAGFCISRGLALKMSPWASGGHFMNTAERIRLPDDCTIGYIVEALLGVPLIRSGLFHSHLENLQQVPTSELHEQVTLSYGMFENKRNAVHVKGPFSVEADPSRWGN

SEQ ID NO: 7787 - protein, 250 aa, Homo Sapiens
MTPGRCCLAADIQVETFIFTDGEDEALARHTGNVVITNCSAAHSRQALSCKMAVEYDRFIESGRKWFCHVDDDNYVNLRALLRLLASYPHTRDVYVGKPSLDRPIQAMERVSENKVRPVHFWFATGGAGFCISRGLALKMSPWASGGHFMNTAERIRLPDDCTIGYIVEALLGVPLIRSGLFHSHLENLQQVPTSELHEQVTLSYGMFENKRNAVHVKGPFSVEADPSRFRSIHCHLYPDTPWCPRTAIF

SEQ ID NO: 7788 - protein, 250 aa, Homo Sapiens; identical to SEQ ID NO: 7787

SEQ ID NO: 7789 - protein, 18 aa, Homo Sapiens
MTPPRLFWVWLLVAGTQA

SEQ ID NO: 7790 - protein, 41 aa, Homo Sapiens
MTPPRLFWVWLLVAGTQAPGIPSDDDLEVPGGSPGFRRERW

SEQ ID NO: 7791 - protein, 41 aa, Homo Sapiens; identical to SEQ ID NO: 7790

SEQ ID NO: 7792 - protein, 62 aa, Homo Sapiens
MTPPRLFWVWLLVAGTQGELSPWEIPKAEVWKAGAPWGCSELQGDILPGARGPAVSQIFSPA

SEQ ID NO: 7793 - protein, 62 aa, Homo Sapiens; identical to SEQ ID NO: 7792

SEQ ID NO: 7794 - protein, 144 aa, Homo Sapiens
MTPPRLFWVWLLVAGTQGSGPIMLDEVQCTGTEASLADCKSLGWLKSNCRHERDAGVVCTNETRSTHTLDLSRELSEALGQIFDSQRGCDLSISVNVQGEDALGFCGHTVILTANLEAQALWKEPGSNVTMSVDAECVPMVRDL

SEQ ID NO: 7795 - protein, 48 aa, Homo Sapiens
MTPPRLFWVWLLVAGTQGVNDGDMRLADGGATNQGRVEIFYRGPWPDL

SEQ ID NO: 7796 - protein, 113 aa, Homo Sapiens
MTPPRLFWVWLLVAGTQGVNDGDMRLADGGATNQGRVEIFYRGQWGTVCDNLWDLTDASVVCRALGFENATQALGRAAFGQGRACCLTGRLQVPGLAEEQLQARERRWCGLHQ

SEQ ID NO: 7797 - protein, 88 aa, Homo Sapiens
MTPPRLFWVWLLVAGTQGVNDGDMRLADGGATNQGRVEIFYRGQWGTVCDNLWDLTDASVVCRALGFENATQALGRAAFGQGSGPIML

SEQ ID NO: 7798 - protein, 209 aa, Homo Sapiens
MTPPRLFWVWLLVAGTQGVNDGDMRLADGGATNQGRVEIFYRGQWGTVCDNLWDLTDASVVCRALGFENATQALGRAAFGQGSGPIMLDEVQCTGTEASLADCKSLGWLKSNCRHERDAGVVCTNETRSTHTLDLSRELSEALGQIFDSQRGCDLSISVNVQGEDALGFCGHTVILTANLEAQALWKEPGSNVTMSVDAECVPMVRDLL

SEQ ID NO: 7799 - protein, 210 aa, Homo Sapiens
MTPPRLFWVWLLVAGTQGVNDGDMRLADGGATNQGRVEIFYRGQWGTVCDNLWDLTDASVVCRALGFENATQALGRAAFGQGSGPIMLDEVQCTGTEASLADCKSLGWLKSNCRHERDAGVVCTNETRSTHTLDLSRELSEALGQIFDSQRGCDLSISVNVQGEDALGFCGHTVILTANLEAQALWKEPGSNVTMSVDAECVPMVRDLLR

SEQ ID NO: 7800 - protein, 585 aa, Homo Sapiens
MTPPRLFWVWLLVAGTQGVNDGDMRLADGGATNQGRVEIFYRGQWGTVCDNLWDLTDASVVCRALGFENATQALGRAAFGQGSGPIMLDEVQCTGTEASLADCKSLGWLKSNCRHERDAGVVCTNETRSTHTLDLSRELSEALGQIFDSQRGCDLSISVNVQGEDALGFCGHTVILTANLEAQALWKEPGSNVTMSVDAECVPMVRDLLRYFYSRRIDITLSSVKCFHKLASAYGARQLQGYCASLFAILLPQDPSFQMPLDLYAYAVATGDALLEKLCLQFLAWNFEALTQAEAWPSVPTDLLQLLLPRSDLAVPSELALLKAVDTWSWGERASHEEVEGLVEKIRFPMMLPEELFELQFNLSLYWSHEALFQKKTLQALEFHTVPFQLLARYKGLNLTEDTYKPRIYTSPTWSAFVTDSSWSARKSQLVYQSRRGPLVKYSSDYFQAPSDYRYYPYQSFQTPQHPSFLFQDKRVSWSLVYLPTIQSCWNYGFSCSSDELPVLGLTKSGGSDRTIAYENKALMLCEGLFVADVTDFEGWKAAIPSALDTNSSKSTSSFPCPAGHFNGFRTVIRPFYLTNSSGVD

SEQ ID NO: 7801 - protein, 259 aa, Homo Sapiens
MTPPRLFWVWLLVAGTQGVNDGDMRLADGGATNQGRVEIFYRGQWGTVCDNLWDLTDASVVCRALGFENATQALGRAAFGQGSGPIMLDEVQCTGTEASLADCKSLGWLKSNCRHERDAGVVCTNETRSTHTLDLSRELSEALGQIFDSQRGCDLSISVNVQGEDALGFCGHTVILTANLEAQALWKEPGSNVTMSVDAECVPMVRDLLRYFYSRRIDITLSSVKCFHKLASAYGARQLQGYCASLFAILLPQDPSFQM

SEQ ID NO: 7802 - protein, 131 aa, Homo Sapiens
MTPPRLFWVWLLVAGTQGVNDGDMRLADGGATNQGRVEIFYRGQWGTVCDNLWDLTDASVVCRALGFENATQALGRAAFGQGSGPIMLDEVQCTGTEASLADCKSLGWLKSNCRHERDAGVVCTNGAFQSE

SEQ ID NO: 7803 - protein, 205 aa, Homo Sapiens
MTPPRLFWVWLLVAGTQGVNDGDMRLADGGATNQGRVEIFYRGQWGTVCDNLWDLTDASVVCRALGFENATQALGRAAFGQGSGPIMLDEVQCTGTEASLADCKSLGWLKSNCRHERDAGVVCTNGTSTPEGLTSPCRQSSASTSWPLPMGPGSCRATAQASLPSSSPRTPRSRCPWTCMPMQWPQGTPCWRSSAYSSWPGTSRP

SEQ ID NO: 7804 - protein, 52 aa, Homo Sapiens
MESERSKRMGNACIPLKRIAYFLCLLSALLLTEGKKPAKPKCPAILCEIWFY

SEQ ID NO: 7805 - protein, 72 aa, Homo Sapiens
MESERSKRMGNACIPLKRIAYFLCLLSALLLTEGKKPAKPKCPAVCTCTKDNALCENARSIPRTVPPDVISL

SEQ ID NO: 7806 - protein, 72 aa, Homo Sapiens; identical to SEQ ID NO: 7805

SEQ ID NO: 7807 - protein, 72 aa, Homo Sapiens; identical to SEQ ID NO: 7805

SEQ ID NO: 7808 - protein, 72 aa, Homo Sapiens; identical to SEQ ID NO: 7805

SEQ ID NO: 7809 - protein, 72 aa, Homo Sapiens; identical to SEQ ID NO: 7805

SEQ ID NO: 7810 - protein, 533 aa, Homo Sapiens
MESERSKRMGNACIPLKRIAYFLCLLSALLLTEGKKPAKPKCPAVCTCTKDNALCENARSIPRTVPPDVISLLFTSNSFDVISDDAFIGLPHLEYLFIENNNIKSISRHTFRGLKSLIHLSLANNNLQTLPKDIFKGLDSLTNVDLRGNSFNCDCKLKWLVEWLGHTNATVEDIYCEGPPEYKKRKINSLSSKDFDCIITEFAKSQDLPYQSLSIDTFSYLNDEYVVIAQPFTGKCIFLEWDHVEKTFRNYDNITGTSTVVCKPIVIETQLYVIVAQLFGGSHIYKRDSFANKFIKIQDIEILKIRKPNDIETFKIENNWYFVVADSSKAGFTTIYKWNGNGFYSHQSLHAWYRDTDVEYLEIVRTPQTLRTPHLILSSSSQRPVIYQWNKATQLFTNQTDIPNMEDVYAVKHFSVKGDVYICLTRFIGDSKVMKWGGSSFQDIQRMPSRGSMVFQPLQINNYQYAILGSDYSFTQVYNWDAEKAKFVKFQELNVQAPRSFTHVSINKRNFLFASSFKGNTQIYKHVIVDLSA

SEQ ID NO: 7811 - protein, 96 aa, Homo Sapiens
MESERSKRMGNACIPLKRIAYFLCLLSALLLTEGKKPAKPKCPAVCTCTKDNALCENARSIPRTVPPDVISLSFVRSGFTEISEGSFLFTPSLQLL

SEQ ID NO: 7812 - protein, 96 aa, Homo Sapiens; identical to SEQ ID NO: 7811

SEQ ID NO: 7813 - protein, 236 aa, Homo Sapiens
MESERSKRMGNACIPLKRIAYFLCLLSALLLTEGKKPAKPKCPAVCTCTKDNALCENARSIPRTVPPDVISLSFVRSGFTEISEGSFLFTPSLQLLLFTSNSFDVISDDAFIGLPHLEYLFIENNNIKSISRHTFRGLKSLIHLFRETQTQAENLHCRGAGAPQMAVGDAFLAAEPGGTETNAVFEPVWSALERRLSSGFHSHNRRFSWVNDENTKGQEMVIISVKKEWPSAFENT

SEQ ID NO: 7814 - protein, 151 aa, Homo Sapiens
MESERSKRMGNACIPLKRIAYFLCLLSALLLTEGKKPAKPKCPAVCTCTKDNALCENARSIPRTVPPDVISLSFVRSGFTEISEGSFLFTPSLQLLLFTSNSFDVISDDAFIGLPHLEYLFIENNNIKSISRHTFRGLKSLIHLRDGVGRI

SEQ ID NO: 7815 - protein, 168 aa, Homo Sapiens
MESERSKRMGNACIPLKRIAYFLCLLSALLLTEGKKPAKPKCPAVCTCTKDNALCENARSIPRTVPPDVISLSFVRSGFTEISEGSFLFTPSLQLLLFTSNSFDVISDDAFIGLPHLEYLFIENNNIKSISRHTFRGLKSLIHLSLANNNLQTLPKDIFKGLDSLTNV

SEQ ID NO: 7816 - protein, 168 aa, Homo Sapiens; identical to SEQ ID NO: 7815

SEQ ID NO: 7817 - protein, 557 aa, Homo Sapiens
MESERSKRMGNACIPLKRIAYFLCLLSALLLTEGKKPAKPKCPAVCTCTKDNALCENARSIPRTVPPDVISLSFVRSGFTEISEGSFLFTPSLQLLLFTSNSFDVISDDAFIGLPHLEYLFIENNNIKSISRHTFRGLKSLIHLSLANNNLQTLPKDIFKGLDSLTNVDLRGNSFNCDCKLKWLVEWLGHTNATVEDIYCEGPPEYKKRKINSLSSKDFDCIITEFAKSQDLPYQSLSIDTFSYLNDEYVVIAQPFTGKCIFLEWDHVEKTFRNYDNITGTSTVVCKPIVIETQLYVIVAQLFGGSHIYKRDSFANKFIKIQDIEILKIRKPNDIETFKIENNWYFVVADSSKAGFTTIYKWNGNGFYSHQSLHAWYRDTDVEYLEIVRTPQTLRTPHLILSSSSQRPVIYQWNKATQLFTNQTDIPNMEDVYAVKHFSVKGDVYICLTRFIGDSKVMKWGGSSFQDIQRMPSRGSMVFQPLQINNYQYAILGSDYSFTQVYNWDAEKAKFVKFQELNVQAPRSFTHVSINKRNFLFASSFKGNTQIYKHVIVDLSA

SEQ ID NO: 7818 - protein, 291 aa, Homo Sapiens
MESERSKRMGNACIPLKRIAYFLCLLSALLLTEGKKPAKPKCPAVCTCTKDNALCENARSIPRTVPPDVISLSFVRSGFTEISEGSFLFTPSLQLLLFTSNSFDVISDDAFIGLPHLEYLFIENNNIKSISRHTFRGLKSLIHLSLANNNLQTLPKDIFKGLDSLTNVDLRGNSFNCDCKLKWLVEWLGHTNATVEDIYCEGPPEYKKRKINSLSSKDFDCIITEFAKSQDLPYQSLSIDTFSYLNDEYVVIAQPFTGKCIFLEWDHVEKTFRNYDNITVLREIHRFTNMS

SEQ ID NO: 7819 - protein, 287 aa, Homo Sapiens
MESERSKRMGNACIPLKRIAYFLCLLSALLLTEGKKPAKPKCPAVCTCTKDNALCENARSIPRTVPPDVISLSFVRSGFTEISEGSFLFTPSLQLLLFTSNSFDVISDDAFIGLPHLEYLFIENNNIKSISRHTFRGLKSLIHLSLANNNLQTLPKDIFKGLDSLTNVDLRGNSFNCDCKLKWLVEWLGHTNATVEDIYCEGPPEYKKRKINSLSSKDFDCIITEFAKSQDLPYQSLSIDTFSYLNDEYVVIAQPFTGKCIFLEWDHVEKTFRNYDNITGQSCWCPQ

SEQ ID NO: 7820 - protein, 281 aa, Homo Sapiens
MESERSKRMGNACIPLKRIAYFLCLLSALLLTEGKKPAKPKCPAVCTCTKDNALCENARSIPRTVPPDVISLSFVRSGFTEISEGSFLFTPSLQLLLFTSNSFDVISDDAFIGLPHLEYLFIENNNIKSISRHTFRGLKSLIHLSLANNNLQTLPKDIFKGLDSLTNVDLRGNSFNCDCKLKWLVEWLGHTNATVEDIYCEGPPEYKKRKINSLSSKDFDCIITEFAKSQDLPYQSLSIDTFSYLNDEYVVIAQPFTGKCIFLEWDHVEKTFRNYDNITGS

SEQ ID NO: 7821 - protein, 509 aa, Homo Sapiens
MESERSKRMGNACIPLKRIAYFLCLLSALLLTEGKKPAKPKCPAVCTCTKDNALCENARSIPRTVPPDVISLSFVRSGFTEISEGSFLFTPSLQLLSLANNNLQTLPKDIFKGLDSLTNVDLRGNSFNCDCKLKWLVEWLGHTNATVEDIYCEGPPEYKKRKINSLSSKDFDCIITEFAKSQDLPYQSLSIDTFSYLNDEYVVIAQPFTGKCIFLEWDHVEKTFRNYDNITGTSTVVCKPIVIETQLYVIVAQLFGGSHIYKRDSFANKFIKIQDIEILKIRKPNDIETFKIENNWYFVVADSSKAGFTTIYKWNGNGFYSHQSLHAWYRDTDVEYLEIVRTPQTLRTPHLILSSSSQRPVIYQWNKATQLFTNQTDIPNMEDVYAVKHFSVKGDVYICLTRFIGDSKVMKWGGSSFQDIQRMPSRGSMVFQPLQINNYQYAILGSDYSFTQVYNWDAEKAKFVKFQELNVQAPRSFTHVSINKRNFLFASSFKGNTQIYKHVIVDLSA

SEQ ID NO: 7822 - protein, 100 aa, Homo Sapiens
MKWGGSSFQDIQRMPSRGSMVFQPLQINNYQYAILGSDYSFTQVYNWDAEKAKFVKFQELNVQAPRSFTHVSINKRNFLFASSFKGNTQIYKHVIVDLSA

SEQ ID NO: 7823 - protein, 545 aa, Homo Sapiens
MALRRGGCGALGLLLLLLGAACLIPRSAQVRRLARCPATCSCTKESIICVGSSWVPRIVPGDISSLSLVNGTFSEIKDRMFSHLPSLQLLLLNSNSFTIIRDDAFAGLFHLEYLFIEGNKIETISRNAFRGLRDLTHLSLANNHIKALPRDVFSDLDSLIELDLRGNKFECDCKAKWLYLWLKMTNSTVSDVLCIGPPEYQEKKLNDVTSFDYECTTTDFVVHQTLPYQSVSVDTFNSKNDVYVAIAQPSMENCMVLEWDHIEMNFRSYDNITGQSIVGCKAILIDDQVFVVVAQLFGGSHIYKYDESWTKFVKFQDIEVSRISKPNDIELFQIDDETFFVIADSSKAGLSTVYKWNSKGFYSYQSLHEWFRDTDAEFVDIDGKSHLILSSRSQVPIILQWNKSSKKFVPHGDIPNMEDVLAVKSFRMQNTLYLSLTRFIGDSRVMRWNSKQFVEIQALPSRGAMTLQPFSFKDNHYLALGSDYTFSQIYQWDKEKQLFKKFKEIYVQAPRSFTAVSTDRRDFFFASSFKGKTKIFEHIIVDLSL

SEQ ID NO: 7824 - protein, 256 aa, Homo Sapiens
  misc_feature (1)..(1): Xaa can be any naturally occurring amino acid
XLGLLLLLLGAACLIPRSAQVRRLARCPATCSCTKESIICVGSSWVPRIVPGDISSLSLVNGTFSEIKDRMFSHLPSLQLLLLNSNSFTIIRDDAFAGLFHLEYLFIEGNKIETISRNAFRGLRDLTHLSLANNHIKALPRDVFSDLDSLIELDLRGNKFECDCKAKWLYLWLKMTNSTVSDVLCIGPPEYQEKKLNDVTSFDYECTTTDKQEEICEGKIQNLNARVVMNCSRPSSAFRKHTGNGRVAFFLPHGVR

SEQ ID NO: 7825 - protein, 134 aa, Homo Sapiens
MAGLRARGGPGPGLLALSALGFCLMLQVSAKRPPKTPPCPPSCSCTRDTAFCVDSKAVPRNLPSEVISLTALADPTVLTRVSPQDPGECRLLRDPGWSVLPPPAAAVLVTQLQQVYTDWRQRLHRTVAPAVSLH

SEQ ID NO: 7826 - protein, 548 aa, Homo Sapiens
MAGLRARGGPGPGLLALSALGFCLMLQVSAKRPPKTPPCPPSCSCTRDTAFCVDSKAVPRNLPSEVISLTLVNAAFSEIQDGAFSHLPLLQFLLLNSNKFTLIGDNAFTGLSHLQYLFIENNDIWALSKFTFRGLKSLTHLSLANNNLQTLPRDIFRPLDILNDLDLRGNSLNCDCKVKWLVEWLAHTNTTVAPIYCASPPRFQEHKVQDLPLREFDCITTDFVLYQTLAFPAVSAEPFLYSSDLYLALAQPGVSACTILKWDYVERQLRDYDRIPAPSAVHCKPMVVDSQLYVVVAQLFGGSYIYHWDPNTTRFTRLQDIDPQRVRKPNDLEAFRIDGDWYFAVADSSKAGATSLYRWHQNGFYSHQALHPWHRDTDLEFVDGEGKPRLIVSSSSQAPVIYQWSRTQKQFVAQGEVTQVPDAQAVKHFRAGRDSYLCLSRYIGDSKILRWEGTRFSEVQALPSRGSLALQPFLVGGRRYLALGSDFSFTQIYQWDEGRQKFVRFQELAVQAPRAFCYMPAGDAQLLLAPSFKGQTLVYRHIVVDLSA

SEQ ID NO: 7827 - protein, 524 aa, Homo Sapiens
MAGLRARGGPGPGLLALSALGFCLMLQVSAKRPPKTPPCPPSCSCTRDTAFCVDSKAVPRNLPSEVISLTLVNAAFSEIQDGAFSHLPLLQFLLLNSNKFTLIGDNAFTGLSHLQYLSLANNNLQTLPRDIFRPLDILNDLDLRGNSLNCDCKVKWLVEWLAHTNTTVAPIYCASPPRFQEHKVQDLPLREFDCITTDFVLYQTLAFPAVSAEPFLYSSDLYLALAQPGVSACTILKWDYVERQLRDYDRIPAPSAVHCKPMVVDSQLYVVVAQLFGGSYIYHWDPNTTRFTRLQDIDPQRVRKPNDLEAFRIDGDWYFAVADSSKAGATSLYRWHQNGFYSHQALHPWHRDTDLEFVDGEGKPRLIVSSSSQAPVIYQWSRTQKQFVAQGEVTQVPDAQAVKHFRAGRDSYLCLSRYIGDSKILRWEGTRFSEVQALPSRGSLALQPFLVGGRRYLALGSDFSFTQIYQWDEGRQKFVRFQELAVQAPRAFCYMPAGDAQLLLAPSFKGQTLVYRHIVVDLSA

SEQ ID NO: 7828 - protein, 198 aa, Homo Sapiens
MCPCRDRTLVNAAFSEIQDGAFSHLPLLQFLLLNSNKFTLIGDNAFTGLSHLQYLFIENNDIWALSKFTFRGLKSLTHLSLANNNLQTLPRDIFRPLDILNDLDLRGNSLNCDCKVKWLVEWLAHTNTTVAPIYCASPPRFQEHKVQDLPLREFDCITTDFVLYQTLAFPAVSAEPFLYSSDLYLALAQPGVSACTIL

SEQ ID NO: 7829 - protein, 537 aa, Homo Sapiens
MGGAGILLLLLAGAGVVVAWRPPKGKCPLRCSCSKDSALCEGSPDLPVSFSPTLLSLSLVRTGVTQLKAGSFLRIPSLHLLLFTSNSFSVIEDDAFAGLSHLQYLFIEDNEIGSISKNALRGLRSLTHLSLANNHLETLPRFLFRGLDTLTHVDLRGNPFQCDCRVLWLLQWMPTVNASVGTGACAGPASLSHMQLHHLDPKTFKCRAIELSWFQTVGESALSVEPFSYQGEPHIVLAQPFAGRCLILSWDYSLQRFRPEEELPAASVVSCKPLVLGPSLFVLAARLWGGSQLWARPSPGLRLAPTQTLAPRRLLRPNDAELLWLEGQPCFVVADASKAGSTTLLCRDGPGFYPHQSLHAWHRDTDAEALELDGRPHLLLASASQRPVLFHWTGGRFERRTDIPEAEDVYATRHFQAGGDVFLCLTRYIGDSMVMRWDGSMFRLLQQLPSRGAHVFQPLLIARDQLAILGSDFAFSQVLRLEPDKGLLEPLQELGPPALVAPRAFAHITMAGRRFLFAACFKGPTQIYQHHEIDLSA

SEQ ID NO: 7830 - protein, 494 aa, Homo Sapiens
MGGAGILLLLLAGAGVVVAWRPPKGKCPLRCSCSKDSALCEGSPDLPVSFSPTLLSLSLVRTGVTQLKAGSFLRIPSLHLLLFTSNSFSVIEDDAFAGLSHLQYLFIEDNEIGSISKNALRGLRSLTHLSLANNHLETLPRFLFRGLDTLTHVDLRGNPFQCDCRVLWLLQWMPTVNASVGTGACAGPASLSHMQLHHLDPKTFKCRAIELSWFQTVGESALSVEPFSYQGEPHIVLAQPFAGRCLILSWDYSLQRFRPEEELPGEPPPRPSACPAACLAGLTCLPTSPQRPPWCPASHWCWARASSCWLPACGGAHSCGPGPVPACAWPQRRPWPRGGCCGPMTPSSCGWKGNPASWWPMPPRRAAPRCCAATGPAFTRTRACTPGTGTRTLRPWSWTAGPTCCWPRLPSGPCSSTGPVAASRDAQTSPRPRMSMPHATSRLVGTCSCASHATLGTPWSCAGTAPCFVCCSNFPRAVPTSSSHCSSPGTSWPS

SEQ ID NO: 7831 - protein, 261 aa, Homo Sapiens
MGGAGILLLLLAGAGVVVAWRPPKGKCPLRCSCSKDSALCEGSPDLPVSFSPTLLSLSLVRTGVTQLKAGSFLRIPSLHLLLFTSNSFSVIEDDAFAGLSHLQYLFIEDNEIGSISKNALRGLRSLTHLSLANNHLETLPRFLFRGLDTLTHVDLRGNPFQCDCRVLWLLQWMPTVNASVGTGACAGPASLSHMQLHHLDPKTFKCRAIGGGLSRWGGRREIWGKGCQGQEARLTPCPAISRSGKTLSKQHCLPEPQFSHL

SEQ ID NO: 7832 - protein, 378 aa, Homo Sapiens
  misc_feature (1)..(1): Xaa can be any naturally occurring amino acid
XVIEDDAFAGLSHLQYLFIEDNEIGSISKNALRGLRSLTHLSLANNHLETLPRFLFRGLDTLTHVDLRGNPFQCDCRVLWLLQWMPTVNASVGTGACAGPASLSHMQLHHLDPKTFKCRAIELSWFQTVGESALSVEPFSYQGEPHIVLAQPFAGRCLILSWDYSLQRFRPEEELPAASVVSCKPLVLGPSLFVLAARLWGGSQLWARPSPGLRLAPTQTLAPRRLLRPNDAELLWLEGQPCFVVADASKAGSTTLLCRDGPGFYPHQSLHAWHRDTDAEALELDGRPHLLLASASQRPVLFHWTGGRFERRTDIPEAEDVYATRHFQAGGDVFLCLTRYIGDSMVRLGLGAGGWLFSTDPILHTKPLNSDLPSHADL

SEQ ID NO: 7833 - protein, 19 aa, Homo Sapiens
MVWKVAVFLSVALGIGAVP

SEQ ID NO: 7834 - protein, 57 aa, Homo Sapiens
MVWKVAVFLSVALGIGAVPIDDPEDGGKHWVVIVAGSNGWYNYRHQADACHAYQIIH

SEQ ID NO: 7835 - protein, 58 aa, Homo Sapiens
MVWKVAVFLSVALGIGAVPIDDPEDGGKHWVVIVAGSNGWYNYRHQADACHAYQIIHR

SEQ ID NO: 7836 - protein, 135 aa, Homo Sapiens
MVWKVAVFLSVALGIGAVPIDDPEDGGKHWVVIVAGSNGWYNYRHQADACHAYQIIHRNGIPDEQIVVMINPTPGIVINRPNGTDVYQGVPKDYTGEDVTPQNFLAVLRGDAEAVKGIGSGKVLKSGPQDHVFIY

SEQ ID NO: 7837 - protein, 78 aa, Homo Sapiens
MVWKVAVFLSVALGIGAVPIDDPEDGGKHWVVIVAGSNGWYNYRHQADACHAYQIIHRNGIPDEQIVVMMYDDIAYSE

SEQ ID NO: 7838 - protein, 78 aa, Homo Sapiens; identical to SEQ ID NO: 7837

SEQ ID NO: 7839 - protein, 223 aa, Homo Sapiens
MVWKVAVFLSVALGIGAVPIDDPEDGGKHWVVIVAGSNGWYNYRHQADACHAYQIIHRNGIPDEQIVVMMYDDIAYSEDNPTPGIVINRPNGTDVYQGVPKDYTGEDVTPQNFLAVLRGDAEAVKGIGSGKVLKSGPQDHVFIYFTDHGSTGILVFPNEDLHVKDLNETIHYMYKHKMYRKMVFYIEACESGSMMNHLPDNINGRWLGRRPRPGLASRLLRHR

SEQ ID NO: 7840 - protein, 433 aa, Homo Sapiens
MVWKVAVFLSVALGIGAVPIDDPEDGGKHWVVIVAGSNGWYNYRHQADACHAYQIIHRNGIPDEQIVVMMYDDIAYSEDNPTPGIVINRPNGTDVYQGVPKDYTGEDVTPQNFLAVLRGDAEAVKGIGSGKVLKSGPQDHVFIYFTDHGSTGILVFPNEDLHVKDLNETIHYMYKHKMYRKMVFYIEACESGSMMNHLPDNINVYATTAANPRESSYACYYDEKRSTYLGDWYSVNWMEDSDVEDLTKETLHKQYHLVKSHTNTSHVMQYGNKTISTMKVMQFQGMKRKASSPVPLPPVTHLDLTPSPDVPLTIMKRKLMNTNDLEESRQLTEEIQRHLDARHLIEKSVRKIVSLLAASEAEVEQLLSERAPLTGHSCYPEALLHFRTHCFNWHSPTYEYALRHLYVLVNLCEKPYPLHRIKLSMDHVCLGHY

SEQ ID NO: 7841 - protein, 433 aa, Homo Sapiens; identical to SEQ ID NO: 7840

SEQ ID NO: 7842 - protein, 376 aa, Homo Sapiens
MVWKVAVFLSVALGIGAVPIDDPEDGGKHWVVIVAGSNGWYNYRHQADACHAYQIIHRNGIPDEQIVVMMYDDIAYSEDNPTPGIVINRPNGTDVYQGVPKDYTGEDVTPQNFLAVLRGDAEAVKGIGSGKVLKSGPQDHVFIYFTDHGSTGILVFPNEDLHVKDLNETIHYMYKHKMYRKMVFYIEACESGSMMNHLPDNINVYATTAANPRESSYACYYDEKRSTYLGDWYSVNWMEDSDVEDLTKETLHKQYHLVKSHTNTSHVMQYGNKTISTMKVMQFQGMKRKASSPVPLPPVTHLDLTPSPDVPLTIMKRKLMNTNDLEESRQLTEEIQRHLDYEYALRHLYVLVNLCEKPYPLHRIKLSMDHVCLGHY

SEQ ID NO: 7843 - protein, 372 aa, Homo Sapiens
MVWKVAVFLSVALGIGAVPIDDPEDGGKHWVVIVAGSNGWYNYRHQADACHAYQIIHRNGIPDEQIVVMMYDDIAYSEDNPTPGIVINRPNGTDVYQGVPKDYTGEDVTPQNFLAVLRGDAEAVKGIGSGKVLKSGPQDHVFIYFTDHGSTGILVFPNEDLHVKDLNETIHYMYKHKMYRKMVFYIEACESGSMMNHLPDNINVYATTAANPRESSYACYYDEKRSTYLGDWYSVNWMEDSDVEDLTKETLHKQYHLVKSHTNTSHVMQYGNKTISTMKVMQFQGMKRKASSPVPLPPVTHLDLTPSPDVPLTIMKRKLMNTNDLEESRQLTEEIQRHLDDKIVHGPRVPWSLLKSCLLEAFPSVSAPPTVC

SEQ ID NO: 7844 - protein, 117 aa, Homo Sapiens
MVWKVAVFLSVALGIGAVPIDDPEDGGKHWVVIVAGSNGWYNYRHQADACHAYQIIHRNGIPDEQIVVMMYDDIAYSEDNPTPGIVINRPNGTDVYQGVPKDYTGEWPPGSRVHLLH

SEQ ID NO: 7845 - protein, 48 aa, Homo Sapiens
MVWKVAVFLSVALGIGAVPIDDPEDGGKHWVVIVAGSNGWYNYRHQEL

SEQ ID NO: 7846 - protein, 91 aa, Homo Sapiens
  misc_feature (1)..(1): Xaa can be any naturally occurring amino acid
XPTPGIVINRPNGTDVYQGVPKDYTGEDVTPQNFLAVLRGGVRSLRCSGPPGEPPLQGSLQDLLHKMTCSLLPASPVFSEKLQIRVGKALY

SEQ ID NO: 7847 - protein, 951 aa, Homo Sapiens
MPGPLGLLCFLALGLLGSAGPSGAAPPLCAAPCSCDGDRRVDCSGKGLTAVPEGLSAFTQALDISMNNITQLPEDAFKNFPFLEELQLAGNDLSFIHPKALSGLKELKVLTLQNNQLKTVPSEAIRGLSALQSLRLDANHITSVPEDSFEGLVQLRHLWLDDNSLTEVPVHPLSNLPTLQALTLALNKISSIPDFAFTNLSSLVVLHLHNNKIRSLSQHCFDGLDNLETLDLNYNNLGEFPQAIKALPSLKELGFHSNSISVIPDGAFDGNPLLRTIHLYDNPLSFVGNSAFHNLSDLHSLVIRGASMVQQFPNLTGTVHLESLTLTGTKISSIPNNLCQEQKMLRTLDLSYNNIRDLPSFNGCHALEEISLQRNQIYQIKEGTFQGLISLRILDLSRNLIHEIHSRAFATLGPITNLDVSFNELTSFPTEGLNGLNQLKLVGNFKLKEALAAKDFVNLRSLSVPYAYQCCAFWGCDSYANLNTEDNSLQDHSVAQEKGTADAANVTSTLENEEHSQIIIHCTPSTGAFKPCEYLLGSWMIRLTVWFIFLVALFFNLLVILTTFASCTSLPSSKLFIGLISVSNLFMGIYTGILTFLDAVSWGRFAEFGIWWETGSGCKVAGFLAVFSSESAIFLLMLATVERSLSAKDIMKNGKSNHLKQFRVAALLAFLGATVAGCFPLFHRGEYSASPLCLPFPTGETPSLGFTVTLVLLNSLAFLLMAVIYTKLYCNLEKEDLSENSQSSMIKHVAWLIFTNCIFFCPVAFFSFAPLITAISISPEIMKSVTLIFFPLPACLNPVLYVFFNPKFKEDWKLLKRRVTKKSGSVSVSISSQGGCLEQDFYYDCGMYSHLQGNLTVCDCCESFLLTKPVSCKHLIKSHSCPALAVASCQRPEGYWSDCGTQSAHSDYADEEDSFVSDSSDQVQACGRACFYQSRGFPLVRYAYNLPRVKD

SEQ ID NO: 7848 - protein, 158 aa, Homo Sapiens
MPGPLGLLCFLALGLLGSAGPSGAAPPLCAAPCSCDGDRRVDCSGKGLTAVPEGLSAFTQALDISMNNITQLPEDAFKNFPFLEELRLDANHITSVPEDSFEGLVQLRHLWLDDNSLTEVPVHPLSNLPTLQALTLALNKISSIPDFAFTNLSSLVVL

SEQ ID NO: 7849 - protein, 927 aa, Homo Sapiens
MPGPLGLLCFLALGLLGSAGPSGAAPPLCAAPCSCDGDRRVDCSGKGLTAVPEGLSAFTQALQLAGNDLSFIHPKALSGLKELKVLTLQNNQLKTVPSEAIRGLSALQSLRLDANHITSVPEDSFEGLVQLRHLWLDDNSLTEVPVHPLSNLPTLQALTLALNKISSIPDFAFTNLSSLVVLHLHNNKIRSLSQHCFDGLDNLETLDLNYNNLGEFPQAIKALPSLKELGFHSNSISVIPDGAFDGNPLLRTIHLYDNPLSFVGNSAFHNLSDLHSLVIRGASMVQQFPNLTGTVHLESLTLTGTKISSIPNNLCQEQKMLRTLDLSYNNIRDLPSFNGCHALEEISLQRNQIYQIKEGTFQGLISLRILDLSRNLIHEIHSRAFATLGPITNLDVSFNELTSFPTEGLNGLNQLKLVGNFKLKEALAAKDFVNLRSLSVPYAYQCCAFWGCDSYANLNTEDNSLQDHSVAQEKGTADAANVTSTLENEEHSQIIIHCTPSTGAFKPCEYLLGSWMIRLTVWFIFLVALFFNLLVILTTFASCTSLPSSKLFIGLISVSNLFMGIYTGILTFLDAVSWGRFAEFGIWWETGSGCKVAGFLAVFSSESAIFLLMLATVERSLSAKDIMKNGKSNHLKQFRVAALLAFLGATVAGCFPLFHRGEYSASPLCLPFPTGETPSLGFTVTLVLLNSLAFLLMAVIYTKLYCNLEKEDLSENSQSSMIKHVAWLIFTNCIFFCPVAFFSFAPLITAISISPEIMKSVTLIFFPLPACLNPVLYVFFNPKFKEDWKLLKRRVTKKSGSVSVSISSQGGCLEQDFYYDCGMYSHLQGNLTVCDCCESFLLTKPVSCKHLIKSHSCPALAVASCQRPEGYWSDCGTQSAHSDYADEEDSFVSDSSDQVQACGRACFYQSRGFPLVRYAYNLPRVKD

SEQ ID NO: 7850 - protein, 141 aa, Homo Sapiens
MEMLQGLLLLLLLSMGGAWASREPLRPWCHPINAILAVEKEGCPVCITVNTTICAGYCPTMMRVLQAVLPPLPQVVCTYRDVRFESIRLPGCPRGVDPVVSFPVALSCRCGPCRRSTSDCGGPKDHPLTCDHPQLSGLLFL

SEQ ID NO: 7851 - protein, 699 aa, Homo Sapiens
MKQRFSALQLLKLLLLLQPPLPRALREALCPEPCNCVPDGALRCPGPTAGLTRLSLAYLPVKVIPSQAFRGLNEVIKIEISQIDSLERIEANAFDNLLNLSEILIQNTKNLRYIEPGAFINLPRLKYLSICNTGIRKFPDVTKVFSSESNFILEICDNLHITTIPGNAFQGMNNESVTLKLYGNGFEEVQSHAFNGTTLTSLELKENVHLEKMHNGAFRGATGPKTLDISSTKLQALPSYGLESIQRLIATSSYSLKKLPSRETFVNLLEATLTYPSHCCAFRNLPTKEQNFSHSISENFSKQCESTVRKVNNKTLYSSMLAESELSGWDYEYGFCLPKTPRCAPEPDAFNPCEDIMGYDFLRVLIWLINILAIMGNMTVLFVLLTSRYKLTVPRFLMCNLSFADFCMGLYLLLIASVDSQTKGQYYNHAIDWQTGSGCSTAGFFTVFASELSVYTLTVITLERWHTITYAIHLDQKLRLRHAILIMLGGWLFSSLIAMLPLVGVSNYMKVSICFPMDVETTLSQVYILTILILNVVAFFIICACYIKIYFAVRNPELMATNKDTKIAKKMAILIFTDFTCMAPISFFAISAAFKVPLITVTNSKVLLVLFYPINSCANPFLYAIFTKTFQRDFFLLLSKFGCCKRRAELYRRKDFSAYTSNCKNGFTGSNKPSQSTLKLSTLHCQGTALLDKTRYTEC

SEQ ID NO: 7852 - protein, 672 aa, Homo Sapiens
MKQRFSALQLLKLLLLLQPPLPRALREALCPEPCNCVPDGALRCPGPTAGLTRLSLAYLPVKVIPSQAFRGLNEVIKIEISQIDSLERIEANAFDNLLNLSEILIQNTKNLRYIEPGAFINLPRLKYLSICNTGIRKFPDVTKVFSSESNFILEICDNLHITTIPGNAFQGMNNESVTLKLYGNGFEEVQSHAFNGTTLTSLELKENVHLEKMHNGAFRGATGPKTLDISSTKLQALPSYGLESIQRLIATSSYSLKKLPSRETFVNLLEATLTYPSHCCAFRNLPTKDYSSMLAESELSGWDYEYGFCLPKTPRCAPEPDAFNPCEDIMGYDFLRVLIWLINILAIMGNMTVLFVLLTSRYKLTVPRFLMCNLSFADFCMGLYLLLIASVDSQTKGQYYNHAIDWQTGSGCSTAGFFTVFASELSVYTLTVITLERWHTITYAIHLDQKLRLRHAILIMLGGWLFSSLIAMLPLVGVSNYMKVSICFPMDVETTLSQVYILTILILNVVAFFIICACYIKIYFAVRNPELMATNKDTKIAKKMAILIFTDFTCMAPISFFAISAAFKVPLITVTNSKVLLVLFYPINSCANPFLYAIFTKTFQRDFFLLLSKFGCCKRRAELYRRKDFSAYTSNCKNGFTGSNKPSQSTLKLSTLHCQGTALLDKTRYTEC

SEQ ID NO: 7853 - protein, 325 aa, Homo Sapiens
MKQRFSALQLLKLLLLLQPPLPRALREALCPEPCNCVPDGALRCPGPTAGLTRLSLAYLPVKVIPSQAFRGLNEVIKIEISQIDSLERIEANAFDNLLNLSEILIQNTKNLRYIEPGAFINLPRLKYLSICNTGIRKFPDVTKVFSSESNFILEICDNLHITTIPGNAFQGMNNESVTLKLYGNGFEEVQSHAFNGTTLTSLELKENVHLEKMHNGAFRGATGPKTLDISSTKLQALPSYGLESIQRLIATSSYSLKKLPSRETFVNLLEATLTYPSHCCAFRNLPTKEQNFSHSISENFSKQCESTVRKVNNKTLSKPRINGYQ

SEQ ID NO: 7854 - protein, 329 aa, Homo Sapiens
MKQRFSALQLLKLLLLLQPPLPRALREALCPEPCNCVPDGALRCPGPTAGLTRLSLAYLPVKVIPSQAFRGLNEVIKIEISQIDSLERIEANAFDNLLNLSEILIQNTKNLRYIEPGAFINLPRLKYLSICNTGIRKFPDVTKVFSSESNFILEICDNLHITTIPGNAFQGMNNESVTLKLYGNGFEEVQSHAFNGTTLTSLELKENVHLEKMHNGAFRGATGPKTLDISSTKLQALPSYGLESIQRLIATSSYSLKKLPSRETFVNLLEATLTYPSHCCAFRNLPTKEQNFSHSISENFSKQCESTVRKVNNKTLLLHGALSAAHSLS

SEQ ID NO: 7855 - protein, 175 aa, Homo Sapiens
NCVPDGALRCPGPTAGLTRLSLAYLPVKVIPSQAFRGLNEVIKIEISQIDSLERIEANAFDNLLNLSEILIQNTKNLRYIEPGAFINLPRLKYLSICNTGIRKFPDVTKVFSSESNFILEICDNLHITTIPGNAFQGMNNESVTLPWQNCDEAIKELTLKEKRENMDWNDSEMKR

SEQ ID NO: 7856 - protein, 202 aa, Homo Sapiens
MKVLAAGVVPLLLVLHWKHGAGSPLPITPVNATCAIRHPCHNNLMNQIRSQLAQLNGSANALFILYYTAQGEPFPNNLDKLCGPNVTDFPPFHANGTEKAKLVELYRIVVYLGTSLGNITRDQKILNPSALSLHSKLNATADILRGLLSNVLCRLCSKYHVGHVDVTYGPDTSGKDVFQKKKLGCQLLGKYKQIIAVLAQAF

SEQ ID NO: 7857 - protein, 88 aa, Homo Sapiens
MKVLAAVHSPGGAVPQQPGQAMWPQRDGLPALPRQRHGEGQAGGAVPHSRVPWHLPGQHHPGPEDPQPQCPQPPQQAQRHRRHPARPP

SEQ ID NO: 7858 - protein, 75 aa, Homo Sapiens
MMDIYVCLKRPSWMVDNKRMRTASNFQWLLSTFILLYLMNQVNSQKKGAPHDLKCVTNNLQVWNCSWKAPSGTGR

SEQ ID NO: 7859 - protein, 126 aa, Homo Sapiens
MMDIYVCLKRPSWMVDNKRMRTASNFQWLLSTFILLYLMNQVNSQKKGAPHDLKCVTNNLQVWNCSWKAPSGTGRGTDYEVCIENRSRSCYQLEKTSIKIPALSHGDYEITINSLHDFGSSTSKFT

SEQ ID NO: 7860 - protein, 1097 aa, Homo Sapiens
MMDIYVCLKRPSWMVDNKRMRTASNFQWLLSTFILLYLMNQVNSQKKGAPHDLKCVTNNLQVWNCSWKAPSGTGRGTDYEVCIENRSRSCYQLEKTSIKIPALSHGDYEITINSLHDFGSSTSKFTLNEQNVSLIPDTPEILNLSADFSTSTLYLKWNDRGSVFPHRSNVIWEIKVLRKESMELVKLVTHNTTLNGKDTLHHWSWASDMPLECAIHFVEIRCYIDNLHFSGLEEWSDWSPVKNISWIPDSQTKVFPQDKVILVGSDITFCCVSQEKVLSALIGHTNCPLIHLDGENVAIKIRNISVSASSGTNVVFTTEDNIFGTVIFAGYPPDTPQQLNCETHDLKEIICSWNPGRVTALVGPRATSYTLVESFSGKYVRLKRAEAPTNESYQLLFQMLPNQEIYNFTLNAHNPLGRSQSTILVNITEKVYPHTPTSFKVKDINSTAVKLSWHLPGNFAKINFLCEIEIKKSNSVQEQRNVTIKGVENSSYLVALDKLNPYTLYTFRIRCSTETFWKWSKWSNKKQHLTTEASPSKGPDTWREWSSDGKNLIIYWKPLPINEANGKILSYNVSCSSDEETQSLSEIPDPQHKAEIRLDKNDYIISVVAKNSVGSSPPSKIASMEIPNDDLKIEQVVGMGKGILLTWHYDPNMTCDYVIKWCNSSRSEPCLMDWRKVPSNSTETVIESDEFRPGIRYNFFLYGCRNQGYQLLRSMIGYIEELAPIVAPNFTVEDTSADSILVKWEDIPVEELRGFLRGYLFYFGKGERDTSKMRVLESGRSDIKVKNITDISQKTLRIADLQGKTSYHLVLRAYTDGGVGPEKSMYVVTKENSVGLIIAILIPVAVAVIVGVVTSILCYRKREWIKETFYPDIPNPENCKALQFQKSVCEGSSALKTLEMNPCTPNNVEVLETRSAFPKIEDTEIISPVAERPEDRSDAEPENHVVVSYCPPIIEEEIPNPAADEAGGTAQVIYIDVQSMYQPQAKPEEEQENDPVGGAGYKPQMHLPINSTVEDIAAEEDLDKTAGYRPQANVNTWNLVSPDSPRSIDSNSEIVSFGSPCSINSRQFLIPPKDEDSPKSNGGGWSFTNFFQNKPND

SEQ ID NO: 7861 - protein, 1097 aa, Homo Sapiens; identical to SEQ ID NO: 7860

SEQ ID NO: 7862 - protein, 66 aa, Homo Sapiens
  misc_feature (1)..(1): Xaa can be any naturally occurring amino acid
XWSNKKQHLTTEASPSKGPDTWREWSSDGKNLIIYWKMRKHSPFLKSLILSTKQRYDLIRMTTSSA

SEQ ID NO: 7863 - protein, 289 aa, Homo Sapiens
MTPIVTVLICLRLSLGPRTHVQAGTLPKPTLWAEPGSVITQGSPVTLWCQGILETQEYRLYREKKTAPWITRIPQEIVKKGQFPIPSITWEHTGRYRCFYGSHTAGWSEPSDPLELVVTGAYIKPTLSALPSPVVTSGGNVTLHCVSQVAFGSFILCKEGEDEHPQCLNSQPRTHGWSRAIFSVGPVSPSRRWSYRCYAYDSNSPHVWSLPSDLLELLVLGAAETLSPPQNKSDSKAGAANTLSPSQNKTASHPQDYTVENLIRMGIAGLVLVVLGILLFEAQHSQRSL

SEQ ID NO: 7864 - protein, 489 aa, Homo Sapiens
MTPIVTVLICLRLSLGPRTHVQAGTLPKPTLWAEPGSVITQGSPVTLWCQGILETQEYRLYREKKTAPWITRIPQEIVKKGQFPIPSITWEHTGRYRCFYGSHTAGWSEPSDPLELVVTGAYIKPTLSALPSPVVTSGGNVTLHCVSQVAFGSFILCKEGEDEHPQCLNSQPRTHGWSRAIFSVGPVSPSRRWSYRCYAYDSNSPHVWSLPSDLLELLVLGVSKKPSLSVQPGPIVAPGESLTLQCVSDVSYDRFVLYKEGERDFLQLPGPQPQAGLSQANFTLGPVSRSYGGQYRCSGAYNLSSEWSAPSDPLDILIAGQFRGRPFISVHPGPTVASGENVTLLCQSWGPFHTFLLTKAGAADAPLRLRSIHEYPKYQAEFPMSPVTSAHSGTYRCYGSLSSNPYLLSHPSDSLELMVSGAAETLSPPQNKSDSKAGAANTLSPSQNKTASHPQDYTVENLIRMGIAGLVLVVLGILLFEAQHSQRSL

SEQ ID NO: 7865 - protein, 454 aa, Homo Sapiens
MTPILTVLICLGHLPKPTLWAEPGSVIIQGSPVTLRCQGSLQAEEYHLYRENKSASWVRRIQEPGKNGQFPIPSITWEHAGRYHCQYYSHNHSSEYSDPLELVVTGAYSKPTLSALPSPVVTSGGNVTLQCVSQVAFDGFILCKEGEDEHPQRLNSHSHARGWSWAIFSVGPVSPSRRWSYRCYAYDSNSPYVWSLPSDLLELLVPGVSKKPSLSVQPGPMVAPGESLTLQCVSDVGYDRFVLYKEGERDFLQRPGWQPQAGLSQANFTLGPVSPSHGGQYRCYSAHNLSSEWSAPSDPLDILITGQFYDRPSLSVQPVPTVAPGKNVTLLCQSRGQFHTFLLTKEGAGHPPLHLRSEHQAQQNQAEFRMGPVTSAHVGTYRCYSSLSSNPYLLSLPSDPLELVVSASLGQHPQDYTVENLIRMGVAGLVLVVLGILLFEAQHSQRSLQDAAGR

SEQ ID NO: 7866 - protein, 203 aa, Homo Sapiens
MTPILTVLICLGLSLGPRTHVQAGHLPKPTLWAEPGSVIIQGSPVTLRCQGSLQAEEYHLYRENKSASWVRRIQEPGKNGQFPIPSITWEHAGRYHCQYYSHNHSSEHQAQQNQAEFRMGPVTSAHVGTYRCYSSLSSNPYLLSLPSDPLELVVSASLGQHPQDYTVENLIRMGVAGLVLVVLGILLFEAQHSQRSLQDAAGR

SEQ ID NO: 7867 - protein, 466 aa, Homo Sapiens
MTPILTVLICLGLSLGPRTHVQAGHLPKPTLWAEPGSVIIQGSPVTLRCQGSLQAEEYHLYRENKSASWVRRIQEPGKNGQFPIPSITWEHAGRYHCQYYSHNHSSEYSDPLELVVTGAYSKPTLSALPSPVVTSGGNVTLQCVSQVAFDGFILCKEGEDEHPQRLNSHSHARGWSWAIFSVGPVSPSRRWSYRCYAYDSNSPYVWSLPSDLLELLVPGVSKKPSLSVQPGPMVAPGESLTLQCVSDVGYDRFVLYKEGERDFLQRPGWQPQAGLSQANFTLGPVSPSHGGQYRCYSAHNLSSEWSAPSDPLDILITGQFYDRPSLSVQPVPTVAPGKNVTLLCQSRGQFHTFLLTKEGAGHPPLHLRSEHQAQQNQAEFRMGPVTSAHVGTYRCYSSLSSNPYLLSLPSDPLELVVSASLGQHPQDYTVENLIRMGVAGLVLVVLGILLFEAQHSQRSLQDAAGR

SEQ ID NO: 7868 - protein, 483 aa, Homo Sapiens
MTPILTVLICLGLSLGPRTHVQAGHLPKPTLWAEPGSVIIQGSPVTLRCQGSLQAEEYHLYRENKSASWVRRIQEPGKNGQFPIPSITWEHAGRYHCQYYSHNHSSEYSDPLELVVTGAYSKPTLSALPSPVVTSGGNVTLQCVSQVAFDGFILCKEGEDEHPQRLNSHSHARGWSWAIFSVGPVSPSRRWSYRCYAYDSNSPYVWSLPSDLLELLVPGVSKKPSLSVQPGPMVAPGESLTLQCVSDVGYDRFVLYKEGERDFLQRPGWQPQAGLSQANFTLGPVSPSHGGQYRCYSAHNLSSEWSAPSDPLDILITGQFYDRPSLSVQPVPTVAPGKNVTLLCQSRGQFHTFLLTKEGAGHPPLHLRSEHQAQQNQAEFRMGPVTSAHVGTYRCYSSLSSNPYLLSLPSDPLELVVSEAAETLSPSQNKTDSTTTSLGQHPQDYTVENLIRMGVAGLVLVVLGILLFEAQHSQRSLQDAAGR

SEQ ID NO: 7869 - protein, 483 aa, Homo Sapiens; identical to SEQ ID NO: 7868

SEQ ID NO: 7870 - protein, 327 aa, Homo Sapiens
MTPILTVLICLGLSLGPRTHVQAGHLPKPTLWAEPGSVIIQGSPVTLRCQGSLQAEEYHLYRENKSASWVRRIQEPGKNGQFPIPSITWEHAGRYHCQYYSHNHSSEYSDPLELVVTGAYSKPTLSALPSPVVTSGGNVTLQCVSQVAFDGFILCKEGEDEHPQRLNSHSHARGWSWAIFSVGPVSPSRRWSYRCYAYDSNSPYVWSLPSDLLELLVPGVSKKPSLSVQPGPMVAPGESLTLQCVSDVGYDRFVLYKEGERDFLQRPGWQPQAGLSQANFTLGPVSPSHGGQYRCYSAHNLSSEWSAPSDPLDILITGQFYDRPSLS

SEQ ID NO: 7871 - protein, 85 aa, Homo Sapiens
  misc_feature (1)..(1): Xaa can be any naturally occurring amino acid
XSLPSDPLELVVSEPLSISPSPTPAGSLGHLKTREEAAWASVGSDCDEAGVHPRCAPLERSTPAVGAAHTAPPVLTWRPLCSGHP

SEQ ID NO: 7872 - protein, 158 aa, Homo Sapiens
MTPALTALLCLGLSLGPRTRMQAGPFPKPTLWAEPGSVISWGSPVTIWCQGSLEAQEYQLDKEGSPEPWDRNNPLEPKNKARFSIPSMTQHHAGRYRCHYYSSAGWSEPSDPLELVMTGFYNKPTLSALPSPVVASGGNMTLRCGSQKGYHHFVLMKE

SEQ ID NO: 7873 - protein, 632 aa, Homo Sapiens
MTPALTALLCLGLSLGPRTRMQAGPFPKPTLWAEPGSVISWGSPVTIWCQGSLEAQEYQLDKEGSPEPWDRNNPLEPKNKARFSIPSMTQHHAGRYRCHYYSSAGWSEPSDPLELVMTGFYNKPTLSALPSPVVASGGNMTLRCGSQKGYHHFVLMKEGEHQLPRTLDSQQLHSGGFQALFPVGPVTPSHRWRFTCYYYYTNTPWVWSHPSDPLEILPSGVSRKPSLLTLQGPVLAPGQSLTLQCGSDVGYDRFVLYKEGERDFLQRPGQQPQAGLSQANFTLGPVSRSYGGQYRCYGAHNLSSEWSAPSDPLDILITGQIYDTVSLSAQPGPTVASGENMTLLCQSRGYFDTFLLTKEGAAHPPLRLRSMYGAHKYQAEFPMSPVTSAHAGTYRCYGSRSSNPHLLSFPSEPLELMVSGHSGGSSLPPTGPPSTPGLGRYLEVLIGVSVAFVLLLFLLLFLLLLRQRHSKHRTSDQRKTDFQRPAGAAETEPKDRGLLRRSSPAADVQEENLYAAVKDTQSEDRVELDSQQSPHDEDPQAVTYAPVKHSSPRREMASPPSSLSGEFLDTKDRQVEEDRQMDTEAAASEASQDVTYAQLHSLTLRRKATEPPPSQEGEPPAEPSIYATLAIH

SEQ ID NO: 7874 - protein, 643 aa, Homo Sapiens
MTPALTALLCLGLSLGPRTRMQAGPFPKPTLWAEPGSVISWGSPVTIWCQGSLEAQEYQLDKEGSPEPWDRNNPLEPKNKARFSIPSMTQHHAGRYRCHYYSSAGWSEPSDPLELVMTGFYNKPTLSALPSPVVASGGNMTLRCGSQKGYHHFVLMKEGEHQLPRTLDSQQLHSGGFQALFPVGPVTPSHRWRFTCYYYYTNTPWVWSHPSDPLEILPSGVSRKPSLLTLQGPVLAPGQSLTLQCGSDVGYDRFVLYKEGERDFLQRPGQQPQAGLSQANFTLGPVSRSYGGQYRCYGAHNLSSEWSAPSDPLDILITGQIYDTVSLSAQPGPTVASGENMTLLCQSRGYFDTFLLTKEGAAHPPLRLRSMYGAHKYQAEFPMSPVTSAHAGTYRCYGSRSSNPHLLSFPSEPLELMVSGPEDQPLNPPGSGPQNAPGLGSGAGTRAAGLGRYLEVLIGVSVAFVLLLFLLLFLLLLRQRHSKHRTSDQRKTDFQRPAGAAETEPKDRGLLRRSSPAADVQEENLYAAVKDTQSEDRVELDSQSPHDEDPQAVTYAPVKHSSPRREMASPPSSLSGEFLDTKDRQVEEDRQMDTEAAASEASQDVTYAQLHSLTLRRKATEPPPSQEGEPPAEPSIYATLAIH

SEQ ID NO: 7875 - protein, 631 aa, Homo Sapiens
MTPALTALLCLGLSLGPRTRMQAGPFPKPTLWAEPGSVISWGSPVTIWCQGSLEAQEYQLDKEGSPEPWDRNNPLEPKNKARFSIPSMTQHHAGRYRCHYYSSAGWSEPSDPLELVMTGFYNKPTLSALPSPVVASGGNMTLRCGSQKGYHHFVLMKEGEHQLPRTLDSQQLHSGGFQALFPVGPVTPSHRWRFTCYYYYTNTPWVWSHPSDPLEILPSGVSRKPSLLTLQGPVLAPGQSLTLQCGSDVGYDRFVLYKEGERDFLQRPGQQPQAGLSQANFTLGPVSRSYGGQYRCYGAHNLSSEWSAPSDPLDILITGQIYDTVSLSAQPGPTVASGENMTLLCQSRGYFDTFLLTKEGAAHPPLRLRSMYGAHKYQAEFPMSPVTSAHAGTYRCYGSRSSNPHLLSFPSEPLELMVSGHSGGSSLPPTGPPSTPGLGRYLEVLIGVSVAFVLLLFLLLFLLLLRQRHSKHRTSDQRKTDFQRPAGAAETEPKDRGLLRRSSPAADVQEENLYAAVKDTQSEDRVELDSQSPHDEDPQAVTYAPVKHSSPRREMASPPSSLSGEFLDTKDRQVEEDRQMDTEAAASEASQDVTYAQLHSLTLRRKATEPPPSQEGEPPAEPSIYATLAIH

SEQ ID NO: 7876 - protein, 191 aa, Homo Sapiens
MTPALTALLCLGLSLGPRTRMQAGPFPKPTLWAEPGSVISWGSPVTIWCQGSLEAQEYQLDKEGSPEPWDRNNPLEPKNKARFSIPSMTQHHAGRYRCHYYSSAGWSEPSDPLELVMTGFYNKPTLSALPSPVVASGGNMTLRCGSQKGYHHFVLMKEGEHQLPRTLDSQQLHSGGFQALFPVGPVTPSHS

SEQ ID NO: 7877 - protein, 253 aa, Homo Sapiens [sequence omitted]

SEQ ID NO: 7878 - protein, 131 aa, Homo Sapiens
MGLPVSWAPPALWVLGCCALLLSLWALCTACRRPEDAVAPRKRARRQRARLQGSATAAEAQVGHQTARAAPGPAQQQGPAACQHGSPAPTLAGGVQGHHRTAGSPLCLPTPGAAPGSAGSCSHRRVRWPRG

SEQ ID NO: 7879 - protein, 176 aa, Homo Sapiens
MGLPVSWAPPALWVLGCCALLLSLWALCTACRRPEDAVAPRKRARRQRARLQGSATAAEAQVGHQTARAAPGPAQQQGPAACQHGSPAPTLAGGVQGHHRTAGSPLCLPTPGAAPGSAGSCSHRRVRWPRGHLFQRGAGGPSRGQPGGQPCGGRVCPRPEAQRDPSQSPRATAGED

SEQ ID NO: 7880 - protein, 107 aa, Homo Sapiens
MGLPVSWAPPALWVLGCCALLLSLWALCTACRRPEDAVAPRKRARRQRARLQGSATAAEASLLRRTHLCSLSKSDTRLHELHRGPRSSRALRPASMDLLRPHWLEVS

SEQ ID NO: 7881 - protein, 295 aa, Homo Sapiens
MGLPVSWAPPALWVLGCCALLLSLWALCTACRRPEDAVAPRKRARRQRARLQGSATAAEASLLRRTHLCSLSKSDTRLHELHRGPRSSRALRPASMDLLRPHWLEVSRDITGPQAAPSAFPHQELPRALPAAAATAGCAGLEATYSNVGLAALPGVSLAASPVVAEYARVQKRKGTHRSPQEPQQGKTEVTPAAQVDVLYSRVCKPKRRDPGPTTDPLDPKGQGAILALAGDLAYQTLPLRALDVDSGPLENVYESIRELGDPAGRSSTCGAGTPPASSCPSLGRGWRPLPASLP

SEQ ID NO: 7882 - protein, 211 aa, Homo Sapiens
MGLPVSWAPPALWVLGCCALLLSLWALCTACRRPEDAVAPRKRARRQRARLQGSATAAEAVSARLSRGPGWGPQGTDQPSSPPVPTEADPPLLPQQVGHQTARAAPGPAQQQGPAACQHGSPAPTLAGGVQGHHRTAGSPLCLPTPGAAPGSAGSCSHRRVRWPRGHLFQRGAGGPSRGQPGGQPCGGRVCPRPEAQRDPSQSPRATAGED

SEQ ID NO: 7883 - protein, 4 aa, Homo Sapiens
MLAG

SEQ ID NO: 7884 - protein, 12 aa, Homo Sapiens
MLAGGVRSMPSP

SEQ ID NO: 7885 - protein, 19 aa, Homo Sapiens
MLAGGVRSMPSPLLACWQP

SEQ ID NO: 7886 - protein, 35 aa, Homo Sapiens
MLAGGVRSMPSPLLACWQPILLLVLGSVLSGSATG

SEQ ID NO: 7887 - protein, 55 aa, Homo Sapiens
MLAGGVRSMPSPLLACWQPILLLVLGSVLSGSATGCPPRCECSAQDRAVLCHRKR

SEQ ID NO: 7888 - protein, 72 aa, Homo Sapiens
MLAGGVRSMPSPLLACWQPILLLVLGSVLSGSATGCPPRCECSAQDRAVLCHRKRFVAVPEGIPTETRLLDL

SEQ ID NO: 7889 - protein, 125 aa, Homo Sapiens
MLAGGVRSMPSPLLACWQPILLLVLGSVLSGSATGCPPRCECSAQDRAVLCHRKRFVAVPEGIPTETRLLDLGKNRIKTLNQDEFASFPHLEELELNENIVSAVEPGAFNNLFNLRTLGLRSNRL

SEQ ID NO: 7890 - protein, 179 aa, Homo Sapiens
MLAGGVRSMPSPLLACWQPILLLVLGSVLSGSATGCPPRCECSAQDRAVLCHRKRFVAVPEGIPTETRLLDLGKNRIKTLNQDEFASFPHLEELELNENIVSAVEPGAFNNLFNLRTLGLRSNRLKLIPLGVFTGLSNLTKLDISENKIVILLDYMFQDLYNLKSLEVGDNDLVYISHR

SEQ ID NO: 7891 - protein, 614 aa, Homo Sapiens
MLAGGVRSMPSPLLACWQPILLLVLGSVLSGSATGCPPRCECSAQDRAVLCHRKRFVAVPEGIPTETRLLDLGKNRIKTLNQDEFASFPHLEELELNENIVSAVEPGAFNNLFNLRTLGLRSNRLKLIPLGVFTGLSNLTKLDISENKIVILLDYMFQDLYNLKSLEVGDNDLVYISHRAFSGLNSLEQLTLEKCNLTSIPTEALSHLHGLIVLRLRHLNINAIRDYSFKRLYRLKVLEISHWPYLDTMTPNCLYGLNLTSLSITHCNLTAVPYLAVRHLVYLRFLNLSYNPISTIEGSMLHELLRLQEIQLVGGQLAVVEPYAFRGLNYLRVLNVSGNQLTTLEESVFHSVGNLETLILDSNPLACDCRLLWVFRRRWRLNFNRQQPTCATPEFVQGKEFKDFPDVLLPNYFTCRRARIRDRKAQQVFVDEGHTVQFVCRADGDPPPAILWLSPRKHLVSAKSNGRLTVFPDGTLEVRYAQVQDNGTYLCIAANAGGNDSMPAHLHVRSYSPDWPHQPNKTFAFISNQPGEGEANSTRATVPFPFDIKTLIIATTMGFISFLGVVLFCLVLLFLWSRGKGNTKHNIEIEYVPRKSDAGISSADAPRKFNMKMI

SEQ ID NO: 7892 - protein, 620 aa, Homo Sapiens
MQVSKRMLAGGVRSMPSPLLACWQPILLLVLGSVLSGSATGCPPRCECSAQDRAVLCHRKRFVAVPEGIPTETRLLDLGKNRIKTLNQDEFASFPHLEELELNENIVSAVEPGAFNNLFNLRTLGLRSNRLKLIPLGVFTGLSNLTKLDISENKIVILLDYMFQDLYNLKSLEVGDNDLVYISHRAFSGLNSLEQLTLEKCNLTSIPTEALSHLHGLIVLRLRHLNINAIRDYSFKRLYRLKVLEISHWPYLDTMTPNCLYGLNLTSLSITHCNLTAVPYLAVRHLVYLRFLNLSYNPISTIEGSMLHELLRLQEIQLVGGQLAVVEPYAFRGLNYLRVLNVSGNQLTTLEESVFHSVGNLETLILDSNPLACDCRLLWVFRRRWRLNFNRQQPTCATPEFVQGKEFKDFPDVLLPNYFTCRRARIRDRKAQQVFVDEGHTVQFVCRADGDPPPAILWLSPRKHLVSAKSNGRLTVFPDGTLEVRYAQVQDNGTYLCIAANAGGNDSMPAHLHVRSYSPDWPHQPNKTFAFISNQPGEGEANSTRATVPFPFDIKTLIIATTMGFISFLGVVLFCLVLLFLWSRGKGNTKHNIEIEYVPRKSDAGISSADAPRKFNMKMI

SEQ ID NO: 7893 - protein, 326 aa, Homo Sapiens
MVQLEQKVSKRMLAGGVRSMPSPLLACWQPILLLVLGSVLSGSATGCPPRCECSAQDRAVLCHRKRFVAVPEGIPTETRLLDLGKNRIKTLNQDEFASFPHLEELELNENIVSAVEPGAFNNLFNLRTLGLRSNRLKLIPLGVFTGLSNLTKLDISENKIVILLDYMFQDLYNLKSLEVGDNDLVYISHRAFSGLNSLEQLTLEKCNLTSIPTEALSHLHGLIVLRLRHLNINAIRDYSFKRLYRLKVLEISHWPYLDTMTPNCLYGLNLTSLSITHCNLTAVPYLAVRHLVYLRFLNLSYNPISTIEGSMLHELLRLQEIQLVGG

SEQ ID NO: 7894 - protein, 343 aa, Homo Sapiens
MACLEFVPFDVQMCLEFLPSGPKPVVFLQHGLLADSSNWVTNLANSSLGFILADAGFDVWMGNSRGNTWSRKHKTLSVSQDEFWAFSYDEMAKYDLPASINFILNKTGQEQVYYVGHSQGTTIGFIAFSQIPELAKRIKMFFALGPVASVAFCTSPMAKLGRLPDHLIKDLFGDKEFLPQSAFLKWLGTHVCTHVILKELCGNLCFLLCGFNERNLNMSRVDVYTTHSPAGTSVQNMLHWSQAVKFQKFQAFDWGSSAKNYFHYNQSYPPTYNVKDMLVPTAVWSGGHDWLADVYDVNILLTQITNLVFHESIPEWEHLDFIWGLDAPWRLYNKIINLMRKYQ

SEQ ID NO: 7895 - protein, 283 aa, Homo Sapiens
MGNSRGNTWSRKHKTLSVSQDEFWAFSYDEMAKYDLPASINFILNKTGQEQVYYVGHSQGTTIGFIAFSQIPELAKRIKMFFALGPVASVAFCTSPMAKLGRLPDHLIKDLFGDKEFLPQSAFLKWLGTHVCTHVILKELCGNLCFLLCGFNERNLNMSRVDVYTTHSPAGTSVQNMLHWSQAVKFQKFQAFDWGSSAKNYFHYNQSYPPTYNVKDMLVPTAVWSGGHDWLADVYDVNILLTQITNLVFHESIPEWEHLDFIWGLDAPWRLYNKIINLMRKYQ

SEQ ID NO: 7896 - protein, 219 aa, Homo Sapiens
MKMRFLGLVVCLVLWTLHSEGSGGKLTAVDPETNMNVSEIISYWGFPSEEYLVETEDGYILCLNRIPHGRKNHSDKGPKPVVFLQHGLLADSSNWVTNLANSSLGFILADAGFDVWMGNSRGNTWSRKHKTLSVSQDEFWAFSYDEMAKYDLPASINFILNKTGQEQVYYVGHSQGTTIGFIAFSQIPELAKRIKMFFALGPVASVAFCTSPMAKLGRL

SEQ ID NO: 7897 - protein, 399 aa, Homo Sapiens
MKMRFLGLVVCLVLWTLHSEGSGGKLTAVDPETNMNVSEIISYWGFPSEEYLVETEDGYILCLNRIPHGRKNHSDKGPKPVVFLQHGLLADSSNWVTNLANSSLGFILADAGFDVWMGNSRGNTWSRKHKTLSVSQDEFWAFSYDEMAKYDLPASINFILNKTGQEQVYYVGHSQGTTIGFIAFSQIPELAKRIKMFFALGPVASVAFCTSPMAKLGRLPDHLIKDLFGDKEFLPQSAFLKWLGTHVCTHVILKELCGNLCFLLCGFNERNLNMSRVDVYTTHSPAGTSVQNMLHWSQAVKFQKFQAFDWGSSAKNYFHYNQSYPPTYNVKDMLVPTAVWSGGHDWLADVYDVNILLTQITNLVFHESIPEWEHLDFIWGLDAPWRLYNKIINLMRKYQ

SEQ ID NO: 7898 - protein, 290 aa, Homo Sapiens
MKMRFLGLVVCLVLWTLHSEGSGGKLTAVDPETNMNVSEIISYWGFPSEEYLVETEDGYILCLNRIPHGRKNHSDKGPKPVVFLQHGLLADSSNWVTNLANSSLGFILADAGFDVWMGNSRGNTWSRKHKTLSVSQDEFWAFSYDEMAKYDLPASINFILNKTGQEQVYYVGHSQGTTIGFIAFSQIPELAKRIKMFFALGPVASVAFCTSPMAKLGRLPDHLIKDLFGDKEFLPQSAFLKWLGTHVCTHVILKELCGNLCFLLCGFNERNLNMSRVDVYTTHSPAGTSV

SEQ ID NO: 7899 - protein, 438 aa, Homo Sapiens
MDTSPLCFSILLVLCIFIQSSALGQSLKPEPFGRRAQAVETNKTLHEMKTRFLLFGETNQGCQIRINHPDTLQECGFNSSLPLVMIIHGWSESVQLSRSHVHLIGYSLGAHVSGFAGSSIGGTHKIGRITGLDAAGPLFEGSAPSNRLSPDDANFVDAIHTFTREHMGLSVGIKQPIGHYDFYPNGGSFQPGCHFLELYRHIAQHGFNAITQTIKCSHERSVHLFIDSLLHAGTQSMAYPCGDMNSFSQGLCLSCKKGRCNTLGYHVRQEPRSKSKRLFLVTRAQSPFKVYHYQFKIQFINQTETPIQTTFTMSLLGTKEKMQKIPITLGKGIASNKTYSFLITLDVDIGELIMIKFKWENSAVWANVWDTVQTIIPWSTGPRHSGLVLKTIRVKAGETQQRMTFCSENTDDLLLRPTQEKIFVKCEIKSKTSKRKIR

SEQ ID NO: 7900 - protein, 499 aa, Homo Sapiens
MDTSPLCFSILLVLCIFIQSSALGQSLKPEPFGRRAQAVETNKTLHEMKTRFLLFGETNQGCQIRINHPDTLQECGFNSSLPLVMIIHGWSVDGVLENWIWQMVAALKSQPAQPVNVGLVDWITLAHDHYTIAVRNTRLVGKEVAALLRWLEESVQLSRSHVHLIGYSLGAHVSGFAGSSIGGTHKIGRITGLDAAGPLFEGSAPSNRLSPDDANFVDAIHTFTREHMGLSVGIKQPIGHYDFYPNGGSFQPGCHFLELYRHIAQHGFNAITQTIKCSHERSVHLFIDSLLHAGTQSMAYPCGDMNSFSQGLCLSCKKGRCNTLGYHVRQEPRSKSKRLFLVTRAQSPFKVYHYQFKIQFINQTETPIQTTFTMSLLGTKEKMQKIPITLGKGIASNKTYSFLITLDVDIGELIMIKFKWENSAVWANVWDTVQTIIPWSTGPRHSGLVLKTIRVKAGETQQRMTFCSENTDDLLLRPTQEKIFVKCEIKSKTSKRKIR

SEQ ID NO: 7901 - protein, 499 aa, Homo Sapiens; identical to SEQ ID NO: 7900

SEQ ID NO: 7902 - protein, 499 aa, Homo Sapiens
MDTSPLCFSILLVLCIFIQSSALGQSLKPEPFGRRAQAVETNKTLHEMKTRFLLFGETNQGCQIRINHPDTLQECGFNSSLPLVMIIHGWSVDGVLENWIWQMVAALKSQPAQPVNVGLVDWITLAHDHYTIAVRNTRLVGKEVAALLRWLEESVQLSRSHVHLIGYSLGAHVSGFAGSSIGGTHKIGRITGLDAAGPLFEGSAPSNRLSPDDANFVDAIHTFTREHMGLSVGIKQPIGHYDFYPNGGSFQPGCHFLELYRHIAQHGFNAITQTIKCSHERSVHLFIDSLLHAGTQSMAYPCGDMNSFSQGLCLSCKKGRCNTLGYHVRQEPRSKSKRLFLVTRAQSPFKVYHYQFKIQFINQTETPIQTTFTMSLLGTKEKMQKIPITLGKGIASNKTYSFLITLDVDIGELIMIKFKWENSAVWANVWDTVQTIIPWSTGPRHSGLVLKTIRVKAGETQQRSPNRINLGRLNCSLLFCTELFSHDSLAHWSSAASEL

SEQ ID NO: 7903 - protein, 375 aa, Homo Sapiens
MFSNANSRSKMWLLLTMASLISVLGTTHGLFGKLHPGSPEVTMNISQMITYWGYPNEEYEVVTEDGYILEVNRIPYGKKNSGNTDAGYDVWLGNSRGNTWARRNLYYSPDSVEFWAFSFDEMAKYDLPATIDFIVKKTGQKQLHYVGHSQGTTIGFIAFSTNPSLAKRIKTFYALAPVATVKYTKSLINKLRFVPQSLFKFIFGDKIFYPHNFFDQFLATEVCSREMLNLLCSNALFIICGFDSKNFNTSRLDVYLSHNPAGTSVQNMFHWTQAVKSGKFQAYDWGSPVQNRMHYDQSQPPYYNVTAMNVPIAVWNGGKDLLADPQDVGLLLPKLPNLIYHKEIPFYNHLDFIWAMDAPQEVYNDIVSMISEDKK

SEQ ID NO: 7904 - protein, 408 aa, Homo Sapiens
MFSNANSRSKMWLLLTMASLISVLGTTHGLFGKLHPGSPEVTMNISQMITYWGYPNEEYEVVTEDGYILEVNRIPYGKKNSGNTGQRPVVFLQHGLLASATNWISNLPNNSLAFILADAGYDVWLGNSRGNTWARRNLYYSPDSVEFWAFSFDEMAKYDLPATIDFIVKKTGQKQLHYVGHSQGTTIGFIAFSTNPSLAKRIKTFYALAPVATVKYTKSLINKLRFVPQSLFKFIFGDKIFYPHNFFDQFLATEVCSREMLNLLCSNALFIICGFDSKNFNTSRLDVYLSHNPAGTSVQNMFHWTQAVKSGKFQAYDWGSPVQNRMHYDQSQPPYYNVTAMNVPIAVWNGGKDLLADPQDVGLLLPKLPNLIYHKEIPFYNHLDFIWAMDAPQEVYNDIVSMISEDKK

SEQ ID NO: 7905 - protein, 365 aa, Homo Sapiens
MWLLLTMASLISVLGTTHGLFGKLHPGSPEVTMNISQMITYWGYPNEEYEVVTEDGYILEVNRIPYGKKNSGNTDAGYDVWLGNSRGNTWARRNLYYSPDSVEFWAFSFDEMAKYDLPATIDFIVKKTGQKQLHYVGHSQGTTIGFIAFSTNPSLAKRIKTFYALAPVATVKYTKSLINKLRFVPQSLFKFIFGDKIFYPHNFFDQFLATEVCSREMLNLLCSNALFIICGFDSKNFNTSRLDVYLSHNPAGTSVQNMFHWTQAVKSGKFQAYDWGSPVQNRMHYDQSQPPYYNVTAMNVPIAVWNGGKDLLADPQDVGLLLPKLPNLIYHKEIPFYNHLDFIWAMDAPQEVYNDIVSMISEDKK

SEQ ID NO: 7906 - protein, 398 aa, Homo Sapiens
MWLLLTMASLISVLGTTHGLFGKLHPGSPEVTMNISQMITYWGYPNEEYEVVTEDGYILEVNRIPYGKKNSGNTGQRPVVFLQHGLLASATNWISNLPNNSLAFILADAGYDVWLGNSRGNTWARRNLYYSPDSVEFWAFSFDEMAKYDLPATIDFIVKKTGQKQLHYVGHSQGTTIGFIAFSTNPSLAKRIKTFYALAPVATVKYTKSLINKLRFVPQSLFKFIFGDKIFYPHNFFDQFLATEVCSREMLNLLCSNALFIICGFDSKNFNTSRLDVYLSHNPAGTSVQNMFHWTQAVKSGKFQAYDWGSPVQNRMHYDQSQPPYYNVTAMNVPIAVWNGGKDLLADPQDVGLLLPKLPNLIYHKEIPFYNHLDFIWAMDAPQEVYNDIVSMISEDKK

SEQ ID NO: 7907 - protein, 188 aa, Homo Sapiens
LCYCFAAGSPVPFGPEGRLEDKLHKPKATQTEVKPSVRFNLRTSKDPEHEGCYLSVGHSQPLEDCSFNMTAKTFFIIHGWTMSGIFENWLHKLVSALHTREKDANVVVVDWLPLAHQLYTDAVNNTRVVGHSIARMLDWLQVLGDERESPVTSRISNPIFLRNAGHASVAMNFWSLIKIFEIKSFIEL

SEQ ID NO: 7908 - protein, 390 aa, Homo Sapiens
MLSFSRDRLPSGRRVSGKCPPPPLGMAVGRGGSGCPEEGSGRKLELLESQLPAERAREEAGPSVRRPRDKLHKPKATQTEVKPSVRFNLRTSKDPEHEGCYLSVGHSQPLEDCSFNMTAKTFFIIHGWTMSGIFENWLHKLVSALHTREKDANVVVVDWLPLAHQLYTDAVNNTRVVGHSIARMLDWLQEKDDFSLGNVHLIGYSLGAHVAGYAGNFVKGTVGRITGLDPAGPMFEGADIHKRLSPDDADFVDVLHTYTRSFGLSIGIQMPVGHIDIYPNGGDFQPGCGLNDVLGSIAYGTITEVVKCEHERAVHLFVDSLVNQDKPSFAFQCTDSNRFKKGICLSCRKNRCNSIGYNAKKMRNKRNSKMYLKTRAGMPFRGNLQSLECP

SEQ ID NO: 7909 - protein, 426 aa, Homo Sapiens
MSNSVPLLCFWSLCYCFAAGSPVPFGPEGRLEDKLHKPKATQTEVKPSVRFNLRTSKDPEHEGCYLSVGHSQPLEDCSFNMTAKTFFIIHGWTMSGIFENWLHKLVSALHTREKDANVVVVDWLPLAHQLYTDAVNNTRVVGHSIARMLDWLQEKDDFSLGNVHLIGYSLGAHVAGYAGNFVKGTVGRITAITEVVKCEHERAVHLFVDSLVNQDKPSFAFQCTDSNRFKKGICLSCRKNRCNSIGYNAKKMRNKRNSKMYLKTRAGMPFRVYHYQMKIHVFSYKNMGEIEPTFYVTLYGTNADSQTLPLEIVERIEQNATNTFLVYTEEDLGDLLKIQLTWEGASQSWYNLWKEFRSYLSQPRNPGRELNIRRIRVKSGETQRKLTFCTEDPENTSISPGRELWFRKCRDGWRMKNETSPTVELP

SEQ ID NO: 7910 - protein, 500 aa, Homo Sapiens
MSNSVPLLCFWSLCYCFAAGSPVPFGPEGRLEDKLHKPKATQTEVKPSVRFNLRTSKDPEHEGCYLSVGHSQPLEDCSFNMTAKTFFIIHGWTMSGIFENWLHKLVSALHTREKDANVVVVDWLPLAHQLYTDAVNNTRVVGHSIARMLDWLQEKDDFSLGNVHLIGYSLGAHVAGYAGNFVKGTVGRITGLDPAGPMFEGADIHKRLSPDDADFVDVLHTYTRSFGLSIGIQMPVGHIDIYPNGGDFQPGCGLNDVLGSIAYGTITEVVKCEHERAVHLFVDSLVNQDKPSFAFQCTDSNRFKKGICLSCRKNRCNSIGYNAKKMRNKRNSKMYLKTRAGMPFRVYHYQMKIHVFSYKNMGEIEPTFYVTLYGTNADSQTLPLEIVERIEQNATNTFLVYTEEDLGDLLKIQLTWEGASQSWYNLWKEFRSYLSQPRNPGRELNIRRIRVKSGETQRKLTFCTEDPENTSISPGRELWFRKCRDGWRMKNETSPTVELP

SEQ ID NO: 7911 - protein, 354 aa, Homo Sapiens
MSNSVPLLCFWSLCYCFAAGSPVPFGPEGRLEDKLHKPKATQTEVKPSVRFNLRTSKDPEHEGCYLSVGHSQPLEDCSFNMTAKTFFIIHGWTMSGIFENWLHKLVSALHTREKDANVVVVDWLPLAHQLYTDAVNNTRVVGHSIARMLDWLQEKDDFSLGNVHLIGYSLGAHVAGYAGNFVKGTVGRITGLDPAGPMFEGADIHKRLSPDDADFVDVLHTYTRSFGLSIGIQMPVGHIDIYPNGGDFQPGCGLNDVLGSIAYGTITEVVKCEHERAVHLFVDSLVNQDKPSFAFQCTDSNRFKKGICLSCRKNRCNSIGYNAKKMRNKRNSKMYLKTRAGMPFRGNLQSLECP

SEQ ID NO: 7912 - protein, 24 aa, Homo Sapiens
MTAKTFFIIHGWTMSGIFENWLHK

SEQ ID NO: 7913 - protein, 417 aa, Homo Sapiens
MLRFYLFISLLCLSRSDAEETCPSFTRLSFHSAVVGTGLNVRLMLYTRKNLTCAQTINSSAFGNLNVTKKTTFIVHGFRPTGSPPVWMDDLVKGLLSVEDMNVVVVDWNRGATTLIYTHASSKTRKVAMVLKEFIDQMLAEGASLDDIYMIGVSLGAHISGFVGEMYDGWLGRITALGYKEPLGNIDFYPNGGLDQPGCPKTILGGFQYFKCDHQRSVYLYLSSLRESCTITAYPCDSYQDYRNGKCVSCGTSQKESCPLLGYYADNWKDHLRGKDPPMTKAFFDTAEESPFCMYHYFVDIITWNKNVRRGDITIKLRDKAGNTTESKINHEPTTFQKYHQVSLLARFNQDLDKVAAISLMFSTGSLIGPRYKLRILRMKLRSLAHPERPQLCRYDLVLMENVETVFQPILCPELQL

SEQ ID NO: 7914 - protein, 451 aa, Homo Sapiens
MLRFYLFISLLCLSRSDAEETCPSFTRLSFHSAVVGTGLNVRLMLYTRKNLTCAQTINSSAFGNLNVTKKTTFIVHGFRPTGSPPVWMDDLVKGLLSVEDMNVVVVDWNRGATTLIYTHASSKTRKVAMVLKEFIDQMLAEGASLDDIYMIGVSLGAHISGFVGEMYDGWLGRITGLDPAGPLFNGKPHQDRLDPSDAQFVDVIHSDTDALGYKEPLGNIDFYPNGGLDQPGCPKTILGGFQYFKCDHQRSVYLYLSSLRESCTITAYPCDSYQDYRNGKCVSCGTSQKESCPLLGYYADNWKDHLRGKDPPMTKAFFDTAEESPFCMYHYFVDIITWNKNVRRGDITIKLRDKAGNTTESKINHEPTTFQKYHQVSLLARFNQDLDKVAAISLMFSTGSLIGPRYKLRILRMKLRSLAHPERPQLCRYDLVLMENVETVFQPILCPELQL

SEQ ID NO: 7915 - protein, 47 aa, Homo Sapiens
MLRFYLFISLLCLSRSDASLDMNEESPLFEEGFLQSEIWEIKLIPPK

SEQ ID NO: 7916 - protein, 86 aa, Homo Sapiens
  misc_feature (1)..(1): Xaa can be any naturally occurring amino acid
XDIYMIGVSLGAHISGFVGEMYDGWLGRITGFQYFKCDHQRSVYLYLSSLRESCTITAYPCDSYQDYRNGKCVSCGTSQKESCPLL

SEQ ID NO: 7917 - protein, 73 aa, Homo Sapiens
  misc_feature (1)..(1): Xaa can be any naturally occurring amino acid
XSPFCMYHYFVDIITWNKNVRRGDITIKLRDKAGNTTESKINQISNRPKVQAQDSPNEVKVPCPSGEASAVSV

SEQ ID NO: 7918 - protein, 399 aa, Homo Sapiens
MWQLLAAACWMLLLGSMYGYDKKGNNANPEANMNISQIISYWGYPYEEYDVTTKDGYILGIYRIPHGRGCPGRTAPKPAVYLQHGLIASASNWICNLPNNSLAFLLADSGYDVWLGNSRGNTWSRKHLKLSPKSPEYWAFSLDEMAKYDLPATINFIIEKTGQKRLYYVGHSQGTTIAFIAFSTNPELAKKIKIFFALAPVVTVKYTQSPMKKLTTLSRRVVKVLFGDKMFHPHTLFDQFIATKVCNRKLFRRICSNFLFTLSGFDPQNLNMSRLDVYLSHNPAGTSVQNMLHWAQAVNSGQLQAFDWGNSDQNMMHFHQLTPPLYNITKMEVPTAIWNGGQDIVADPKDVENLLPQIANLIYYKLIPHYNHVDFYLGEDAPQEIYQDLIILMEEYLQN

SEQ ID NO: 7919 - protein, 423 aa, Homo Sapiens
MLETLSRQWIVSHRMEMWLLILVAYMFQRNVNSVHMPTKAVDPEAFMNISEIIQHQGYPCEEYEVATEDGYILSVNRIPRGLVQPKKTGSRPVVLLQHGLVGGASNWISNLPNNSLGFILADAGFDVWMGNSRGNAWSRKHKTLSIDQDEFWAFSYDEMARFDLPAVINFILQKTGQEKIYYVGYSQGTTMGFIAFSTMPELAQKIKMYFALAPIATVKHAKSPGTKFLLLPDMMIKGLFGKKEFLYQTRFLRQLVIYLCGQVILDQICSNIMLLLGGFNTNNMNMSRASVYAAHTLAGTSVQNILHWSQAVNSGELRAFDWGSETKNLEKCNQPTPVRYRVRDMTVPTAMWTGGQDWLSNPEDVKMLLSEVTNLIYHKNIPEWAHVDFIWGLDAPHRMYNEIIHLMQQEETNLSQGRCEAVL

SEQ ID NO: 7920 - protein, 383 aa, Homo Sapiens
MTRPLDRKQSEIIQHQGYPCEEYEVATEDGYILSVNRIPRGLVQPKKTGSRPVVLLQHGLVGGASNWISNLPNNSLGFILADAGFDVWMGNSRGNAWSRKHKTLSIDQDEFWAFSYDEMARFDLPAVINFILQKTGQEKIYYVGYSQGTTMGFIAFSTMPELAQKIKMYFALAPIATVKHAKSPGTKFLLLPDMMIKGLFGKKEFLYQTRFLRQLVIYLCGQVILDQICSNIMLLLGGFNTNNMNMSRASVYAAHTLAGTSVQNILHWSQAVNSGELRAFDWGSETKNLEKCNQPTPVRYRVRDMTVPTAMWTGGQDWLSNPEDVKMLLSEVTNLIYHKNIPEWAHVDFIWGLDAPHRMYNEIIHLMQQEETNLSQGRCEAVL

SEQ ID NO: 7921 - protein, 398 aa, Homo Sapiens
MMWLLLTTTCLICGTLNAGGFLDLENEVNPEVWMNTSEIIIYNGYPSEEYEVTTEDGYILLVNRIPYGRTHARSTGPRPVVYMQHALFADNAYWLENYANGSLGFLLADAGYDVWMGNSRGNTWSRRHKTLSETDEKFWAFSFDEMAKYDLPGVIDFIVNKTGQEKLYFIGHSLGTTIGFVAFSTMPELAQRIKMNFALGPTISFKYPTGIFTRFFLLPNSIIKAVFGTKGFFLEDKKTKIASTKICNNKILWLICSEFMSLWAGSNKKNMNQSRMDVYMSHAPTGSSVHNILHIKQLYHSDEFRAYDWGNDADNMKHYNQSHPPIYDLTAMKVPTAIWAGGHDVLVTPQDVARILPQIKSLHYFKLLPDWNHFDFVWGLDAPQRMYSEIIALMKAYS

SEQ ID NO: 7922 - protein, 288 aa, Homo Sapiens
MAAEGWIWRWGWGRRCLGRPGLLGPGPGPTTPLFLLLLLGSVTADITDGNSEHLKREHSLIKPYQGVGSSSMPLWDFQGSTMLTSQYVRLTPDERSKEGSIWNHQPCFLKDWEMHVHFKVHGTGKKNLHGDGIALWYTRDRLVPDNFHGLAIFLDTYPNDETTERVFPYISVMVNNGSLSYDHSKDGRWTELAGCTADFRNRDHDTFLAVRYSRGRLTVMTDLEDKNEWKNCIDITGVRLPTGYYFGASAGTGDLSDNHDIISMKLFQLMVEHTPDEESIDWTKIEPS

SEQ ID NO: 7923 - protein, 203 aa, Homo Sapiens
MAAEGWIWRWGWGRRCLGRPGLLGPGPGPTTPLFLLLLLGSVTADITDGNSEHLKREHSLIKPYQGVGSSSMPLWDFQGSTMLTSQYVRLTPDERSKEGSIWNHQPCFLKDWEMHVHFKVHGTGKKNLHGDGIALWYTRDRLVPGPVFGSKDNFHGLAIFLDTYPNDETTEHRLDQDRAQRQLPQVAQRQRGRPHGELPQRAP

SEQ ID NO: 7924 - protein, 356 aa, Homo Sapiens
MAAEGWIWRWGWGRRCLGRPGLLGPGPGPTTPLFLLLLLGSVTADITDGNSEHLKREHSLIKPYQGVGSSSMPLWDFQGSTMLTSQYVRLTPDERSKEGSIWNHQPCFLKDWEMHVHFKVHGTGKKNLHGDGIALWYTRDRLVPGPVFGSKDNFHGLAIFLDTYPNDETTERVFPYISVMVNNGSLSYDHSKDGRWTELAGCTADFRNRDHDTFLAVRYSRGRLTVMTDLEDKNEWKNCIDITGVRLPTGYYFGASAGTGDLSDNHDIISMKLFQLMVEHTPDEESIDWTKIEPSVNFLKSPKDNVDDPTGNFRSGPLTGWRVFLLLLCALLGIVVCAVVGAVVFQKRQERNKRFY

SEQ ID NO: 7925 - protein, 325 aa, Homo Sapiens
MAAEGWIWRWGWGRRCLGRPGLLGPGPGPTTPLFLLLLLGSVTADITDGNSEHLKREHSLIKPYQGVGSSSMPLWDFQGSTMLTSQYVRLTPDERSKEGSIWNHQPCFLKDWEMHVHFKVHGTGKKNLHGDGIALWYTRDRLVPGPVFGSKDNFHGLAIFLDTYPNDETTERVFPYISVMVNNGSLSYDHSKDGRWTELAGCTADFRNRDHDTFLAVRYSRGRLTVMTDLEDKNEWKNCIDITGVRLPTGYYFGASAGTGDLSDNHDIISMKLFQLMVEHTPDEESIDWTKIEPSVNFLKSPKAPPFLLPQTTWTTPRGTSAAGP

SEQ ID NO: 7926 - protein, 192 aa, Homo Sapiens
MPLWDFQGSTMLTSQYVRLTPDERSKEGSIWNHQPCFLKDWEMHVHFKVHGTGKKNLHGDGIALWYTRDRLVPGPVFGSKDNFHGLAIFLDTYPNDETTERVFPYISVMVNNGSLSYDHSKDGRWTELAGCTADFRNRDHDTFLAVRYSRGRLTVMTDLEDKNEWKNCIDITGVRLPTGYYFGASAGTGDLS

SEQ ID NO: 7927 - protein, 144 aa, Homo Sapiens
MAIGDHILQQNVNGQTISLYRFLPNIVMQANSTVTVWAAASEAKHQPPSDFLWKEQDKFRASPDCITILCKPNGQAIAWYTPIHWKQAWEKLDADVEFNRCSVVSPTFRKRVFQWTASTATITKEKQDQPKKDISNYQVEQAQV

SEQ ID NO: 7928 - protein, 291 aa, Homo Sapiens
MIGDGEDYFLSLFGDSKKLTAHSNYTQKTLKYFSMILEEVGQFTSSSLGDVEIAEVNVKGLFVKLINSSLDKEMAIGDHILQQNVNGQTISLYRFLPNIVMQANSTVTVWAAASEAKHQPPSDFLWKEQDKFRASPDCITILCKPNGQAIAWYTPIHWKQAWEKLDADVEFNRCSVVSPTFRKRVFQWTASTATITKEKQDQPKKDISNYQVEQAQVLLKREKEIPPTVFPNRSPWCQNPYVSAHPYCPLIEPHNTSTAGGRLDRQPRTRSTRPNRASGSKKKKTSESQKQ

SEQ ID NO: 7929 - protein, 369 aa, Homo Sapiens
MKDTQDIQEASKAMQNKVHEQEDKNEKQKQREDKLGVYSLVHFSPKMLGSVATTLPLSSSNSSGMPLGYYLSSPQISRVTISTTGQLTSKATVGSCSRVENSLDASPFSVPKKQDESPMIGDGEDYFLSLFGDSKKLTAHSNYTQKTLKYFSMILEEVGQFTSSSLGDVEIAEVNVKGLFVKLINSSLDKEMAIGDHILQQNVNGQTISLYRFLPNIVMQANSTVTAIAWYTPIHWKQAWEKLDADVEFNRCSVVSPTFRKRVFQWTASTATITKEKQDQPKKDISNYQVEQAQVLLKREKEIPPTVFPNRSPWCQNPYVSAHPYCPLIEPHNTSTAGGRLDRQPRTRSTRPNRASGSKKKKTSESQKQ

SEQ ID NO: 7930 - protein, 409 aa, Homo Sapiens
MKDTQDIQEASKAMQNKVHEQEDKNEKQKQREDKLGVYSLVHFSPKMLGSVATTLPLSSSNSSGMPLGYYLSSPQISRVTISTTGQLTSKATVGSCSRVENSLDASPFSVPKKQDESPMIGDGEDYFLSLFGDSKKLTAHSNYTQKTLKYFSMILEEVGQFTSSSLGDVEIAEVNVKGLFVKLINSSLDKEMAIGDHILQQNVNGQTISLYRFLPNIVMQANSTVTVWAAASEAKHQPPSDFLWKEQDKFRASPDCITILCKPNGQAIAWYTPIHWKQAWEKLDADVEFNRCSVVSPTFRKRVFQWTASTATITKEKQDQPKKDISNYQVEQAQVLLKREKEIPPTVFPNRSPWCQNPYVSAHPYCPLIEPHNTSTAGGRLDRQPRTRSTRPNRASGSKKKKTSESQKQ

SEQ ID NO: 7931 - protein, 388 aa, Homo Sapiens
MLEGSWINRREDKLGVYSLVHFSPKMLGSVATTLPLSSSNSSGMPLGYYLSSPQISRVTISTTGQLTSKATVGSCSRVENSLDASPFSVPKKQDESPMIGDGEDYFLSLFGDSKKLTAHSNYTQKTLKYFSMILEEVGQFTSSSLGDVEIAEVNVKGLFVKLINSSLDKEMAIGDHILQQNVNGQTISLYRFLPNIVMQANSTVTVWAAASEAKHQPPSDFLWKEQDKFRASPDCITILCKPNGQAIAWYTPIHWKQAWEKLDADVEFNRCSVVSPTFRKRVFQWTASTATITKEKQDQPKKDISNYQVEQAQVLLKREKEIPPTVFPNRSPWCQNPYVSAHPYCPLIEPHNTSTAGGRLDRQPRTRSTRPNRASGSKKKKTSESQKQ

SEQ ID NO: 7932 - protein, 72 aa, Homo Sapiens
MLGSVATTLPLSSSNSSGMPLGYYLSSPQISRVTISTTGQLTSKATVGSCSRVENSLDASPFSVPKKQDESP

SEQ ID NO: 7933 - protein, 166 aa, Homo Sapiens
MLGSVATTLPLSSSNSSGMPLGYYLSSPQISRVTISTTGQLTSKATVGSCSRVENSLDASPFSVPKKQDESPMIGDGEDYFLSLFGDSKKLTAHSNYTQKTLKYFSMILEEVGQFTSSSLGDVEIAEVNVKGLFVKLINSSLDKEMAIGDHILQQNVNGQTISLYR

SEQ ID NO: 7934 - protein, 170 aa, Homo Sapiens
MLGSVATTLPLSSSNSSGMPLGYYLSSPQISRVTISTTGQLTSKATVGSCSRVENSLDASPFSVPKKQDESPMIGDGEDYFLSLFGDSKKLTAHSNYTQKTLKYFSMILEEVGQFTSSSLGDVEIAEVNVKGLFVKLINSSLDKEMAIGDHILQQNVNGQTISLYRFLPN

SEQ ID NO: 7935 - protein, 325 aa, Homo Sapiens
MQQPVRAGDIGVSRVQTHHNASPFSVPKKQDESPMIGDGEDYFLSLFGDSKKLTAHSNYTQKTLKYFSMILEEVGQFTSSSLGDVEIAEVNVKGLFVKLINSSLDKEMAIGDHILQQNVNGQTISLYRFLPNIVMQANSTVTVWAAASEAKHQPPSDFLWKEQDKFRASPDCITILCKPNGQAIAWYTPIHWKQAWEKLDADVEFNRCSVVSPTFRKRVFQWTASTATITKEKQDQPKKDISNYQVEQAQVLLKREKEIPPTVFPNRSPWCQNPYVSAHPYCPLIEPHNTSTAGGRLDRQPRTRSTRPNRASGSKKKKTSESQKQ

SEQ ID NO: 7936 - protein, 105 aa, Homo Sapiens
QWTASTATITKEKQDQPKKDISNYQVEQAQVLLKREKEIPPTVFPNRSPWCQNPYVSAHPYCPLIEPHNTSTAGGRLDRQPRTRSTRPNRASGSKKKKTSESQKQ

SEQ ID NO: 7937 - protein, 163 aa, Homo Sapiens
  misc_feature (1)..(1): Xaa can be any naturally occurring amino acid
XDKFRASPDCITILCKPNGQAIAWYTPIHWKQAWEKLDADVEFNRCSVVSPTFRKRVFQWTASTATITKEKQDQPKKDISNYQVEQAQVLLKREKEIPPTVFPNRSPWCQNPYVSAHPYCPLIEPHNTSTAGGRLDRQPRTRSTRPNRASGSKKKKTSESQKQ

SEQ ID NO: 7938 - protein, 632 aa, Homo Sapiens
MKALLLLVLPWLSPANYIDNVGNLHFLYSELCKGASHYGLTKDRKRRSQDGCPDGCASLTATAPSPEVSAAATISLMTDEPGLDNPAYVSSAEDGQPAISPVDSGRSNRTRARPFERSTIRSRSFKKINRALSVLRRTKSGSAVANHADQGRENSENTTAPEVFPRLYHLIPDGEITSIKINRVDPSESLSIRLVGGSETPLVHIIIQHIYRDGVIARDGRLLPGDIILKVNGMDISNVPHNYAVRLLRQPCQVLWLTVMREQKFRSRNNGQAPDAYRPRDDSFHVILNKSSPEEQLGIKLVRKVDEPGVFIFNVLDGGVAYRHGQLEENDRVLAINGHDLRYGSPESAAHLIQASERRVHLVVSRQVRQRSPDIFQEAGWNSNGSWSPGPGERSNTPKPLHPTITCHEKVVNIQKDPGESLGMTVAGGASHREWDLPIYVISVEPGGVISRDGRIKTGDILLNVDGVELTEVSRSEAVALLKRTSSSIVLKALEVKEYEPQEDCSSPAALDSNHNMAPPSDWSPSWVMWLELPRCLYNCKDIVLRRNTAGSLGFCIVGGYEEYNGNKPFFIKSIVEGTPAYNDGRIRCGDILLAVNGRSTSGMIHACLARLLKELKGRITLTIVSWPGTFL

SEQ ID NO: 7939 - protein, 6 aa, Homo Sapiens
MNQPES

SEQ ID NO: 7940 - protein, 16 aa, Homo Sapiens
MNQPESANDPEPLCAV

SEQ ID NO: 7941 - protein, 90 aa, Homo Sapiens
MNQPESANDPEPLCAVCGQAHSLEENHFYSYPEEVDDDLICHICLQALLDPLDTPCGHTYCTLCLTNFLVEKDFCPMDRKPLVLQHCKKS

SEQ ID NO: 7942 - protein, 99 aa, Homo Sapiens
MNQPESANDPEPLCAVCGQAHSLEENHFYSYPEEVDDDLICHICLQALLDPLDTPCGHTYCTLCLTNFLVEKDFCPMDRKPLVLQHCKKSSILVNKLLN

SEQ ID NO: 7943 - protein, 126 aa, Homo Sapiens
MNQPESANDPEPLCAVCGQAHSLEENHFYSYPEEVDDDLICHICLQALLDPLDTPCGHTYCTLCLTNFLVEKDFCPMDRKPLVLQHCKKSSILVNKLLNKLLVTCPFREHCTQVLQRCDLEHHFQT

SEQ ID NO: 7944 - protein, 728 aa, Homo Sapiens
MNQPESANDPEPLCAVCGQAHSLEENHFYSYPEEVDDDLICHICLQALLDPLDTPCGHTYCTLCLTNFLVEKDFCPMDRKPLVLQHCKKSSILVNKLLNKLLVTCPFREHCTQVLQRCDLEHHFQTSCKGASHYGLTKDRKRRSQDGCPDGCASLTATAPSPEVSAAATISLMTDEPGLDNPAYVSSAEDGQPAISPVDSGRSNRTRARPFERSTIRSRSFKKINRALSVLRRTKSGSAVANHADQGRENSENTTAPEVFPRLYHLIPDGEITSIKINRVDPSESLSIRLVGGSETPLVHIIIQHIYRDGVIARDGRLLPGDIILKVNGMDISNVPHNYAVRLLRQPCQVLWLTVMREQKFRSRNNGQAPDAYRPRDDSFHVILNKSSPEEQLGIKLVRKVDEPGVFIFNVLDGGVAYRHGQLEENDRVLAINGHDLRYGSPESAAHLIQASERRVHLVVSRQVRQRSPDIFQEAGWNSNGSWSPGPGERSNTPKPLHPTITCHEKVVNIQKDPGESLGMTVAGGASHREWDLPIYVISVEPGGVISRDGRIKTGDILLNVDGVELTEVSRSEAVALLKRTSSSIVLKALEVKEYEPQEDCSSPAALDSNHNMAPPSDWSPSWVMWLELPRCLYNCKDIVLRRNTAGSLGFCIVGGYEEYNGNKPFFIKSIVEGTPAYNDGRIRCGDILLAVNGRSTSGMIHACLARLLKELKGRITLTIVSWPGTFL

SEQ ID NO: 7945 - protein, 417 aa, Homo Sapiens
MRFAWTVLLLGPLQLCALVHCAPPAAGQQQPPREPPAAPGAWRQQIQWENNGQVFSLLSLGSQYQPQRRRDPGAAVPGAANASAQQPRTPILLIRDNRTAAARTRTAGSSGVTAGRPRPTARHWFQAGYSTSRAREAGASRAENQTAPGEVPALSNLRPPSRVDGMVGDDPYNPYKYSDDNPYYNYYDTYERPRPGGRYRPGYGTGYFQYGLPDLVADPYYIQASTYVQKMSMYNLRCAAEENCLASTAYRADVRDYDHRVLLRFPQRVKNQGTSDFLPSRPRYSWEWHSCHQHYHSMDEFSHYDLLDANTQRRVAEGHKASFCLEDTSCDYGYHRRFACTAHTQGLSPGCYDTYGADIDCQWIDITDVKPGNYILKVSVNPSYLVPESDYTNNVVRCDIRYTGHHAYASGCTISPY

SEQ ID NO: 7946 - protein, 417 aa, Homo Sapiens; identical to SEQ ID NO: 7945

SEQ ID NO: 7947 - protein, 61 aa, Homo Sapiens
YNPYKYSDDNPYYNYYDTYERPRPGGRYRPGYGTGYFQYVQHTGQMSEIMITGCCSDFPKE

SEQ ID NO: 7948 - protein, 574 aa, Homo Sapiens
MALARGSRQLGALVWGACLCVLVHGQQAQPGQGSDPARWRQLIQWENNGQVYSLLNSGSEYVPAGPQRSESSSRVLLAGAPQAQQRRSHGSPRRRQAPSLPLPGRVGSDTVRGQARHPFGFGQVPDNWREVAVGDSTGMARARTSVSQQRHGGSASSVSASAFASTYRQQPSYPQQFPYPQAPFVSQYENYDPASRTYDQGFVYYRPAGGGVGAGAAAVASAGVIYPYQPRARYEEYGGGEELPEYPPQGFYPAPERPYVPPPPPPPDGLDRRYSHSLYSEGTPGFEQAYPDPGPEAAQAHGGDPRLGWYPPYANPPPEAYGPPRALEPPYLPVRSSDTPPPGGERNGAQQGRLSVGSVYRPNQNGRGLPDLVPDPNYVQASTYVQRAHLYSLRCAAEEKCLASTAYAPEATDYDVRVLLRFPQRVKNQGTADFLPNRPRHTWEWHSCHQHYHSMDEFSHYDLLDAATGKKVAEGHKASFCLEDSTCDFGNLKRYACTSHTQGLSPGCYDTYNADIDCQWIDITDVQPGNYILKVHVNPKYIVLESDFTNNVVRCNIHYTGRYVSATNCKIVQS

SEQ ID NO: 7949 - protein, 431 aa, Homo Sapiens
MALARGSRQLGALVWGACLCVLVHGQQAQPGQGSDPARWRQLIQWENNGQVYSLLNSGSEYVPAGPQRSESSSRVLLAGAPQAQQRRSHGSPRRRQAPSLPLPGRVGSDTVRGQARHPFGFGQVPDNWREVAVGDSTGMARARTSVSQQRHGGSASSVSASAFASTYRQQPSYPQQFPYPQAPFVSQYENYDPASRTYDQGFVYYRPAGGGVGAGAAAVASAGVIYPYQPRARYEEYGGGEELPEYPPQGFYPAPERPYVPPPPPPPDGLDRRYSHSLYSEGTPGFEQAYPDPGPEAAQAHGGDPRLGWYPPYANPPPEAYGPPRALEPPYLPVRSSDTPPPGGERNGAQQGRLSVGSVYRPNQNGRVTPAQTPACPGRKVEGQEQDGQAPGSGTSWGTRDHKDGGSLQTSPGRLTPGLAGERARASLRSP

SEQ ID NO: 7950 - protein, 258 aa, Homo Sapiens
MEASKVLDKSKAAAIGDQSRPLCSRKGLSGGGSGGGPPWRARSQPGHCGSLKPKSSCCFCTPPVPPSCAGPLRGIISPKTGMERPLCSHLCSCLAMLALLSPLSLAQYDSWPHYPEYFQQPAPEYHQPQAPANVAKIQLRLAGQKRKHSEGRVEVYYDGQWGTVCDDDFSIHAAHVVCRELGYVEAKSWTASSSYGKGEGPIWLDNLHCTGNEATLAACTSNGWGVTDCKHTEDVGVVCSDKRIPGFKFDNSLINQIE

SEQ ID NO: 7951 - protein, 218 aa, Homo Sapiens
MEASKVLDKSKAAESSCCFCTPPVPPSCAGPLRGIISPKTGMERPLCSHLCSCLAMLALLSPLSLAQYDSWPHYPEYFQQPAPEYHQPQAPANVAKIQLRLAGQKRKHSEGRVEVYYDGQWGTVCDDDFSIHAAHVVCRELGYVEAKSWTASSSYGKGEGPIWLDNLHCTGNEATLAACTSNGWGVTDCKHTEDVGVVCSDKRIPGFKFDNSLINQIE

SEQ ID NO: 7952 - protein, 101 aa, Homo Sapiens
MERPLCSHLCSCLAMLALLSPLSLAQYDSWPHYPEYFQQPAPEYHQPQAPANVAKIQLHLVLARRCQQQQSGHEWSEVLGNGAVPGALPPRRGGRGLPPGR

SEQ ID NO: 7953 - protein, 96 aa, Homo Sapiens
MERPLCSHLCSCLAMLALLSPLSLAQYDSWPHYPEYFQQPAPEYHQPQAPANVAKIQLRLAGQKRKHSEGRVEVYYDGQWGTVCDDDFSIHAAHVV

SEQ ID NO: 7954 - protein, 139 aa, Homo Sapiens
MERPLCSHLCSCLAMLALLSPLSLAQYDSWPHYPEYFQQPAPEYHQPQAPANVAKIQLRLAGQKRKHSEGRVEVYYDGQWGTVCDDDFSIHAAHVVCRELGYVEAKSWTASSSYGKGEGPIWLDNLHCTGNEATLAACT

SEQ ID NO: 7955 - protein, 151 aa, Homo Sapiens
MERPLCSHLCSCLAMLALLSPLSLAQYDSWPHYPEYFQQPAPEYHQPQAPANVAKIQLRLAGQKRKHSEGRVEVYYDGQWGTVCDDDFSIHAAHVVCRELGYVEAKSWTASSSYGKGEGPIWLDNLHCTGNEATLAACTSNGWGVTDCKHT

SEQ ID NO: 7956 - protein, 774 aa, Homo Sapiens
MERPLCSHLCSCLAMLALLSPLSLAQYDSWPHYPEYFQQPAPEYHQPQAPANVAKIQLRLAGQKRKHSEGRVEVYYDGQWGTVCDDDFSIHAAHVVCRELGYVEAKSWTASSSYGKGEGPIWLDNLHCTGNEATLAACTSNGWGVTDCKHTEDVGVVCSDKRIPGFKFDNSLINQIENLNIQVEDIRIRAILSTYRKRTPVMEGYVEVKEGKTWKQICDKHWTAKNSRVVCGMFGFPGERTYNTKVYKMFASRRKQRYWPFSMDCTGTEAHISSCKLGPQVSLDPMKNVTCENGLPAVVSCVPGQVFSPDGPSRFRKAYKPEQPLVRLRGGAYIGEGRVEVLKNGEWGTVCDDKWDLVSASVVCRELGFGSAKEAVTGSRLGQGIGPIHLNEIQCTGNEKSIIDCKFNAESQGCNHEEDAGVRCNTPAMGLQKKLRLNGGRNPYEGRVEVLVERNGSLVWGMVCGQNWGIVEAMVVCRQLGLGFASNAFQETWYWHGDVNSNKVVMSGVKCSGTELSLAHCRHDGEDVACPQGGVQYGAGVACSETAPDLVLNAEMVQQTTYLEDRPMFMLQCAMEENCLSASAAQTDPTTGYRRLLRFSSQIHNNGQSDFRPKNGRHAWIWHDCHRHYHSMEVFTHYDLLNLNGTKVAEGHKASFCLEDTECEGDIQKNYECANFGDQGITMGCWDMYRHDIDCQWVDITDVPPGDYLFQVVINPNFEVAESDYSNNIMKCRSRYDGHRIWMYNCHIGGSFSEETEKKFEHFSGLLNNQLSPQ

SEQ ID NO: 7957 - protein, 67 aa, Homo Sapiens
RIRAILSTYRKRTPVMEGYVEVKEGKTWKQICDKHWTAKNSRVVCGMFGFPGERTYNTKVYNNPWCD

SEQ ID NO: 7958 - protein, 207 aa, Homo Sapiens
  misc_feature (1)..(1): Xaa can be any naturally occurring amino acid
XENGLPAVVSCVPGQVFSPDGPSRFRKAYKPEQDRVSLQQPLVRLRGGAYIGEGRVEVLKNGEWGTVCDDKWDLVSASVVCRELGFGSAKEAVTGSRLGQGIGPIHLNEIQCTGNEKSIIDCKFNAESQGCNHEEDAGVRCNTPAMGLQKKLRLNGGRNPYEGRVEVLVERNGSLVWGMVCGQNWGIVEAMVVCRQLGLGFASNAFQ

SEQ ID NO: 7959 - protein, 586 aa, Homo Sapiens
MRPVSVWQWSPWGLLLCLLCSSCLGSPSPSTGPEKKAGSQGLRFRLAGFPRKPYEGRVEIQRAGEWGTICDDDFTLQAAHILCRELGFTEATGWTHSAKYGPGTGRIWLDNLSCSGTEQSVTECASRGWGNSDCTHDEDAGVICKDQRLPGFSDSNVIEARVRLKGGAHPGEGRVEVLKASTWGTVCDRKWDLHAASVVCRELGFGSAREALSGARMGQGMGAIHLSEVRCSGQELSLWKCPHKNITAEDCSHSQDAGVRCNLPYTGAETRIRLSGGRSQHEGRVEVQIGGPGPLRWGLICGDDWGTLEAMVACRQLGLGYANHGLQETWYWDSGNITEVVMSGVRCTGTELSLDQCAHHGTHITCKRTGTRFTAGVICSETASDLLLHSALVQETAYIEDRPLHMLYCAAEENCLASSARSANWPYGHRRLLRFSSQIHNLGRADFRPKAGRHSWVWHECHGHYHSMDIFTHYDILTPNGTKVAEGHKASFCLEDTECQEDVSKRYECANFGEQGITVGCWDLYRHDIDCQWIDITDVKPGNYILQVVINPNFEVAESDFTNNAMKCNCKYDGHRIWVHNCHIGI

SEQ ID NO: 7960 - protein, 608 aa, Homo Sapiens
MRPVSVWQWSPWGLLLCLLCSSCLGSPSPSTGPEKKAGSQGLRFRLAGFPRKPYEGRVEIQRAGEWGTICDDDFTLQAAHILCRELGFTEATGWTHSAKYGPGTGRIWLDNLSCSGTEQSVTECASRGWGNSDCTHDEDAGVICKDQRLPGFSDSNVIEARVRLKGGAHPGEGRVEVLKASTWGTVCDRKWDLHAASVVCRELGFGSAREALSGARMGQGMGAIHLSEVRCSGQELSLWKCPHKNITAEDCSHSQDAGVRCNLPYTGAETRIRLSGGRSQHEGRVEVQIGGPGPLRWGLICGDDWGTLEAMVACRQLGLGYANHGLQETWYWDSGNITEVVMSGVRCTGTELSLDQCAHHGTHITCKRTGTRFTAGVICSETASDLLLHSALVQETAYIEDRPLHMLYCAAEENCLASSARSANWPYGHRRLLRFSSQIHNLGRADFRPKAGRHSWVWHECHGHYHSMDIFTHYDILTPNGTKVAEGHKASFCLEDTECQEDVSKRYECANFGEQGITVGCWDLYRHDIDCQWIDITDVKPGNYILQVVINPNFEVAESDFTNNAMKCNCKYDGHRIWVHNCHIGDAFSEEANRRFERYPGQTSNQII

SEQ ID NO: 7961 - protein, 753 aa, Homo Sapiens
MRPVSVWQWSPWGLLLCLLCSSCLGSPSPSTGPEKKAGSQGLRFRLAGFPRKPYEGRVEIQRAGEWGTICDDDFTLQAAHILCRELGFTEATGWTHSAKYGPGTGRIWLDNLSCSGTEQSVTECASRGWGNSDCTHDEDAGVICKDQRLPGFSDSNVIEVEHHLQVEEVRIRPAVGWGRRPLPVTEGLVEVRLPDGWSQVCDKGWSAHNSHVVCGMLGFPSEKRVNAAFYRLLAQRQQHSFGLHGVACVGTEAHLSLCSLEFYRANDTARCPGGGPAVVSCVPGPVYAASSGQKKQQQSKPQGEARVRLKGGAHPGEGRVEVLKASTWGTVCDRKWDLHAASVVCRELGFGSAREALSGARMGQGMGAIHLSEVRCSGQELSLWKCPHKNITAEDCSHSQDAGVRCNLPYTGAETRIRLSGGRSQHEGRVEVQIGGPGPLRWGLICGDDWGTLEAMVACRQLGLGYANHGLQETWYWDSGNITEVVMSGVRCTGTELSLDQCAHHGTHITCKRTGTRFTAGVICSETASDLLLHSALVQETAYIEDRPLHMLYCAAEENCLASSARSANWPYGHRRLLRFSSQIHNLGRADFRPKAGRHSWVWHECHGHYHSMDIFTHYDILTPNGTKVAEGHKASFCLEDTECQEDVSKRYECANFGEQGITVGCWDLYRHDIDCQWIDITDVKPGNYILQVVINPNFEVAESDFTNNAMKCNCKYDGHRIWVHNCHIGDAFSEEANRRFERYPGQTSNQII

SEQ ID NO: 7962 - protein, 303 aa, Homo Sapiens
MRPVSVWQWSPWGLLLCLLCSSCLGSPSPSTGPEKKAGSQGLRFRLAGFPRKPYEGRVEIQRAGEWGTICDDDFTLQAAHILCRELGFTEATGWTHSAKYGPGTGRIWLDNLSCSGTEQSVTECASRGWGNSDCTHDEDAGVICKDQRLPGFSDSNVIEVEHHLQVEEVRIRPAVGWGRRPLPVTEGLVEVRLPDGWSQVCDKGWSAHNSHVVCGMLGFPSEKRVNAAFYRLLAQRQQHSFGLHGVACVGTEAHLSLCSLEFYRANDTARCPGGGPAVVSCVPGPVYAASSGQKKQQQSKPQG

SEQ ID NO: 7963 - protein, 471 aa, Homo Sapiens
MRPVSVWQWSPWGLLLCLLCSSCLGSPSPSTGPEKKAGSQGLRFRLAGFPRKPYEGRVEIQRAGEWGTICDDDFTLQAAHILCRELGFTEATGWTHSAKYGPGTGRIWLDNLSCSGTEQSVTECASRGWGNSDCTHDEDAGVICKDQRLPGFSDSNVIEVEHHLQVEEVRIRPAVGWGRRPLPVTEGLVEVRLPDGWSQVCDKGWSAHNSHVVCGMLGFPSEKRVNAAFYRLLAQRQQHSFGLHGVACVGTEAHLSLCSLEFYRANDTARCPGGGPAVVSCVPGPVYAASSGQKKQQQSKPQGEARVRLKGGAHPGEGRVEVLKASTWGTVCDRKWDLHAASVVCRELGFGSAREALSGARMGQDVSKRYECANFGEQGITVGCWDLYRHDIDCQWIDITDVKPGNYILQVVINPNFEVAESDFTNNAMKCNCKYDGHRIWVHNCHIGDAFSEEANRRFERYPGQTSNQII

SEQ ID NO: 7964 - protein, 697 aa, Homo Sapiens
MRPVSVWQWSPWGLLLCLLCSSCLGSPSPSTGPEKKAGSQGLRFRLAGFPRKPYEGRVEIQRAGEWGTICDDDFTLQAAHILCRELGFTEATGWTHSAKYGPGTGRIWLDNLSCSGTEQSVTECASRGWGNSDCTHDEDAGVICKDQRLPGFSDSNVIEVEHHLQVEEVRIRPAVGWGRRPLPVTEGLVEVRLPDGWSQVCDKGWSAHNSHVVCGMLGFPSEKRVNAAFYRLLAQRQQHSFGLHGVACVGTEAHLSLCSLEFYRANDTARCPGGGPAVVSCVPGPVYAASSGQKKQQQSKPQGEARVRLKGGAHPGEGRVEVLKASTWGTVCDRKWDLHAASVVCRELGFGSAREALSGARMGQGMGAIHLSEVRCSGQELSLWKCPHKNITAEDCSHSQDAGVRCNLPYTGAETRETWYWDSGNITEVVMSGVRCTGTELSLDQCAHHGTHITCKRTGTRFTAGVICSETASDLLLHSALVQETAYIEDRPLHMLYCAAEENCLASSARSANWPYGHRRLLRFSSQIHNLGRADFRPKAGRHSWVWHECHGHYHSMDIFTHYDILTPNGTKVAEGHKASFCLEDTECQEDVSKRYECANFGEQGITVGCWDLYRHDIDCQWIDITDVKPGNYILQVVINPNFEVAESDFTNNAMKCNCKYDGHRIWVHNCHIGDAFSEEANRRFERYPGQTSNQII

SEQ ID NO: 7965 - protein, 180 aa, Homo Sapiens
  misc_feature (1)..(1): Xaa can be any naturally occurring amino acid
XRQRLERPQQPRGLRDAGLPQRKEGQRGLLQARVRLKGGAHPGEGRVEVLKASTWGTVCDRKWDLHAASVVCRELGFGSAREALSGARMGQGMGAIHLSEVRCSGQELSLWKCPHKNITAEDCSHSQDAGVRCNLPYTGAETRIRLSGGRSQHEGRVEVQIGGPGPLRWGLICGDDWGTL

SEQ ID NO: 7966 - protein, 756 aa, Homo Sapiens
MAWSPPATLFLFLLLLGQPPPSRPQSLGTTKLRLVGPESKPEEGRLEVLHQGQWGTVCDDNFAIQEATVACRQLGFEAALTWAHSAKYGQGEGPIWLDNVRCVGTESSLDQCGSNGWGVSDCSHSEDVGVICHPRRHRGYLSETVSNALGPQGRRLEEVRLKPILASAKQHSPVTEGAVEVKYEGHWRQVCDQGWTMNNSRVVCGMLGFPSEVPVDSHYYRKVWDLKMRDPKSRLKSLTNKNSFWIHQVTCLGTEPHMANCQVQVAPARGKLRPACPGGMHAVVSCVAGPHFRPPKTKPQRKGSWAEEPRVRLRSGAQVGEGRVEVLMNRQWGTVCDHRWNLISASVVCRQLGFGSAREALFGARLGQGLGPIHLSEVRCRGYERTLSDCPALEGSQNGCQHENDAAVRCNVPNMGFQNQVRLAGGRIPEEGLLEVQVEVNGVPRWGSVCSENWGLTEAMVACRQLGLGFAIHAYKETWFWSGTPRAQEVVMSGVRCSGTELALQQCQRHGPVHCSHGGGRFLAGVSCMDSAPDLVMNAQLVQETAYLEDRPLSQLYCAHEENCLSKSADHMDWPYGYRRLLRFSTQIYNLGRTDFRPKTGRDSWVWHQCHRHYHSIEVFTHYDLLTLNGSKVAEGHKASFCLEDTNCPTGLQRRYACANFGEQGVTVGCWDTYRHDIDCQWVDITDVGPGNYIFQVIVNPHYEVAESDFSNNMLQCRCKYDGHRVWLHNCHTGNSYPANAELSLEQEQRLRNNLI

SEQ ID NO: 7967 - protein, 2040 aa, Homo Sapiens
MEHKEVVLLLLLFLKSAAPEQSHVVQDCYHGDGQSYRGTYSTTVTGRTCQAWSSMTPHQHNRTTENYPNAGLIMNYCRNPDAVAAPYCYTRDPGVRWEYCNLTQCSDAEGTAVAPPTVTPVPSLEAPSEQAPTEQRPGVQECYHGNGQSYRGTYSTTVTGRTCQAWSSMTPHSHSRTPEYYPNAGLIMNYCRNPDAVAAPYCYTRDPGVRWEYCNLTQCSDAEGTAVAPPTVTPVPSLEAPSEQAPTEQRPGVQECYHGNGQSYRGTYSTTVTGRTCQAWSSMTPHSHSRTPEYYPNAGLIMNYCRNPDAVAAPYCYTRDPGVRWEYCNLTQCSDAEGTAVAPPTVTPVPSLEAPSEQAPTEQRPGVQECYHGNGQSYRGTYSTTVTGRTCQAWSSMTPHSHSRTPEYYPNAGLIMNYCRNPDAVAAPYCYTRDPGVRWEYCNLTQCSDAEGTAVAPPTVTPVPSLEAPSEQAPTEQRPGVQECYHGNGQSYRGTYSTTVTGRTCQAWSSMTPHSHSRTPEYYPNAGLIMNYCRNPDAVAAPYCYTRDPGVRWEYCNLTQCSDAEGTAVAPPTVTPVPSLEAPSEQAPTEQRPGVQECYHGNGQSYRGTYSTTVTGRTCQAWSSMTPHSHSRTPEYYPNAGLIMNYCRNPDAVAAPYCYTRDPGVRWEYCNLTQCSDAEGTAVAPPTVTPVPSLEAPSEQAPTEQRPGVQECYHGNGQSYRGTYSTTVTGRTCQAWSSMTPHSHSRTPEYYPNAGLIMNYCRNPDAVAAPYCYTRDPGVRWEYCNLTQCSDAEGTAVAPPTVTPVPSLEAPSEQAPTEQRPGVQECYHGNGQSYRGTYSTTVTGRTCQAWSSMTPHSHSRTPEYYPNAGLIMNYCRNPDPVAAPYCYTRDPSVRWEYCNLTQCSDAEGTAVAPPTITPIPSLEAPSEQAPTEQRPGVQECYHGNGQSYQGTYFITVTGRTCQAWSSMTPHSHSRTPAYYPNAGLIKNYCRNPDPVAAPWCYTTDPSVRWEYCNLTRCSDAEWTAFVPPNVILAPSLEAFFEQALTEETPGVQDCYYHYGQSYRGTYSTTVTGRTCQAWSSMTPHQHSRTPENYPNAGLTRNYCRNPDAEIRPWCYTMDPSVRWEYCNLTQCLVTESSVLATLTVVPDPSTEASSEEAPTEQSPGVQDCYHGDGQSYRGSFSTTVTGRTCQSWSSMTPHWHQRTTEYYPNGGLTRNYCRNPDAEISPWCYTMDPNVRWEYCNLTQCPVTESSVLATSTAVSEQAPTEQSPTVQDCYHGDGQSYRGSFSTTVTGRTCQSWSSMTPHWHQRTTEYYPNGGLTRNYCRNPDAEIRPWCYTMDPSVRWEYCNLTQCPVMESTLLTTPTVVPVPSTELPSEEAPTENSTGVQDCYRGDGQSYRGTLSTTITGRTCQSWSSMTPHWHRRIPLYYPNAGLTRNYCRNPDAEIRPWCYTMDPSVRWEYCNLTRCPVTESSVLTTPTVAPVPSTEAPSEQAPPEKSPVVQDCYHGDGRSYRGISSTTVTGRTCQSWSSMIPHWHQRTPENYPNAGLTENYCRNPDSGKQPWCYTTDPCVRWEYCNLTQCSETESGVLETPTVVPVPSMEAHSEAAPTEQTPVVRQCYHGNGQSYRGTFSTTVTGRTCQSWSSMTPHRHQRTPENYPNDGLTMNYCRNPDADTGPWCFTMDPSIRWEYCNLTRCSDTEGTVVAPPTVIQVPSLGPPSEQDCMFGNGKGYRGKKATTVTGTPCQEWAAQEPHRHSTFIPGTNKWAGLEKNYCRNPDGDINGPWCYTMNPRKLFDYCDIPLCASSSFDCGKPQVEPKKCPGSIVGGCVAHPHSWPWQVSLRTRFGKHFCGGTLISPEWVLTAAHCLKKSSRPSSYKVILGAHQEVNLESHVQEIEVSRLFLEPTQADIALLKLSRPAVITDKVMPACLPSPDYMVTARTECYITGWGETQGTFGTGLLKEAQLLVIENEVCNHYKYICAEHLARGTDSCQGDSGGPLVCFEKDKYILQGVTSWGLGCARPNKPGVYARVSRFVTWIEGMMRNN

SEQ ID NO: 7968 - protein, 571 aa, Homo Sapiens
SGLIMNYCRNPDAVAAPYCYTRDPGVRWEYCNLTQCSDAEGTAVAPPTVTPVPSLEAPSEQAPTEQRPGVQECYHGNGQSYRGTYSTTVTGRTCQAWSSMTPHSHSRTPEYYPNAGLIMNYCRNPDAVAAPYCYTRDPGVRWEYCNLTQCSDAEGTAVAPPTVTPVPSLEAPSEQAPTEQRPGVQECYHGNGQSYRGTYSTTVTGRTCQAWSSMTPHSHSRTPEYYPNAGLIMNYCRNPDAVAAPYCYTRDPGVRWEYCNLTQCSDAEGTAVAPPTVTPVPSLEAPSEQAPTEQRPGVQECYHGNGQSYRGTYSTTVTGRTCQAWSSMTPHSHSRTPEYYPNAGLIMNYCRNPDAVAAPYCYTRDPGVRWEYCNLTQCSDAEGTAVAPPTVTPVPSLEAPSEQAPTEQRPGVQECYHGNGQSYRGTYSTTVTGRTCQAWSSMTPHSHSRTPEYYPNAGLIMNYCRNPDAVAAPYCYTRDPGVRWEYCNLTQCSDAEGTAVAPPTVTPVPSLEAPSEQAPTEQRPGVQECYHGNGQSYRGTYSTTVTGRTCQAWSSMTPHSHSRTPEYYPNA

SEQ ID NO: 7969 - protein, 613 aa, Homo Sapiens
SGLIMNYCRNPDAVAAPYCYTRDPGVRWEYCNLTQCSDAEGTAVAPPTVTPVPSLEAPSEQAPTEQRPGVQECYHGNGQSYRGTYSTTVTGRTCQAWSSMTPHSHSRTPEYYPNAGLIMNYCRNPDPVAAPYCYTRDPSVRWEYCNLTQCSDAEGTAVAPPTITPIPSLEAPSEQAPTEQRPGVQECYHGNGQSYQGTYFITVTGRTCQAWSSMTPHSHSRTPAYYPNAGLIKNYCRNPDPVAAPWCYTTDPSVRWEYCNLTRCSDAEWTAFVPPNVILAPSLEAFFEQALTEETPGVQDCYYHYGQSYRGTYSTTVTGRTCQAWSSMTPHQHSRTPENYPNAGLTRNYCRNPDAEIRPWCYTMDPSVRWEYCNLTQCLVTESSVLATLTVVPDPSTEASSEEAPTEQSPGVQDCYHGDGQSYRGSFSTTVTGRTCQSWSSMTPHWHQRTTEYYPNGGLTRNYCRNPDAEISPWCYTMDPNVRWEYCNLTQCPVTESSVLATSTAVSEQAPTEQSPTVQDCYHGDGQSYRGSFSTTVTGRTCQSWSSMTPHWHQRTTEYYPNGGLTRNYCRNPDAEIRPWCYTMDPSVRWEYCNLTQCPVMESTLLTTPTVVP

SEQ ID NO: 7970 - protein, 39 aa, Homo Sapiens
MESKALLVLTLAVWLQSLTASRGGVAAADLILKLQIFKF

SEQ ID NO: 7971 - protein, 106 aa, Homo Sapiens
MESKALLVLTLAVWLQSLTASRGGVAAADQRRDFIDIESKFALRTPEDTAEDTCHLIPGVAESVATCHFNHSSKTFMVIHGWTVTGMYESWVPKLVAALYKREPDS

SEQ ID NO: 7972 - protein, 130 aa, Homo Sapiens
MESKALLVLTLAVWLQSLTASRGGVAAADQRRDFIDIESKFALRTPEDTAEDTCHLIPGVAESVATCHFNHSSKTFMVIHGWTVTGMYESWVPKLVAALYKREPDSNVIVVDWLSRAQEHYPVSAGYTKL

SEQ ID NO: 7973 - protein, 475 aa, Homo Sapiens
MESKALLVLTLAVWLQSLTASRGGVAAADQRRDFIDIESKFALRTPEDTAEDTCHLIPGVAESVATCHFNHSSKTFMVIHGWTVTGMYESWVPKLVAALYKREPDSNVIVVDWLSRAQEHYPVSAGYTKLVGQDVARFINWMEEEFNYPLDNVHLLGYSLGAHAAGIAGSLTNKKVNRITGLDPAGPNFEYAEAPSRLSPDDADFVDVLHTFTRGSPGRSIGIQKPVGHVDIYPNGGTFQPGCNIGEAIRVIAERGLGDVDQLVKCSHERSIHLFIDSLLNEENPSKAYRCSSKEAFEKGLCLSCRKNRCNNLGYEINKVRAKRSSKMYLKTRSQMPYKVFHYQVKIHFSGTESETHTNQAFEISLYGTVAESENIPFTLPEVSTNKTYSFLIYTEVDIGELLMLKLKWKSDSYFSWSDWWSSPGFAIQKIRVKAGETQKKVIFCSREKVSHLQKGKAPAVFVKCHDKSLNKKSG

SEQ ID NO: 7974 - protein, 115 aa, Homo Sapiens
MVIHGWTVTGMYESWVPKLVAALYKREPDSNVIVVDWLSRAQEHYPVSAGYTKLVGQDVARFINWMEEEFNYPLDNVHLLGYSLGAHAAGIAGSLTNKKVNRITGLDPAGPNFEY

SEQ ID NO: 7975 - protein, 117 aa, Homo Sapiens
FPPNDPKAGTQGKCMPFFRAGFVCPTPPYKSLAREQINALTSFLDASFVYSSEPSLASRLRNLSSPLGLMAVNQEVSDHGLPYLPYDSKKPSPCEFINTTARVPCFLAGKETEAQKC

SEQ ID NO: 7976 - protein, 95 aa, Homo Sapiens
GCGAPAPVVRCDPCSPYRTITGDCNNRRKPALGAANRALARWLPAEYEDGLSLPFGWTPGKTRNGFPLPLAREVSNKIVGYLNEEGVLDQNRSTL

SEQ ID NO: 7977 - protein, 712 aa, Homo Sapiens
MRVLLHLPALLASLILLQAAASTTRAQTTRTSAISDTVSQAKVQVNKAFLDSRTRLKTAMSSETPTSRQLSEYLKHAKGRTRTAIRNGQVWEESLKRLRQKASLTNVTDPSLDLTSLSLEVGCGAPAPVVRCDPCSPYRTITGDCNNRRKPALGAANRALARWLPAEYEDGLSLPFGWTPGKTRNGFPLPLAREVSNKIVGYLNEEGVLDQNRSLLFMQWGQIVDHDLDFAPDTELGSSEYSKAQCDEYCIQGDNCFPIMFPPNDPKAGTQGKCMPFFRAGFVCPTPPYKSLAREQINALTSFLDASFVYSSEPSLASRLRNLSSPLGLMAVNQEVSDHGLPYLPYDSKKPSPCEFINTTARVPCFLAGDSRASEHILLATSHTLFLREHNRLARELKRLNPQWDGEKLYQEARKILGAFVQIITFRDYLPILLGDHMQKWIPPYQGYSESVDPRISNVFTFAFRFGHLEVPSSMFRLDENYQPWGPEPELPLHTLFFNTWRMVKDGGIDPLVRGLLAKKSKLMKQNKMMTGELRNKLFQPTHRIHGFDLAAINTQRCRDHGQPGYNSWRAFCDLSQPQTLEELNTVLKSKMLAKKLLGLYGTPDNIDIWIGAIAEPLVERGRVGPLLACLLGKQFQQIRDGDRFWWENPGVFTNEQKDSLQKMSFSRLVCDNTRITKVPRDPFWANSYPYDFVDCSAIDKLDLSPWASVKN

SEQ ID NO: 7978 - protein, 629 aa, Homo Sapiens
MRVLLHLPALLASLILLQAAASTTRDPSLDLTSLSLEVGCGAPAPVVRCDPCSPYRTITGDCNNRRKPALGAANRALARWLPAEYEDGLSLPFGWTPGKTRNGFPLPLAREVSNKIVGYLNEEGVLDQNRSLLFMQWGQIVDHDLDFAPDTELGSSEYSKAQCDEYCIQGDNCFPIMFPPNDPKAGTQGKCMPFFRAGFVCPTPPYKSLAREQINALTSFLDASFVYSSEPSLASRLRNLSSPLGLMAVNQEVSDHGLPYLPYDSKKPSPCEFINTTARVPCFLAGDSRASEHILLATSHTLFLREHNRLARELKRLNPQWDGEKLYQEARKILGAFVQIITFRDYLPILLGDHMQKWIPPYQGYSESVDPRISNVFTFAFRFGHLEVPSSMFRLDENYQPWGPEPELPLHTLFFNTWRMVKDGGIDPLVRGLLAKKSKLMKQNKMMTGELRNKLFQPTHRIHGFDLAAINTQRCRDHGQPGYNSWRAFCDLSQPQTLEELNTVLKSKMLAKKLLGLYGTPDNIDIWIGAIAEPLVERGRVGPLLACLLGKQFQQIRDGDRFWWENPGVFTNEQKDSLQKMSFSRLVCDNTRITKVPRDPFWANSYPYDFVDCSAIDKLDLSPWASVKN

SEQ ID NO: 7979 - protein, 629 aa, Homo Sapiens; identical to SEQ ID NO: 7978

SEQ ID NO: 7980 - protein, 123 aa, Homo Sapiens
MSSETPTSRQLSEYLKHAKGRTRTAIRNGQVWEESLKRLRQKASLTNVTDPSLDLTSLSLEVGCGAPAPVVRCDPCSPYRTITGDCNNRRKPALGAANRALARWLPAEYEDGLSLPFGWTPGK

SEQ ID NO: 7981 - protein, 653 aa, Homo Sapiens
MSSETPTSRQLSEYLKHAKGRTRTAIRNGQVWEESLKRLRQKASLTNVTDPSLDLTSLSLEVGCGAPAPVVRCDPCSPYRTITGDCNNRRKPALGAANRALARWLPAEYEDGLSLPFGWTPGKTRNGFPLPLAREVSNKIVGYLNEEGVLDQNRSLLFMQWGQIVDHDLDFAPDTELGSSEYSKAQCDEYCIQGDNCFPIMFPPNDPKAGTQGKCMPFFRAGFVCPTPPYKSLAREQINALTSFLDASFVYSSEPSLASRLRNLSSPLGLMAVNQEVSDHGLPYLPYDSKKPSPCEFINTTARVPCFLAGDSRASEHILLATSHTLFLREHNRLARELKRLNPQWDGEKLYQEARKILGAFVQIITFRDYLPILLGDHMQKWIPPYQGYSESVDPRISNVFTFAFRFGHLEVPSSMFRLDENYQPWGPEPELPLHTLFFNTWRMVKDGGIDPLVRGLLAKKSKLMKQNKMMTGELRNKLFQPTHRIHGFDLAAINTQRCRDHGQPGYNSWRAFCDLSQPQTLEELNTVLKSKMLAKKLLGLYGTPDNIDIWIGAIAEPLVERGRVGPLLACLLGKQFQQIRDGDRFWWENPGVFTNEQKDSLQKMSFSRLVCDNTRITKVPRDPFWANSYPYDFVDCSAIDKLDLSPWASVKN

SEQ ID NO: 7982 - protein, 69 aa, Homo Sapiens
MKNPMLEVVSLLLEKLLLISNFTLFSSGAAGEDKGRNSFYETSSFHRGDVLEVPRTHLTHYGIYLGDNR

SEQ ID NO: 7983 - protein, 230 aa, Homo Sapiens
MKNPMLEVVSLLLEKLLLISNFTLFSSGAAGEDKGRNSFYETSSFHRGDVLEVPRTHLTHYGIYLGDNRVAHMMPDILLALTDDMGRTQKVVSNKRLILGVIVKVASIRVDTVEDFAYGANILVNHLDESLQKKALLNEEVARRAEKLLGFTPYSLLWNNCEHFVTYCRYGTPISPQSDKFCETVKIIIRDQRSVLASAVLGLASIVCTGLVSYTTLPAIFIPFFLWMAG

SEQ ID NO: 7984 - protein, 230 aa, Homo Sapiens; identical to SEQ ID NO: 7983

SEQ ID NO: 7985 - protein, 214 aa, Homo Sapiens
AVLDFVKQKASQSPQKQHPLLDGVDGECPFPSRRSQHTDDSALCMSDDRPNALLSSPATETGHASPLPPSAAPTTDSTDSITGQNSRQREEELELIDQLRKHIEYRLKVSLPCDLGAALTDGVVLCHLANHVRPRSVPSIHVPSPAVPKLTMAKCRRNVENFLEACRKIGVPQEQLCLPLHILEEKGLSQVAVTVQALLELAPPKQQQHQLSAV

SEQ ID NO: 7986 - protein, 712 aa, Homo Sapiens
MAAAGLVAVAAAAEYSGTVASGGNLPGVHCGPSSGAGPGFGPGSWSRSLDRALEEAAVTGVLSLSGRKLREFPRGAANHDLTDTTRADLSRNRLSEIPIEACHFVSLENLNLYQNCIRYIPEAILNLQALTFLNISRNQLSTLPVHLCNLPLKVLIASNNKLVSLPEEIGHLRHLMELDVSCNEIQTIPSQIGNLEALRDLNVRRNHLVHLPEELAELPLIRLDFSCNKITTIPVCYRNLRHLQTITLDNNPLQSPPAQICIKGKVHIFKYLNIQACKIAPDLPDYDRRPLGFGSCHEELYSSRPYGALDSGFNSVDSGDKRWSGNEPTDEFSDLPLRVAEITKEQRLRRESQYQENRGSLVVTNGGVEHDLDQIDYIDSCTAEEEEAEVRQPKGPDPDSLSSQFMAYIEQRRISHEGSPVKPVAIREFQKTEDMRRYLHQNRVPAEPSSLLSLSASHNQLSHTDLELHQRREQLVERTRREAQLAALQYEEEKIRTKQIQRDAVLDFVKQKASQSPQKQHPLLDGVDGECPFPSRRSQHTDDSALCMSLSGLNQVGCAATLPHSSAFTPLKSDDRPNALLSSPATETVHHSPAYSFPAAIQRNQPQRPESFLFRAGVRAETNKGHASPLPPSAAPTTDSTDSITGQNSRQREEELELIDQLRKHIEYRLKVSLPCDLGAALTDGVVLCHLANHVRPRSVPSIHVPSPAVVS

SEQ ID NO: 7987 - protein, 725 aa, Homo Sapiens
MAAAGLVAVAAAAEYSGTVASGGNLPGVHCGPSSGAGPGFGPGSWSRSLDRALEEAAVTGVLSLSGRKLREFPRGAANHDLTDTTRADLSRNRLSEIPIEACHFVSLENLNLYQNCIRYIPEAILNLQALTFLNISRNQLSTLPVHLCNLPLKVLIASNNKLVSLPEEIGHLRHLMELDVSCNEIQTIPSQIGNLEALRDLNVRRNHLVHLPEELAELPLIRLDFSCNKITTIPVCYRNLRHLQTITLDNNPLQSPPAQICIKGKVHIFKYLNIQACKIAPDLPDYDRRPLGFGSCHEELYSSRPYGALDSGFNSVDSGDKRWSGNEPTDEFSDLPLRVAEITKEQRLRRESQYQENRGSLVVTNGGVEHDLDQIDYIDSCTAEEEEAEGSPVKPVAIREFQKTEDMRRYLHQNRVPAEPSSLLSLSASHNQLSHTDLELHQRREQLVERTRREAQLAALQYEEEKIRTKQIQRDAVLDFVKQKASQSPQKQHPLLDGVDGECPFPSRRSQHTDDSALCMSDDRPNALLSSPATETVHHSPAYSFPAAIQRNQPQRPESFLFRAGVRAETNKGHASPLPPSAAPTTDSTDSITGQNSRQREEELELIDQLRKHIEYRLKVSLPCDLGAALTDGVVLCHLANHVRPRSVPSIHVPSPAVPKLTMAKCRRNVENFLEACRKIGVPQEQLCLPLHILEEKGLSQVAVTVQALLELAPPKQQQHQLSAV

SEQ ID NO: 7988 - protein, 803 aa, Homo Sapiens
MAAAGLVAVAAAAEYSGTVASGGNLPGVHCGPSSGAGPGFGPGSWSRSLDRALEEAAVTGVLSLSGRKLREFPRGAANHDLTDTTRADLSRNRLSEIPIEACHFVSLENLNLYQNCIRYIPEAILNLQALTFLNISRNQLSTLPVHLCNLPLKVLIASNNKLVSLPEEIGHLRHLMELDVSCNEIQTIPSQIGNLEALRDLNVRRNHLVHLPEELAELPLIRLDFSCNKITTIPVCYRNLRHLQTITLDNNPLQSPPAQICIKGKVHIFKYLNIQACKIAPDLPDYDRRPLGFGSCHEELYSSRPYGALDSGFNSVDSGDKRWSGNEPTDEFSDLPLRVAEITKEQRLRRESQYQENRGSLVVTNGGVEHDLDQIDYIDSCTAEEEEAEVRQPKGPDPDSLSSQFMAYIEQRRISHEGSPVKPVAIREFQKTEDMRRYLHQNRVPAEPSSLLSLSASHNQLSHTDLELHQRREQLVERTRREAQLAALQYEEEKIRTKQIQRDAVLDFVKQKASQSPQKQHPLLDGVDGECPFPSRRSQHTDDSALCMSLSGLNQVGCAATLPHSSAFTPLKSDDRPNALLSSPATETVHHSPAYSFPAAIQRNQPQRPESFLFRAGVRAETNKGHASPLPPSAAPTTDSTDSITGQNSRQREEELELIDQLRKHIEYRLKVSLPCDLGAALTDGVVLCHLANHVRPRSVPSIHVPSPAVPKLTMAKCRRNVENFLEACRKIGVPQDNLCSPSDILQLNLSVKRTVETLLSLGAHSEESSFVCLSLQLLGFVAFYCTVMLTLCVLYYWLFPAR

SEQ ID NO: 7989 - protein, 777 aa, Homo Sapiens
MAAAGLVAVAAAAEYSGTVASGGNLPGVHCGPSSGAGPGFGPGSWSRSLDRALEEAAVTGVLSLSGRKLREFPRGAANHDLTDTTRADLSRNRLSEIPIEACHFVSLENLNLYQNCIRYIPEAILNLQALTFLNISRNQLSTLPVHLCNLPLKVLIASNNKLVSLPEEIGHLRHLMELDVSCNEIQTIPSQIGNLEALRDLNVRRNHLVHLPEELAELPLIRLDFSCNKITTIPVCYRNLRHLQTITLDNNPLQSPPAQICIKGKVHIFKYLNIQACKIAPDLPDYDRRPLGFGSCHEELYSSRPYGALDSGFNSVDSGDKRWSGNEPTDEFSDLPLRVAEITKEQRLRRESQYQENRGSLVVTNGGVEHDLDQIDYIDSCTAEEEEAEVRQPKGPDPDSLSSQFMAYIEQRRISHEGSPVKPVAIREFQKTEDMRRYLHQNRVPAEPSSLLSLSASHNQLSHTDLELHQRREQLVERTRREAQLAALQYEEEKIRTKQIQRDAVLDFVKQKASQSPQKQHPLLDGVDGECPFPSRRSQHTDDSALCMSLSGLNQVGCAATLPHSSAFTPLKSDDRPNALLSSPATETVHHSPAYSFPAAIQRNQPQRPESFLFRAGVRAETNKGHASPLPPSAAPTTDSTDSITGQNSRQREEELELIDQLRKHIEYRLKVSLPCDLGAALTDGVVLCHLANHVRPRSVPSIHVPSPAVPKLTMAKCRRNVENFLEACRKIGVPQEQLCLPLHILEEKGLSQVAVTVQALLELAPPKQQQHQLSAV

SEQ ID NO: 7990 - protein, 803 aa, Homo Sapiens; identical to SEQ ID NO: 7988

SEQ ID NO: 7991 - protein, 623 aa, Homo Sapiens
MAAAGLVAVAAAAEYSGTVASGGNLPGVHCGPSSGAGPGFGPGSWSRSLDRALEEAAVTGVLSLSGRKLREFPRGAANHDLTDTTRAELAELPLIRLDFSCNKITTIPVCYRNLRHLQTITLDNNPLQSPPAQICIKGKVHIFKYLNIQACKIAPDLPDYDRRPLGFGSCHEELYSSRPYGALDSGFNSVDSGDKRWSGNEPTDEFSDLPLRVAEITKEQRLRRESQYQENRGSLVVTNGGVEHDLDQIDYIDSCTAEEEEAEGSPVKPVAIREFQKTEDMRRYLHQNRVPAEPSSLLSLSASHNQLSHTDLELHQRREQLVERTRREAQLAALQYEEEKIRTKQIQRDAVLDFVKQKASQSPQKQHPLLDGVDGECPFPSRRSQHTDDSALCMSLSGLNQVGCAATLPHSSAFTPLKSDDRPNALLSSPATETVHHSPAYSFPAAIQRNQPQRPESFLFRAGVRAETNKGHASPLPPSAAPTTDSTDSITGQNSRQREEELELIDQLRKHIEYRLKVSLPCDLGAALTDGVVLCHLANHVRPRSVPSIHVPSPAVPKLTMAKCRRNVENFLEACRKIGVPQEQLCLPLHILEEKGLSQVAVTVQALLELAPPKQQQHQLSAV

SEQ ID NO: 7992 - protein, 92 aa, Homo Sapiens
MAAAGLVAVAAAAEYSGTVASGGNLPGVHCGPSSGAGPGFGPGSWSRSLDRALEEAAVTGVLSLSGRKLREFPRGAANHDLTDTTRAGCELQ

SEQ ID NO: 7993 - protein, 227 aa, Homo Sapiens
YEEEKIRTKQIQRDAVLDFVKQKASQSPQKQHPLLDGVDGECPFPSRRSQHTDDSALCMSLSGLNQVGCAATLPHSSAFTPLKSDDRPNALLSSPATETGHASPLPPSAAPTTDSTDSITGQNSRQREEELELIDQLRKHIEYRLKVSLPCDLGAALTDGVVLCHLANHVRPRSVPSIHVPSPAVPKLTMAKCRRNVENFLEACRKIGVPQDNLCSPSDILQLNLSV

SEQ ID NO: 7994 - protein, 159 aa, Homo Sapiens
MAGPGWTLLLLLLLLLLLGSMAGYGPQKKLNLSHKGIGEPCRRHEECQSNCCTINSLAPHTLCTPKTIFLQCLPWRKPNGYRCSHDSECQSSCCVRNNSPQELCTPQSVFLQCVPWRKPNGDFCSSHQECHSQCCIQLREYSPFRCIPRTGILAQCLPL

SEQ ID NO: 7995 - protein, 139 aa, Homo Sapiens
MAGPGWTLLLLLLLLLLLGSMAGYGPQKKLNLSHKGIGEPCRRHEECQSNCCTINSLAPHTLCTPKTIFLQCLPWRKVSPMGTDARTTQSARAAAASATTARRSCARPKASSCSVCPGASPTATSAAAIRSVTASAASS

SEQ ID NO: 7996 - protein, 46 aa, Homo Sapiens
MAGPGWTLLLLLLLLLLLGSMAGYGPQKKLNLSHKKLLRKPKFEGW

SEQ ID NO: 7997 - protein, 61 aa, Homo Sapiens
MAGPGWTLLLLLLLLLLLGSMAGYGPQKKLNLSHKPRAPSTDLPEPRQSGFVPETSQETQV

SEQ ID NO: 7998 - protein, 635 aa, Homo Sapiens
MAPPLLLLLLASGAAACPLPCVCQNLSESLSTLCAHRGLLFVPPNVDRRTVELRLADNFIQALGPPDFRNMTGLVDLTLSRNAITRIGARAFGDLESLRSLHLDGNRLVELGTGSLRGPVNLQHLILSGNQLGRIAPGAFDDFLESLEDLDLSYNNLRQVPWAGIGAMPALHTLNLDHNLIDALPPGAFAQLGQLSRLDLTSNRLATLAPDPLFSRGRDAEASPAPLVLSFSGNPLHCNCELLWLRRLARPDDLETCASPPGLAGRYFWAVPEGEFSCEPPLIARHTQRLWVLEGQRATLRCRALGDPAPTMHWVGPDDRLVGNSSRARAFPNGTLEIGVTGAGDAGGYTCIATNPAGEATARVELRVLALPHGGNSSAEGGRPGPSDIAASARTAAEGEGTLESEPAVQVTEVTATSGLVSWGPGRPADPVWMFQIQYNSSEDETLIYRIVPASSHHFLLKHLVPGADYDLCLLALSPAAGPSDLTATRLLGCAHFSTLPASPLCHALQAHVLGGTLTVAVGGVLVAALLVFTVALLVRGRGAGNGRLPLKLSHVQSQTNGGPSPTPKAHPPRSPPPRPQRSCSLDLGDAGCYGYARRLGGAWARRSHSVHGGLLGAGCRGVGGSAERLEESVV

SEQ ID NO: 7999 - protein, 418 aa, Homo Sapiens
MAPPLLLLLLASGAAACPLPCVCQNLSESLSTLCAHRGLLFVPPNVDRRTVELRLADNFIQALGPPDFRNMTGLVDLTLSRNAITRIGARAFGDLESLRSLHLDGNRLVELGTGSLRGPVNLQHLILSGNQLGRIAPGAFDDFLESLEDLDLSYNNLRQVPWAGIGAMPALHTLNLDHNLIDALPPGAFAQLGQLSRLDLTSNRLATLAPDPLFSRGRDAEASPAPLVLSFSGNPLHCNCELLWLRRLARPDDLETCASPPGLAGRYFWAVPEGEFSCEPPLIARHTQRLWVLEGQRATLRCRALGDPAPTMHWVGPDDRLVGNSSRARAFPNGTLEIGVTGAGDAGGYTCIATNPAGEATARVELRVLALPHGGNSRPGAAAWPGSPSLVFILSTSGSPVYLEGQGALSSVLASRPG

SEQ ID NO: 8000 - protein, 719 aa, Homo Sapiens
MEKILFYLFLIGIAVKAQICPKRCVCQILSPNLATLCAKKGLLFVPPNIDRRTVELRLADNFVTNIKRKDFANMTSLVDLTLSRNTISFITPHAFADLRNLRALHLNSNRLTKITNDMFSGLSNLHHLILNNNQLTLISSTAFDDVFALEELDLSYNNLETIPWDAVEKMVSLHTLSLDHNMIDNIPKGTFSHLHKMTRLDVTSNKLQKLPPDPLFQRAQVLATSGIISPSTFALSFGGNPLHCNCELLWLRRLSREDDLETCASPPLLTGRYFWSIPEEEFLCEPPLITRHTHEMRVLEGQRATLRCKARGDPEPAIHWISPEGKLISNATRSLVYDNGTLDILITTVKDTGAFTCIASNPAGEATQIVDLHIIKLPHLLNSTNHIHEPDPGSSDISTSTKSGSNTSSSNGDTKLSQDKIVVAEATSSTALLKFNFQRNIPGIRMFQIQYNGTYDDTLVYRMIPPTSKTFLVNNLAAGTMYDLCVLAIYDDGITSLTATRVVGCIQFTTEQDYVRCHFMQSQFLGGTMIIIIGGIIVASVLVFIIILMIRYKVCNNNGQHKVTKVSNVYSQTNGAQIQGCSVTLPQSVSKQAVGHEENAQCCKATSDNVIQSSETCSSQDSSTTTSALPPSWTSSTSVSQKQKRKTGTKPSTEPQNEAVTNVESQNTNRNNSTALQLASRPPDSVTEGPTSKRAHIKPNALLTNVDQIVQETQRLELI

SEQ ID NO: 8001 - protein, 466 aa, Homo Sapiens
MEKILFYLFLIGIAVKAQICPKRCVCQILSPNLATLCAKKGLLFVPPNIDRRTVELRLADNFVTNIKRKDFANMTSLVDLTLSRNTISFITPHAFADLRNLRALHLNSNRLTKITNDMFSGLSNLHHLILNNNQLTLISSTAFDDVFALEELDLSYNNLETIPWDAVEKMVSLHTLSLDHNMIDNIPKGTFSHLHKMTRLDVTSNKLQKLPPDPLFQRAQVLATSGIISPSTFALSFGGNPLHCNCELLWLRRLSREDDLETCASPPLLTGRYFWSIPEEEFLCEPPLITRHTHEMRVLEGQRATLRCKARGDPEPAIHWISPEGKLISNATRSLVYDNGTLDILITTVKDTGAFTCIASNPAGEATQIVDLHIIKLPHLLNSTNHIHEPDPGSSDISTSTKSGSNTSSSNGDTKLSQDKIVVAEATSSTALLKFNFQRNIPGIRMFQIQYNGTYDDTLVYRCFAD

SEQ ID NO: 8002 - protein, 465 aa, Homo Sapiens
MEKILFYLFLIGIAVKAQICPKRCVCQILSPNLATLCAKKGLLFVPPNIDRRTVELRLADNFVTNIKRKDFANMTSLVDLTLSRNTISFITPHAFADLRNLRALHLNSNRLTKITNDMFSGLSNLHHLILNNNQLTLISSTAFDDVFALEELDLSYNNLETIPWDAVEKMVSLHTLSLDHNMIDNIPKGTFSHLHKMTRLDVTSNKLQKLPPDPLFQRAQVLATSGIISPSTFALSFGGNPLHCNCELLWLRRLSREDDLETCASPPLLTGRYFWSIPEEEFLCEPPLITRHTHEMRVLEGQRATLRCKARGDPEPAIHWISPEGKLISNATRSLVYDNGTLDILITTVKDTGAFTCIASNPAGEATQIVDLHIIKLPHLLNSTNHIHEPDPGSSDISTSTKSGSNTSSSNGDTKLSQDKIVVAEATSSTALLKFNFQRNIPGIRMFQIQYNGTYDDTLVYRGWS

SEQ ID NO: 8003 - protein, 347 aa, Homo Sapiens
MSSWSRQRPKSPGGIQPHVSRTLFLLLLLAASAWGVTLSPKDCQVFRSDHGSSISCQPPAEIPGYLPADTVHLAVEFFNLTHLPANLLQGASKLQELHLSSNGLESLSPEFLRPVPQLRVLDLTRNALTGLPPGLFQASATLDTLVLKENQLEVLEVSWLHGLKALGHLDLSGNRLRKLPPGLLANFTLLRTLDLGENQLETLPPDLLRGPLQLERLHLEGNKLQVLGKDLLLPQPDLRYLFLNGNKLARVAAGAFQGLRQLDMLDLSNNSLASVPEGLWASLGQPNWDMRDGFDISGNPWICDQNLSDLYRWLQAQKDKMFSQNDTRCAGPEAVKGQTLLAVAKSQ

SEQ ID NO: 8004 - protein, 4544 aa, Homo Sapiens
MLTPPLLLLLPLLSALVAAAIDAPKTCSPKQFACRDQITCISKGWRCDGERDCPDGSDEAPEICPQSKAQRCQPNEHNCLGTELCVPMSRLCNGVQDCMDGSDEGPHCRELQGNCSRLGCQHHCVPTLDGPTCYCNSSFQLQADGKTCKDFDECSVYGTCSQLCTNTDGSFICGCVEGYLLQPDNRSCKAKNEPVDRPPVLLIANSQNILATYLSGAQVSTITPTSTRQTTAMDFSYANETVCWVHVGDSAAQTQLKCARMPGLKGFVDEHTINISLSLHHVEQMAIDWLTGNFYFVDDIDDRIFVCNRNGDTCVTLLDLELYNPKGIALDPAMGKVFFTDYGQIPKVERCDMDGQNRTKLVDSKIVFPHGITLDLVSRLVYWADAYLDYIEVVDYEGKGRQTIIQGILIEHLYGLTVFENYLYATNSDNANAQQKTSVIRVNRFNSTEYQVVTRVDKGGALHIYHQRRQPRVRSHACENDQYGKPGGCSDICLLANSHKARTCRCRSGFSLGSDGKSCKKPEHELFLVYGKGRPGIIRGMDMGAKVPDEHMIPIENLMNPRALDFHAETGFIYFADTTSYLIGRQKIDGTERETILKDGIHNVEGVAVDWMGDNLYWTDDGPKKTISVARLEKAAQTRKTLIEGKMTHPRAIVVDPLNGWMYWTDWEEDPKDSRRGRLERAWMDGSHRDIFVTSKTVLWPNGLSLDIPAGRLYWVDAFYDRIETILLNGTDRKIVYEGPELNHAFGLCHHGNYLFWTEYRSGSVYRLERGVGGAPPTVTLLRSERPPIFEIRMYDAQQQQVGTNKCRVNNGGCSSLCLATPGSRQCACAEDQVLDADGVTCLANPSYVPPPQCQPGEFACANSRCIQERWKCDGDNDCLDNSDEAPALCHQHTCPSDRFKCENNRCIPNRWLCDGDNDCGNSEDESNATCSARTCPPNQFSCASGRCIPISWTCDLDDDCGDRSDESASCAYPTCFPLTQFTCNNGRCININWRCDNDNDCGDNSDEAGCSHSCSSTQFKCNSGRCIPEHWTCDGDNDCGDYSDETHANCTNQATRPPGGCHTDEFQCRLDGLCIPLRWRCDGDTDCMDSSDEKSCEGVTHVCDPSVKFGCKDSARCISKAWVCDGDNDCEDNSDEENCESLACRPPSHPCANNTSVCLPPDKLCDGNDDCGDGSDEGELCDQCSLNNGGCSHNCSVAPGEGIVCSCPLGMELGPDNHTCQIQSYCAKHLKCSQKCDQNKFSVKCSCYEGWVLEPDGESCRSLDPFKPFIIFSNRHEIRRIDLHKGDYSVLVPGLRNTIALDFHLSQSALYWTDVVEDKIYRGKLLDNGALTSFEVVIQYGLATPEGLAVDWIAGNIYWVESNLDQIEVAKLDGTLRTTLLAGDIEHPRAIALDPRDGILFWTDWDASLPRIEAASMSGAGRRTVHRETGSGGWPNGLTVDYLEKRILWIDARSDAIYSARYDGSGHMEVLRGHEFLSHPFAVTLYGGEVYWTDWRTNTLAKANKWTGHNVTVVQRTNTQPFDLQVYHPSRQPMAPNPCEANGGQGPCSHLCLINYNRTVSCACPHLMKLHKDNTTCYEFKKFLLYARQMEIRGVDLDAPYYNYIISFTVPDIDNVTVLDYDAREQRVYWSDVRTQAIKRAFINGTGVETVVSADLPNAHGLAVDWVSRNLFWTSYDTNKKQINVARLDGSFKNAVVQGLEQPHGLVVHPLRGKLYWTDGDNISMANMDGSNRTLLFSGQKGPVGLAIDFPESKLYWISSGNHTINRCNLDGSGLEVIDAMRSQLGKATALAIMGDKLWWADQVSEKMGTCSKADGSGSVVLRNSTTLVMHMKVYDESIQLDHKGTNPCSVNNGDCSQLCLPTSETTRSCMCTAGYSLRSGQQACEGVGSFLLYSVHEGIRGIPLDPNDKSDALVPVSGTSLAVGIDFHAENDTIYWVDMGLSTISRAKRDQTWREDVVTNGIGRVEGIAVDWIAGNIYWTDQGFDVIEVARLNGSFRYVVISQGLDKPRAITVHPEKGYLFWTEWGQYPRIERSRLDGTERVVLVNVSISWPNGISVDYQDGKLYWCDARTDKIERIDLETGENREVVLSSNNMDMFSVSVFEDFIYWSDRTHANGSIKRGSKDNATDSVPLRTGIGVQLKDIKVFNRDRQKGTNVCAVANGGCQQLCLYRGRGQRACACAHGMLAEDGASCREYAGYLLYSERTILKSIHLSDERNLNAPVQPFEDPEHMKNVIALAFDYRAGTSPGTPNRIFFSDIHFGNIQQINDDGSRRITIVENVGSVEGLAYHRGWDTLYWTSYTTSTITRHTVDQTRPGAFERETVITMSGDDHPRAFVLDECQNLMFWTNWNEQHPSIMRAALSGANVLTLIEKDIRTPNGLAIDHRAEKLYFSDATLDKIERCEYDGSHRYVILKSEPVHPFGLAVYGEHIFWTDWVRRAVQRANKHVGSNMKLLRVDIPQQPMGIIAVANDTNSCELSPCRINNGGCQDLCLLTHQGHVNCSCRGGRILQDDLTCRAVNSSCRAQDEFECANGECINFSLTCDGVPHCKDKSDEKPSYCNSRRCKKTFRQCSNGRCVSNMLWCNGADDCGDGSDEIPCNKTACGVGEFRCRDGTCIGNSSRCNQFVDCEDASDEMNCSATDCSSYFRLGVKGVLFQPCERTSLCYAPSWVCDGANDCGDYSDERDCPGVKRPRCPLNYFACPSGRCIPMSWTCDKEDDCEHGEDETHCNKFCSEAQFECQNHRCISKQWLCDGSDDCGDGSDEAAHCEGKTCGPSSFSCPGTHVCVPERWLCDGDKDCADGADESIAAGCLYNSTCDDREFMCQNRQCIPKHFVCDHDRDCADGSDESPECEYPTCGPSEFRCANGRCLSSRQWECDGENDCHDQSDEAPKNPHCTSQEHKCNASSQFLCSSGRCVAEALLCNGQDDCGDSSDERGCHINECLSRKLSGCSQDCEDLKIGFKCRCRPGFRLKDDGRTCADVDECSTTFPCSQRCINTHGSYKCLCVEGYAPRGGDPHSCKAVTDEEPFLIFANRYYLRKLNLDGSNYTLLKQGLNNAVALDFDYREQMIYWTDVTTQGSMIRRMHLNGSNVQVLHRTGLSNPDGLAVDWVGGNLYWCDKGRDTIEVSKLNGAYRTVLVSSGLREPRALVVDVQNGYLYWTDWGDHSLIGRIGMDGSSRSVIVDTKITWPNGLTLDYVTERIYWADAREDYIEFASLDGSNRHVVLSQDIPHIFALTLFEDYVYWTDWETKSINRAHKTTGTNKTLLISTLHRPMDLHVFHALRQPDVPNHPCKVNNGGCSNLCLLSPGGGHKCACPTNFYLGSDGRTCVSNCTASQFVCKNDKCIPFWWKCDTEDDCGDHSDEPPDCPEFKCRPGQFQCSTGICTNPAFICDGDNDCQDNSDEANCDIHVCLPSQFKCTNTNRCIPGIFRCNGQDNCGDGEDERDCPEVTCAPNQFQCSITKRCIPRVWVCDRDNDCVDGSDEPANCTQMTCGVDEFRCKDSGRCIPARWKCDGEDDCGDGSDEPKEECDERTCEPYQFRCKNNRCVPGRWQCDYDNDCGDNSDEESCTPRPCSESEFSCANGRCIAGRWKCDGDHDCADGSDEKDCTPRCDMDQFQCKSGHCIPLRWRCDADADCMDGSDEEACGTGVRTCPLDEFQCNNTLCKPLAWKCDGEDDCGDNSDENPEECARFVCPPNRPFRCKNDRVCLWIGRQCDGTDNCGDGTDEEDCEPPTAHTTHCKDKKEFLCRNQRCLSSSLRCNMFDDCGDGSDEEDCSIDPKLTSCATNASICGDEARCVRTEKAAYCACRSGFHTVPGQPGCQDINECLRFGTCSQLCNNTKGGHLCSCARNFMKTHNTCKAEGSEYQVLYIADDNEIRSLFPGHPHSAYEQAFQGDESVRIDAMDVHVKAGRVYWTNWHTGTISYRSLPPAAPPTTSNRHRRQIDRGVTHLNISGLKMPRGIAIDWVAGNVYWTDSGRDVIEVAQMKGENRKTLISGMIDEPHAIVVDPLRGTMYWSDWGNHPKIETAAMDGTLRETLVQDNIQWPTGLAVDYHNERLYWADAKLSVIGSIRLNGTDPIVAADSKRGLSHPFSIDVFEDYIYGVTYINNRVFKIHKFGHSPLVNLTGGLSHASDVVLYHQHKQPEVTNPCDRKKCEWLCLLSPSGPVCTCPNGKRLDNGTCVPVPSPTPPPDAPRPGTCNLQCFNGGSCFLNARRQPKCRCQPRYTGDKCELDQCWEHCRNGGTCAASPSGMPTCRCPTGFTGPKCTQQVCAGYCANNSTCTVNQGNQPQCRCLPGFLGDRCQYRQCSGYCENFGTCQMAADGSRQCRCTAYFEGSRCEVNKCSRCLEGACVVNKQSGDVTCNCTDGRVAPSCLTCVGHCSNGGSCTMNSKMMPECQCPPHMTGPRCEEHVFSQQQPGHIASILIPLLLLLLLVLVAGVVFWYKRRVQGAKGFQHQRMTNGAMNVEIGNPTYKMYEGGEPDDVGGLLDADFALDPDKPTNFTNPVYATLYMGGHGSRHSLASTDEKRELLGRGPEDEIGDPLA

SEQ ID NO: 8005 - protein, 292 aa, Homo Sapiens
MLTPPLLLLLPLLSALVAAAIDAPKTCSPKQFACRDQITCISKGWRCDGERDCPDGSDEAPEICPQSKAQRCQPNEHNCLGTELCVPMSRLCNGVQDCMDGSDEGPHCRELQGNCSRLGCQHHCVPTLDGPTCYCNSSFQLQADGKTCKDFDECSVYGTCSQLCTNTDGSFICGCVEGYLLQPDNRSCKAKNEPVDRPPVLLIANSQNILATYLSGAQVSTITPTSTRQTTAMDFSYANETVCWVHVGDSAAQTQLKCARMPGLKGFVDEHTINISLSLHLCVFSKSQQEMG

SEQ ID NO: 8006 - protein, 296 aa, Homo Sapiens
MLTPPLLLLLPLLSALVAAAIDAPKTCSPKQFACRDQITCISKGWRCDGERDCPDGSDEAPEICPQSKAQRCQPNEHNCLGTELCVPMSRLCNGVQDCMDGSDEGPHCRELQGNCSRLGCQHHCVPTLDGPTCYCNSSFQLQADGKTCKDFDECSVYGTCSQLCTNTDGSFICGCVEGYLLQPDNRSCKAKNEPVDRPPVLLIANSQNILATYLSGAQVSTITPTSTRQTTAMDFSYANETVCWVHVGDSAAQTQLKCARMPGLKGFVDEHTINISLSLHRRSRKRAQENEVTQHG

SEQ ID NO: 8007 - protein, 439 aa, Homo Sapiens
MLTPPLLLLLPLLSALVAAAIDAPKTCSPKQFACRDQITCISKGWRCDGERDCPDGSDEAPEICPQSKAQRCQPNEHNCLGTELCVPMSRLCNGVQDCMDGSDEGPHCRELQGNCSRLGCQHHCVPTLDGPTCYCNSSFQLQADGKTCKDFDECSVYGTCSQLCTNTDGSFICGCVEGYLLQPDNRSCKAKNEPVDRPPVLLIANSQNILATYLSGAQVSTITPTSTRQTTAMDFSYANETVCWVHVGDSAAQTQLKCARMPGLKGFVDEHTINISLSLHHVEQMAIDWLTGNFYFVDDIDDRIFVCNRNGDTCVTLLDLELYNPKGIALDPAMGKVFFTDYGQIPKVERCDMDGQNRTKLVDSKIVFPHGITLDLVSRLVYWADAYLDYIEVVDYEGKGRQTIIQGILVRELLSEVLWGNHDPGPSGEGGSLCRGTVL

SEQ ID NO: 8008 - protein, 183 aa, Homo Sapiens
NGQDNCGDGEDERDCPEVTCAPNQFQCSITKRCIPRVWVCDRDNDCVDGSDEPANCTQMTCGVDEFRCKDSGRCIPARWKCDGEDDCGDGSDEPKEECGEPRPHSRRKTVYLDERTCEPYQFRCKNNRCVPGRWQCDYDNDCGDNSDEESCTPRPCSESEFSCANGRCIAGRWKCDGDHDCAD

SEQ ID NO: 8009 - protein, 139 aa, Homo Sapiens
  misc_feature (1)..(1): Xaa can be any naturally occurring amino acid
XRPGAFERETVITMSGDDHPRAFVLDECQNLMFWTNWNEQHPSIMRAALSGANVLTLIEKDIRTPNGLAIDHRAEKLYFSDATLDKIERCEYDGSHRYVNSLHAESTTVAARTCVCSLTRAMSTAHAEGAESSRMTSPA

SEQ ID NO: 8010 - protein, 500 aa, Homo Sapiens
MASVAQESAGSQRRLPPRHGALRGLLLLCLWLPSGRAALPPAAPLSELHAQLSGVEQLLEEFRRQLQQERPQEELELELRAGGGPQEDCPGPGSGGYSAMPDAIIRTKDSLAAGASFLRAPAAVRGWRQCVAACCSEPRCSVAVVELPRRPAPPAAVLGCYLFNCTARGRNVCKFALHSGYSSYSLSRAPDGAALATARASPRQEKDAPPLSKAGQDVVLHLPTDGVVLDGRESTDDHAIVQYEWALLQGDPSVDMKVPQSGTLKLSHLQEGTYTFQLTVTDTAGQRSSDNVSVTVLRAAYSTGGCLHTCSRYHFFCDDGCCIDITLACDGVQQCPDGSDEDFCQNLGLDRKMVTHTAASPALPRTTGPSEDAGGDSLVEKSQKATAPNKPPALSNTEKRNHSAFWGPESQIIPVMPDSSSSGKNRKEESYIFESKGDGGGGEHPAPETGAVLPLALGLAITALLLLMVACRLRLVKQKLKKARPITSEESDYLINGMYL

SEQ ID NO: 8011 - protein, 325 aa, Homo Sapiens
MASVAQESAGSQRRLPPRHGALRGLLLLCLWLPSGRAALPPAAPLSELHAQLSGVEQLLEEFRRQLQQERPQEELELELRAGGGPQEDCPGPGSGGYSAMPDAIIRTKDSLAAGASFLRAPAAVRGWRQCVAACCSEPRCSVAVVELPRRPAPPAAVLGCYLFNCTARGRNVCKFALHSGYSSYSLSRAPDGAALATARASPRQEKDAPPLSKAGQDVVLHLPTDGVVLDGRESTDDHAIVQYEWALLQGDPSVDMKVPQSGTLKLSHLQEGTYTFQLTVTDTAGQRSSDNVSVTVLRAAYSTGDGWSICCICSKREAKEFSETS

SEQ ID NO: 8012 - protein, 4599 aa, Homo Sapiens
MSEFLLALLTLSGLLPIARVLTVGADRDQQLCDPGEFLCHDHVTCVSQSWLCDGDPDCPDDSDESLDTCPEEVEIKCPLNHIACLGTNKCVHLSQLCNGVLDCPDGYDEGVHCQELLSNCQQLNCQYKCTMVRNSTRCYCEDGFEITEDGRSCKDQDECAVYGTCSQTCRNTHGSYTCSCVEGYLMQPDNRSCKAKIEPTDRPPILLIANFETIEVFYLNGSKMATLSSVNGNEIHTLDFIYNEDMICWIESRESSNQLKCIQITKAGGLTDEWTINILQSFHNVQQMAIDWLTRNLYFVDHVGDRIFVCNSNGSVCVTLIDLELHNPKAIAVDPIAGKLFFTDYGNVAKVERCDMDGMNRTRIIDSKTEQPAALALDLVNKLVYWVDLYLDYVGVVDYQGKNRHTVIQGRQVRHLYGITVFEDYLYATNSDNYNIVRINRFNGTDIHSLIKIENAWGIRIYQKRTQPTVRSHACEVDPYGMPGGCSHICLLSSSYKTRTCRCRTGFNLGSDGRSCKRPKNELFLFYGKGRPGIVRGMDLNTKIADEYMIPIENLVNPRALDFHAETNYIYFADTTSFLIGRQKIDGTERETILKDDLDNVEGIAVDWIGNNLYWTNDGHRKTINVARLEKASQSRKTLLEGEMSHPRGIVVDPVNGWMYWTDWEEDEIDDSVGRIEKAWMDGFNRQIFVTSKMLWPNGLTLDFHTNTLYWCDAYYDHIEKVFLNGTHRKIVYSGRELNHPFGLSHHGNYVFWTDYMNGSIFQLDLITSEVTLLRHERPPLFGLQIYDPRKQQGDNMCRVNNGGCSTLCLAIPGGRVCACADNQLLDENGTTCTFNPGEALPHICKAGEFRCKNRHCIQARWKCDGDDDCLDGSDEDSVNCFNHSCPDDQFKCQNNRCIPKRWLCDGANDCGSNEDESNQTCTARTCQVDQFSCGNGRCIPRAWLCDREDDCGDQTDEMASCEFPTCEPLTQFVCKSGRCISSKWHCDSDDDCGDGSDEVGCVHSCFDNQFRCSSGRCIPGHWACDGDNDCGDFSDEAQINCTKEEIHSPAGCNGNEFQCHPDGNCVPDLWRCDGEKDCEDGSDEKGCNGTIRLCDHKTKFSCWSTGRCINKAWVCDGDIDCEDQSDEDDCDSFLCGPPKHPCANDTSVCLQPEKLCNGKKDCPDGSDEGYLCDECSLNNGGCSNHCSVVPGRGIVCSCPEGLQLNKDNKTCEIVDYCSNHLKCSQVCEQHKHTVKCSCYEGWKLDVDGESCTSVDPFEAFIIFSIRHEIRRIDLHKRDYSLLVPGLRNTIALDFHFNQSLLYWTDVVEDRIYRGKLSESGGVSAIEVVVEHGLATPEGLTVDWIAGNIYWIDSNLDQIEVAKLDGSLRTTLIAGAMEHPRAIALDPRYGILFWTDWDANFPRIESASMSGAGRKTIYKDMKTGAWPNGLTVDHFEKRIVWTDARSDAIYSALYDGTNMIEIIRGHEYLSHPFAVSLYGSEVYWTDWRTNTLSKANKWTGQNVSVIQKTSAQPFDLQIYHPSRQPQAPNPCAANDGKGPCSHMCLINHNRSAACACPHLMKLSSDKKTCYEMKKFLLYARRSEIRGVDIDNPYFNFITAFTVPDIDDVTVIDFDASEERLYWTDIKTQTIKRAFINGTGLETVISRDIQSIRGLAVDWVSRNLYWISSEFDETQINVARLDGSLKTSIIHGIDKPQCLAAHPVRGKLYWTDGNTINMANMDGSNSKILFQNQKEPVGLSIDYVENKLYWISSGNGTINRCNLDGGNLEVIESMKEELTKATALTIMDKKLWWADQNLAQLGTCSKRDGRNPTILRNKTSGVVHMKVYDKEAQQGSNSCQLNNGGCSQLCLPTSETTRTCMCTVGYYLQKNRMSCQGIESFLMYSVHEGIRGIPLEPSDKMDALMPISGTSFAVGIDFHAENDTIYWTDMGFNKISRAKRDQTWKEDIITNGLGRVEGIAVDWIAGNIYWTDHGFNLIEVARLNGSFRYVIISQGLDQPRSIAVHPEKGLLFWTEWGQMPCIGKARLDGSEKVVLVSMGIAWPNGISIDYEENKLYWCDARTDKIERIDLETGGNREMVLSGSNVDMFSVAVFGAYIYWSDRAHANGSVRRGHKNDATETITMRTGLGVNLKEVKIFNRVREKGTNVCARDNGGCKQLCLYRGNSRRTCACAHGYLAEDGVTCLRHEGYLLYSGRTILKSIHLSDETNLNSPIRPYENPRYFKNVIALAFDYNQRRKGTNRIFYSDAHFGNIQLIKDNWEDRQVIVENVGSVEGLAYHRAWDTLYWTSSTTSSITRHTVDQTRPGAFDREAVITMSEDDHPHVLALDECQNLMFWTNWNEQHPSIMRSTLTGKNAQVVVSTDILTPNGLTIDYRAEKLYFSDGSLGKIERCEYDGSQRHVIVKSGPGTFLSLAVYDNYIFWSDWGRRAILRSNKYTGGDTKILRSDIPHQPMGIIAVANDTNSCELSPCALLNGGCHDLCLLTPNGRVNCSCRGDRILLEDNRCVTKNSSCNAYSEFECGNGECIDYQLTCDGIPHCKDKSDEKLLYCENRSCRRGFKPCYNRRCIPHGKLCDGENDCGDNSDELDCKVSTCATVEFRCADGTCIPRSARCNQNIDCADASDEKNCNNTDCTHFYKLGVKTTGFIRCNSTSLCVLPTWICDGSNDCGDYSDELKCPVQNKHKCEENYFSCPSGRCILNTWICDGQKDCEDGRDEFHCDSSCSWNQFACSAQKCISKHWICDGEDDCGDGLDESDSICGAITCAADMFSCQGSRACVPRHWLCDGERDCPDGSDELSTAGCAPNNTCDENAFMCHNKVCIPKQFVCDHDDDCGDGSDESPQCGYRQCGTEEFSCADGRCLLNTQWQCDGDFDCPDHSDEAPLNPKCKSAEQSCNSSFFMCKNGRCIPSGGLCDNKDDCGDGSDERNCHINECLSKKVSGCSQDCQDLPVSYKCKCWPGFQLKDDGKTCVDIDECSSGFPCSQQCINTYGTYKCLCTDGYEIQPDNPNGCKSLSDEEPFLILADHHEIRKISTDGSNYTLLKQGLNNVIAIDFDYREEFIYWIDSSRPNGSRINRMCLNGSDIKVVHNTAVPNALAVDWIGKNLYWSDTEKRIIEVSKLNGLYPTILVSKRLKFPRDLSLDPQAGYLYWIDCCEYPHIGRVGMDGTNQSVVIETKISRPMALTIDYVNRRLYWADENHIEFSNMDGSHRHKVPNQDIPGVIALTLFEDYIYWTDGKTKSLSRAHKTSGADRLSLIYSWHAITDIQVYHSYRQPDVSKHLCMINNGGCSHLCLLAPGKTHTCACPTNFYLAADNRTCLSNCTASQFRCKTDKCIPFWWKCDTVDDCGDGSDEPDDCPEFRCQPGRFQCGTGLCALPAFICDGENDCGDNSDELNCDTHVCLSGQFKCTKNQKCIPVNLRCNGQDDCGDEEDERDCPENSCSPDYFQCKTTKHCISKLWVCDEDPDCADASDEANCDKKTCGPHEFQCKNNNCIPDHWRCDSQNDCSDNSDEENCKPQTCTLKDFLCANGDCVSSRFWCDGDFDCADGSDERNCETSCSKDQFRCSNGQCIPAKWKCDGHEDCKYGEDEKSCEPASPTCSSREYICASDGCISASLKCNGEYDCADGSDEMDCVTECKEDQFRCKNKAHCIPIRWLCDGIHDCVDGSDEENCERGGNICRADEFLCNNSLCKLHFWVCDGEDDCGDNSDEAPDMCVKFLCPSTRPHRCRNNRICLQSEQMCNGIDECGDNSDEDHCGGKLTYKARPCKKDEFACSNKKCIPMDLQCDRLDDCGDGSDEQGCRIAPTEYTCEDNVNPCGDDAYCNQIKTSVFCRCKPGFQRNMKNRQCEDLNECLVFGTCSHQCINVEGSYKCVCDQNFQERNNTCIAEGSEDQVLYIANDTDILGFIYPFNYSGDHQQISHIEHNSRITGMDVYYQRDMIIWSTQFNPGGIFYKRIHGREKRQANSGLICPEFKRPRDIAVDWVAGNIYWTDHSRMHWFSYYTTHWTSLRYSINVGQLNGPNCTRLLTNMAGEPYAIAVNPKRGMMYWTVVGDHSHIEEAAMDGTLRRILVQKNLQRPTGLAVDYFSERIYWADFELSIIGSVLYDGSNSVVSVSSKQGLLHPHRIDIFEDYIYGAGPKNGVFRVQKFGHGSVEYLALNIDKTKGVLISHRYKQLDLPNPCLDLACEFLCLLNPSGATCVCPEGKYLINGTCNDDSLLDDSCKLTCENGGRCILNEKGDLRCHCWPSYSGERCEVNHCSNYCQNGGTCVPSVLGRPTCSCALGFTGPNCGKTVCEDFCQNGGTCIVTAGNQPYCHCQPEYTGDRCQYYVCHHYCVNSESCTIGDDGSVECVCPTRYEGPKCEVDKCVRCHGGHCIINKDSEDIFCNCTNGKIASSCQLCDGYCYNGGTCQLDPETNVPVCLCSTNWSGTQCERPAPKSSKSDHISTRSIAIIVPLVLLVTLITTLVIGLVLCKRKRRTKTIRRQPIINGGINVEIGNPSYNMYEVDHDHNDGGLLDPGFMIDPTKARYIGGGPSAFKLPHTAPPIYLNSDLKGPLTAGPTNYSNPVYAKLYMDGQNCRNSLGSVDERKELLPKKIEIGIRETVA

SEQ ID NO: 8013 - protein, 782 aa, Homo Sapiens [sequence omitted]

SEQ ID NO: 8014 - protein, 280 aa, Homo Sapiens
  misc_feature (1)..(1): Xaa can be any naturally occurring amino acid
XRPTCSCALGFTGPNCGKTVCEDFCQNGGTCIVTAGNQPYCHCQPEYTGDRCQYYVCHHYCVNSESCTIGDDGSVECVCPTRYEGPKCEVDKCVRCHGGHCIINKDSEDIFCNCTNGKIASSCQLCDGYCYNGGTCQLDPETNVPVCLCSVGFKSQRCDQKENPCDHYCQNEGICTLTAFNEPRCKCSTNWSGTQCERPAPKSSKSDHISTRSIAIIVPLVLLVTLITTLVIGLVLCKRKRRTKTIRRQPIINGGINVEIGNPSYNMYEVDHDHNDGGLL

SEQ ID NO: 8015 - protein, 798 aa, Homo Sapiens
  misc_feature (1)..(1): Xaa can be any naturally occurring amino acid
XSNKKCIPMDLQCDRLDDCGDGSDEQGCRIAPTEYTCEDNVNPCGDDAYCNQIKTSVFCRCKPGFQRNMKNRQCEDLNECLVFGTCSHQCINVEGSYKCVCDQNFQERNNTCIAEGSEDQVLYIANDTDILGFIYPFNYSGDHQQISHIEHNSRITGMDVYYQRDMIIWSTQFNPGGIFYKRIHGREKRQANSGLICPEFKRPRDIAVDWVAGNIYWTDHSRMHWFSYYTTHWTSLRYSINVGQLNGPNCTRLLTNMAGEPYAIAVNPKRGMMYWTVVGDHSHIEEAAMDGTLRRILVQKNLQRPTGLAVDYFSERIYWADFELSIIGSVLYDGSNSVVSVSSKQGLLHPHRIDIFEDYIYGAGPKNGVFRVQKFGHGSVEYLALNIDKTKGVLISHRYKQLDLPNPCLDLACEFLCLLNPSGATCVCPEGKYLINGTCNDDSLLDDSCKLTCENGGRCILNEKGDLRCHCWPSYSGERCEVNHCSNYCQNGGTCVPSVLGRPTCSCALGFTGPNCGKTVCEDFCQNGGTCIVTAGNQPYCHCQPEYTGDRCQYYVCHHYCVNSESCTIGDDGSVECVCPTRYEGPKCEVDKCVRCHGGHCIINKDSEDIFCNCTNGKIASSCQLCDGYCYNGGTCQLDPETNVPVCLCSTNWSGTQCERPAPKSSKSDHISTRSIAIIVPLVLLVTLITTLVIGLVLCKRKRRTKTIRRQPIINGGINVEIGNPSYNMYEVDHDHNDGGLLDPGFMIDPTKPTNYSNPVYAKLYMDGQNCRNSLGSVDERKELLPKKIEIGIRETVA

SEQ ID NO: 8016 - protein, 4655 aa, Homo Sapiens
MDRGPAAVACTLLLALVACLAPASGQECDSAHFRCGSGHCIPADWRCDGTKDCSDDADEIGCAVVTCQQGYFKCQSEGQCIPNSWVCDQDQDCDDGSDERQDCSQSTCSSHQITCSNGQCIPSEYRCDHVRDCPDGADENDCQYPTCEQLTCDNGACYNTSQKCDWKVDCRDSSDEINCTEICLHNEFSCGNGECIPRAYVCDHDNDCQDGSDEHACNYPTCGGYQFTCPSGRCIYQNWVCDGEDDCKDNGDEDGCESGPHDVHKCSPREWSCPESGRCISIYKVCDGILDCPGREDENNTSTGKYCSMTLCSALNCQYQCHETPYGGACFCPPGYIINHNDSRTCVEFDDCQIWGICDQKCESRPGRHLCHCEEGYILERGQYCKANDSFGEASIIFSNGRDLLIGDIHGRSFRILVESQNRGVAVGVAFHYHLQRVFWTDTVQNKVFSVDINGLNIQEVLNVSVETPENLAVDWVNNKIYLVETKVNRIDMVNLDGSYRVTLITENLGHPRGIAVDPTVGYLFFSDWESLSGEPKLERAFMDGSNRKDLVKTKLGWPAGVTLDMISKRVYWVDSRFDYIETVTYDGIQRKTVVHGGSLIPHPFGVSLFEGQVFFTDWTKMAVLKANKFTETNPQVYYQASLRPYGVTVYHSLRQPYATNPCKDNNGGCEQVCVLSHRTDNDGLGFRCKCTFGFQLDTDERHCIAVQNFLIFSSQVAIRGIPFTLSTQEDVMVPVSGNPSFFVGIDFDAQDSTIFFSDMSKHMIFKQKIDGTGREILAANRVENVESLAFDWISKNLYWTDSHYKSISVMRLADKTRRTVVQYLNNPRSVVVHPFAGYLFFTDWFRPAKIMRAWSDGSHLLPVINTTLGWPNGLAIDWAASRLYWVDAYFDKIEHSTFDGLDRRRLGHIEQMTHPFGLAIFGEHLFFTDWRLGAIIRVRKADGGEMTVIRSGIAYILHLKSYDVNIQTGSNACNQPTHPNGDCSHFCFPVPNFQRVCGCPYGMRLASNHLTCEGDPTNEPPTEQCGLFSFPCKNGRCVPNYYLCDGVDDCHDNSDEQLCGTLNNTCSSSAFTCGHGECIPAHWRCDKRNDCVDGSDEHNCPTHAPASCLDTQYTCDNHQCISKNWVCDTDNDCGDGSDEKNCNSTETCQPSQFNCPNHRCIDLSFVCDGDKDCVDGSDEVGCVLNCTASQFKCASGDKCIGVTNRCDGVFDCSDNSDEAGCPTRPPGMCHSDEFQCQEDGICIPNFWECDGHPDCLYGSDEHNACVPKTCPSSYFHCDNGNCIHRAWLCDRDNDCGDMSDEKDCPTQPFRCPSWQWQCLGHNICVNLSVVCDGIFDCPNGTDESPLCNGNSCSDFNGGCTHECVQEPFGAKCLCPLGFLLANDSKTCEDIDECDILGSCSQHCYNMRGSFRCSCDTGYMLESDGRTCKVTASESLLLLVASQNKIIADSVTSQVHNIYSLVENGSYIVAVDFDSISGRIFWSDATQGKTWSAFQNGTDRRVVFDSSIILTETIAIDWVGRNLYWTDYALETIEVSKIDGSHRTVLISKNLTNPRGLALDPRMNEHLLFWSDWGHHPRIERASMDGSMRTVIVQDKIFWPCGLTIDYPNRLLYFMDSYLDYMDFCDYNGHHRRQVIASDLIIRHPYALTLFEDSVYWTDRATRRVMRANKWHGGNQSVVMYNIQWPLGIVAVHPSKQPNSVNPCAFSRCSHLCLLSSQGPHFYSCVCPSGWSLSPDLLNCLRDDQPFLITVRQHIIFGISLNPEVKSNDAMVPIAGIQNGLDVEFDDAEQYIYWVENPGEIHRVKTDGTNRTVFASISMVGPSMNLALDWISRNLYSTNPRTQSIEVLTLHGDIRYRKTLIANDGTALGVGFPIGITVDPARGKLYWSDQGTDSGVPAKIASANMDGTSVKTLFTGNLEHLECVTLDIEEQKLYWAVTGRGVIERGNVDGTDRMILVHQLSHPWGIAVHDSFLYYTDEQYEVIERVDKATGANKIVLRDNVPNLRGLQVYHRRNAAESSNGCSNNMNACQQICLPVPGGLFSCACATGFKLNPDNRSCSPYNSFIVVSMLSAIRGFSLELSDHSETMVPVAGQGRNALHVDVDVSSGFIYWCDFSSSVASDNAIRRIKPDGSSLMNIVTHGIGENGVRGIAVDWVAGNLYFTNAFVSETLIEVLRINTTYRRVLLKVTVDMPRHIVVDPKNRYLFWADYGQRPKIERSFLDCTNRTVLVSEGIVTPRGLAVDRSDGYVYWVDDSLDIIARIRINGENSEVIRYGSRYPTPYGITVFENSIIWVDRNLKKIFQASKEPENTEPPTVIRDNINWLRDVTIFDKQVQPRSPAEVNNNPCLENNGGCSHLCFALPGLHTPKCDCAFGTLQSDGKNCAISTENFLIFALSNSLRSLHLDPENHSPPFQTINVERTVMSLDYDSVSDRIYFTQNLASGVGQISYATLSSGIHTPTVIASGIGTADGIAFDWITRRIYYSDYLNQMINSMAEDGSNRTVIARVPKPRAIVLDPCQGYLYWADWDTHAKIERATLGGNFRVPIVNSSLVMPSGLTLDYEEDLLYWVDASLQRIERSTLTGVDREVIVNAAVHAFGLTLYGQYIYWTDLYTQRIYRANKYDGSGQIAMTTNLLSQPRGINTVVKNQKQQCNNPCEQFNGGCSHICAPGPNGAECQCPHEGNWYLANNRKHCIVDNGERCGASSFTCSNGRCISEEWKCDNDNDCGDGSDEMESVCALHTCSPTAFTCANGRCVQYSYRCDYYNDCGDGSDEAGCLFRDCNATTEFMCNNRRCIPREFICNGVDNCHDNNTSDEKNCPDRTCQSGYTKCHNSNICIPRVYLCDGDNDCGDNSDENPTYCTTHTCSSSEFQCASGRCIPQHWYCDQETDCFDASDEPASCGHSERTCLADEFKCDGGRCIPSEWICDGDNDCGDMSDEDKRHQCQNQNCSDSEFLCVNDRPPDRRCIPQSWVCDGDVDCTDGYDENQNCTRRTCSENEFTCGYGLCIPKIFRCDRHNDCGDYSDERGCLYQTCQQNQFTCQNGRCISKTFVCDEDNDCGDGSDELMHLCHTPEPTCPPHEFKCDNGRCIEMMKLCNHLDDCLDNSDEKGCGINECHDPSISGCDHNCTDTLTSFYCSCRPGYKLMSDKRTCVDIDECTEMPFVCSQKCENVIGSYICKCAPGYLREPDGKTCRQNSNIEPYLIFSNRYYLRNLTIDGYFYSLILEGLDNVVALDFDRVEKRLYWIDTQRQVIERMFLNKTNKETIINHRLPAAESLAVDWVSRKLYWLDARLDGLFVSDLNGGHRRMLAQHCVDANNTFCFDNPRGLALHPQYGYLYWADWGHRAYIGRVGMDGTNKSVIISTKLEWPNGITIDYTNDLLYWADAHLGYIEYSDLEGHHRHTVYDGALPHPFAITIFEDTIYWTDWNTRTVEKGNKYDGSNRQTLVNTTHRPFDIHVYHPYRQPIVSNPCGTNNGGCSHLCLIKPGGKGFTCECPDDFRTLQLSGSTYCMPMCSSTQFLCANNEKCIPIWWKCDGQKDCSDGSDELALCPQRFCRLGQFQCSDGNCTSPQTLCNAHQNCPDGSDEDRLLCENHHCDSNEWQCANKRCIPESWQCDTFNDCEDNSDEDSSHCASRTCRPGQFRCANGRCIPQAWKCDVDNDCGDHSDEPIEECMSSAHLCDNFTEFSCKTNYRCIPKWAVCNGVDDCRDNSDEQGCEERTCHPVGDFRCKNHHCIPLRWQCDGQNDCGDNSDEENCAPRECTESEFRCVNQQCIPSRWICDHYNDCGDNSDERDCEMRTCHPEYFQCTSGHCVHSELKCDGSADCLDASDEADCPTRFPDGAYCQATMFECKNHVCIPPYWKCDGDDDCGDGSDEELHLCLDVPCNSPNRFRCDNNRCIYSHEVCNGVDDCGDGTDETEEHCRKPTPKPCTEYEYKCGNGHCIPHDNVCDDADDCGDWSDELGCNKGKERTCAENICEQNCTQLNEGGFICSCTAGFETNVFDRTSCLDINECEQFGTCPQHCRNTKGSYECVCADGFTSMSDRPGKRCAAEGSSPLLLLPDNVRIRKYNLSSERFSEYLQDEEYIQAVDYDWDPKDIGLSVVYYTVRGEGSRFGAIKRAYIPNFESGRNNLVQEVDLKLKYVMQPDGIAVDWVGRHIYWSDVKNKRIEVAKLDGRYRKWLISTDLDQPAAIAVNPKLGLMFWTDWGKEPKIESAWMNGEDRNILVFEDLGWPTGLSIDYLNNDRIYWSDFKEDVIETIKYDGTDRRVIAKEAMNPYSLDIFEDQLYWISKEKGEVWKQNKFGQGKKEKTLVVNPWLTQVRIFHQLRYNKSVPNLCKQICSHLCLLRPGGYSCACPQGSSFIEGSTTECDAAIELPINLPPPCRCMHGGNCYFDETDLPKCKCPSGYTGKYCEMAFSKGISPGTTAVAVLLTILLIVVIGALAIAGFFHYRRTGSLLPALPKLPSLSSLVKPSENGNGVTFRSGADLNMDIGVSGFGPETAIDRSMAMSEDFVMEMGKQPIIFENPMYSARDSAVKVVQPIQVTVSENVDNKNYGSPINPSEIVPETNPTSPAADGTQVTKWNLFKRKSKQTTNFENPIYAQMENEQKESVAATPPPSPSLPAKPKPPSRRDPTPTYSATEDTFKDTANLVKEDSEV

SEQ ID NO: 8017 - protein, 1225 aa, Homo Sapiens
MDRGPAAVACTLLLALVACLAPASGQECDSAHFRCGSGHCIPADWRCDGTKDCSDDADEIGCAVVTCQQGYFKCQSEGQCIPNSWVCDQDQDCDDGSDERQDCSQSTCSSHQITCSNGQCIPSEYRCDHVRDCPDGADENDCQYPTCEQLTCDNGACYNTSQKCDWKVDCRDSSDEINCTEICLHNEFSCGNGECIPRAYVCDHDNDCQDGSDEHACNYPTCGGYQFTCPSGRCIYQNWVCDGEDDCKDNGDEDGCESGPHDVHKCSPREWSCPESGRCISIYKVCDGILDCPGREDENNTSTGKYCSMTLCSALNCQYQCHETPYGGACFCPPGYIINHNDSRTCVEFDDCQIWGICDQKCESRPGRHLCHCEEGYILERGQYCKANDSFGEASIIFSNGRDLLIGDIHGRSFRILVESQNRGVAVGVAFHYHLQRVFWTDTVQNKVFSVDINGLNIQEVLNVSVETPENLAVDWVNNKIYLVETKVNRIDMVNLDGSYRVTLITENLGHPRGIAVDPTVGKTVVHGGSLIPHPFGVSLFEGQVFFTDWTKMAVLKANKFTETNPQVYYQASLRPYGVTVYHSLRQPYATNPCKDNNGGCEQVCVLSHRTDNDGLGFRCKCTFGFQLDTDERHCIGREILAANRVENVESLAFDWISKNLYWTDSHYKSISVMRLADKTRRTVVQYLNNPRSVVVHPFAGYLFFTDWFRPAKIMRAWSDGSHLLPVINTTLGWPNGLAIDWAASRLYWVDAYFDKIEHSTFDGLDRRRLGHIEQMTHPFGLAIFGEHLFFTDWRLGAIIRVRKADGGEMTVIRSGIAYILHLKSYDVNIQTGSNACNQPTHPNGDCSHFCFPVPNFQRVCGCPYGMRLASNHLTCEGDPTNEPPTEQCGLFSFPCKNGRCVPNYYLCDGVDDCHDNSDEQLCGTLNNTCSSSAFTCGHGECIPAHWRCDKRNDCVDGSDEHNCPTHAPASCLDTQYTCDNHQCISKNWVCDTDNDCGDGSDEKNCNSTETCQPSQFNCPNHRCIDLSFVCDGDKDCVDGSDEVGCVLNCTASQFKCASGDKCIGVTNRCDGVFDCSDNSDEAGCPTRPPGMCHSDEFQCQEDGICIPNFWECDGHPDCLYGSDEHNACVPKTCPSSYFHCDNGNCIHRAWLCDRDNDCGDMSDEKDCPTQPFRCPSWQWQCLGHNICVNLSVVCDGIFDCPNGTDESPLCSKFPDHSLLAINSF

SEQ ID NO: 8018 - protein, 1905 aa, Homo Sapiens
MRRQWGALLLGALLCAHGLASSPECACGRSHFTCAVSALGECTCIPAQWQCDGDNDCGDHSDEDGCILPTCSPLDFHCDNGKCIRRSWVCDGDNDCEDDSDEQDCPPRECEEDEFPCQNGYCIRSLWHCDGDNDCGDNSDEQCDMRKCSDKEFRCSDGSCIAEHWYCDGDTDCKDGSDEENCPSAVPAPPCNLEEFQCAYGRCILDIYHCDGDDDCGDWSDESDCSSHQPCRSGEFMCDSGLCINAGWRCDGDADCDDQSDERNCTTSMCTAEQFRCHSGRCVRLSWRCDGEDDCADNSDEENCENTGSPQCALDQFLCWNGRCIGQRKLCNGVNDCGDNSDESPQQNCRPRTGEENCNVNNGGCAQKCQMVRGAVQCTCHTGYRLTEDGHTCQDVNECAEEGYCSQGCTNSEGAFQCWCETGYELRPDRRSCKALGPEPVLLFANRIDIRQVLPHRSEYTLLLNNLENAIALDFHHRRELVFWSDVTLDRILRANLNGSNVEEVVSTGLESPGGLAVDWVHDKLYWTDSGTSRIEVANLDGAHRKVLLWQNLEKPRAIALHPMEGTIYWTDWGNTPRIEASSMDGSGRRIIADTHLFWPNGLTIDYAGRRMYWVDAKHHVIERANLDGSHRKAVISQGLPHPFAITVFEDSLYWTDWHTKSINSANKFTGKNQEIIRNKLHFPMDIHTLHPQRQPAGKNRCGDNNGGCTHLCLPSGQNYTCACPTGFRKISSHACAQSLDKFLLFARRMDIRRISFDTEDLSDDVIPLADVRSAVALDWDSRDDHVYWTDVSTDTISRAKWDGTGQEVVVDTSLESPAGLAIDWVTNKLYWTDAGTDRIEVANTDGSMRTVLIWENLDRPRDIVVEPMGGYMYWTDWGASPKIERAGMDASGRQVIISSNLTWPNGLAIDYGSQRLYWADAGMKTIEFAGLDGSKRKVLIGSQLPHPFGLTLYGERIYWTDWQTKSIQSADRLTGLDRETLQENLENLMDIHVFHRRRPPVSTPCAMENGGCSHLCLRSPNPSGFSCTCPTGINLLSDGKTCSPGMNSFLIFARRIDIRMVSLDIPYFADVVVPINITMKNTIAIGVDPQEGKVYWSDSTLHRISRANLDGSQHEDIITTGLQTTDGLAVDAIGRKVYWTDTGTNRIEVGNLDGSMRKVLVWQNLDSPRAIVLYHEMGFMYWTDWGENAKLERSGMDGSDRAVLINNNLGWPNGLTVDKASSQLLWADAHTERIEAADLNGANRHTLVSPVQHPYGLTLLDSYIYWTDWQTRSIHRADKGTGSNVILVRSNLPGLMDMQAVDRAQPLGFNKCGSRNGGCSHLCLPRPSGFSCACPTGIQLKGDGKTCDPSPETYLLFSSRGSIRRISLDTSDHTDVHVPVPELNNVISLDYDSVDGKVYYTDVFLDVIRRADLNGSNMETVIGRGLKTTDGLAVDWVARNLYWTDTGRNTIEASRLDGSCRKVLINNSLDEPRAIAVFPRKGYLFWTDWGHIAKIERANLDGSERKVLINTDLGWPNGLTLDYDTRRIYWVDAHLDRIESADLNGKLRQVLVSHVSHPFALTQQDRWIYWTDWQTKSIQRVDKYSGRNKETVLANVEGLMDIIVVSPQRQTGTNACGVNNGGCTHLCFARASDFVCACPDEPDSRPCSLVPGLVPPAPRATGMSEKSPVLPNTPPTTLYSSTTRTRTSLEEVEGRCSERDARLGLCARSNDAVPAAPGEGLHISYAIGGLLSILLILVVIAALMLYRHKKSKFTDPGMGNLTYSNPSYRTSTQEVKIEAIPKPAMYNQLCYKKEGGPDHNYTKEKIKIVEGICLLSGDDAEWDDLKQLRSSRGGLLRDHVCMKTDTVSIQASSGSLDDTETEQLLQEEQSECSSVHTAATPERRGSLPDTGWKHERKLSSESQV

SEQ ID NO: 8019 - protein, 133 aa, Homo Sapiens
MRRQWGALLLGALLCAHVLPTCSPLDFHCDNGKCIRRSWVCDGDNDCEDDSDEQDCPPRECEEDEFPCQNGYCIRSLWHCDGDNDCGDNSDEQCDMRKCSDKEFRCSDGSCIAEHWYCDGDTDCKDGSDEENC

SEQ ID NO: 8020 - protein, 357 aa, Homo Sapiens
MAPRRVRSFLRGLPALLLLLLFLGPWPAASHGGKYSREKNQPKPSPKRESGEEFRMEKLNQLWEKAQRLHLPPVRLAELHADLKIQERDELAWKKLKLDGLDEDGEKEARLIRNLNVILAKYGLDGKKDARQVTSNSLSGTQEDGLDDPRLEKLWHKAKTSGKFSGEELDKLWREFLHHKEKVHEYNVLLETLSRTEEIHENVISPSDLSDIKGSVLHSRHTELKEKLRSINQGLDRLRRVSHQGYSTEAEFEEPRVIDLWDLAQSANLTDKELEAFREELKHFEAKIEKHNHYQKQLEIAHEKLRHAESVGDGERVSRSREKHALLEGRTKELGYTVKKHLQDLSGRISRARHNEL

SEQ ID NO: 8021 - protein, 105 aa, Homo Sapiens
MAPRRVRSFLRGLPALLLLLLFLGPWPAASHGGKYSREKNQPKPSPKRESGEEFRMEKLNQLWEKAQRNLPVASLLRGQFLAVSWSVLLVAHRLLPFVRSCIFLP

SEQ ID NO: 8022 - protein, 104 aa, Homo Sapiens
MRVVTIVILLCFCKAAELRKASPGSVRSRVNHGRAGGGRRGSNPVKRYAPGLPCDVYTYLHEKYLDCQERKLVYVLPGWPQDLLHMLLARNKIRTLKNNMFSKF

SEQ ID NO: 8023 - protein, 313 aa, Homo Sapiens
MRVVTIVILLCFCKAAELRKASPGSVRSRVNHGRAGGGRRGSNPVKRYAPGLPCDVYTYLHEKYLDCQERKLVYVLPGWPQDLLHMLLARNKIRTLKNNMFSKFKKLKSLDLQQNEISKIESEAFFGLNKLTTLLLQHNQIKVLTEEVFIYTPLLSYLRLYDNPWHCTCEIETLISMLQIPRNRNLGNYAKCESPQEQKNKKLRQIKSEQLCNEEEKEQLDPKPQVSGRPPVIKPEVDSTFCHNYVFPIQTLDCKRKELKKVPNNIPPDIVKLDLSYNKINQLRPKEFEDVHELKKLNLSSNGIEFIDPGSLR

SEQ ID NO: 8024 - protein, 441 aa, Homo Sapiens
MRVVTIVILLCFCKAAELRKASPGSVRSRVNHGRAGGGRRGSNPVKRYAPGLPCDVYTYLHEKYLDCQERKLVYVLPGWPQDLLHMLLARNKIRTLKNNMFSKFKKLKSLDLQQNEISKIESEAFFGLNKLTTLLLQHNQIKVLTEEVFIYTPLLSYLRLYDNPWHCTCEIETLISMLQIPRNRNLGNYAKCESPQEQKNKKLRQIKSEQLCNEEEKEQLDPKPQVSGRPPVIKPEVDSTFCHNYVFPIQTLDCKRKELKKVPNNIPPDIVKLDLSYNKINQLRPKEFEDVHELKKLNLSSNGIEFIDPAAFLGLTHLEELDLSNNSLQNFDYGVLEDLYFLKLLWLRDNPWRCDYNIHYLYYWLKHHYNVHFNGLECKTPEEYKGWSVGKYIRSYYEECPKDKLPAYPESFDQDTEDDEWEKKHRDHTAKKQSVIITIVG

SEQ ID NO: 8025 - protein, 186 aa, Homo Sapiens
MRPQILLLLALLTLGLAAQHQDKVPCKMVDKKVSCQVLGLLQVPSVLPPDTETLDLSGNQLRSILASPLGFYTALRHLDLSTNEISFLQPGAFQALTHLEHLSLAHNRLAMATALSAGGLGPLPRVTSLDLSGNSLYSGLLERLLGEAPSLHTLSLAENSLTRLTRHTFRDMPALEQLDLHSNVLM

SEQ ID NO: 8026 - protein, 662 aa, Homo Sapiens
MRPQILLLLALLTLGLAAQHQDKVPCKMVDKKVSCQVLGLLQVPSVLPPDTETLDLSGNQLRSILASPLGFYTALRHLDLSTNEISFLQPGAFQALTHLEHLSLAHNRLAMATALSAGGLGPLPRVTSLDLSGNSLYSGLLERLLGEAPSLHTLSLAENSLTRLTRHTFRDMPALEQLDLHSNVLMDIEDGAFEGLPRLTHLNLSRNSLTCISDFSLQQLRVLDLSCNSIEAFQTASQPQAEFQLTWLDLRENKLLHFPDLAALPRLIYLNLSNNLIRLPTGPPQDSKGIHAPSEGWSALPLSAPSGNASGRPLSQLLNLDLSYNEIELIPDSFLEHLTSLCFLNLSRNCLRTFEARRLGSLPCLMLLDLSHNALETLELGARALGSLRTLLLQGNALRDLPPYTFANLASLQRLNLQGNRVSPCGGPDEPGPSGCVAFSGITSLRSLSLVDNEIELLRAGAFLHTPLTELDLSSNPGLEVATGALGGLEASLEVLALQGNGLMVLQVDLPCFICLKRLNLAENRLSHLPAWTQAVSLEVLDLRNNSFSLLPGSAMGGLETSLRRLYLQGNPLSCCGNGWLAAQLHQGRVDVDATQDLICRFSSQEEVSLSHVRPEDCEKGGLKNINLIIILTFILVSAILLTTLAACCCVRRQKFNQQYKA

SEQ ID NO: 8027 - protein, 662 aa, Homo Sapiens; identical to SEQ ID NO: 8026

SEQ ID NO: 8028 - protein, 662 aa, Homo Sapiens; identical to SEQ ID NO: 8026

SEQ ID NO: 8029 - protein, 55 aa, Homo Sapiens
MNLVDLWLTRSLSMCLLLQSFVLMILCFHSASMCPKGCLCSSSGGLNVTCSNANL

SEQ ID NO: 8030 - protein, 163 aa, Homo Sapiens
MNLVDLWLTRSLSMCLLLQSFVLMILCFHSASMCPKGCLCSSSGGLNVTCSNANLKEIPRDLPPETVLLYLDSNQITSIPNEIFKDLHQLRVLNLSKNGIEFIDEHAFKGVAETLQTLDLSDNRIQSVHKNAFNNLKARARIANNPWHCDCTLQQVLRSMASN

SEQ ID NO: 8031 - protein, 259 aa, Homo Sapiens
MNLVDLWLTRSLSMCLLLQSFVLMILCFHSASMCPKGCLCSSSGGLNVTCSNANLKEIPRDLPPETVLLYLDSNQITSIPNEIFKDLHQLRVLNLSKNGIEFIDEHAFKGVAETLQTLDLSDNRIQSVHKNAFNNLKARARIANNPWHCDCTLQQVLRSMASNHETAHNVICKTSVLDEHAGRPFLNAANDADLCNLPKKTTDYAMLVTMFGWFTMVISYVVYYVRQNQEDARRHLEYLKSLPSRQKKADEPDDISTVV

SEQ ID NO: 8032 - protein, 259 aa, Homo Sapiens; identical to SEQ ID NO: 8031

SEQ ID NO: 8033 - protein, 259 aa, Homo Sapiens; identical to SEQ ID NO: 8031

SEQ ID NO: 8034 - protein, 238 aa, Homo Sapiens
MARARGSPCPPLPPGRMSWPHGALLFLWLFSPPLGAGGGGVAVTSAAGGGSPPATSCPVACSCSNQASRVICTRRDLAEVPASIPVNTRYLNLQENGIQVIRTDTFKHLRHLEILQLSKNLVRKIEVGAFNGLPSLNTLELFDNRLTTVPTQAFEYLSKLRELWLRNNPIESIPSYAFNRVPSLRRLDLGELKRLEYISEAAFEGLVNLRYLNLGMCNLKDIPNLTALVRLEELELSG

SEQ ID NO: 8035 - protein, 713 aa, Homo Sapiens
MARARGSPCPPLPPGRMSWPHGALLFLWLFSPPLGAGGGGVAVTSAAGGGSPPATSCPVACSCSNQASRVICTRRDLAEVPASIPVNTRYLNLQENGIQVIRTDTFKHLRHLEILQLSKNLVRKIEVGAFNGLPSLNTLELFDNRLTTVPTQAFEYLSKLRELWLRNNPIESIPSYAFNRVPSLRRLDLGELKRLEYISEAAFEGLVNLRYLNLGMCNLKDIPNLTALVRLEELELSGNRLDLIRPGSFQGLTSLRKLWLMHAQVATIERNAFDDLKSLEELNLSHNNLMSLPHDLFTPLHRLERVHLNHNPWHCNCDVLWLSWWLKETVPSNTTCCARCHAPAGLKGRYIGELDQSHFTCYAPVIVEPPTDLNVTEGMAAELKCRTGTSMTSVNWLTPNGTLMTHGSYRVRISVLHDGTLNFTNVTVQDTGQYTCMVTNSAGNTTASATLNVSAVDPVAAGGTGSGGGGPGGSGGVGGGSGGYTYFTTVTVETLETQPGEEALQPRGTEKEPPGPTTDGVWGGGRPGDAAGPASSSTTAPAPRSSRPTEKAFTVPITDVTENALKDLDDVMKTTKIIIGCFVAITFMAAVMLVAFYKLRKQHQLHKHHGPTRTVEIINVEDELPAASAVSVAAAAAVASGGGVGGDSHLALPALERDHLNHHHYVAAAFKAHYSSNPSGGGCGGKGPPGLNSIHEPLLFKSGSKENVQETQI

SEQ ID NO: 8036 - protein, 713 aa, Homo Sapiens; identical to SEQ ID NO: 8035

SEQ ID NO: 8037 - protein, 71 aa, Homo Sapiens
MCGLQFSLPCLRLFLVVTCYLLLLLHKEILGCSSVCQLCTGRQINCRNLGLSSIPKNFPESTVFLLASKGP

SEQ ID NO: 8038 - protein, 622 aa, Homo Sapiens
MCGLQFSLPCLRLFLVVTCYLLLLLHKEILGCSSVCQLCTGRQINCRNLGLSSIPKNFPESTVFLYLTGNNISYINESELTGLHSLVALYLDNSNILYVYPKAFVQLRHLYFLFLNNNFIKRLDPGIFKGLLNLRNLYLQYNQVSFVPRGVFNDLVSVQYLNLQRNRLTVLGSGTFVGMVALRILDLSNNNILRISESGFQHLENLACLYLGSNNLTKVPSNAFEVLKSLRRLSLSHNPIEAIQPFAFKGLANLEYLLLKNSRIRNVTRDGFSGINNLKHLILSHNDLENLNSDTFSLLKNLIYLKLDRNRIISIDNDTFENMGASLKILNLSFNNLTALHPRVLKPLSSLIHLQANSNPWECNCKLLGLRDWLASSAITLNIYCQNPPSMRGRALRYINITNCVTSSINVSRAWAVVKSPHIHHKTTALMMAWHKVTTNGSPLENTETENITFWERIPTSPAGRFFQENAFGNPLETTAVLPVQIQLTTSVTLNLEKNSALPNDAASMSGKTSLICTQEVEKLNEAFDILLAFFILACVLIIFLIYKVVQFKQKLKASENSRENRLEYYSFYQSARYNVTASICNTSPNSLESPGLEQIRLHKQIVPENEAQVILFEHSAL

SEQ ID NO: 8039 - protein, 708 aa, Homo Sapiens
MKDMPLRIHVLLGLAITTLVQAVDKKVDCPRLCTCEIRPWFTPRSIYMEASTVDCNDLGLLTFPARLPANTQILLLQTNNIAKIEYSTDFPVNLTGLDLSQNNLSSVTNINVKKMPQLLSVYLEENKLTELPEKCLSELSNLQELYINHNLLSTISPGAFIGLHNLLRLHLNSNRLQMINSKWFDALPNLEILMIGENPIIRIKDMNFKPLINLRSLVIAGINLTEIPDNALVGLENLESISFYDNRLIKVPHVALQKVVNLKFLDLNKNPINRIRRGDFSNMLHLKELGINNMPELISIDSLAVDNLPDLRKIEATNNPRLSYIHPNAFFRLPKLESLMLNSNALSALYHGTIESLPNLKEISIHSNPIRCDCVIRWMNMNKTNIRFMEPDSLFCVDPPEFQGQNVRQVHFRDMMEICLPLIAPESFPSNLNVEAGSYVSFHCRATAEPQPEIYWITPSGQKLLPNTLTDKFYVHSEGTLDINGVTPKEGGLYTCIATNLVGADLKSVMIKVDGSFPQDNNGSLNIKIRDIQANSVLVSWKASSKILKSSVKWTAFVKTENSHAAQSARIPSDVKVYNLTHLNPSTEYKICIDIPTIYQKNRKKCVNVTTKGLHPDQKEYEKNNTTTLMACLGGLLGIIGVICLISCLSPEMNCDGGHSYVRNYLQKPTFALGELYPPLINLWEAGKEKSTSLKVKATVIGLPTNMS

SEQ ID NO: 8040 - protein, 708 aa, Homo Sapiens; identical to SEQ ID NO: 8039

SEQ ID NO: 8041 - protein, 273 aa, Homo Sapiens
MKDMPLRIHVLLGLAITTLVQAVDKKVDCPRLCTCEIRPWFTPRSIYMEASTVDCNDLGLLTFPARLPANTQILLLQTNNIAKIEYSTDFPVNLTGLDLSQNNLSSVTNINVKKMPQLLSVYLEENKLTELPEKCLSELSNLQELYINHNLLSTISPGAFIGLHNLLRLHLNSNRLQMINSKWFDALPNLEILMIGENPIIRIKDMNFKPLINLRSLVIAGINLTEIPDNALVGLENLESISFYDNRLIKVPHVALQKVVNLKFLDLNKNPIN

SEQ ID NO: 8042 - protein, 708 aa, Homo Sapiens; identical to SEQ ID NO: 8039

SEQ ID NO: 8043 - protein, 109 aa, Homo Sapiens
MDFLLLGLCLYWLLRRPSGVVLCLLGACFQMLPAAPSGCPQLCRCEGRLLYCEALNLTEAPHNLSGLLGLSLRYNSLSELRAGQFTGLMQLTWLYLDHNHICSVQGDAF

SEQ ID NO: 8044 - protein, 183 aa, Homo Sapiens
MDFLLLGLCLYWLLRRPSGVVLCLLGACFQMLPAAPSGCPQLCRCEGRLLYCEALNLTEAPHNLSGLLGLSLRYNSLSELRAGQFTGLMQLTWLYLDHNHICSVQGDAFQKLRRVKELTLSSNQITQLPNTTFRPMPNLRSVDLSYNKLQALAPDLFHGLRKLTTLHMRANAIQFVPVRIFQD

SEQ ID NO: 8045 - protein, 223 aa, Homo Sapiens
MDFLLLGLCLYWLLRRPSGVVLCLLGACFQMLPAAPSGCPQLCRCEGRLLYCEALNLTEAPHNLSGLLGLSLRYNSLSELRAGQFTGLMQLTWLYLDHNHICSVQGDAFQKLRRVKELTLSSNQITQLPNTTFRPMPNLRSVDLSYNKLQALAPDLFHGLRKLTTLHMRANAIQFVPVRIFQDCRSLKFLDIGYNQLKSLARNSFAGLFKLTELHLEHNDLVK

SEQ ID NO: 8046 - protein, 522 aa, Homo Sapiens
MDFLLLGLCLYWLLRRPSGVVLCLLGACFQMLPAAPSGCPQLCRCEGRLLYCEALNLTEAPHNLSGLLGLSLRYNSLSELRAGQFTGLMQLTWLYLDHNHICSVQGDAFQKLRRVKELTLSSNQITQLPNTTFRPMPNLRSVDLSYNKLQALAPDLFHGLRKLTTLHMRANAIQFVPVRIFQDCRSLKFLDIGYNQLKSLARNSFAGLFKLTELHLEHNDLVKVNFAHFPRLISLHSLCLRRNKVAIVVSSLDWVWNLEKMDLSGNEIEYMEPHVFETVPHLQSLQLDSNRLTYIEPRILNSWKSLTSITLAGNLWDCGRNVCALASWLNNFQGRYDGNLQCASPEYAQGEDVLDAVYAFHLCEDGAEPTSGHLLSAVTNRSDLGPPASSATTLADGGEGQHDGTFEPATVALPGGEHAENAVQIHKVVTGTMALIFSFLIVVLVLYVSWKCFPASLRQLRQCFVTQRRKQKQKQTMHQMAAMSAQEYYVDYKPNHIEGALVIINEYGSCTCHQQPARECEV

SEQ ID NO: 8047 - protein, 522 aa, Homo Sapiens; identical to SEQ ID NO: 8046

SEQ ID NO: 8048 - protein, 522 aa, Homo Sapiens; identical to SEQ ID NO: 8046

SEQ ID NO: 8049 - protein, 522 aa, Homo Sapiens; identical to SEQ ID NO: 8046

SEQ ID NO: 8050 - protein, 38 aa, Homo Sapiens
MAVISAPRALLWPSEAADLAFTFQLPADYPSTPVLGLS

SEQ ID NO: 8051 - protein, 516 aa, Homo Sapiens
MGLHFKWPLGAPMLAAIYAMSMVLKMLPALGMACPPKCRCEKLLFYCDSQGFHSVPNATDKGSLGLSLRHNHITELERDQFASFSQLTWLHLDHNQISTVKEDAFQGLYKLKELILSSNKIFYLPNTTFTQLINLQNLDLSFNQLSSLHPELFYGLRKLQTLHLRSNSLRTIPVRLFWDCRSLEFLDLSTNRLRSLARNGFAGLIKLRELHLEHNQLTKINFAHFLRLSSLHTLFLQWNKISNLTCGMEWTWGTLEKLDLTGNEIKAIDLTVFETMPNLKILLMDNNKLNSLDSKILNSLRSLTTVGLSGNLWECSARICALASWLGSFQGRWEHSILCHSPDHTQGEDILDAVHGFQLCWNLSTTVTVMATTYRDPTTEYTKRISSSSYHVGDKEIPTTAGIAVTTEEHFPEPDNAIFTQRVITGTMALLFSFFFIIFIVFISRKCCPPTLRRIRQCSMVQNHRQLRSQTRLHMSNMSDQGPYNEYEPTHEGPFIIINGYGQCKCQQLPYKECEV

SEQ ID NO: 8052 - protein, 77 aa, Homo Sapiens
MVFISRKCCPPTLRRIRQCSMVQNHRQLRSQTRLHMSNMSDQGPYNEYEPTHEGPFIIINGYGQCKCQQLPYKECEV

SEQ ID NO: 8053 - protein, 590 aa, Homo Sapiens
MGFHLITQLKGMSVVLVLLPTLLLVMLTGAQRACPKNCRCDGKIVYCESHAFADIPENISGGSQGLSLRFNSIQKLKSNQFAGLNQLIWLYLDHNYISSVDEDAFQGIRRLKELILSSNKITYLHNKTFHPVPNLRNLDLSYNKLQTLQSEQFKGLRKLIILHLRSNSLKTVPIRVFQDCRNLDFLDLGYNRLRSLSRNAFAGLLKLKELHLEHNQFSKINFAHFPRLFNLRSIYLQWNRIRSISQGLTWTWSSLHNLDLSGNDIQGIEPGTFKCLPNLQKLNLDSNKLTNISQETVNAWISLISITLSGNMWECSRSICPLFYWLKNFKGNKESTMICAGPKHIQGEKVSDAVETYNICSEVQVVNTERSHLVPQTPQKPLIIPRPTIFKPDVTQSTFETPSPSPGFQIPGAEQEYEHVSFHKIIAGSVALFLSVAMILLVIYVSWKRYPASMKQLQQHSLMKRRRKKARESERQMNSPLQEYYVDYKPTNSETMDISVNGSGPCTYTISGSRECEMPHHMKPLPYYSYDQPVIGYCQAHQPLHVTKGYETVSPEQDESPGLELGRDHSFIATIARSAAPAIYLERIAN

SEQ ID NO: 8054 - protein, 518 aa, Homo Sapiens
MGFHLITQLKGMSVVLVLLPTLLLVMLTGAQRACPKNCRCDGKIVYCESHAFADIPENISGGSQGLSLRFNSIQKLKSNQFAGLNQLIWLYLDHNYISSVDEDAFQGIRRLKELILSSNKITYLHNKTFHPVPNLRNLDLSYNKLQTLQSEQFKGLRKLIILHLRSNSLKTVPIRVFQDCRNLDFLDLGYNRLRSLSRNAFAGLLKLKELHLEHNQFSKINFAHFPRLFNLRSIYLQWNRIRSISQGLTWTWSSLHNLDLSGNDIQGIEPGTFKCLPNLQKLNLDSNKLTNISQETVNAWISLISITLSGNMWECSRSICPLFYWLKNFKGNKESTMICAGPKHIQGEKVSDAVETYNICSEVQVVNTERSHLVPQTPQKPLIIPRPTIFKPDVTQSTFETPSPSPGFQIPGAEQEYEHVSFHKIIAGSVALFLSVAMILLVIYVSWKRYPASMKQLQQHSLMKRRRKKARESERQMNSPLQEYYVDYKPTNSETMDISVNGSGPCTYTISGSRECEV

SEQ ID NO: 8055 - protein, 590 aa, Homo Sapiens; identical to SEQ ID NO: 8053

SEQ ID NO: 8056 - protein, 591 aa, Homo Sapiens
MPGFHLITQLKGMSVVLVLLPTLLLVMLTGAQRACPKNCRCDGKIVYCESHAFADIPENISGGSQGLSLRFNSIQKLKSNQFAGLNQLIWLYLDHNYISSVDEDAFQGIRRLKELILSSNKITYLHNKTFHPVPNLRNLDLSYNKLQTLQSEQFKGLRKLIILHLRSNSLKTVPIRVFQDCRNLDFLDLGYNRLRSLSRNAFAGLLKLKELHLEHNQFSKINFAHFPRLFNLRSIYLQWNRIRSISQGLTWTWSSLHNLDLSGNDIQGIEPGTFKCLPNLQKLNLDSNKLTNISQETVNAWISLISITLSGNMWECSRSICPLFYWLKNFKGNKESTMICAGPKHIQGEKVSDAVETYNICSEVQVVNTERSHLVPQTPQKPLIIPRPTIFKPDVTQSTFETPSPSPGFQIPGAEQEYEHVSFHKIIAGSVALFLSVAMILLVIYVSWKRYPASMKQLQQHSLMKRRRKKARESERQMNSPLQEYYVDYKPTNSETMDISVNGSGPCTYTISGSRECEMPHHMKPLPYYSYDQPVIGYCQAHQPLHVTKGYETVSPEQDESPGLELGRDHSFIATIARSAAPAIYLERIAN

SEQ ID NO: 8057 - protein, 519 aa, Homo Sapiens
MPGFHLITQLKGMSVVLVLLPTLLLVMLTGAQRACPKNCRCDGKIVYCESHAFADIPENISGGSQGLSLRFNSIQKLKSNQFAGLNQLIWLYLDHNYISSVDEDAFQGIRRLKELILSSNKITYLHNKTFHPVPNLRNLDLSYNKLQTLQSEQFKGLRKLIILHLRSNSLKTVPIRVFQDCRNLDFLDLGYNRLRSLSRNAFAGLLKLKELHLEHNQFSKINFAHFPRLFNLRSIYLQWNRIRSISQGLTWTWSSLHNLDLSGNDIQGIEPGTFKCLPNLQKLNLDSNKLTNISQETVNAWISLISITLSGNMWECSRSICPLFYWLKNFKGNKESTMICAGPKHIQGEKVSDAVETYNICSEVQVVNTERSHLVPQTPQKPLIIPRPTIFKPDVTQSTFETPSPSPGFQIPGAEQEYEHVSFHKIIAGSVALFLSVAMILLVIYVSWKRYPASMKQLQQHSLMKRRRKKARESERQMNSPLQEYYVDYKPTNSETMDISVNGSGPCTYTISGSRECEV

SEQ ID NO: 8058 - protein, 24 aa, Homo Sapiens
MSVVLVLLPTLLLVMLTGAQRACP

SEQ ID NO: 8059 - protein, 93 aa, Homo Sapiens
MLAPGSSPGQRGRLALQWRQVSWITCWIALYAVEALPTCPFSCKCDSRSLEVDCSGLGLTTVPPDVPAATRTLLLLNNKLSALPSWAFANLSS

SEQ ID NO: 8060 - protein, 96 aa, Homo Sapiens
MLAPGSSPGQRGRLALQWRQVSWITCWIALYAVEALPTCPFSCKCDSRSLEVDCSGLGLTTVPPDVPAATRTLLLLNNKLSALPSWAFANLSSLQR

SEQ ID NO: 8061 - protein, 370 aa, Homo Sapiens
MLAPGSSPGQRGRLALQWRQVSWITCWIALYAVEALPTCPFSCKCDSRSLEVDCSGLGLTTVPPDVPAATRTLLLLNNKLSALPSWAFANLSSLQRLDLSNNFLDRLPRSIFGDLTNLTELQLRNNSIRTLDRDLLRHSPLLRHLDLSINGLAQLPPGLFDGLLALRSLSLRSNRLQNLDRLTFEPLANLQLLQVGDNPWECDCNLREFKHWMEWFSYRGGRLDQLACTLPKELRGKDMRMVPMEMFNYCSQLEDENSSAGLDIPGPPCTKASPEPAKPKPGAEPEPEPSTACPQKQRHRPASVRRAMGTVIIAGVVCGVVCIMMVVAAAYGCIYASLMAKYHRELKKRQPLMGDPEGEHEDQKQISSVA

SEQ ID NO: 8062 - protein, 370 aa, Homo Sapiens; identical to SEQ ID NO: 8061

SEQ ID NO: 8063 - protein, 370 aa, Homo Sapiens; identical to SEQ ID NO: 8061

SEQ ID NO: 8064 - protein, 114 aa, Homo Sapiens
DSVRTVRVVATKQGNAVTLGDYYQGRRITITGNADLTFDQTAWGDSGVYYCSVVSAQDLQGNNEAYAELIVLGRTSGVAELLPGFQAGPIEVYAAGKAATSGVPSIYAPSTYAH

SEQ ID NO: 8065 - protein, 493 aa, Homo Sapiens
MALLAGGLSRGLGSHPAAAGRDAVVFVWLLLSTWCTAPARAIQVTVSNPYHVVILFQPVTLPCTYQMTSTPTQPIVIWKYKSFCRDRIADAFSPASVDNQLNAQLAAGNPGYNPYVECQDSVRTVRVVATKQGNAVTLGDYYQGRRITITGMYAAGKAATSGVPSIYAPSTYAHLSPAKTPPPPAMIPMGPAYNGYPGGYPGDVDRSSSAGGQGSYVPLLRDTDSSVASEVRSGYRIQASQQDDSMRVLYYMEKELANFDPSRPGPPSGRVERAMSEVTSLHEDDWRSRPSRGPALTPIRDEEWGGHSPRSPRGWDQEPAREQAGGGWRARRPRARSVDALDDLTPPSTAESGSRSPTSNGGRSRAYMPPRSRSRDDLYDQDDSRDFPRSRDPHYDDFRSRERPPADPRSHHHRTRDPRDNGSRSGDLPYDGRLLEEAVRKKGSEERRRPHKEEEEEAYYPPAPPPYSETDSQASRERRLKKNLALSRESLVV

SEQ ID NO: 8066 - protein, 601 aa, Homo Sapiens
MALLAGGLSRGLGSHPAAAGRDAVVFVWLLLSTWCTAPARAIQVTVSNPYHVVILFQPVTLPCTYQMTSTPTQPIVIWKYKSFCRDRIADAFSPASVDNQLNAQLAAGNPGYNPYVECQDSVRTVRVVATKQGNAVTLGDYYQGRRITITGNADLTFDQTAWGDSGVYYCSVVSAQDLQGNNEAYAELIVLGRTSGVAELLPGFQAGPIEDWLFVVVVCLAAFLIFLLLGICWCQCCPHTCCCYVRCPCCPDKCCCPEALYAAGKAATSGVPSIYAPSTYAHLSPAKTPPPPAMIPMGPAYNGYPGGYPGDVDRSSSAGGQGSYVPLLRDTDSSVASEVRSGYRIQASQQDDSMRVLYYMEKELANFDPSRPGPPSGRVERAMSEVTSLHEDDWRSRPSRGPALTPIRDEEWGGHSPRSPRGWDQEPAREQAGGGWRARRPRARSVDALDDLTPPSTAESGSRSPTSNGGRSRAYMPPRSRSRDDLYDQDDSRDFPRSRDPHYDDFRSRERPPADPRSHHHRTRDPRDNGSRSGDLPYDGRLLEEAVRKKGSEERRRPHKEEEEEAYYPPAPPPYSETDSQASRERRLKKNLALSRESLVV

SEQ ID NO: 8067 - protein, 591 aa, Homo Sapiens
MQQDGLGVGTRNGSGKGRSVHPSWPWCAPRPLRYFGRDARARRAQTAAMALAIQVTVSNPYHVVILFQPVTLPCTYQMTSTPTQPIVIWKYKSFCRDRIADAFSPASVDNQLNAQLAAGNPGYNPYVECQDSVRTVRVVATKQGNAVTLGDYYQGRRITITGNADLTFDQTAWGDSGVYYCSVVSAQDLQGNNEAYAELIVLGRTSGVAELLPGFQAGPIEDWLFVVVVCLAAFLIFLLLGICWCQCCPHTCCCYVRCPCCPDKCCCPEALYAAGKAATSGVPSIYAPSTYAHLSPAKTPPPPAMIPMGPAYNGYPGGYPGDVDRSSSVRSGYRIQASQQDDSMRVLYYMEKELANFDPSRPGPPSGRVERAMSEVTSLHEDDWRSRPSRGPALTPIRDEEWGGHSPRSPRGWDQEPAREQAGGGWRARRPRARSVDALDDLTPPSTAESGSRSPTSNGGRSRAYMPPRSRSRDDLYDQDDSRDFPRSRDPHYDDFRSRERPPADPRSHHHRTRDPRDNGSRSGDLPYDGRLLEEAVRKKGSEERRRPHKEEEEEAYYPPAPPPYSETDSQASRERRLKKNLALSRESLVV

SEQ ID NO: 8068 - protein, 630 aa, Homo Sapiens
MQQDGLGVGTRNGSGKGRSVHPSWPWCAPRPLRYFGRDARARRAQTAAMALLAGGLSRGLGSHPAAAGRDAVVFVWLLLSTWCTAPARAIQVTVSNPYHVVILFQPVTLPCTYQMTSTPTQPIVIWKYKSFCRDRIADAFSPASVDNQLNAQLAAGNPGYNPYVECQDSVRTVRVVATKQGNAVTLGDYYQGRRITITGNADLTFDQTAWGDSGVYYCSVVSAQDLQGNNEAYAELIVLDWLFVVVVCLAAFLIFLLLGICWCQCCPHTCCCYVRCPCCPDKCCCPEALYAAGKAATSGVPSIYAPSTYAHLSPAKTPPPPAMIPMGPAYNGYPGGYPGDVDRSSSAGGQGSYVPLLRDTDSSVASEVRSGYRIQASQQDDSMRVLYYMEKELANFDPSRPGPPSGRVERAMSEVTSLHEDDWRSRPSRGPALTPIRDEEWGGHSPRSPRGWDQEPAREQAGGGWRARRPRARSVDALDDLTPPSTAESGSRSPTSNGGRSRAYMPPRSRSRDDLYDQDDSRDFPRSRDPHYDDFRSRERPPADPRSHHHRTRDPRDNGSRSGDLPYDGRLLEEAVRKKGSEERRRPHKEEEEEAYYPPAPPPYSETDSQASRERRLKKNLALSRESLVV

SEQ ID NO: 8069 - protein, 629 aa, Homo Sapiens
MQQDGLGVGTRNGSGKGRSVHPSWPWCAPRPLRYFGRDARARRAQTAAMALLAGGLSRGLGSHPAAAGRDAVVFVWLLLSTWCTAPARAIQVTVSNPYHVVILFQPVTLPCTYQMTSTPTQPIVIWKYKSFCRDRIADAFSPASVDNQLNAQLAAGNPGYNPYVECQDSVRTVRVVATKQGNAVTLGDYYQGRRITITGNADLTFDQTAWGDSGVYYCSVVSAQDLQGNNEAYAELIVLDWLFVVVVCLAAFLIFLLLGICWCQCCPHTCCCYVRCPCCPDKCCCPEALYAAGKAATSGVPSIYAPSTYAHLSPAKTPPPPAMIPMGPAYNGYPGGYPGDVDRSSSAGGQGSYVPLLRDTDSSVASVRSGYRIQASQQDDSMRVLYYMEKELANFDPSRPGPPSGRVERAMSEVTSLHEDDWRSRPSRGPALTPIRDEEWGGHSPRSPRGWDQEPAREQAGGGWRARRPRARSVDALDDLTPPSTAESGSRSPTSNGGRSRAYMPPRSRSRDDLYDQDDSRDFPRSRDPHYDDFRSRERPPADPRSHHHRTRDPRDNGSRSGDLPYDGRLLEEAVRKKGSEERRRPHKEEEEEAYYPPAPPPYSETDSQASRERRLKKNLALSRESLVV

SEQ ID NO: 8070 - protein, 649 aa, Homo Sapiens
MQQDGLGVGTRNGSGKGRSVHPSWPWCAPRPLRYFGRDARARRAQTAAMALLAGGLSRGLGSHPAAAGRDAVVFVWLLLSTWCTAPARAIQVTVSNPYHVVILFQPVTLPCTYQMTSTPTQPIVIWKYKSFCRDRIADAFSPASVDNQLNAQLAAGNPGYNPYVECQDSVRTVRVVATKQGNAVTLGDYYQGRRITITGNADLTFDQTAWGDSGVYYCSVVSAQDLQGNNEAYAELIVLGRTSGVAELLPGFQAGPIEDWLFVVVVCLAAFLIFLLLGICWCQCCPHTCCCYVRCPCCPDKCCCPEALYAAGKAATSGVPSIYAPSTYAHLSPAKTPPPPAMIPMGPAYNGYPGGYPGDVDRSSSAGGQGSYVPLLRDTDSSVASEVRSGYRIQASQQDDSMRVLYYMEKELANFDPSRPGPPSGRVERAMSEVTSLHEDDWRSRPSRGPALTPIRDEEWGGHSPRSPRGWDQEPAREQAGGGWRARRPRARSVDALDDLTPPSTAESGSRSPTSNGGRSRAYMPPRSRSRDDLYDQDDSRDFPRSRDPHYDDFRSRERPPADPRSHHHRTRDPRDNGSRSGDLPYDGRLLEEAVRKKGSEERRRPHKEEEEEAYYPPAPPPYSETDSQASRERRLKKNLALSRESLVV

SEQ ID NO: 8071 - protein, 649 aa, Homo Sapiens; identical to SEQ ID NO: 8070

SEQ ID NO: 8072 - protein, 581 aa, Homo Sapiens
MQQDGLGVGTRNGSGKGRSVHPSWPWCAPRPLRYFGRDARARRAQTAAMALLAGGLSRGLGSHPAAAGRDAVVFVWLLLSTWCTAPARAIQVTVSNPYHVVILFQPVTLPCTYQMTSTPTQPIVIWKYKSFCRDRIADAFSPASVDNQLNAQLAAGNPGYNPYVECQDSVRTVRVVATKQGNAVTLGDYYQGRRITITGNADLTFDQTAWGDSGVYYCSVVSAQDLQGNNEAYAELIVLVYAAGKAATSGVPSIYAPSTYAHLSPAKTPPPPAMIPMGPAYNGYPGGYPGDVDRSSSAGGQGSYVPLLRDTDSSVASEVRSGYRIQASQQDDSMRVLYYMEKELANFDPSRPGPPSGRVERAMSEVTSLHEDDWRSRPSRGPALTPIRDEEWGGHSPRSPRGWDQEPAREQAGGGWRARRPRARSVDALDDLTPPSTAESGSRSPTSNGGRSRAYMPPRSRSRDDLYDQDDSRDFPRSRDPHYDDFRSRERPPADPRSHHHRTRDPRDNGSRSGDLPYDGRLLEEAVRKKGSEERRRPHKEEEEEAYYPPAPPPYSETDSQASRERRLKKNLALSRESLVV

SEQ ID NO: 8073 - protein, 51 aa, Homo Sapiens
MQQDGLGVGTRNGSGKGRSVHPSWPWCAPRPLSSCQGHPGDRVQPLPRGDP

SEQ ID NO: 8074 - protein, 139 aa, Homo Sapiens
MTSTPTQPIVIWKYKSFCRDRIADAFSPASVDNQLNAQLAAGNPGYNPYVECQDSVRTVRVVATKQGNAVTLGDYYQGRRITITGNADLTFDQTAWGDSGVYYCSVVSAQDLQGNNEAYAELIVLDWLFVVVVCLAAFL

SEQ ID NO: 8075 - protein, 35 aa, Homo Sapiens
MLSRNDAPSVLVPGPGLLRAGTPLCISAEAASAQQ

SEQ ID NO: 8076 - protein, 36 aa, Homo Sapiens
MLSRNDDICIYGGLGLGGLLLLAVVLLSACLCWLHR

SEQ ID NO: 8077 - protein, 66 aa, Homo Sapiens
MLSRNDDICIYGGLGLGGLLLLAVVLLSACLCWLHRRAPSVLVPGPGLLRAGTPLCISAEAASAQQ

SEQ ID NO: 8078 - protein, 44 aa, Homo Sapiens
MLSRNDDICIYGGLGLGGLLLLAVVLLSACLCWLHRREAASAQQ

SEQ ID NO: 8079 - protein, 59 aa, Homo Sapiens
MLSRNDDICIYGGLGLGGLLLLAVVLLSACLCWLHRRGPGLLRAGTPLCISAEAASAQQ

SEQ ID NO: 8080 - protein, 97 aa, Homo Sapiens
MLSRNDDICIYGGLGLGGLLLLAVVLLSACLCWLHRRVKRLERSWAQGSSEQELHYASLQRLPVPSSEGPDLRGRDKRGTKEDPRADYACIAENKPT

SEQ ID NO: 8081 - protein, 104 aa, Homo Sapiens
MLSRNDDICIYGGLGLGGLLLLAVVLLSACLCWLHRRVKRLERSWHLLSWSQAQGSSEQELHYASLQRLPVPSSEGPDLRGRDKRGTKEDPRADYACIAENKPT

SEQ ID NO: 8082 - protein, 66 aa, Homo Sapiens
MLSRNDDICIYGGLGLGGLLLLAVVLLSACLCWLHRRVKRLERSWRLPVPSSEGPDLRGRDKRGTK

SEQ ID NO: 8083 - protein, 13 aa, Homo Sapiens
MLSRNDEAASAQQ

SEQ ID NO: 8084 - protein, 28 aa, Homo Sapiens
MLSRNDGPGLLRAGTPLCISAEAASAQQ

SEQ ID NO: 8085 - protein, 28 aa, Homo Sapiens
MLSRNDGPGLLRAGTPLCISAEAASAQQ

SEQ ID NO: 8086 - protein, 28 aa, Homo Sapiens
MLSRNDGPGLLRAGTPLCISAEAASAQQ

SEQ ID NO: 8087 - protein, 66 aa, Homo Sapiens
MLSRNDVKRLERSWAQGSSEQELHYASLQRLPVPSSEGPDLRGRDKRGTKEDPRADYACIAENKPT

SEQ ID NO: 8088 - protein, 66 aa, Homo Sapiens; identical to SEQ ID NO: 8087

SEQ ID NO: 8089 - protein, 73 aa, Homo Sapiens
MLSRNDVKRLERSWHLLSWSQAQGSSEQELHYASLQRLPVPSSEGPDLRGRDKRGTKEDPRADYACIAENKPT

SEQ ID NO: 8090 - protein, 51 aa, Homo Sapiens
MLSRNDVKRLERSWRLPVPSSEGPDLRGRDKRGTKEDPRADYACIAENKPT

SEQ ID NO: 8091 - protein, 60 aa, Homo Sapiens
  misc_feature (1)..(1): Xaa can be any naturally occurring amino acid
XDICIYGGLGLGGLLLLAVVLLSACLCWLHRREAGEELGPGLLRAGTPLCISAEAASAQQ

SEQ ID NO: 8092 - protein, 35 aa, Homo Sapiens
  misc_feature (1)..(1): Xaa can be any naturally occurring amino acid
XGGLLLLAVVLLSACLCWLHRREAGEELEAASAQQ

SEQ ID NO: 8093 - protein, 205 aa, Homo Sapiens
MTPPERLFLPRVCGTTLHLLLLGLLLVLLPGAQGLPGVGLTPSAAQTARQHPKMHLAHSTLKPAAHLIGDPSKQNSLLWRANTDRAFLQDGFSLSNNSLLVPTSGIYFVYSQVVFSGKAYSPKATSSPLYLAHEVQLFSSQYPFHVPLLSSQKMVYPGLQEPWLHSMYHGAAFQLTQGDQLSTHTDGIPHLVLSPSTVFFGAFAL

SEQ ID NO: 8094 - protein, 205 aa, Homo Sapiens; identical to SEQ ID NO: 8093

SEQ ID NO: 8095 - protein, 270 aa, Homo Sapiens
ECQHRHLCAHGQCRNTEGSFQCVCDQGYRASGLGDHCEDINECLEDKSVCQRGDCINTAGSYDCTCPDGFQLDDNKTCQDINECEHPGLCGPQGECLNTEGSFHCVCQQGFSISADGRTCEDVNECELLSGVCGEAFCENVEGSFLCVCADENQEYSPMTGQCRSRTSTDLDVDVDQPKEEKKECYYNLNDASLCDNVLAPNVTKQECCCTSGVGWGDNCEIFPCPVLGTAEFTEMCPKGKGFVPAGESSSEAGGENYKDADECLLFGQE

SEQ ID NO: 8096 - protein, 1721 aa, Homo Sapiens
MAGAWLRWGLLLWAGLLASSAHGRLRRITYVVHPGPGLAAGALPLSGPPRSRTFNVALNARYSRSSAAAGAPSRASPGVPSERTRRTSKPGGAALQGLRPPPPPPPEPARPAVPGGQLHPNPGGHPAAAPFTKQGRQVVRSKVPQETQSGGGSRLQVHQKQQLQGVNVCGGRCCHGWSKAPGSQRCTKPSCVPPCQNGGMCLRPQLCVCKPGTKGKACETIAAQDTSSPVFGGQSPGAASSWGPPEQAAKHTSSKKADTLPRVSPVAQMTLTLKPKPSVGLPQQIHSQVTPLSSQSVVIHHGQTQEYVLKPKYFPAQKGISGEQSTEGSFPLRYVQDQVAAPFQLSNHTGRIKVVFTPSICKVTCTKGSCQNSCEKGNTTTLISENGHAADTLTATNFRVVICHLPCMNGGQCSSRDKCQCPPNFTGKLCQIPVHGASVPKLYQHSQQPGKALGTHVIHSTHTLPLTVTSQQGVKVKFPPNIVNIHVKHPPEASVQIHQVSRIDGPTGQKTKEAQPGQSQVSYQGLPVQKTQTIHSTYSHQQVIPHVYPVAAKTQLGRCFQETIGSQCGKALPGLSKQEDCCGTVGTSWGFNKCQKCPKKPSYHGYNQMMECLPGYKRVNNTFCQDINECQLQGVCPNGECLNTMGSYRCTCKIGFGPDPTFSSCVPDPPVISEEKGPCYRLVSSGRQCMHPLSVHLTKQLCCCSVGKAWGPHCEKCPLPGTAAFKEICPGGMGYTVSGVHRRRPIHHHVGKGPVFVKPKNTQPVAKSTHPPPLPAKEEPVEALTFSREHGPGVAEPEVATAPPEKEIPSLDQEKTKLEPGQPQLSPGISTIHLHPQFPVVIEKTSPPVPVEVAPEASTSSASQVIAPTQVTEINECTVNPDICGAGHCINLPVRYTCICYEGYRFSEQQRKCVDIDECTQVQHLCSQGRCENTEGSFLCICPAGFMASEEGTNCIDVDECLRPDVCGEGHCVNTVGAFRCEYCDSGYRMTQRGRCEDIDECLNPSTCPDEQCVNSPGSYQCVPCTEGFRGWNGQCLDVDECLEPNVCANGDCSNLEGSYMCSCHKGYTRTPDHKHCRDIDECQQGNLCVNGQCKNTEGSFRCTCGQGYQLSAAKDQCEDIDECQHRHLCAHGQCRNTEGSFQCVCDQGYRASGLGDHCEDINECLEDKSVCQRGDCINTAGSYDCTCPDGFQLDDNKTCQDINECEHPGLCGPQGECLNTEGSFHCVCQQGFSISADGRTCEDIDECVNNTVCDSHGFCDNTAGSFRCLCYQGFQAPQDGQGCVDVNECELLSGVCGEAFCENVEGSFLCVCADENQEYSPMTGQCRSRTSTDLDVDVDQPKEEKKECYYNLNDASLCDNVLAPNVTKQECCCTSGVGWGDNCEIFPCPVLGTAEFTEMCPKGKGFVPAGESSSEAGGENYKDADECLLFGQEICKNGFCLNTRPGYECYCKQGTYYDPVKLQCFDMDECQDPSSCIDGQCVNTEGSYNCFCTHPMVLDASEKRCIRPAESNEQIEETDVYQDLCWEHLSDEYVCSRPLVGKQTTYTECCCLYGEAWGMQCALCPLKDSDDYAQLCNIPVTGRRQPYGRDALVDFSEQYTPEADPYFIQDRFLNSFEELQAEECGILNGCENGRCVRVQEGYTCDCFDGYHLDTAKMTCVDVNECDELNNRMSLCKNAKCINTDGSYKCLCLPGYVPSDKPNYCTPLNTALNLEKDSDLE

SEQ ID NO: 8097 - protein, 1395 aa, Homo Sapiens
MDTKLMCLLFFFSLPPLLVSNHTGRIKVVFTPSICKVTCTKGSCQNSCEKGNTTTLISENGHAADTLTATNFRVVICHLPCMNGGQCSSRDKCQCPPNFTGKLCQIPVHGASVPKLYQHSQQPGKALGTHVIHSTHTLPLTVTSQQGVKVKFPPNIVNIHVKHPPEASVQIHQVSRIDGPTGQKTKEAQPGQSQVSYQGLPVQKTQTIHSTYSHQQVIPHVYPVAAKTQLGRCFQETIGSQCGKALPGLSKQEDCCGTVGTSWGFNKCQKCPKKPSYHGYNQMMECLPGYKRVNNTFCQDINECQLQGVCPNGECLNTMGSYRCTCKIGFGPDPTFSSCVPDPPVISEEKGPCYRLVSSGRQCMHPLSVHLTKQLCCCSVGKAWGPHCEKCPLPGTAAFKEICPGGMGYTVSGVHRRRPIHHHVGKGPVFVKPKNTQPVAKSTHPPPLPAKEEPVEALTFSREHGPGVAEPEVATAPPEKEIPSLDQEKTKLEPGQPQLSPGISTIHLHPQFPVVIEKTSPPVPVEVAPEASTSSASQVIAPTQVTEINECTVNPDICGAGHCINLPVRYTCICYEGYRFSEQQRKCVDIDECTQVQHLCSQGRCENTEGSFLCICPAGFMASEEGTNCIDVDECLRPDVCGEGHCVNTVGAFRCEYCDSGYRMTQRGRCEDIDECLNPSTCPDEQCVNSPGSYQCVPCTEGFRGWNGQCLDVDECLEPNVCANGDCSNLEGSYMCSCHKGYTRTPDHKHCRDIDECQQGNLCVNGQCKNTEGSFRCTCGQGYQLSAAKDQCEDIDECQHRHLCAHGQCRNTEGSFQCVCDQGYRASGLGDHCEDINECLEDKSVCQRGDCINTAGSYDCTCPDGFQLDDNKTCQDINECEHPGLCGPQGECLNTEGSFHCVCQQGFSISADGRTCEDIDECVNNTVCDSHGFCDNTAGSFRCLCYQGFQAPQDGQGCVDVNECELLSGVCGEAFCENVEGSFLCVCADENQEYSPMTGQCRSRTSTDLDVDVDQPKEEKKECYYNLNDASLCDNVLAPNVTKQECCCTSGVGWGDNCEIFPCPVLGTAEFTEMCPKGKGFVPAGESSSEAGGENYKDADECLLFGQEICKNGFCLNTRPGYECYCKQGTYYDPVKLQCFDMDECQDPSSCIDGQCVNTEGSYNCFCTHPMVLDASEKRCIRPAESNEQIEETDVYQDLCWEHLSDEYVCSRPLVGKQTTYTECCCLYGEAWGMQCALCPLKDSDDYAQLCNIPVTGRRQPYGRDALVDFSEQYTPEADPYFIQDRFLNSFEELQAEECGILNGCENGRCVRVQEGYTCDCFDGYHLDTAKMTCVDVNECDELNNRMSLCKNAKCINTDGSYKCLCLPGYVPSDKPNYCTPLNTALNLEKDSDLE

SEQ ID NO: 8098 - protein, 1353 aa, Homo Sapiens
MDTKLMCLLFFFSLPPLLVSNHTGRIKVVFTPSICKVTCTKGSCQNSCEKGNTTTLISENGHAADTLTATNFRVVICHLPCMNGGQCSSRDKCQCPPNFTGKLCQIPVHGASVPKLYQHSQQPGKALGTHVIHSTHTLPLTVTSQQGVKVKFPPNIVNIHVKHPPEASVQIHQVSRIDGPTGQKTKEAQPGQSQVSYQGLPVQKTQTIHSTYSHQQVIPHVYPVAAKTQLGRCFQETIGSQCGKALPGLSKQEDCCGTVGTSWGFNKCQKCPKKPSYHGYNQMMECLPGYKRVNNTFCQDINECQLQGVCPNGECLNTMGSYRCTCKIGFGPDPTFSSCVPDPPVISEEKGPCYRLVSSGRQCMHPLSVHLTKQLCCCSVGKAWGPHCEKCPLPGTAAFKEICPGGMGYTVSGVHRRRPIHHHVGKGPVFVKPKNTQPVAKSTHPPPLPAKEEPVEALTFSREHGPGVAEPEVATAPPEKEIPSLDQEKTKLEPGQPQLSPGISTIHLHPQFPVVIEKTSPPVPVEVAPEASTSSASQVIAPTQVTEINECTVNPDICGAGHCINLPVRYTCICYEGYRFSEQQRKCVDIDECTQVQHLCSQGRCENTEGSFLCICPAGFMASEEGTNCIDVDECLRPDVCGEGHCVNTVGAFRCEYCDSGYRMTQRGRCEDIDECLNPSTCPDEQCVNSPGSYQCVPCTEGFRGWNGQCLDVDECLEPNVCANGDCSNLEGSYMCSCHKGYTRTPDHKHCRDIDECQQGNLCVNGQCKNTEGSFRCTCGQGYQLSAAKDQCEDIDECQHRHLCAHGQCRNTEGSFQCVCDQGYRASGLGDHCEDINECLEDKSVCQRGDCINTAGSYDCTCPDGFQLDDNKTCQDINECEHPGLCGPQGECLNTEGSFHCVCQQGFSISADGRTCEDVNECELLSGVCGEAFCENVEGSFLCVCADENQEYSPMTGQCRSRTSTDLDVDVDQPKEEKKECYYNLNDASLCDNVLAPNVTKQECCCTSGVGWGDNCEIFPCPVLGTAEFTEMCPKGKGFVPAGESSSEAGGENYKDADECLLFGQEICKNGFCLNTRPGYECYCKQGTYYDPVKLQCFDMDECQDPSSCIDGQCVNTEGSYNCFCTHPMVLDASEKRCIRPAESNEQIEETDVYQDLCWEHLSDEYVCSRPLVGKQTTYTECCCLYGEAWGMQCALCPLKDSDDYAQLCNIPVTGRRQPYGRDALVDFSEQYTPEADPYFIQDRFLNSFEELQAEECGILNGCENGRCVRVQEGYTCDCFDGYHLDTAKMTCVDVNECDELNNRMSLCKNAKCINTDGSYKCLCLPGYVPSDKPNYCTPLNTALNLEKDSDLE

SEQ ID NO: 8099 - protein, 1342 aa, Homo Sapiens
MDTKLMCLLFFFSLPPLLVSNHTGRIKVVFTPSICKVTCTKGSCQNSCEKGNTTTLISENGHAADTLTATNFRVVICHLPCMNGGQCSSRDKCQCPPNFTGKLCQIPVHGASVPKLYQHSQQPGKALGTHVIHSTHTLPLTVTSQQGVKVKFPPNIVNIHVKHPPEASVQIHQVSRIDGPTGQKTKEAQPGQSQVSYQGLPVQKTQTIHSTYSHQQVIPHVYPVAAKTQLGRCFQETIGSQCGKALPGLSKQEDCCGTVGTSWGFNKCQKCPKKPSYHGYNQMMECLPGYKRVNNTFCQDINECQLQGVCPNGECLNTMGSYRCTCKIGFGPDPTFSSCVPDPPVISEEKGPCYRLVSSGRQCMHPLSVHLTKQLCCCSVGKAWGPHCEKCPLPGTAKEEPVEALTFSREHGPGVAEPEVATAPPEKEIPSLDQEKTKLEPGQPQLSPGISTIHLHPQFPVVIEKTSPPVPVEVAPEASTSSASQVIAPTQVTEINECTVNPDICGAGHCINLPVRYTCICYEGYRFSEQQRKCVDIDECTQVQHLCSQGRCENTEGSFLCICPAGFMASEEGTNCIDVDECLRPDVCGEGHCVNTVGAFRCEYCDSGYRMTQRGRCEDIDECLNPSTCPDEQCVNSPGSYQCVPCTEGFRGWNGQCLDVDECLEPNVCANGDCSNLEGSYMCSCHKGYTRTPDHKHCRDIDECQQGNLCVNGQCKNTEGSFRCTCGQGYQLSAAKDQCEDIDECQHRHLCAHGQCRNTEGSFQCVCDQGYRASGLGDHCEDINECLEDKSVCQRGDCINTAGSYDCTCPDGFQLDDNKTCQDINECEHPGLCGPQGECLNTEGSFHCVCQQGFSISADGRTCEDIDECVNNTVCDSHGFCDNTAGSFRCLCYQGFQAPQDGQGCVDVNECELLSGVCGEAFCENVEGSFLCVCADENQEYSPMTGQCRSRTSTDLDVDVDQPKEEKKECYYNLNDASLCDNVLAPNVTKQECCCTSGVGWGDNCEIFPCPVLGTAEFTEMCPKGKGFVPAGESSSEAGGENYKDADECLLFGQEICKNGFCLNTRPGYECYCKQGTYYDPVKLQCFDMDECQDPSSCIDGQCVNTEGSYNCFCTHPMVLDASEKRCIRPAESNEQIEETDVYQDLCWEHLSDEYVCSRPLVGKQTTYTECCCLYGEAWGMQCALCPLKDSDDYAQLCNIPVTGRRQPYGRDALVDFSEQYTPEADPYFIQDRFLNSFEELQAEECGILNGCENGRCVRVQEGYTCDCFDGYHLDTAKMTCVDVNECDELNNRMSLCKNAKCINTDGSYKCLCLPGYVPSDKPNYCTPLNTALNLEKDSDLE

SEQ ID NO: 8100 - protein, 1340 aa, Homo Sapiens
MDTKLMCLLFFFSLPPLLVSNHTGRIKVVFTPSICKVTCTKGSCQNSCEKGNTTTLISENGHAADTLTATNFRVVICHLPCMNGGQCSSRDKCQCPPNFTGKLCQIPVHGASVPKLYQHSQQPGKALGTHVIHSTHTLPLTVTSQQGVKVKFPPNIVNIHVKHPPEASVQIHQVSRIDGPTGQKTKEAQPGQSQVSYQGLPVQKTQTIHSTYSHQQVIPHVYPVAAKTQLGRCFQETIGSQCGKALPGLSKQEDCCGTVGTSWGFNKCQKCPKKPSYHGYNQMMECLPGYKRVNNTFCQDINECQLQGVCPNGECLNTMGSYRCTCKIGFGPDPTFSSCVPDPPVISEEKGPCYRLVSSGRQCMHPLSVHLTKQLCCCSVGKAWGPHCEKCPLPGTAKEEPVEALTFSREHGPGVAEPEVATAPPEKEIPSLDQEKTKLEPGQPQLSPGISTIHLHPQFPVVIEKTSPPVPVEVAPEASTSSASQVIAPTQVTEINECTVNPDICGAGHCINLPVRYTCICYEGYRFSEQQRKCVDIDECTQVQHLCSQGRCENTEGSFLCICPAGFMASEEGTNCIDVDECLRPDVCGEGHCVNTVGAFRCEYCDSGYRMTQRGRCEDIDECLNPSTCPDEQCVNSPGSYQCVPCTEGFRGWNGQCLDVDECLEPNVCANGDCSNLEGSYMCSCHKGYTRTPDHKHCRDIDECQQGNLCVNGQCKNTEGSFRCTCGQGYQLSAAKDQCEDIDECQHRHLCAHGQCRNTEGSFQCVCDQGYRASGLGDHCEDINECLEDKSVCQRGDCINTAGSYDCTCPDGFQLDDNKTCQDINECEHPGLCGPQGECLNTEGSFHCVCQQGFSISADGRTCEDIDECVNNTVCDSHGFCDNTAGSFRCLCYQGFQAPQDGQGCVDVNECELLSGVCGEAFCENVEGSFLCVCADENQEYSPMTGQCRSRTSTDVDVDQPKEEKKECYYNLNDASLCDNVLAPNVTKQECCCTSGVGWGDNCEIFPCPVLGTAEFTEMCPKGKGFVPAGESSSEAGGENYKDADECLLFGQEICKNGFCLNTRPGYECYCKQGTYYDPVKLQCFDMDECQDPSSCIDGQCVNTEGSYNCFCTHPMVLDASEKRCIRPAESNEQIEETDVYQDLCWEHLSDEYVCSRPLVGKQTTYTECCCLYGEAWGMQCALCPLKDSDDYAQLCNIPVTGRRQPYGRDALVDFSEQYTPEADPYFIQDRFLNSFEELQAEECGILNGCENGRCVRVQEGYTCDCFDGYHLDTAKMTCVDVNECDELNNRMSLCKNAKCINTDGSYKCLCLPGYVPSDKPNYCTPLNTALNLEKDSDLE

SEQ ID NO: 8101 - protein, 219 aa, Homo Sapiens
MGSYRCTCKIGFGPDPTFSSCVPDPPVISEEKGPCYRLVSSGRQCMHPLSVHLTKQLCCCSVGKAWGPHCEKCPLPGTGKGPVFVKPKNTQPVAKSTHPPPLPAKEEPVEALTFSREHGPGVAEPEVATAPPEKEIPSLDQEKTKLEPGQPQLSPGISTIHLHPQFPVVIEKTSPPVPVEVAPEASTSSASQVIAPTQVTEINECTVNPDICGAGHCIN

SEQ ID NO: 8102 - protein, 101 aa, Homo Sapiens
MNGGQCSSRDKCQCPPNFTGKLCQIPVHGASVPKLYQHSQQPGKALGTHVIHSTHTLPLTVTSQQGVKVKFPPNIVNIHVKHPPEASVQIHQVSRIDGPTG

SEQ ID NO: 8103 - protein, 221 aa, Homo Sapiens
SSGRQCMHPLSVHLTKQLCCCSVGKAWGPHCEKCPLPGTAAFKEICPGGMGYTVSGVHRRRPIHHHVGKGPVFVKPKNTQPVAKSTHPPPLPAKEEPVEALTFSREHGPGVAEPEVATAPPEKEIPSLDQEKTKLEPGQPQLSPGISTIHLHPQFPGIVIEKTSPPVPVEVAPEASTSSASQVIAPTQVTEINECTVNPDICGAGHCINLPVRYTCICYEG

SEQ ID NO: 8104 - protein, 267 aa, Homo Sapiens
  misc_feature (1)..(1): Xaa can be any naturally occurring amino acid
XGRCEDIDECLNPSTCPDEQCVNSPGSYQCVPCTEGFRGWNGQCLDIDECQQGNLCVNGQCKNTEGSFRCTCGQGYQLSAAKDQCEDIDECQHRHLCAHGQCRNTEGSFQCVCDQGYRASGLGDHCEDINECLEDKSVCQRGDCINTAGSYDCTCPDGFQLDDNKTCQDINECEHPGLCGPQGECLNTEGSFHCVCQQGFSISADGRTCEDIDECVNNTVCDSHGFCDNTAGSFRCLCYQGFQAPQDGQGCVDVNECELLSGVCGEA

SEQ ID NO: 8105 - protein, 1821 aa, Homo Sapiens
MRPRTKARSPGRALRNPWRGFLPLTLALFVGAGHAQRDPVGRYEPAGGDANRLRRPGGSYPAAAAAKVYSLFREQDAPVAGLQPVERAQPGWGSPRRPTEAEARRPSRAQQSRRVQPPAQTRRSTPLGQQQPAPRTRAAPALPRLGTPQRSGAAPPTPPRGRLTGRNVCGGQCCPGWTTANSTNHCIKPVCEPPCQNRGSCSRPQLCVCRSGFRGARCEEVIPDEEFDPQNSRLAPRRWAERSPNLRRSSAAGEGTLARAQPPAPQSPPAPQSPPAGTLSGLSQTHPSQQHVGLSRTVRLHPTATASSQLSSNALPPGPGLEQRDGTQQAVPLEHPSSPWGLNLTEKIKKIKIVFTPTICKQTCARGHCANSCERGDTTTLYSQGGHGHDPKSGFRIYFCQIPCLNGGRCIGRDECWCPANSTGKFCHLPIPQPDREPPGRGSRPRALLEAPLKQSTFTLPLSNQLASVNPSLVKVHIHHPPEASVQIHQVAQVRGGVEEALVENSVETRPPPWLPASPGHSLWDSNNIPARSGEPPRPLPPAAPRPRGLLGRCYLNTVNGQCANPLLELTTQEDCCGSVGAFWGVTLCAPCPPRPASPVIENGQLECPQGYKRLNLTHCQDINECLTLGLCKDAECVNTRGSYLCTCRPGLMLDPSRSRCVSDKAISMLQGLCYRSLGPGTCTLPLAQRITKQICCCSRVGKAWGSECEKCPLPGTEAFREICPAGHGYTYASSDIRLSMRKAEEEELARPPREQGQRSSGALPGPAERQPLRVVTDTWLEAGTIPDKGDSQAGQVTTSVTHAPAWVTGNATTPPMPEQGIAEIQEEQVTPSTDVLVTLSTPGIDRCAAGATNVCGPGTCVNLPDGYRCVCSPGYQLHPSQAYCTDDNECLRDPCKGKGRCINRVGSYSCFCYPGYTLATSGATQECQDINECEQPGVCSGGQCTNTEGSYHCECDQGYIMVRKGHCQDINECRHPGTCPDGRCVNSPGSYTCLACEEGYRGQSGSCVDVNECLTPGVCAHGKCTNLEGSFRCSCEQGYEVTSDEKGCQDVDECASRASCPTGLCLNTEGSFACSACENGYWVNEDGTACEDLDECAFPGVCPSGVCTNTAGSFSCKDCDGGYRPSPLGDSCEDVDECEDPQSSCLGGECKNTVGSYQCLCPQGFQLANGTVCEDVNECMGEEHCAPHGECLNSHGSFFCLCAPGFVSAEGGTSCQDVDECATTDPCVGGHCVNTEGSFNCLCETGFQPSPESGECVDIDECEDYGDPVCGTWKCENSPGSYRCVLGCQPGFHMAPNGDCIDIDECANDTMCGSHGFCDNTDGSFRCLCDQGFEISPSGWDCVDVNECELMLAVCGAALCENVEGSFLCLCASDLEEYDAQEGHCRPRGAGGQSMSEAPTGDHAPAPTRMDCYSGQKGHAPCSSVLGRNTTQAECCCTQGASWGDACDLCPSEDSAEFSEICPSGKGYIPVEGAWTFGQTMYTDADECVIFGPGLCPNGRCLNTVPGYVCLCNPGFHYDASHKKCEDHDECQDLACENGECVNTEGSFHCFCSPPLTLDLSQQRCMNSTSSTEDLPDHDIHMDICWKKVTNDVCSEPLRGHRTTYTECCCQDGEAWSQQCALCPPRSSEVYAQLCNVARIEAEREAGVHFRPGYEYGPGPDDLHYSIYGPDGAPFYNYLGPEDTVPEPAFPNTAGHSADRTPILESPLQPSELQPHYVASHPEPPAGFEGLQAEECGILNGCENGRCVRVREGYTCDCFEGFQLDAAHMACVDVNECDDLNGPAVLCVHGYCENTEGSYRCHCSPGYVAEAGPPHCTAKE

SEQ ID NO: 8106 - protein, 1769 aa, Homo Sapiens
MRPRTKARSPGRALRNPWRGFLPLTLALFVGAGHAQRDPVGRYEPAGGDANRLRRPGGSYPAAAAAKVYSLFREQDAPVAGLQPVERAQPGWGSPRRPTEAEARRPSRAQQSRRVQPPAQTRRSTPLGQQQPAPRTRAAPALPRLGTPQRSGAAPPTPPRGRLTGRNVCGGQCCPGWTTANSTNHCIKPVCEPPCQNRGSCSRPQLCVCRSGFRGARCEEVIPDEEFDPQNSRLAPRRWAERSPNLRRSSAAGEGTLARAQPPAPQSPPAPQSPPAGTLSGLSQTHPSQQHVGLSRTVRLHPTATASSQLSSNALPPGPGLEQRDGTQQAVPLEHPSSPWGLNLTEKIKKIKIVFTPTICKQTCARGHCANSCERGDTTTLYSQGGHGHDPKSGFRIYFCQIPCLNGGRCIGRDECWCPANSTGKFCHLPIPQPDREPPGRGSRPRALLEAPLKQSTFTLPLSNQLASVNPSLVKVHIHHPPEASVQIHQVAQVRGGVEEALVENSVETRPPPWLPASPGHSLWDSNNIPARSGEPPRPLPPAAPRPRGLLGRCYLNTVNGQCANPLLELTTQEDCCGSVGAFWGVTLCAPCPPRPASPVIENGQLECPQGYKRLNLTHCQDINECLTLGLCKDAECVNTRGSYLCTCRPGLMLDPSRSRCVSDKAISMLQGLCYRSLGPGTCTLPLAQRITKQICCCSRVGKAWGSECEKCPLPGTEAFREICPAGHGYTYASSDIRLSMRKAEEEELARPPREQGQRSSGALPGPAERQPLRVVTDTWLEAGTIPDKGDSQAGQVTTSVTHAPAWVTGNATTPPMPEQGIAEIQEEQVTPSTDVLVTLSTPGIDRCAAGATNVCGPGTCVNLPDGYRCVCSPGYQLHPSQAYCTDDNECLRDPCKGKGRCINRVGSYSCFCYPGYTLATSGATQECQDINECEQPGVCSGGQCTNTEGSYHCECDQGYIMVRKGHCQDINECRHPGTCPDGRCVNSPGSYTCLACEEGYRGQSGSCVDVNECLTPGVCAHGKCTNLEGSFRCSCEQGYEVTSDEKGCQDVDECASRASCPTGLCLNTEGSFACSACENGYWVNEDGTACEDLDECAFPGVCPSGVCTNTAGSFSCKDCDGGYRPSPLGDSCEDVDECEDPQSSCLGGECKNTVGSYQCLCPQGFQLANGTVCEDVNECMGEEHCAPHGECLNSHGSFFCLCAPGFVSAEGGTSCQDVDECATTDPCVGGHCVNTEGSFNCLCETGFQPSPESGECVDIDECEDYGDPVCGTWKCENSPGSYRCVLGCQPGFHMAPNGDCIDIDECANDTMCGSHGFCDNTDGSFRCLCDQGFEISPSGWDCVDVNECELMLAVCGAALCENVEGSFLCLCASDLEEYDAQEGHCRPRGAGGQSMSEAPTGDHAPAPTRMDCYSGQKGHAPCSSVLGRNTTQAECCCTQGASWGDACDLCPSEDSAEFSEICPSGKGYIPVEGAWTFGQTMYTDADECVIFGPGLCPNGRCLNTVPGYVCLCNPGFHYDASHKKCEDHDECQDLACENGECVNTEGSFHCFCSPPLTLDLSQQRCMNSTSSTEDLPDHDIHMDICWKKVTNDVCSEPLRGHRTTYTECCCQDGEAWSQQCALCPPRSSEVYAQLCNVARIEAEREAGVHFRPGYEYGPGPDDLHYSIYGPDGAPFYNYLGPEDTVPEPAFPNTAGHSADRTPILESPLQPSELQPHYVASHPGLCCCKTGEEVGTKAVSLPSPPPASHIASRSPQPASKGFRRRSAAS

SEQ ID NO: 8107 - protein, 1777 aa, Homo Sapiens
MRPRTKARSPGRALRNPWRGFLPLTLALFVGAGHAQRDPVGRYEPAGGDANRLRRPGGSYPAAAAAKVYSLFREQDAPVAGLQPVERAQPGWGSPRRPTEAEARRPSRAQQSRRVQPPAQTRRSTPLGQQQPAPRTRAAPALPRLGTPQRSGAAPPTPPRGRLTGRNVCGGQCCPGWTTANSTNHCIKPVCEPPCQNRGSCSRPQLCVCRSGFRGARCEEVIPDEEFDPQNSRLAPRRWAERSPNLRRSSAAGEGTLARAQPPAPQSPPAPQSPPAGTLSGLSQTHPSQQHVGLSRTVRLHPTATASSQLSSNALPPGPGLEQRDGTQQAVPLEHPSSPWGLNLTEKIKKIKIVFTPTICKQTCARGHCANSCERGDTTTLYSQGGHGHDPKSGFRIYFCQIPCLNGGRCIGRDECWCPANSTGKFCHLPIPQPDREPPGRGSRPRALLEAPLKQSTFTLPLSNQLASVNPSLVKVHIHHPPEASVQIHQVAQVRGGVEEALVENSVETRPPPWLPASPGHSLWDSNNIPARSGEPPRPLPPAAPRPRGLLGRCYLNTVNGQCANPLLELTTQEDCCGSVGAFWGVTLCAPCPPRPASPVIENGQLECPQGYKRLNLTHCQDINECLTLGLCKDAECVNTRGSYLCTCRPGLMLDPSRSRCVSDKAISMLQGLCYRSLGPGTCTLPLAQRITKQICCCSRVGKAWGSECEKCPLPGTEAFREICPAGHGYTYASSDIRLSMRKAEEEELARPPREQGQRSSGALPGPAERQPLRVVTDTWLEAGTIPDKGDSQAGQVTTSVTHAPAWVTGNATTPPMPEQGIAEIQEEQVTPSTDVLVTLSTPGIDRCAAGATNVCGPGTCVNLPDGYRCVCSPGYQLHPSQAYCTDDNECLRDPCKGKGRCINRVGSYSCFCYPGYTLATSGATQECQDINECEQPGVCSGGQCTNTEGSYHCECDQGYIMVRKGHCQDINECRHPGTCPDGRCVNSPGSYTCLACEEGYRGQSGSCVDVNECLTPGVCAHGKCTNLEGSFRCSCEQGYEVTSDEKGCQDVDECASRASCPTGLCLNTEGSFACSACENGYWVNEDGTACEDLDECAFPGVCPSGVCTNTAGSFSCKDCDGGYRPSPLGDSCEDVDECEDPQSSCLGGECKNTVGSYQCLCPQGFQLANGTVCEDVNECMGEEHCAPHGECLNSHGSFFCLCAPGFVSAEGGTSCQDVDECATTDPCVGGHCVNTEGSFNCLCETGFQPSPESGECVDIDECANDTMCGSHGFCDNTDGSFRCLCDQGFEISPSGWDCVDVNECELMLAVCGAALCENVEGSFLCLCASDLEEYDAQEGHCRPRGAGGQSMSEAPTGDHAPAPTRMDCYSGQKGHAPCSSVLGRNTTQAECCCTQGASWGDACDLCPSEDSAEFSEICPSGKGYIPVEGAWTFGQTMYTDADECVIFGPGLCPNGRCLNTVPGYVCLCNPGFHYDASHKKCEDHDECQDLACENGECVNTEGSFHCFCSPPLTLDLSQQRCMNSTSSTEDLPDHDIHMDICWKKVTNDVCSEPLRGHRTTYTECCCQDGEAWSQQCALCPPRSSEVYAQLCNVARIEAEREAGVHFRPGYEYGPGPDDLHYSIYGPDGAPFYNYLGPEDTVPEPAFPNTAGHSADRTPILESPLQPSELQPHYVASHPEPPAGFEGLQAEECGILNGCENGRCVRVREGYTCDCFEGFQLDAAHMACVDVNECDDLNGPAVLCVHGYCENTEGSYRCHCSPGYVAEAGPPHCTAKE

SEQ ID NO: 8108 - protein, 233 aa, Homo Sapiens
  misc_feature (1)..(1): Xaa can be any naturally occurring amino acid
XTEGSFACSACENGYWVNEDGTACEDLDECAFPGVCPSGVCTNTAGSFSCKDCDGGYRPSPLGDSCEDVDECEDPQSSCLGGECKNTVGSYQCLCPQGFQLANGTVCEDVNECMGEEHCAPHGECLNSHGSFFCLCAPGFVSAEGGTSCQDIDECEDYGDPVCGTWKCENSPGSYRCVLGCQPGFHMAPNGDCIDIDECANDTMCGSHGFCDNTDGSFRCLCDQGFEISPSGW

SEQ ID NO: 8109 - protein, 144 aa, Homo Sapiens
FQDTLPKQPCGSNPLPGLTKQEDCCGSIGTAWGQSKCHKCPQLQYTGVQKPGPVRGEVGADCPQGYKRLNSTHCQADKPEEKSLCFRLVSPEHQCQHPLTTRLTRQLCCCSVGKAWGARCQRCPTDGTAAFKEICPAGKGYHIL

SEQ ID NO: 8110 - protein, 140 aa, Homo Sapiens
LNECAKPHLCGDGGFCINFPGHYKCNCYPGYRLKASRPPVCEDIDECRDPSSCPDGKCENKPGSFKCIACQPGYRSQGGGACRDVNECAEGSPCSPGWCENLPGSFRCTCAQGYAPAPDGRSCLGERQHPRPGPPPPPTR

SEQ ID NO: 8111 - protein, 124 aa, Homo Sapiens
MERAPERRDVCWSQRGEDGMCAGPLAGPALTFDDCCCRQGRGWGAQCRPCPPRGAGSHCPTSQSESNSFWDTSPLLLGKPPRDEDSSEEDSDECRCVSGRCVPRPGGAVCECPGGFQLDASRAR

SEQ ID NO: 8112 - protein, 306 aa, Homo Sapiens
MLFGSEICKEGKCVNTQPGYECYCKQGFYYDGNLLECVDVDECLDESNCRNGVCENTRGGYRCACTPPAEYSPAQRQCLSPEEMDVDECQDPAACRPGRCVNLPGSYRCECRPPWVPGPSGRDCQLPESPAERAPERRDVCWSQRGEDGMCAGPLAGPALTFDDCCCRQGRGWGAQCRPCPPRGAGSHCPTSQSESNSFWDTSPLLLGKPPRDEDSSEEDSDECRCVSGRCVPRPGGAVCECPGGFQLDASRARCVDIDECRELNQRGLLCKSERCVNTSGSFRCVCKAGFARSRPHGACVPQRRR

SEQ ID NO: 8113 - protein, 222 aa, Homo Sapiens
MLFGSEICKEGKCVNTQPGYECYCKQGFYYDGNLLECVDVDECLDESNCRNGVCENTRGGYRCACTPPAEYSPAQRQCLSPEEMERAPERRDVCWSQRGEDGMCAGPLAGPALTFDDCCCRQGRGWGAQCRPCPPRGAGSHCPTSQSESNSFWDTSPLLLGKPPRDEDSSEEDSDECRCVSGRCVPRPGGAVCECPGGFQLDASRARCVDIDECRELNQRGL

SEQ ID NO: 8114 - protein, 259 aa, Homo Sapiens
MLFGSEICKEGKCVNTQPGYECYCKQGFYYDGNLLECVDVDECLDESNCRNGVCENTRGGYRCACTPPAEYSPAQRQCLSPEEMERAPERRDVCWSQRGEDGMCAGPLAGPALTFDDCCCRQGRGWGAQCRPCPPRGAGSHCPTSQSESNSFWDTSPLLLGKPPRDEDSSEEDSDECRCVSGRCVPRPGGAVCECPGGFQLDASRARCVDIDECRELNQRGLLCKSERCVNTSGSFRCVCKAGFARSRPHGACVPQRRR

SEQ ID NO: 8115 - protein, 733 aa, Homo Sapiens
MPAETDECRLNQNICGHGECVPGPPDYSCHCNPGYRSHPQHRYCVDVNECEAEPCGPGRGICMNTGGSYNCHCNRGYRLHVGAGGRSCVDLNECAKPHLCGDGGFCINFPGHYKCNCYPGYRLKASRPPVCEDIDECRDPSSCPDGKCENKPGSFKCIACQPGYRSQGGGACRDVNECAEGSPCSPGWCENLPGSFRCTCAQGYAPAPDGRSCLDVDECEAGDVCDNGICSNTPGSFQCQCLSGYHLSRDRSHCEDIDECDFPAACIGGDCINTNGSYRCLCPQGHRLVGGRKCQDIDECSQDPSLCLPHGACKNLQGSYVCVCDEGFTPTQDQHGCEEVEQPHHKKECYLNFDDTVFCDSVLATNVTQQECCCSLGAGWGDHCEIYPCPVYSSAEFHSLCPDGKGYTQDNNIVNYGIPAHRDIDECMLFGSEICKEGKCVNTQPGYECYCKQGFYYDGNLLECVDVDECLDESNCRNGVCENTRGGYRCACTPPAEYSPAQRQCLSPEEMDVDECQDPAACRPGRCVNLPGSYRCECRPPWVPGPSGRDCQLPESPAERAPERRDVCWSQRGEDGMCAGPLAGPALTFDDCCCRQGRGWGAQCRPCPPRGAGSHCPTSQSESNSFWDTSPLLLGKPPRDEDSSEEDSDECRCVSGRCVPRPGGAVCECPGGFQLDASRARCVDIDECRELNQRGLLCKSERCVNTSGSFRCVCKAGFARSRPHGACVPQRRR

SEQ ID NO: 8116 - protein, 1256 aa, Homo Sapiens
MPGPRGAAGGLAPEMRGAGAAGLLALLLLLLLLLLGLGGRVEGGPAGERGAGGGGALARERFKVVFAPVICKRTCLKGQCRDSCQQGSNMTLIGENGHSTDTLTGSGFRVVVCPLPCMNGGQCSSRNQCLCPPDFTGRFCQVPAGGAGGGTGGSGPGLSRTGALSTGALPPLAPEGDSVASKHAIYAVQVIADPPGPGEGPPAQHAAFLVPLGPGQISAEVQAPPPVVNVRVHHPPEASVQVHRIESSNAESAAPSQHLLPHPKPSHPRPPTQKPLGRCFQDTLPKQPCGSNPLPGLTKQEDCCGSIGTAWGQSKCHKCPQLQYTGVQKPGPVRGEVGADCPQGYKRLNSTHCQDINECAMPGVCRHGDCLNNPGSYRCVCPPGHSLGPSRTQCIADKPEEKSLCFRLVSPEHQCQHPLTTRLTRQLCCCSVGKAWGARCQRCPTDGTAAFKEICPAGKGYHILTSHQTLTIQGESDFSLFLHPDGPPKPQQLPESPSQAPPPEDTEEERGVTTDSPVSEERSVQQSHPTATTTPARPYPELISRPSPPTMRWFLPDLPPSRSAVEIAPTQVTETDECRLNQNICGHGECVPGPPDYSCHCNPGYRSHPQHRYCVDVNECEAEPCGPGRGICMNTGGSYNCHCNRGYRLHVGAGGRSCVDLNECAKPHLCGDGGFCINFPGHYKCNCYPGYRLKASRPPVCEDIDECRDPSSCPDGKCENKPGSFKCIACQPGYRSQGGGACRDVNECAEGSPCSPGWCENLPGSFRCTCAQGYAPAPDGRSCLDVDECEAGDVCDNGICSNTPGSFQCQCLSGYHLSRDRSHCEDIDECDFPAACIGGDCINTNGSYRCLCPQGHRLVGGRKCQDIDECSQDPSLCLPHGACKNLQGSYVCVCDEGFTPTQDQHGCEEVEQPHHKKECYLNFDDTVFCDSVLATNVTQQECCCSLGAGWGDHCEIYPCPVYSSAEFHSLCPDGKGYTQDNNIVNYGIPAHRDIDECMLFGSEICKEGKCVNTQPGYECYCKQGFYYDGNLLECVDVDECLDESNCRNGVCENTRGGYRCACTPPAEYSPAQRQCLSPEEMERAPERRDVCWSQRGEDGMCAGPLAGPALTFDDCCCRQGRGWGAQCRPCPPRGAGSHCPTSQSESNSFWDTSPLLLGKPPRDEDSSEEDSDECRCVSGRCVPRPGGAVCECPGGFQLDASRARCVDIDECRELNQRGLLCKSERCVNTSGSFRCVCKAGFARSRPHGACVPQRRR

SEQ ID NO: 8117 - protein, 1303 aa, Homo Sapiens
MPGPRGAAGGLAPEMRGAGAAGLLALLLLLLLLLLGLGGRVEGGPAGERGAGGGGALARERFKVVFAPVICKRTCLKGQCRDSCQQGSNMTLIGENGHSTDTLTGSGFRVVVCPLPCMNGGQCSSRNQCLCPPDFTGRFCQVPAGGAGGGTGGSGPGLSRTGALSTGALPPLAPEGDSVASKHAIYAVQVIADPPGPGEGPPAQHAAFLVPLGPGQISAEVQAPPPVVNVRVHHPPEASVQVHRIESSNAESAAPSQHLLPHPKPSHPRPPTQKPLGRCFQDTLPKQPCGSNPLPGLTKQEDCCGSIGTAWGQSKCHKCPQLQYTGVQKPGPVRGEVGADCPQGYKRLNSTHCQDINECAMPGVCRHGDCLNNPGSYRCVCPPGHSLGPSRTQCIADKPEEKSLCFRLVSPEHQCQHPLTTRLTRQLCCCSVGKAWGARCQRCPTDGTAAFKEICPAGKGYHILTSHQTLTIQGESDFSLFLHPDGPPKPQQLPESPSQAPPPEDTEEERGVTTDSPVSEERSVQQSHPTATTTPARPYPELISRPSPPTMRWFLPDLPPSRSAVEIAPTQVTETDECRLNQNICGHGECVPGPPDYSCHCNPGYRSHPQHRYCVDVNECEAEPCGPGRGICMNTGGSYNCHCNRGYRLHVGAGGRSCVDLNECAKPHLCGDGGFCINFPGHYKCNCYPGYRLKASRPPVCEDIDECRDPSSCPDGKCENKPGSFKCIACQPGYRSQGGGACRDVNECAEGSPCSPGWCENLPGSFRCTCAQGYAPAPDGRSCLDVDECEAGDVCDNGICSNTPGSFQCQCLSGYHLSRDRSHCEDIDECDFPAACIGGDCINTNGSYRCLCPQGHRLVGGRKCQDIDECSQDPSLCLPHGACKNLQGSYVCVCDEGFTPTQDQHGCEEVEQPHHKKECYLNFDDTVFCDSVLATNVTQQECCCSLGAGWGDHCEIYPCPVYSSAEFHSLCPDGKGYTQDNNIVNYGIPAHRDIDECMLFGSEICKEGKCVNTQPGYECYCKQGFYYDGNLLECVDVDECLDESNCRNGVCENTRGGYRCACTPPAEYSPAQRQCLSPEEMDVDECQDPAACRPGRCVNLPGSYRCECRPPWVPGPSGRDCQLPESPAERAPERRDVCWSQRGEDGMCAGPLAGPALTFDDCCCRQGRGWGAQCRPCPPRGAGSHCPTSQSESNSFWDTSPLLLGKPPRDEDSSEEDSDECRCVSGRCVPRPGGAVCECPGGFQLDASRARCVDIDECRELNQRGLLCKSERCVNTSGSFRCVCKAGFARSRPHGACVPQRRR

SEQ ID NO: 8118 - protein, 116 aa, Homo Sapiens
MPGPRGAAGGLAPEMRGAGAAGLLALLLLLLLLLLGLGGRVEGGPAGERGAGGGGALARERFKVVFAPVICKRTCLKGQCRDSCQQGSNMTLIGENGHSTDTLTGSGFRWCALSPA

SEQ ID NO: 8119 - protein, 1137 aa, Homo Sapiens
MTLIGENGHSTDTLTGSGFRVVVCPLPCMNGGQCSSRNQCLCPPDFTGRFCQVPAGGAGGGTGGSGPGLSRTGALSTGALPPLAPEGDSVASKHAIYAVQVIADPPGPGEGPPAQHAAFLVPLGPGQISAEVQAPPPVVNVRVHHPPEASVQVHRIESSNAESAAPSQHLLPHPKPSHPRPPTQKPLGRCFQDTLPKQPCGSNPLPGLTKQEDCCGSIGTAWGQSKCHKCPQLQYTGVQKPGPVRGEVGADCPQGYKRLNSTHCQDINECAMPGVCRHGDCLNNPGSYRCVCPPGHSLGPSRTQCIADKPEEKSLCFRLVSPEHQCQHPLTTRLTRQLCCCSVGKAWGARCQRCPTDGTAAFKEICPAGKGYHILTSHQTLTIQGESDFSLFLHPDGPPKPQQLPESPSQAPPPEDTEEERGVTTDSPVSEERSVQQSHPTATTTPARPYPELISRPSPPTMRWFLPDLPPSRSAVEIAPTQVTETDECRLNQNICGHGECVPGPPDYSCHCNPGYRSHPQHRYCVDVNECEAEPCGPGRGICMNTGGSYNCHCNRGYRLHVGAGGRSCVDLNECAKPHLCGDGGFCINFPGHYKCNCYPGYRLKASRPPVCEDIDECRDPSSCPDGKCENKPGSFKCIACQPGYRSQGGGACRDVNECAEGSPCSPGWCENLPGSFRCTCAQGYAPAPDGRSCLDVDECEAGDVCDNGICSNTPGSFQCQCLSGYHLSRDRSHCEDIDECDFPAACIGGDCINTNGSYRCLCPQGHRLVGGRKCQDIDECSQDPSLCLPHGACKNLQGSYVCVCDEGFTPTQDQHGCEEVEQPHHKKECYLNFDDTVFCDSVLATNVTQQECCCSLGAGWGDHCEIYPCPVYSSAEFHSLCPDGKGYTQDNNIVNYGIPAHRDIDECMLFGSEICKEGKCVNTQPGYECYCKQGFYYDGNLLECVDVDECLDESNCRNGVCENTRGGYRCACTPPAEYSPAQRQCLSPEEMDVDECQDPAACRPGRCVNLPGSYRCECRPPWVPGPSGRDCQLPESPAERAPERRDVCWSQRGEDGMCAGPLAGPALTFDDCCCRQGRGWGAQCRPCPPRGAGSHCPTSQSESNSFWDTSPLLLGKPPRDEDSSEEDSDECRCVSG

SEQ ID NO: 8120 - protein, 907 aa, Homo Sapiens
  misc_feature (1)..(1): Xaa can be any naturally occurring amino acid
XFAPVICKRTCLKGQCRDSCQQGSNMTLIGENGHSTDTLTGSGFRVADKPEEKSLCFRLVSPEHQCQHPLTTRLTRQLCCCSVGKAWGARCQRCPTDGTAAFKEICPAGKGYHILTSHQTLTIQGESDFSLFLHPDGPPKPQQLPESPSQAPPPEDTEEERGVTTDSPVSEERSVQQSHPTATTTPARPYPELISRPSPPTMRWFLPDLPPSRSAVEIAPTQVTETDECRLNQNICGHGECVPGPPDYSCHCNPGYRSHPQHRYCVDVNECEAEPCGPGRGICMNTGGSYNCHCNRGYRLHVGAGGRSCVDLNECAKPHLCGDGGFCINFPGHYKCNCYPGYRLKASRPPVCEDIDECRDPSSCPDGKCENKPGSFKCIACQPGYRSQGGGACRDVNECAEGSPCSPGWCENLPGSFRCTCAQGYAPAPDGRSCLDVDECEAGDVCDNGICSNTPGSFQCQCLSGYHLSRDRSHCEDIDECDFPAACIGGDCINTNGSYRCLCPQGHRLVGGRKCQDIDECSQDPSLCLPHGACKNLQGSYVCVCDEGFTPTQDQHGCEEVEQPHHKKECYLNFDDTVFCDSVLATNVTQQECCCSLGAGWGDHCEIYPCPVYSSAEFHSLCPDGKGYTQDNNIVNYGIPAHRDIDECMLFGSEICKEGKCVNTQPGYECYCKQGFYYDGNLLECVDVDECLDESNCRNGVCENTRGGYRCACTPPAEYSPAQRQCLSPEEMERAPERRDVCWSQRGEDGMCAGPLAGPALTFDDCCCRQGRGWGAQCRPCPPRGAGSHCPTSQSESNSFWDTSPLLLGKPPRDEDSSEEDSDECRCVSGRCVPRPGGAVCECPGGFQLDASRARCVDIDECRELNQRGLLCKSERCVNTSGSFRCVCKAGFARSRPHGACVPQRRR

SEQ ID NO: 8121 - protein, 69 aa, Homo Sapiens
  misc_feature (1)..(1): Xaa can be any naturally occurring amino acid
XFAPVICKRTCLKGQCRDSCQQGSNMTLIGENGHSTDTLTGSGFRVGPAPRGECARPSPARGLSPGAPH

SEQ ID NO: 8122 - protein, 303 aa, Homo Sapiens
ECLNTDGSFACTCAPGYRPGPRGASCLDVDECSEEDLCQSGICTNTDGSFECICPPGHRAGPDLASCLDVDECRERGPALCGSQRCENSPGSYRCVRDCDPGYHAGPEGTCDDVNECETLQGVCGAALCENVEGSFLCVCPNSPEEFDPMTGRCVPPRTSADVDECQLFRDQVCKSGVCVNTAPGYSCYCSNGYYYHTQRLECIDNDECADEEPACEGGRCVNTVGSYHCTCEPPLVLDGSQRRCVSNESQSLDDNLGVCWQEVGADLVCSHPRLDRQATYTECCCLYGEAWGMDCALCPAQD

SEQ ID NO: 8123 - protein, 1557 aa, Homo Sapiens
MAGGVRLLWVSLLVLLAQLGPQPGLGRLGERLRVRFTPVVCGLRCVHGPTGSRCTPTCAPRNATSVDSGAPGGAAPGGPGFRAFLCPLICHNGGVCVKPDRCLCPPDFAGKFCQLHSSGARPPAPAVPGLTRSVYTMPLANHRDDEHGVASMVSVHVEHPQEASVVVHQVERVSGPWEEADAEAVARAEAAARAEAAAPYTVLAQSAPREDGYSDASGFGYCFRELRGGECASPLPGLRTQEVCCRGAGLAWGVHDCQLCSERLGNSERVSAPDGPCPTGFERVNGSCEDVDECATGGRCQHGECANTRGGYTCVCPDGFLLDSSRSSCISQHVISEAKGPCFRVLRDGGCSLPILRNITKQICCCSRVGKAWGRGCQLCPPFGSEGFREICPAGPGYHYSASDLRYNTRPLGQEPPRVSLSQPRTLPATSRPSAGFLPTHRLEPRPEPRPDPRPGPELPLPSIPAWTGPEIPESGPSSGMCQRNPQVCGPGRCISRPSGYTCACDSGFRLSPQGTRCIDVDECRRVPPPCAPGRCENSPGSFRCVCGPGFRAGPRAAECLDVDECHRVPPPCDLGRCENTPGSFLCVCPAGYQAAPHGASCQDVDECTQSPGLCGRGACKNLPGSFRCVCPAGFRGSACEEDVDECAQEPPPCGPGRCDNTAGSFHCACPAGFRSRGPGAPCQDVDECARSPPPCTYGRCENTEGSFQCVCPMGFQPNTAGSECEDVDECENHLACPGQECVNSPGSFQCRTCPSGHHLHRGRCTDVDECSSGAPPCGPHGHCTNTEGSFRCSCAPGYRAPSGRPGPCADVNECLEGDFCFPHGECLNTDGSFACTCAPGYRPGPRGASCLDVDECSEEDLCQSGICTNTDGSFECICPPGHRAGPDLASCLDVDECRERGPALCGSQRCENSPGSYRCVRDCDPGYHAGPEGTCDDVDECQEYGPEICGAQRCENTPGSYRCTPACDPGYQPTPGGGCQDVDECRNRSFCGAHAVCQNLPGSFQCLCDQGYEGARDGRHCVDVNECETLQGVCGAALCENVEGSFLCVCPNSPEEFDPMTGRCVPPRTSAGTFPGSQPQAPASPVLPARPPPPPLPRRPSTPRQGPVGSGRRECYFDTAAPDACDNILARNVTWQECCCTVGEGWGSGCRIQQCPGTETAEYQSLCPHGRGYLAPSGDLSLRRDVDECQLFRDQVCKSGVCVNTAPGYSCYCSNGYYYHTQRLECIDNDECADEEPACEGGRCVNTVGSYHCTCEPPLVLDGSQRRCVSNESQSLDDNLGVCWQEVGADLVCSHPRLDRQATYTECCCLYGEAWGMDCALCPAQDSDDFEALCNVLRPPAYSPPRPGGFGLPYEYGPDLGPPYQGLPYGPELYPPPALPYDPYPPPPGPFARREAPYGAPRFDMPDFEDDGGPYGESEAPAPPGPGTRWPYRSRDTRRSFPEPEEPPEGGSYAGSLAEPYEELEAEECGILDGCTNGRCVRVPEGFTCRCFDGYRLDMTRMACVDINECDEAEAASPLCVNARCLNTDGSFRCICRPGFAPTHQPHHCAPARPRA

SEQ ID NO: 8124 - protein, 44 aa, Homo Sapiens
MGDVKALLFVAAARARRLGGAAASEPSAGSEAASPKSVQAPSGA

SEQ ID NO: 8125 - protein, 1587 aa, Homo Sapiens
MGDVKALLFVAAARARRLGGAAASESLAVSEAFCRVRSCQPKKCAGPQRCLNPVPAVPSPSPSVRKRQVSLNWQPLTLQEARALLKRRRPRGPGGRGLLRRRPPQRAPAGKAPVLCPLICHNGGVCVKPDRCLCPPDFAGKFCQLHSSGARPPAPAVPGLTRSVYTMPLANHRDDEHGVASMVSVHVEHPQEASVVVHQVERVSGPWEEADAEAVARAEAAARAEAAAPYTVLAQSAPREDGYSDASGFGYCFRELRGGECASPLPGLRTQEVCCRGAGLAWGVHDCQLCSERLGNSERVSAPDGPCPTGFERVNGSCEDVDECATGGRCQHGECANTRGGYTCVCPDGFLLDSSRSSCISQHVISEAKGPCFRVLRDGGCSLPILRNITKQICCCSRVGKAWGRGCQLCPPFGSEGFREICPAGPGYHYSASDLRYNTRPLGQEPPRVSLSQPRTLPATSRPSAGFLPTHRLEPRPEPRPDPRPGPELPLPSIPAWTGPEIPESGPSSGMCQRNPQVCGPGRCISRPSGYTCACDSGFRLSPQGTRCIDVDECRRVPPPCAPGRCENSPGSFRCVCGPGFRAGPRAAECLDVDECHRVPPPCDLGRCENTPGSFLCVCPAGYQAAPHGASCQDVDECTQSPGLCGRGACKNLPGSFRCVCPAGFRGSACEEDVDECAQEPPPCGPGRCDNTAGSFHCACPAGFRSRGPGAPCQDVDECARSPPPCTYGRCENTEGSFQCVCPMGFQPNTAGSECEDVDECENHLACPGQECVNSPGSFQCRTCPSGHHLHRGRCTDVDECSSGAPPCGPHGHCTNTEGSFRCSCAPGYRAPSGRPGPCADVNECLEGDFCFPHGECLNTDGSFACTCAPGYRPGPRGASCLDVDECSEEDLCQSGICTNTDGSFECICPPGHRAGPDLASCLDVDECRERGPALCGSQRCENSPGSYRCVRDCDPGYHAGPEGTCDDVDECQEYGPEICGAQRCENTPGSYRCTPACDPGYQPTPGGGCQDVDECRNRSFCGAHAVCQNLPGSFQCLCDQGYEGARDGRHCVDVNECETLQGVCGAALCENVEGSFLCVCPNSPEEFDPMTGRCVPPRTSAGTFPGSQPQAPASPVLPARPPPPPLPRRPSTPRQGPVGSGRRECYFDTAAPDACDNILARNVTWQECCCTVGEGWGSGCRIQQCPGTETAEYQSLCPHGRGYLAPSGDLSLRRDVDECQLFRDQVCKSGVCVNTAPGYSCYCSNGYYYHTQRLECIDNDECADEEPACEGGRCVNTVGSYHCTCEPPLVLDGSQRRCVSNESQSLDDNLGVCWQEVGADLVCSHPRLDRQATYTECCCLYGEAWGMDCALCPAQDSDDFEALCNVLRPPAYSPPRPGGFGLPYEYGPDLGPPYQGLPYGPELYPPPALPYDPYPPPPGPFARREAPYGAPRFDMPDFEDDGGPYGESEAPAPPGPGTRWPYRSRDTRRSFPEPEEPPEGGSYAGSLAEPYEELEAEECGILDGCTNGRCVRVPEGFTCRCFDGYRLDMTRMACVDINECDEAEAASPLCVNARCLNTDGSFRCICRPGFAPTHQPHHCAPARPRA

SEQ ID NO: 8126 - protein, 44 aa, Homo Sapiens
MLQPQALLFVAAARARRLGGAAASEPSAGSEAASPKSVQAPSGA

SEQ ID NO: 8127 - protein, 1624 aa, Homo Sapiens
MPRPGTSGRRPLLLVLLLPLFAAATSAASPSPSPSQVVEVPGVPSRPASVAVCRCCPGQTSRRSRCIRAFCRVRSCQPKKCAGPQRCLNPVPAVPSPSPSVRKRQVSLNWQPLTLQEARALLKRRRPRGPGGRGLLRRRPPQRAPAGKAPVLCPLICHNGGVCVKPDRCLCPPDFAGKFCQLHSSGARPPAPAVPGLTRSVYTMPLANHRDDEHGVASMVSVHVEHPQEASVVVHQVERVSGPWEEADAEAVARAEAAARAEAAAPYTVLAQSAPREDGYSDASGFGYCFRELRGGECASPLPGLRTQEVCCRGAGLAWGVHDCQLCSERLGNSERVSAPDGPCPTGFERVNGSCEDVDECATGGRCQHGECANTRGGYTCVCPDGFLLDSSRSSCISQHVISEAKGPCFRVLRDGGCSLPILRNITKQICCCSRVGKAWGRGCQLCPPFGSEGFREICPAGPGYHYSASDLRYNTRPLGQEPPRVSLSQPRTLPATSRPSAGFLPTHRLEPRPEPRPDPRPGPELPLPSIPAWTGPEIPESGPSSGMCQRNPQVCGPGRCISRPSGYTCACDSGFRLSPQGTRCIDVDECRRVPPPCAPGRCENSPGSFRCVCGPGFRAGPRAAECLDVDECHRVPPPCDLGRCENTPGSFLCVCPAGYQAAPHGASCQDVDECTQSPGLCGRGACKNLPGSFRCVCPAGFRGSACEEDVDECAQEPPPCGPGRCDNTAGSFHCACPAGFRSRGPGAPCQDVDECARSPPPCTYGRCENTEGSFQCVCPMGFQPNTAGSECEDVDECENHLACPGQECVNSPGSFQCRTCPSGHHLHRGRCTDVDECSSGAPPCGPHGHCTNTEGSFRCSCAPGYRAPSGRPGPCADVNECLEGDFCFPHGECLNTDGSFACTCAPGYRPGPRGASCLDVDECSEEDLCQSGICTNTDGSFECICPPGHRAGPDLASCLDVDECRERGPALCGSQRCENSPGSYRCVRDCDPGYHAGPEGTCDDVDECQEYGPEICGAQRCENTPGSYRCTPACDPGYQPTPGGGCQDVDECRNRSFCGAHAVCQNLPGSFQCLCDQGYEGARDGRHCVDVNECETLQGVCGAALCENVEGSFLCVCPNSPEEFDPMTGRCVPPRTSAGTFPGSQPQAPASPVLPARPPPPPLPRRPSTPRQGPVGSGRRECYFDTAAPDACDNILARNVTWQECCCTVGEGWGSGCRIQQCPGTETAEYQSLCPHGRGYLAPSGDLSLRRDVDECQLFRDQVCKSGVCVNTAPGYSCYCSNGYYYHTQRLECIDNDECADEEPACEGGRCVNTVGSYHCTCEPPLVLDGSQRRCVSNESQSLDDNLGVCWQEVGADLVCSHPRLDRQATYTECCCLYGEAWGMDCALCPAQDSDDFEALCNVLRPPAYSPPRPGGFGLPYEYGPDLGPPYQGLPYGPELYPPPALPYDPYPPPPGPFARREAPYGAPRFDMPDFEDDGGPYGESEAPAPPGPGTRWPYRSRDTRRSFPEPEEPPEGGSYAGSLAEPYEELEAEECGILDGCTNGRCVRVPEGFTCRCFDGYRLDMTRMACVDINECDEAEAASPLCVNARCLNTDGSFRCICRPGFAPTHQPHHCAPARPRA

SEQ ID NO: 8128 - protein, 70 aa, Homo Sapiens
MSARTAPFSWSGGKLRPKDQETLASGHTSWKALLFVAAARARRLGGAAASEPSAGSEAASPKSVQAPSGA

SEQ ID NO: 8129 - protein, 145 aa, Homo Sapiens
PPGPGTRWPYRSRDTRRSFPEPEEPPEGGSYAGSLAEPYEELEAEECGILDGCTNGRCVRVPEGFTCRCFDGYRLDMTRMACVAFSSDRCLPSADINECDEAEAASPLCVNARCLNTDGSFRCICRPGFAPTHQPHHCAPARPRA

SEQ ID NO: 8130 - protein, 252 aa, Homo Sapiens
  misc_feature (1)..(1): Xaa can be any naturally occurring amino acid
XFRCSCAPGYRAPSGRPGPCADVNECLEGDFCFPHGECLNTDGSFACTCAPGYRPGPRGASCLDVDECSEEDLCQSGICTNTDGSFECICPPGHRAGPDLASCLDVDECRERGPALCGSQRCENSPGSYRCVRDCDPGYHAGPEGTCDDVDECRNRSFCGAHAVCQNLPGSFQCLCDQGYEGARDGRHCVDVNECETLQGVCGAALCENVEGSFLCVCPNSPEEFDPMTGRCVPPRTSAGTFPGSQPQAPAS

SEQ ID NO: 8131 - protein, 182 aa, Homo Sapiens
  misc_feature (1)..(1): Xaa can be any naturally occurring amino acid
XGPEICGAQRCENTPGSYRCTPACDPGYQPTPGGGCQDVDECRNRSFCGAHAVCQNLPGSFQCLCDQGYEGARDGRHCVDVNECETLQGVCGAALCENVEGSFLCVCPNSPEEFDPMTGRCVPPRTSADVDECQLFRDQVCKSGVCVNTAPGYSCYCSNGYYYHTQRLECIDNDECADEEPA

SEQ ID NO: 8132 - protein, 224 aa, Homo Sapiens
  misc_feature (1)..(1): Xaa can be any naturally occurring amino acid
XNTDGSFACTCAPGYRPGPRGASCLDVDECSEEDLCQSGICTNTDGSFECICPPGHRAGPDLASCLDVDECRERGPALCGSQRCENSPGSYRCVRDCDPGYHAGPEGTCDDVDECQEYGPEICGAQRCENTPGSYRCTPACDPGYQPTPGGGCQDVNECETLQGVCGAALCENVEGSFLCVCPNSPEEFDPMTGRCVPPRTSAGTFPGSQPQAPASPVLPARPP

SEQ ID NO: 8133 - protein, 674 aa, Homo Sapiens
  misc_feature (1)..(1): Xaa can be any naturally occurring amino acid
XNTEGSFQCVCPMGFQPNTAGSECEDVDECENHLACPGQECVNSPGSFQCRTCPSGHHLHRGRCTDVDECSSGAPPCGPHGHCTNTEGSFRCSCAPGYRAPSGRPGPCADVNECLEGDFCFPHGECLNTDGSFACTCAPGYRPGPRGASCLDVDECSEEDLCQSGICTNTDGSFECICPPGHRAGPDLASCLDVDECRERGPALCGSQRCENSPGSYRCVRDCDPGYHAGPEGTCDDVNECETLQGVCGAALCENVEGSFLCVCPNSPEEFDPMTGRCVPPRTSAGTFPGSQPQAPASPVLPARPPPPPLPRRPSTPRQGPVGSGRRECYFDTAAPDACDNILARNVTWQECCCTVGEGWGSGCRIQQCPGTETAEYQSLCPHGRGYLAPSGDLSLRRDVDECQLFRDQVCKSGVCVNTAPGYSCYCSNGYYYHTQRLECIDNDECADEEPACEGGRCVNTVGSYHCTCEPPLVLDGSQRRCVSNESQSLDDNLGVCWQEVGADLVCSHPRLDRQATYTECCCLYGEAWGMDCALCPAQDSDDFEALCNVLRPPAYSPPRPGGFGLPYEYGPDLGPPYQGLPYGPELYPPPALPYDPYPPPPGPFARREAPYGAPRFDMPDFEDDGGPYGESEAPAPPGPGTRWPYRSRDTRRSFPEPEEPPEGGSYAGSLAEP

SEQ ID NO: 8134 - protein, 94 aa, Homo Sapiens
  misc_feature (1)..(1): Xaa can be any naturally occurring amino acid
XRFDMPDFEDDGGPYGESEAEECGILDGCTNGRCVRVPEGFTCRCFDGYRLDMTRMACVDINECDEAEAASPLCVNARCLNTDGSFRCICRPGF

SEQ ID NO: 8135 - protein, 957 aa, Homo Sapiens
  misc_feature (1)..(1): Xaa can be any naturally occurring amino acid
XVDECRRVPPPCAPGRCENSPGSFRCVCGPGFRAGPRAAECLDVDECHRVPPPCDLGRCENTPGSFLCVCPAGYQAAPHGASCQDVDECARSPPPCTYGRCENTEGSFQCVCPMGFQPNTAGSECEDVDECENHLACPGQECVNSPGSFQCRTCPSGHHLHRGRCTDVDECSSGAPPCGPHGHCTNTEGSFRCSCAPGYRAPSGRPGPCADVNECLEGDFCFPHGECLNTDGSFACTCAPGYRPGPRGASCLDVDECSEEDLCQSGICTNTDGSFECICPPGHRAGPDLASCLDVDECRERGPALCGSQRCENSPGSYRCVRDCDPGYHAGPEGTCDDVDECQEYGPEICGAQRCENTPGSYRCTPACDPGYQPTPGGGCQDVDECRNRSFCGAHAVCQNLPGSFQCLCDQGYEGARDGRHCVDVNECETLQGVCGAALCENVEGSFLCVCPNSPEEFDPMTGRCVPPRTSAGTFPGSQPQAPASPVLPARPPPPPLPRRPSTPRQGPVGSGRRECYFDTAAPDACDNILARNVTWQECCCTVGEGWGSGCRIQQCPGTETAEYQSLCPHGRGYLAPSGDLSLRRDVDECQLFRDQVCKSGVCVNTAPGYSCYCSNGYYYHTQRLECIDNDECADEEPACEGGRCVNTVGSYHCTCEPPLVLDGSQRRCVSNESQSLDDNLGVCWQEVGADLVCSHPRLDRQATYTECCCLYGEAWGMDCALCPAQDSDDFEALCNVLRPPAYSPPRPGGFGLPYEYGPDLGPPYQGLPYGPELYPPPALPYDPYPPPPGPFARREAPYGAPRFDMPDFEDDGGPYGESEAPAPPGPGTRWPYRSRDTRRSFPEPEEPPEGGSYAGSLAEPYEELEAEECGILDGCTNGRCVRVPEGFTCRCFDGYRLDMTRMACVDINECDEAEAASPLCVNARCLNTDGSFRCICRPGFAPTHQPHHCAPARPRA

SEQ ID NO: 8136 - protein, 191 aa, Homo Sapiens
  misc_feature (1)..(1): Xaa can be any naturally occurring amino acid
XVDECSEEDLCQSGICTNTDGSFECICPPGHRAGPDLASCLDVDECRERGPALCGSQRCENSPGSYRCVRDCDPGYHAGPEGTCDDVDECQEYGPEICGAQRCENTPGSYRCTPACDPGYQPTPGGGCQDVNECETLQGVCGAALCENVEGSFLCVCPNSPEEFDPMTGRCVPPRTSADVDECQLFRDQVC

SEQ ID NO: 8137 - protein, 189 aa, Homo Sapiens
  misc_feature (1)..(1): Xaa can be any naturally occurring amino acid
XVDECSEEDLCQSGICTNTDGSFECICPPGHRAGPDLASCLDVDECRERGPALCGSQRCENSPGSYRCVRDCDPGYHAGPEGTCDDVDECRNRSFCGAHAVCQNLPGSFQCLCDQGYEGARDGRHCVDVNECETLQGVCGAALCENVEGSFLCVCPNSPEEFDPMTGRCVPPRTSAGTFPGSQPQAPAS

SEQ ID NO: 8138 - protein, 416 aa, Homo Sapiens
MEATGISLASQLKVPPYASENQTCRDQEKEYYEPQHRICCSRCPPGTYVSAKCSRIRDTVCATCAENSYNEHWNYLTICQLCRPCDPVMGLEEIAPCTSKRKTQCRCQPGMFCAAWALECTHCELLSDCPPGTEAELKDEVGKGNNHCVPCKAGHFQNTSSPSARCQPHTRCENQGLVEAAPGTAQSDTTCKNPLEPLPPEMSGTMLMLAVLLPLAFFLLLATVFSCIWKSHPSLCRKLGSLLKRRPQGEGPNPVAGSWEPPKAHPYFPDLVQPLLPISGDVSPVSTGLPAAPVLEAGVPQQQSPLDLTREPQLEPGEQSQVAHGTNGIHVTGGSMTITGNIYIYNGPVLGGPPGPGDLPATPEPPYPIPEEGDPGPPGLSTPHQEDGKAWHLAETEHCGATPSNRGPRNQFITHD

SEQ ID NO: 8139 - protein, 148 aa, Homo Sapiens
MGLEEIAPCTSKRKTQCRCQPGMFCAAWALECTHCELLSDCPPGTEAELKDEVGKGNNHCVPCKAGHFQNTSSPSARCQPHTRCENQGLVEAAPGTAQSDTTCKNPLEPLPPEMSEPALSKGVENLQALLYQAATGSSEASFPTLSPL

SEQ ID NO: 8140 - protein, 292 aa, Homo Sapiens
MGLEEIAPCTSKRKTQCRCQPGMFCAAWALECTHCELLSDCPPGTEAELKDEVGKGNNHCVPCKAGHFQNTSSPSARCQPHTRCENQGLVEAAPGTAQSDTTCKNPLEPLPPEMSGSLLKRRPQGEGPNPVAGSWEPPKAHPYFPDLVQPLLPISGDVSPVSTGLPAAPVLEAGVPQQQSPLDLTREPQLEPGEQSQVAHGTNGIHVTGGSMTITGNIYIYNGPVLGGPPGPGDLPATPEPPYPIPEEGDPGPPGLSTPHQEDGKAWHLAETEHCGATPSNRGPRNQFITHD

SEQ ID NO: 8141 - protein, 74 aa, Homo Sapiens
MGLEEIAPCTSKRKTQCRCQPGMFCAAWALECTHCELLSDCPPGTEAELKGVRTKVWWRQLQALPSPTQPAKIH

SEQ ID NO: 8142 - protein, 218 aa, Homo Sapiens
MLLPWATSAPGLAWGPLVLGLFGLLAASQPQAVPPYASENQTCRDQEKEYYEPQHRICCSRCPPAKCSRIRDTVCATCAENSYNEHWNYLTICQLCRPCDPVMGLEEIAPCTSKRKTQCRCQPGMFCAAWALECTHCELLSDCPPGTEAELKDEVGKGNNHCVPCKAGHFQNTSSPSARCQPHTRCENQGLVEAAPGTAQSDTTCKNPLEPLPPEMSG

SEQ ID NO: 8143 - protein, 435 aa, Homo Sapiens
MLLPWATSAPGLAWGPLVLGLFGLLAASQPQAVPPYASENQTCRDQEKEYYEPQHRICCSRCPPGTYVSAKCSRIRDTVCATCAENSYNEHWNYLTICQLCRPCDPVMGLEEIAPCTSKRKTQCRCQPGMFCAAWALECTHCELLSDCPPGTEAELKDEVGKGNNHCVPCKAGHFQNTSSPSARCQPHTRCENQGLVEAAPGTAQSDTTCKNPLEPLPPEMSGTMLMLAVLLPLAFFLLLATVFSCIWKSHPSLCRKLGSLLKRRPQGEGPNPVAGSWEPPKAHPYFPDLVQPLLPISGDVSPVSTGLPAAPVLEAGVPQQQSPLDLTREPQLEPGEQSQVAHGTNGIHVTGGSMTITGNIYIYNGPVLGGPPGPGDLPATPEPPYPIPEEGDPGPPGLSTPHQEDGKAWHLAETEHCGATPSNRGPRNQFITHD

SEQ ID NO: 8144 - protein, 696 aa, Homo Sapiens
MGLCLAGRRRSVQWCAVSQPEATKCFQWQRNMRKVRGPPVSCIKRDSPIQCIQAIAENRADAVTLDGGFIYEAGLAPYKLRPVAAEVYGTERQPRTHYYAVAVVKKGGSFQLNELQGLKSCHTGLRRTAGWNVPIGTLRPFLNWTGPPEPIEAAVARFFSASCVPGADKGQFPNLCRLCAGTGENKCAFSSQEPYFSYSGAFKCLRDGAGDVAFIRESTVFEDLSDEAERDEYELLCPDNTRKPVDKFKDCHLARVPSHAVVARSVNGKEDAIWNLLRQAQEKFGKDKSPKFQLFGSPSGQKDLLFKDSAIGFSRVPPRIDSGLYLGSGYFTAIQNLRKSEEEVAARRARVVWCAVGEQELRKCNQWSGLSEGSVTCSSASTTEDCIALVLKGEADAMSLDGGYVYTAGKCGLVPVLAENYKSQQSSDPDPNCVDRPVEGYLAVAVVRRSDTSLTWNSVKGKKSCHTAVDRTAGWNIPMGLLFNQTGSCKFDEYFSQSCAPGSDPRSNLCALCIGDEQGENKCVPNSNERYYGYTGAFRCLAENAGDVAFVKDVTVLQNTDGNNNEAWAKDLKLADFALLCLDGKRKPVTEARSCHLAMAPNHAVVSRMDKVERLKQVLLHQQAKFGRNGSDCPDKFCLFQSETKNLLFNDNTECLARLHGKTTYEKYLGPQYVAGITNLKKCSTSPLLEACEFLR

SEQ ID NO: 8145 - protein, 182 aa, Homo Sapiens
MKLVFLVLLFLGALGFLWMPFIRQPGLCLAGRRRSVQWCAVSQPEATKCFQWQRNMRKVRGPPVSCIKRDSPIQCIQAIAENRADAVTLDGGFIYEAGLAPYKLRPVAAEVYGTERQPRTHYYAVAVVKKGGSFQLNELQGLKSCHTGLRRTAGWNVPIGTLRPFLNWTGPPEPIEAAVARF

SEQ ID NO: 8146 - protein, 710 aa, Homo Sapiens
MKLVFLVLLFLGALGLCLAGRRRSVQWCAVSQPEATKCFQWQRNMRKVRGPPVSCIKRDSPIQCIQAIAENRADAVTLDGGFIYEAGLAPYKLRPVAAEVYGTERQPRTHYYAVAVVKKGGSFQLNELQGLKSCHTGLRRTAGWNVPIGTLRPFLNWTGPPEPIEAAVARFFSASCVPGADKGQFPNLCRLCAGTGENKCAFSSQEPYFSYSGAFKCLRDGAGDVAFIRESTVFEDLSDEAERDEYELLCPDNTRKPVDKFKDCHLARVPSHAVVARSVNGKEDAIWNLLRQAQEKFGKDKSPKFQLFGSPSGQKDLLFKDSAIGFSRVPPRIDSGLYLGSGYFTAIQNLRKSEEEVAARRARVVWCAVGEQELRKCNQWSGLSEGSVTCSSASTTEDCIALVLKGEADAMSLDGGYVYTAGKCGLVPVLAENYKSQQSSDPDPNCVDRPVEGYLAVAVVRRSDTSLTWNSVKGKKSCHTAVDRTAGWNIPMGLLFNQTGSCKFDEYFSQSCAPGSDPRSNLCALCIGDEQGENKCVPNSNERYYGYTGAFRCLAENAGDVAFVKDVTVLQNTDGNNNEAWAKDLKLADFALLCLDGKRKPVTEARSCHLAMAPNHAVVSRMDKVERLKQVLLHQQAKFGRNGSDCPDKFCLFQSETKNLLFNDNTECLARLHGKTTYEKYLGPQYVAGITNLKKCSTSPLLEACEFLRK

SEQ ID NO: 8147 - protein, 708 aa, Homo Sapiens
MKLVFLVLLFLGALGLCLAGRRRSVQWCAVSQPEATKCFQWQRNMRKVRGPPVSCIKRDSPIQCIQAIAENRADAVTLDGGFIYEAGLAPYKLRPVAAEVYGTERQPRTHYYAVAVVKKGGSFQLNELQGLKSCHTGLRRTAGWNVPIGTLRPFLNWTGPPEPIEAAVARFFSASCVPGADKGQFPNLCRLCAGTGENKCAFSSQEPYFSYSGAFKCLRDGAGDVAFIRESTVFEDLSDEAERDEYELLCPDNTRKPVDKFKDCHLARVPSHAVVARSVNGKEDAIWNLLRQAQEKFGKDKSPKFQLFGSPSGQKDLLFKDSAIGFSRVPPRIDSGLYLGSGYFTAIQNLRKSEEEVAARRARVVWCAVGEQELRKCNQWSGLSEGSVTCSSASTTEDCIALKGEADAMSLDGGYVYTAGKCGLVPVLAENYKSQQSSDPDPNCVDRPVEGYLAVAVVRRSDTSLTWNSVKGKKSCHTAVDRTAGWNIPMGLLFNQTGSCKFDEYFSQSCAPGSDPRSNLCALCIGDEQGENKCVPNSNERYYGYTGAFRCLAENAGDVAFVKDVTVLQNTDGNNNEAWAKDLKLADFALLCLDGKRKPVTEARSCHLAMAPNHAVVSRMDKVERLKQVLLHQQAKFGRNGSDCPDKFCLFQSETKNLLFNDNTECLARLHGKTTYEKYLGPQYVAGITNLKKCSTSPLLEACEFLRK

SEQ ID NO: 8148 - protein, 666 aa, Homo Sapiens
MRKVRGPPVSCIKRDSPIQCIQAIAENRADAVTLDGGFIYEAGLAPYKLRPVAAEVYGTERQPRTHYYAVAVVKKGGSFQLNELQGLKSCHTGLRRTAGWNVPIGTLRPFLNWTGPPEPIEAAVARFFSASCVPGADKGQFPNLCRLCAGTGENKCAFSSQEPYFSYSGAFKCLRDGAGDVAFIRESTVFEDLSDEAERDEYELLCPDNTRKPVDKFKDCHLARVPSHAVVARSVNGKEDAIWNLLRQAQEKFGKDKSPKFQLFGSPSGQKDLLFKDSAIGFSRVPPRIDSGLYLGSGYFTAIQNLRKSEEEVAARRARVVWCAVGEQELRKCNQWSGLSEGSVTCSSASTTEDCIALVLKGEADAMSLDGGYVYTAGKCGLVPVLAENYKSQQSSDPDPNCVDRPVEGYLAVAVVRRSDTSLTWNSVKGKKSCHTAVDRTAGWNIPMGLLFNQTGSCKFDEYFSQSCAPGSDPRSNLCALCIGDEQGENKCVPNSNERYYGYTGAFRCLAENAGDVAFVKDVTVLQNTDGNNNEAWAKDLKLADFALLCLDGKRKPVTEARSCHLAMAPNHAVVSRMDKVERLKQVLLHQQAKFGRNGSDCPDKFCLFQSETKNLLFNDNTECLARLHGKTTYEKYLGPQYVAGITNLKKCSTSPLLEACEFLRK

SEQ ID NO: 8149 - protein, 864 aa, Homo Sapiens
MGCWGQLLVWFGAAGAILCSSPGSQETFLRSSPLPLASPSPRDPKVSAPPSILEPASPLNSPGTEGSWLFSTCGASGRHGPTQTQCDGAYAGTSVVVTVGAAGQLRGVQLWRVPGPGQYLISAYGAAGGKGAKNHLSRAHGVFVSAIFSLGLGESLYILVGQQGEDACPGGSPESQLVCLGESRAVEEHAAMDGSEGVPGSRRWAGGGGGGGGATYVFRVRAGELEPLLVAAGGGGRAYLRPRDRGRTQASPEKLENRSEAPGSGGRGGAAGGGGGWTSRAPSPQAGRSLQEGAEGGQGCSEAWATLGWAAAGGFGGGGGACTAGGGGGGYRGGDASETDNLWADGEDGVSFIHPSSELFLQPLAVTENHGEVEIRRHLNCSHCPLRDCQWQAELQLAECLCPEGMELAVDNVTCMDLHKPPGPLVLMVAVVATSTLSLLMVCGVLILVKQKKWQGLQEMRLPSPELELSKLRTSAIRTAPNPYYCQVGLGPAQSWPLPPGVTEVSPANVTLLRALGHGAFGEVYEGLVIGLPGDSSPLQVAIKTLPELCSPQDELDFLMEALIISKFRHQNIVRCVGLSLRATPRLILLELMSGGDMKSFLRHSRPHLGQPSPLVMRDLLQLAQDIAQGCHYLEENHFIHRDIAARNCLLSCAGPSRVAKIGDFGMARDIYRASYYRRGDRALLPVKWMPPEAFLEGIFTSKTDSWSFGVLLWEIFSLGYMPYPGRTNQEVLDFVVGGGRMDPPRGCPGPVYRIMTQCWQHEPELRPSFASILERLQYCTQDPDVLNSLLPMELGPTPEEEGTSGLGNRSLECLRPPQPQELSPEKLKSWGGSPLGPWLSSGLKPLKSRGLQPQNLWNPTYRS

SEQ ID NO: 8150 - protein, 803 aa, Homo Sapiens
MGCWGQLLVWFGAAGAILCSSPGSQETFLRSSPLPLASPSPRDPKVSAPPSILEPASPLNSPGTEGSWLFSTCGASGRHGPTQTQCDGAYAGTSVVVTVGAAGQLRGVQLWRVPGPGQYLISAYGAAGGKGAKNHLSRAHGVFVSAIFSLGLGESLYILVGQQGEDACPGGSPESQLVCLGESRAVEEHAAMDGSEGVPGSRRWAGGGGGGGGATYVFRVRAGELEPLLVAAGGGGRAYLRPRDRGRTQASPEKLENRSEAPGSGGRGGAAGGDASETDNLWADGEDGVSFIHPSSELFLQPLAVTENHGEVEIRRHLNCSHCPLRDCQWQAELQLAECLCPEGMELAVDNVTCMDLHKPPGPLVLMVAVVATSTLSLLMVCGVLILVKQKKWQGLQEMRLPSPELELSKLRTSAIRTAPNPYYCQVGLGPAQSWPLPPGVTEVSPANVTLLRALGHGAFGEVYEGLVIGLPGDSSPLQVAIKTLPELCSPQDELDFLMEALIISKFRHQNIVRCVGLSLRATPRLILLELMSGGDMKSFLRHSRPHLGQPSPLVMRDLLQLAQDIAQGCHYLEENHFIHRDIAARNCLLSCAGPSRVAKIGDFGMARDIYRASYYRRGDRALLPVKWMPPEAFLEGIFTSKTDSWSFGVLLWEIFSLGYMPYPGRTNQEVLDFVVGGGRMDPPRGCPGPVYRIMTQCWQHEPELRPSFASILERLQYCTQDPDVLNSLLPMELGPTPEEEGTSGLGNRSLECLRPPQPQELSPEKLKSWGGSPLGPWLSSGLKPLKSRGLQPQNLWNPTYRS

SEQ ID NO: 8151 - protein, 734 aa, Homo Sapiens
MGCWGQLLVWFGAAGAILCSSPGSQETFLRSSPLPLASPSPRDPKVSAPPSILEPASPLNSPGTEGSWLFSTCGASGRHGPTQTQCDGAYAGTSVVVTVGAAGQLRGVQLWRVPGPGQYLISAYGAAGGKGAKNHLSRAHGVFVSAIFSLGLGESLYILVGQQGEDACPGGSPESQLVCLGESRAVEEHAAMDGSEGVPGSRRWAGGGGGGGGATYVFRVRAGELEPLLVAAGGGGRAYLRPRDRGRTQASPEKLENRSEAPGSGGRGGAAGGDASETDNLWADGEDGVSFIHPSSELFLQPLAVTENHGEVEIRRHLNCSHCPLRDCQWQAELQLAECLCPEGMELAVDNVTCMDLHKPPGPLVLMVAVVATSTLSLLMVCGVLILGGAWPGPVLASATRCHRGFPSQCYSAQTLPELCSPQDELDFLMEALIISKFRHQNIVRCVGLSLRATPRLILLELMSGGDMKSFLRHSRPHLGQPSPLVMRDLLQLAQDIAQGCHYLEENHFIHRDIAARNCLLSCAGPSRVAKIGDFGMARDIYRASYYRRGDRALLPVKWMPPEAFLEGIFTSKTDSWSFGVLLWEIFSLGYMPYPGRTNQEVLDFVVGGGRMDPPRGCPGPVYRIMTQCWQHEPELRPSFASILERLQYCTQDPDVLNSLLPMELGPTPEEEGTSGLGNRSLECLRPPQPQELSPEKLKSWGGSPLGPWLSSGLKPLKSRGLQPQNLWNPTYRS

SEQ ID NO: 8152 - protein, 562 aa, Homo Sapiens
MGCWGQLLVWFGAAGGDASETDNLWADGEDGVSFIHPSSELFLQPLAVTENHGEVEIRRHLNCSHCPLRDCQWQAELQLAECLCPEGMELAVDNVTCMDLHKPPGPLVLMVAVVATSTLSLLMVCGVLILGTKRLAGTVDSRLLLSMKQKKWQGLQEMRLPSPELELSKLRTSAIRTAPNPYYCQVGLGPAQSWPLPPGVTEVSPANVTLLRALGHGAFGEVYEGLVIGLPGDSSPLQVAIKTLPELCSPQDELDFLMEALIISKFRHQNIVRCVGLSLRATPRLILLELMSGGDMKSFLRHSRPHLGQPSPLVMRDLLQLAQDIAQGCHYLEENHFIHRDIAARNCLLSCAGPSRVAKIGDFGMARDIYRASYYRRGDRALLPVKWMPPEAFLEGIFTSKTDSWSFGVLLWEIFSLGYMPYPGRTNQEVLDFVVGGGRMDPPRGCPGPVYRIMTQCWQHEPELRPSFASILERLQYCTQDPDVLNSLLPMELGPTPEEEGTSGLGNRSLECLRPPQPQELSPEKLKSWGGSPLGPWLSSGLKPLKSRGLQPQNLWNPTYRS

SEQ ID NO: 8153 - protein, 338 aa, Homo Sapiens
MSLSAFTLFLALIGGTSGQYYDYDFPLSIYGQSSPNCAPECNCPESYPSAMYCDELKLKSVPMVPPGIKYLYLRNNQIDHIDEKAFENVTDLQWLILDHNLLENSKIKGRVFSKLKQLKKLHINHNNLTESVGPLPKSLEDLQLTHNKITKLGSFEGLVNLTFIHLQHNRLKEDAVSAAFKGLKSLEYLDLSFNQIARLPSGLPVSLLTLYLDNNKISNIPDEYFKRFNALQYLRLSHNELADSGIPGNSFNVSSLVELDLSYNKLKNIPTVNENLENYYLEVNQLEKFDIKSFCKILGPLSYSKIKHLRLDGNRISETSLPPDMYECLRVANEVTLN

SEQ ID NO: 8154 - protein, 176 aa, Homo Sapiens
MKFSPAHYLLPLLPALVLSTRQDYEELEKQLKEVFKERSTILRQLTKTSRELDGIKVNLQSLKNDEQSAKTDVQKLLELGQKQREEMKSLQEALQNQLKETSEKAEKHQATINFLKTEVERKSKMIRDLQNEAQQLTDLEQKLAVAKNELEKAALDRESQMKAMKETVQLCLTSVF

SEQ ID NO: 8155 - protein, 346 aa, Homo Sapiens
MKFSPAHYLLPLLPALVLSTRQDYEELEKQLKEVFKERSTILRQLTKTSRELDGIKVNLQSLKNDEQSAKTDVQKLLELGQKQREEMKSLQEALQNQLKETSEKAEKHQATINFLKTEVERKSKMIRDLQNENKSLKNKLLSGNKLCGIHAEESKKIQAQLKELRYGKKDLLFKAQQLTDLEQKLAVAKNELEKAALDRESQMKAMKETVQLCLTSVFRDQPPPPLSLITSNPTRMLLPPRNIASKLPDAAAKSKPQQSASGNNESSQVESTKEGNPSTTACDSQDEGRPCSMKHKESPPSNATAETEPIPQKLQMPPCSECEVKKAPEKPLTSFEGMAAREEKIL

SEQ ID NO: 8156 - protein, 260 aa, Homo Sapiens
MKSLQEALQNQLKETSEKAEKHQATINFLKTEVERKSKMIRDLQNENKSLKNKLLSGNKLCGIHAEESKKIQAQLKELRYGKKDLLFKAQQLTDLEQKLAVAKNELEKAALDRESQMKAMKETVQLCLTSVFRDQPPPPLSLITSNPTRMLLPPRNIASKLPDAAAKSKPQQSASGNNESSQVESTKEGNPSTTACDSQDEGRPCSMKHKESPPSNATAETEPIPQKLQMPPCSECEVKKAPEKPLTSFEGMAAREEKIL

SEQ ID NO: 8157 - protein, 260 aa, Homo Sapiens; identical to SEQ ID NO: 8156

SEQ ID NO: 8158 - protein, 978 aa, Homo Sapiens
MGPPSSSGFYVSRAVALLLAGLVAALLLALAVLAALYGHCERVPPSELPGLRDLEAESSPPLRQKPTPTPKPSSARELAVTTTPSNWRPPGPWDQLRLPPWLVPLHYDLELWPQLRPDELPAGSLPFTGRVNITVRCTVATSRLLLHSLFQDCERAEVRGPLSPDDVWFALDTEYMVLELSEPLKPGSSYELQLSFSGLVKEDLREGLFLNVYTDQGERRALLASQLEPTFARYVFPCFDEPALKATFNITMIHHPSYVALSNMPKLGQSEKEDVNGSKWTVTTFSTTPHMPTYLVAFVICDYDHVNRTERGKEIRIWARKDAIANGSADFALNITGPIFSFLEDLFNISYSLPKTDIIALPSFDNHAMENWGLMIFDESGLLLEPKDQLTEKKTLISYVVSHEIGHQWFGNLVTMNWWNNIWLNEGFASYFEFEVINYFNPKLPRNEIFFSNILHNILREDHALVTRAVAMKVENFKTSEIQELFDIFTYSKGASMARMLSCFLNEHLFVSALKSYLKTFSYSNAEQDDLWRHFQMAIDDQSTVILPATIKNIMDSWTHQSGFPVITLNVSTGVMKQEPFYLENIKNRTLLTSNDTWIVPILWIKNGTTQPLVWLDQSSKVFPEMQVSDSDHDWVILNLNMTGYYRVNYDKLGWKKLNQQLEKDPKAIPVIHRLQLIDDAFSLSKNNYIEIETALELTKYLAEEDEIIVWHTVLVNLVTRDLVSEVNIYDIYSLLKRYLLKRLNLIWNIYSTIIRENVLALQDDYLALISLEKLFVTACWLGLEDCLQLSKELFAKWVDHPENEIPYPIKDVVLCYGIALGSDKEWDILLNTYTNTTNKEEKIQLAYAMSCSKDPWILNRYMEYAISTSPFTSNETNIIEVVASSEVGRYVAKDFLVNNWQAVSKRYGTQSLINLIYTIGRTVTTDLQIVELQQFFSNMLEEHQRIRVHANLQTIKNENLKNKKLSARIAAWLRRNT

SEQ ID NO: 8159 - protein, 990 aa, Homo Sapiens
MGPPSSSGFYVSRAVALLLAGLVAALLLALAVLAALYGHCERVPPSELPGLRDLEAESSPPLRQKPTPTPKPSSARELAVTTTPSNWRPPGPWDQLRLPPWLVPLHYDLELWPQLRPDELPAGSLPFTGRVNITVRCTVATSRLLLHSLFQDCERAEVRGPLSPGTGNATVGRVPVDDVWFALDTEYMVLELSEPLKPGSSYELQLSFSGLVKEDLREGLFLNVYTDQGERRALLASQLEPTFARYVFPCFDEPALKATFNITMIHHPSYVALSNMPKLGQSEKEDVNGSKWTVTTFSTTPHMPTYLVAFVICDYDHVNRTERGKEIRIWARKDAIANGSADFALNITGPIFSFLEDLFNISYSLPKTDIIALPSFDNHAMENWGLMIFDESGLLLEPKDQLTEKKTLISYVVSHEIGHQWFGNLVTMNWWNNIWLNEGFASYFEFEVINYFNPKLPRNEIFFSNILHNILREDHALVTRAVAMKVENFKTSEIQELFDIFTYSKGASMARMLSCFLNEHLFVSALKSYLKTFSYSNAEQDDLWRHFQMAIDDQSTVILPATIKNIMDSWTHQSGFPVITLNVSTGVMKQEPFYLENIKNRTLLTSNDTWIVPILWIKNGTTQPLVWLDQSSKVFPEMQVSDSDHDWVILNLNMTGYYRVNYDKLGWKKLNQQLEKDPKAIPVIHRLQLIDDAFSLSKNNYIEIETALELTKYLAEEDEIIVWHTVLVNLVTRDLVSEVNIYDIYSLLKRYLLKRLNLIWNIYSTIIRENVLALQDDYLALISLEKLFVTACWLGLEDCLQLSKELFAKWVDHPENEIPYPIKDVVLCYGIALGSDKEWDILLNTYTNTTNKEEKIQLAYAMSCSKDPWILNRYMEYAISTSPFTSNETNIIEVVASSEVGRYVAKDFLVNNWQAVSKRYGTQSLINLIYTIGRTVTTDLQIVELQQFFSNMLEEHQRIRVHANLQTIKNENLKNKKLSARIAAWLRRNT

SEQ ID NO: 8160 - protein, 701 aa, Homo Sapiens
MGPPSSSGFYVSRAVALLLAGLVAALLLALAVLAALYGHCERVPPSELPGLRDLEAESSPPLRQKPTPTPKPSSARELAVTTTPSNWRPPGPWDQLRLPPWLVPLHYDLELWPQLRPDELPAGSLPFTGRVNITVRCTVATSRLLLHSLFQDCERAEVRGPLSPGTGNATVGRVPVDDVWFALDTEYMVLELSEPLKPGSSYELQLSFSGLVKEDLREGLFLNVYTDQGERRALLASQLEPTFARYVFPCFDEPALKATFNITMIHHPSYVALSNMPKLGQSEKEDVNGSKWTVTTFSTTPHMPTYLVAFVICDYDHVNRTERGKEIRIWARKDAIANGSADFALNITGPIFSFLEDLFNISYSLPKTDIIALPSFDNHAMENWGLMIFDESGLLLEPKDQLTEKKTLISYVVSHEIGHQWFGNLVTMNWWNNIWLNEGFASYFEFEVINYFNPKLPRNEIFFSNILHNILREDHALVTRAVAMKVENFKTSEIQELFDIFTYSKGASMARMLSCFLNEHLFVSALKSYLKTFSYSNAEQDDLWRHFQMAIDDQSTVILPATIKNIMDSWTHQSGFPVITLNVSTGVMKQEPFYLENIKNRTLLTSNDTWIVPILWIKNGTTQPLVWLDQSSKVFPEMQVSDSDHDWVILNLNMTGYYRVNYDKLGWKKLNQQLEKDPKAIPVIHRLQLIDDAFSLSKGTY

SEQ ID NO: 8161 - protein, 226 aa, Homo Sapiens
MKVENFKTSEIQELFDIFTYSKGASMARMLSCFLNEHLFVSALKSYLKTFSYSNAEQDDLWRHFQMAIDDQSTVILPATIKNIMDSWTHQSGFPVITLNVSTGVMKQEPFYLENIKNRTLLTSNDTWIVPILWIKNGTTQPLVWLDQSSKVFPEMQVSDSDHDWVILNLNMTGYYRVNYDKLGWKKLNQQLEKDPKAIPVIHRLQLIDDAFSLSNLQDFGHLKVPN

SEQ ID NO: 8162 - protein, 198 aa, Homo Sapiens
MKVENFKTSEIQELFDIFTYSKGASMARMLSCFLNEHLFVSALKSYLKTFSYSNAEQDDLWRHFQMAIDDQSTVILPATIKNIMDSWTHQSGFPVITLNVSTGVMKQEPFYLENIKNRTLLTSNDTWIVPILWIKNGTTQPLVWLDQSSKVFPEMQVSDSDHDWVILNLNMTGYYRVNYDKLGWKKLNQQLEKDPKMR

SEQ ID NO: 8163 - protein, 198 aa, Homo Sapiens; identical to SEQ ID NO: 8162

SEQ ID NO: 8164 - protein, 66 aa, Homo Sapiens
MKIFLPVLLAALLGVERASSLMCFSCLNQKSNLYCLKPTICSDQDNYCVTVSASAGIASFPMQGIS

SEQ ID NO: 8165 - protein, 66 aa, Homo Sapiens; identical to SEQ ID NO: 8164

SEQ ID NO: 8166 - protein, 73 aa, Homo Sapiens
MKIFLPVLLAALLGVERASSLMCFSCLNQKSNLYCLKPTICSDQDNYCVTVSASAGIGECQASDRAFLPWPSP

SEQ ID NO: 8167 - protein, 66 aa, Homo Sapiens
MKIFLPVLLAALLGVERASSLMCFSCLNQKSNLYCLKPTICSDQDNYCVTVSASAGIGGFAGGTDS

SEQ ID NO: 8168 - protein, 131 aa, Homo Sapiens
MKIFLPVLLAALLGVERASSLMCFSCLNQKSNLYCLKPTICSDQDNYCVTVSASAGIGNLVTFGHSLSKTCSPACPIPEGVNVGVASMGISCCQSFLCNFSAADGGLRASVTLLGAGLLLSLLPALLRFGP

SEQ ID NO: 8169 - protein, 131 aa, Homo Sapiens; identical to SEQ ID NO: 8168

SEQ ID NO: 8170 - protein, 131 aa, Homo Sapiens; identical to SEQ ID NO: 8168

SEQ ID NO: 8171 - protein, 131 aa, Homo Sapiens; identical to SEQ ID NO: 8168

SEQ ID NO: 8172 - protein, 131 aa, Homo Sapiens; identical to SEQ ID NO: 8168

SEQ ID NO: 8173 - protein, 131 aa, Homo Sapiens; identical to SEQ ID NO: 8168

SEQ ID NO: 8174 - protein, 131 aa, Homo Sapiens; identical to SEQ ID NO: 8168

SEQ ID NO: 8175 - protein, 41 aa, Homo Sapiens
MKIFLPVLLAALLGVEREEQSVLPEADHLLRPGQLLRDCVC

SEQ ID NO: 8176 - protein, 41 aa, Homo Sapiens; identical to SEQ ID NO: 8175

SEQ ID NO: 8177 - protein, 147 aa, Homo Sapiens
MTSGIPGCGGACVLPSRAPLRRRDPQHCSPTLSEAPLLRAHTQTRLLTRGLPTPNTTRTVQVSVTVTPTWSPVRPRQDRLLWFVTSRQDGHPLQNEDLLASAAGCPSGCGASQLADVLLLLEPEEQSVLPEADHLLRPGQLLRDCVC

SEQ ID NO: 8178 - protein, 201 aa, Homo Sapiens
MKVHMLVGVLVMVGFTVGKVPVPDIRTCHFCLVEDPSVGCISGSEKCTISSSSLCMVITIYYDVKVRFIVRGCGQYISYRCQEKRNTYFAEYWYQAQCCQYDYCNSWSSPQLQSSLPEPHDRPLALPLSDSQIQWFYQALNLSLPLPNFHAGTEPDGLDPMVTLSLNLGLSFAELRRMYLFLNSSGLLVLPQAGLLTPHPS

SEQ ID NO: 8179 - protein, 146 aa, Homo Sapiens
MVITIYYDVKVRFIVRGCGQYISYRCQEKRNTYFAEYWYQAQCCQYDYCNSWSSPQLQSSLPEPHDRPLALPLSDSQIQWFYQALNLSLPLPNFHAGTEPDGLDPMVTLSLNLGLSFAELRRMYLFLNSSGLLVLPQAGLLTPHPS

SEQ ID NO: 8180 - protein, 133 aa, Homo Sapiens
MKPQFVGILLSSLLGAALGNRMRCYNCGGSPSSSCKEAVTTCGEGRPQPGLEQIKLPGNPPVTLIHQHPACVAAHHCNQVETESVGDVTYPAHRDCYLGDLCNSAVASHVAPAGILAAAATALTCLLPGLWSG

SEQ ID NO: 8181 - protein, 174 aa, Homo Sapiens
MKPQFVGILLSSLLGAALGNRMRCYNCGGSPSSSCKEAVTTCGEGRPQPGLEQIKLPGNRRCFLRGLKIPLGSLKSHLLCPRRQVLKPGVQHPSFILSLSPSDLDSPTSSLRRSPSLQSSGDRVGGRRDLSSPQGLLPGRPVQQRRGKPCGPCRHFGCSSYRPDLSLARTVERI

SEQ ID NO: 8182 - protein, 66 aa, Homo Sapiens
MGTSSIFLCVLFLCGALGLTMSPARGRLRCYICGFTKPCHPVPTECRDDEACGISIGTSDQSEITE

SEQ ID NO: 8183 - protein, 125 aa, Homo Sapiens
MGTSSIFLCVLFLCGALGLTMSPARGRLRCYICGFTKPCHPVPTECRDDEACGISIGTSGKSCLSRAQCPLPGYATYWLHSYTLWHHCCEQDLCNIAASPQQLTSLLASLPLFVASFAGRGHLLH

SEQ ID NO: 8184 - protein, 100 aa, Homo Sapiens
MGTSSIFLCVLFLCGALGLTMSPARGRLRCYICGFTKPCHPVPTECRDDEACGISIGTSGRTLVQWPFSRRLPTSIHPAFPVAPASACLFHPTDQSEITE

SEQ ID NO: 8185 - protein, 88 aa, Homo Sapiens
MLQLYKSRDLGVQITSPRFLSLCLAMGTSSIFLCVLFLCGALGLTMSPARGRLRCYICGFTKPCHPVPTECRDDEACGISIGTSDAHC

SEQ ID NO: 8186 - protein, 161 aa, Homo Sapiens
MLAPQRTRAPSPRAAPRPTRSMLPAAMKGLGLALLAVLLCSAPAHGLWCQDCTLTTNSSHCTPKQCQPSDTVCASVRITDPSSSRKDHSVNKMCASSCDFVKRHFFSDYLMGFINSGILKVDVDCCEKDLCNGAAGAGHSPWALAGGLLLSLGPALLWAGP

SEQ ID NO: 8187 - protein, 161 aa, Homo Sapiens; identical to SEQ ID NO: 8186

SEQ ID NO: 8188 - protein, 140 aa, Homo Sapiens
MLPAAMKGLGLALLAVLLCSAPAHGLWCQDCTLTTNSSHCTPKQCQPSDTVCASVRITDPSSSRKDHSVNKMCASSCDFVKRHFFSDYLMGFINSGILKVDVDCCEKDLCNGAAGAGHSPWALAGGLLLSLGPALLWAGP

SEQ ID NO: 8189 - protein, 140 aa, Homo Sapiens; identical to SEQ ID NO: 8188

SEQ ID NO: 8190 - protein, 165 aa, Homo Sapiens
MALLALLLVVALPRVWTDANLTARQRDPEDSQRTDEGDNRVWCHVCERENTFECQNPRRCKWTEPYCVIAAVKIFPRFFMVAKQCSAGCAAMERPKPEEKRFLLEEPMPFFYLKCCKIRYCNLEGPPINSSVFKEYAGSMGESCGGLWLAILLLLASIAAGLSLS

SEQ ID NO: 8191 - protein, 100 aa, Homo Sapiens
MALLALLLVVALPRVWTDANLTARQRDPEDSQRTDEGDNRVWCHVCERENTFECQNPRRCKWTEPYCVIAAVRRSSGLVNSDSAQQSLSSPSVSTKLVGC

SEQ ID NO: 8192 - protein, 85 aa, Homo Sapiens
MALLALLLVVALPRVWTDANLTARQRDPEDSQRTDEGDNRVWCHVCERENTFECQNPRRCKWTEPYCVIAAVSEYLRSCWGPKGR

SEQ ID NO: 8193 - protein, 105 aa, Homo Sapiens
MALLALLLVVALPRVWTDANLTARQRDPEDSQRTDEGDNRVWCHVCERENTFECQNPRRCKWTEPYCVIAAVTVLRWLCSDGETQARGEAVSPGRAHALLLPQVL

SEQ ID NO: 8194 - protein, 138 aa, Homo Sapiens
MERLVLTLCTLPLAVASAGCATTPARNLSCYQCFKVSSWTECPPTWCSPLDQVCISNEVVVSFKWSVRVLLSKRCAPRCPNDNMKFEWSPAPMVQGVITRRCCSWALCNRALTPQEGRWALRGGLLLQVGLSLLRALL

SEQ ID NO: 8195 - protein, 162 aa, Homo Sapiens
MKGFTATLFLWTLIFPSCSGGGGGKAWPTHVVCSDSGLEVLYQSCDPLQDFGFSVEKCSKQLKSNINIRFGIILREDIKELFLDLALMSQGSSVLNFSYPICEAALPKFSFCGRRKGEQIYYAGPVNNPEFTIPQGEYQVLLELYTEKRSTVACANATIMCS

SEQ ID NO: 8196 - protein, 162 aa, Homo Sapiens; identical to SEQ ID NO: 8195

SEQ ID NO: 8197 - protein, 160 aa, Homo Sapiens [sequence omitted]

SEQ ID NO: 8198 - protein, 130 aa, Homo Sapiens
MLPFLFFSTLFSSIFTEAQKQYWVCNSSDASISYTYCGRDLKQLYFNLYITVNTMNLPKRKEVICRGSDDDYSFCRALKGETVNTTISFSFKGIKFSKGKYKCVVEAISGSPEEMLFCLEFVILHQPNSN

SEQ ID NO: 8199 - protein, 194 aa, Homo Sapiens
MSALWLLLGLLALMDLSESSNWGCYGNIQSLDTPGASCGIGRRHGLNYCGVRASERLAEIDMPYLLKYQPMMQTIGQKYCMDPAVIAGVLSRKSPGDKILVNMGDRTSMVQDPGSQAPTSWISESQVSQTTEVLTTRIKEIQRRFPTWTPDQYLRGGLCAYSGGAGYVRSSQDLSCDFCNDVLARAKYLKRHGF

SEQ ID NO: 8200 - protein, 194 aa, Homo Sapiens; identical to SEQ ID NO: 8199

SEQ ID NO: 8201 - protein, 169 aa, Homo Sapiens
MLSSVVFWGLIALIGTSRGSYPFSHSMKPHLHPRLYHGCYGDIMTMKTSGATCDANSVMNCGIRGSEMFAEMDLRAIKPYQTLIKEVGQRHCVDPAVIAAIISRESHGGSVLQDGWDHRGLKFGLMQLDKQTYHPVGAWDSKEHLSQATGILTERIKAIQKKFPTWSVA

SEQ ID NO: 8202 - protein, 178 aa, Homo Sapiens
MLSSVVFWGLIALIGTSRGSYPFSHSMKPHLHPRLYHGCYGDIMTMKTSGATCDANSVMNCGIRGSEMFAEMDLRAIKPYQTLIKEVGQRHCVDPAVIAAIISRESHGGSVLQDGWDHRGLKFGLMQLDKQTYHPVGAWDSKEHLSQATGILTERIKAIQKKFPTWSVAQHLKGFFLL

SEQ ID NO: 8203 - protein, 178 aa, Homo Sapiens; identical to SEQ ID NO: 8202

SEQ ID NO: 8204 - protein, 212 aa, Homo Sapiens
MLSSVVFWGLIALIGTSRGSYPFSHSMKPHLHPRLYHGCYGDIMTMKTSGATCDANSVMNCGIRGSEMFAEMDLRAIKPYQTLIKEVGQRHCVDPAVIAAIISRESHGGSVLQDGWDHRGLKFGLMQLDKQTYHPVGAWDSKEHLSQATGILTERIKAIQKKFPTWSVAQHLKGGLSAFKSGIEAIATPSDIDNDFVNDIIARAKFYKRQSF

SEQ ID NO: 8205 - protein, 212 aa, Homo Sapiens; identical to SEQ ID NO: 8204

SEQ ID NO: 8206 - protein, 182 aa, Homo Sapiens
MLSSVVFWGLIALIGTSRGSYPFSHSMKPHLHPRLYHGCYGDIMTMKTSGATCDANSVMNCGIRGSEMFAEMDLRAIKPYQTLIKEVGQRHCVDPAVIAAIISRESHGGSVLQDGWDHRGLKFGLMQLDKQTYHPVGAWDSKEHLSQATGILTERIKAIQKKFPTWSVAQHLKGRLYSEYFV

SEQ ID NO: 8207 - protein, 82 aa, Homo Sapiens
MTPLLTLILVVLMGLPLAQALDCHVCAYNGDNCFNPMRCPAMVAYCMTTRTYYTPTRMKVSKSCVPRCFETVYDGYSKHAST

SEQ ID NO: 8208 - protein, 84 aa, Homo Sapiens
MTPLLTLILVVLMGLPLAQALDCHVCAYNGDNCFNPMRCPAMVAYCMTTRTYYTPTRMKVSKSCVPRCFETVYDGYSKHASTTS

SEQ ID NO: 8209 - protein, 116 aa, Homo Sapiens
MTPLLTLILVVLMGLPLAQALDCHVCAYNGDNCFNPMRCPAMVAYCMTTRTYYTPTRMKVSKSCVPRCFETVYDGYSKHASTTSCCQYDLCNGTGLATPATLALAPILLATLWGLL

SEQ ID NO: 8210 - protein, 116 aa, Homo Sapiens; identical to SEQ ID NO: 8209

SEQ ID NO: 8211 - protein, 116 aa, Homo Sapiens; identical to SEQ ID NO: 8209

SEQ ID NO: 8212 - protein, 89 aa, Homo Sapiens
MCQKEVMEQSAGIMYRKSCASSAACLIASAGYQSFCSPGKLNSVCISCCNTPLCNGPRPKKRGSSASALRPGLRTTILFLKLALFSAHC

SEQ ID NO: 8213 - protein, 39 aa, Homo Sapiens
MWVLGIAATFCGLFLLPGENTQRPAAEARLCAANPVLPV

SEQ ID NO: 8214 - protein, 141 aa, Homo Sapiens
MWVLGIAATFCGLFLLPGFALQIQCYQCEEFQLNNDCSSPEFIVNCTVNVQDMCQKEVMEQSAGIMYRKSCASSAACLIASAGYQSFCSPGKLNSVCISCCNTPLCNGPRPKKRGSSASALRPGLRTTILFLKLALFSAHC

SEQ ID NO: 8215 - protein, 125 aa, Homo Sapiens
MRGTRLALLALVLAACGELAPALRCYVCPEPTGVSDCVTIATCTTNETMCKTTLYSREIVYPFQGDSTVTKSCASKCKPSDVDGIGQTLPVSCCNTELCNVDGAPALNSLHCGALTLLPLLSLRL

SEQ ID NO: 8216 - protein, 246 aa, Homo Sapiens
MGPQHLRLVQLFCLLGAISTLPRAGALLCYEATASRFRAVAFHNWKWLLMRNMVCKLQEGCEETLVFIETGTARGVVGFKGCSSSSSYPAQISYLVSPPGVSIASYSRVCRSYLCNNLTNLEPFVKLKASTPKSITSASCSCPTCVGEHMKDCLPNFVTTNSCPLAASTCYSSTLKFQAGFLNTTFLLMGCAREHNQLLADFHHIGSIKVTEVLNILEKSQIVGAASSRQDPAWGVVLGLLFAFRD

SEQ ID NO: 8217 - protein, 211 aa, Homo Sapiens
MGPQHLRLVQLFCLLGAISTLPRMSCGAGCYKTQKGTARGVVGFKGCSSSSSYPAQISYLVSPPGVSIASYSRVCRSYLCNNLTNLEPFVKLKASTPKSITSASCSCPTCVGEHMKDCLPNFVTTNSCPLAASTCYSSTLKFQAGFLNTTFLLMGCAREHNQLLADFHHIGSIKVTEVLNILEKSQIVGAASSRQDPAWGVVLGLLFAFRD

SEQ ID NO: 8218 - protein, 211 aa, Homo Sapiens; identical to SEQ ID NO: 8217

SEQ ID NO: 8219 - protein, 53 aa, Homo Sapiens
MEPGPALAWLLLLSLLADCLKAAQSRDFTVKDIIYLHPSTTPYPGGFKCFTCE

SEQ ID NO: 8220 - protein, 171 aa, Homo Sapiens
MEPGPALAWLLLLSLLADCLKAAQSRDFTVKDIIYLHPSTTPYPGGFKCFTCEKAADNYECNRWAPDIYCPRETRYCYTQHTMEVTGNSISVTKRCVPLEECLSTGCRDSEHEGHKVCTSCCEGNICNLPLPRNETDATFATTSPINQTNGHPRCMSVIVSCLWLWLGLML

SEQ ID NO: 8221 - protein, 171 aa, Homo Sapiens; identical to SEQ ID NO: 8220

SEQ ID NO: 8222 - protein, 76 aa, Homo Sapiens
MEPGPALAWLLLLSLLADCLKAAQSRDFTVKDIIYLHPSTTPYPGGFKCFTCEKAADNYECNRWAPDIYCPRGTMI

SEQ ID NO: 8223 - protein, 76 aa, Homo Sapiens; identical to SEQ ID NO: 8222

SEQ ID NO: 8224 - protein, 50 aa, Homo Sapiens
MLCERHCTEEDENHSKPNKGNAEEIFSAEYWKVRFPASRISGNVNEQHEA

SEQ ID NO: 8225 - protein, 74 aa, Homo Sapiens
MLLITLSANLFTVPERSLTTTFSFSRCERHCTEEDENHSKPNKGNAEEIFSAEYWKVRFPASRISGNVNEQHEA

SEQ ID NO: 8226 - protein, 207 aa, Homo Sapiens
MLLITLSANLFTVPERSLTTTFSFSRYKSSDRPAHKVSMLLLCHALAIAVVQIVIFSESWAFAKNINFYNVRPPLDPTPFPNSFKCFTCENAGDNYNCNRWAEDKWCPQNTQYCLTVHHFTSHGRSTSITKKCASRSECHFVGCHHSRDSEHTECRSCCEGMICNVELPTNHTNAVFAVMHAQRTSGSSAPTLYLPVLAWVFVLPLL

SEQ ID NO: 8227 - protein, 54 aa, Homo Sapiens
MLYKSSDRPAHKVSMLLLCHALAIAVVQIVIFSESWAFAKNINFYNVRPPLDHK

SEQ ID NO: 8228 - protein, 183 aa, Homo Sapiens
MLYKSSDRPAHKVSMLLLCHALAIAVVQIVIFSESWAFAKNINFYNVRPPLDPTPFPNSFKCFTCENAGDNYNCNRWAEDKWCPQNTQYCLTVHHFTSHGRSTSITKKCASRSECHFVGCHHSRDSEHTECRSCCEGMICNVELPTNHTNAVFAVMHAQRTSGSSAPTLYLPVLAWVFVLPLL

SEQ ID NO: 8229 - protein, 183 aa, Homo Sapiens; identical to SEQ ID NO: 8228

SEQ ID NO: 8230 - protein, 183 aa, Homo Sapiens
MRYKSSDRPAHKVSMLLLCHALAIAVVQIVIFSESWAFAKNINFYNVRPPLDPTPFPNSFKCFTCENAGDNYNCNRWAEDKWCPQNTQYCLTVHHFTSHGRSTSITKKCASRSECHFVGCHHSRDSEHTECRSCCEGMICNVELPTNHTNAVFAVMHAQRTSGSSAPTLYLPVLAWVFVLPLL

SEQ ID NO: 8231 - protein, 237 aa, Homo Sapiens
MKGILVAGITAVLVAAVESLSCVQCNSWEKSCVNSIASECPSHANTSCISSSASSSLETPVRLYQNMFCSAENCSEETHITAFTVHVSAEEHFHFVSQCCQGKECSNTSDALDPPLKNVSSNAECPACYESNGTSCHGKPWKCYEEEQCVFLVAELKNDIESKSLVLKGCSNVSNATCQFLSGENKTLGGVIFRKFECANVNSLTPTSAPTTSHNVGSKASLYLLALASLLLRGLLP

SEQ ID NO: 8232 - protein, 54 aa, Homo Sapiens
  misc_feature (1)..(1): Xaa can be any naturally occurring amino acid
XPPLKNVSSNAECPACYESNGTSCHGKPWKCYEEEQCVFLVAELKNGTPGDGAD

SEQ ID NO: 8233 - protein, 148 aa, Homo Sapiens
MKALIVLGLVLLSVTVQGKVFERCELARTLKRLGMDGYRGISLANWMCLAKWESGYNTRATNYNAGDRSTDYGIFQINSRYWCNDGKTPGAVNACHLSCSALLQDNIADAVACAKRVVRDPQGIRAWVAWRNRCQNRDVRQYVQGCGV

SEQ ID NO: 8234 - protein, 104 aa, Homo Sapiens
MKALIVLGLVLLSVTVQGKVFERCELARTLKRLGMDGYRGISLANWMCLAKWESGYNTRATNYNAGDRSTDYGIFQINSRYWCNDGKTPGAVNACHLSCSGKTS

SEQ ID NO: 8235 - protein, 137 aa, Homo Sapiens
MKALIVLGLVLLSVTVQGKVFERCELARTLKRLGMDGYRGISLANWMCLAKWESGYNTRATNYNAGDRSTDYGIFQINSRYWCNDGKTPGAVNACHLSCSGWHGEIVVKTEMSVSMFKVVECNSRIFLLQLILSLSH

SEQ ID NO: 8236 - protein, 146 aa, Homo Sapiens
MKASVVLSLLGYLVVPSGAYILGRCTVAKKLHDGGLDYFEGYSLENWVCLAYFESKFNPMAIYENTREGYTGFGLFQMRGSDWCGDHGRNRCHMSCSALLNPNLEKTIKCAKTIVKGKEGMGAWPTWSRYCQYSDTLARWLDGCKL

SEQ ID NO: 8237 - protein, 146 aa, Homo Sapiens; identical to SEQ ID NO: 8236

SEQ ID NO: 8238 - protein, 148 aa, Homo Sapiens
MTKALLIYLVSSFLALNQASLISRCDLAQVLQLEDLDGFEGYSLSDWLCLAFVESKFNISKINENADGSFDYGLFQINSHYWCNDYKSYSENLCHVDCQDLLNPNLLAGIHCAKRIVSGARGMNNWVEWRLHCSGRPLFYWLTGCRLR

SEQ ID NO: 8239 - protein, 148 aa, Homo Sapiens; identical to SEQ ID NO: 8238

SEQ ID NO: 8240 - protein, 86 aa, Homo Sapiens
  misc_feature (1)..(1): Xaa can be any naturally occurring amino acid
XLEDLDGFEGYSLSDWLCLAFVESKFNISKINENADGSFDYGLFQINSHYWCNDYKSYSENLCHVDCQGIHCAKRIVSGARGMNNW

SEQ ID NO: 8241 - protein, 148 aa, Homo Sapiens
LLLLLAVAVRESWQTEEKTCDLDNFNPVSEERGKVQDCFYLFEMDSSLACSPEISHLSVGSILLVTFASLVAVYVVGGFLYQRLVVGAKGMEQFPHLAFWQDLGNLVADGCDFVCRSKPRNVPAAYRGVGDDQLGEESEERDDHLLPM

SEQ ID NO: 8242 - protein, 92 aa, Homo Sapiens
MFPFYSCWRTGLLLLLLAVAVRESWQTEEKTCDLVGEKGKESEKELALVKRLKPLFNKSFESTVGQGSDTYIYIFRVCREAGNHTSGAGLVQ

SEQ ID NO: 8243 - protein, 109 aa, Homo Sapiens
MFPFYSCWRTGLLLLLLAVAVRESWQTEEKTCDLVGEKGKESEKELALVKRLKPLFNKSFESTVGQGSDTYIYIFRVCREAGNHTSGAGLVQINKSNGKETVVGRLNET

SEQ ID NO: 8244 - protein, 133 aa, Homo Sapiens
MFPFYSCWRTGLLLLLLAVAVRESWQTEEKTCDLVGEKGKESEKELALVKRLKPLFNKSFESTVGQGSDTYIYIFRVCREAGNHTSGAGLVQINKSNGKETVVGRLNETHIFNGSLHHWLLFMLLGGSYTSDW

SEQ ID NO: 8245 - protein, 191 aa, Homo Sapiens
MFPFYSCWRTGLLLLLLAVAVRESWQTEEKTCDLVGEKGKESEKELALVKRLKPLFNKSFESTVGQGSDTYIYIFRVCREAGNHTSGAGLVQINKSNGKETVVGRLNETHIFNGSNWIMLIYKGGDEYDNHCGKEQRRAVVMISCNRHTLADGCDFVCRSKPRNVPAAYRGVGDDQLGEESEERDDHLLPM

SEQ ID NO: 8246 - protein, 277 aa, Homo Sapiens
MFPFYSCWRTGLLLLLLAVAVRESWQTEEKTCDLVGEKGKESEKELALVKRLKPLFNKSFESTVGQGSDTYIYIFRVCREAGNHTSGAGLVQINKSNGKETVVGRLNETHIFNGSNWIMLIYKGGDEYDNHCGKEQRRAVVMISCNRHTLADNFNPVSEERGKVQDCFYLFEMDSSLACSPEISHLSVGSILLVTFASLVAVYVVGGFLYQRLVVGAKGMEQFPHLAFWQDLGNLVADGCDFVCRSKPRNVPAAYRGVGDDQLGEESEERDDHLLPM

SEQ ID NO: 8247 - protein, 25 aa, Homo Sapiens
MLIYKGGDEYDNHCGKEQRRAVVMI

SEQ ID NO: 8248 - protein, 85 aa, Homo Sapiens
VVGGFLYQRLVVGAKGMEQFPHLAFWQDLGNLVAACGFDLFFNLLERERKQKWDIEGSAVLCAGCGMLLHLSLLLAQGSVFLPTF

SEQ ID NO: 8249 - protein, 104 aa, Homo Sapiens
  misc_feature (1)..(1): Xaa can be any naturally occurring amino acid
XFNKSFESTVGQGSDTYIYIFRVCREAGNHTSGAGLVQINKSNGKETVVGRLNETHIFNGSNWIMLIYKGGDEYDNHCGKEQRRAVVMISCNRHTLAESKHLTT

SEQ ID NO: 8250 - protein, 122 aa, Homo Sapiens
  misc_feature (1)..(1): Xaa can be any naturally occurring amino acid
XGGDEYDNHCGKEQRRAVVMISCNRHTLADNFNPVSEERGKVQDCFYLFEMDSSLACSPEISHLSVGSILLVTFASLVAVYVVGGFLYQRLVVGAKGMEQFPHLAFWQDLGNLVAVSNRAAG

SEQ ID NO: 8251 - protein, 96 aa, Homo Sapiens
  misc_feature (1)..(1): Xaa can be any naturally occurring amino acid
XILLVTFASLVAVYVVGGFLYQRLVVGAKGMEQFPHLAFWQDLGNLVAKGNGSRSGTSRALLSSALGVECCCTCPFCWLREVSSCPHFCGERFLIL

SEQ ID NO: 8252 - protein, 157 aa, Homo Sapiens
MEDLGENTMVLSTLRSLNNFISQRVEGGSGLDISTSAPGSLQMQYQQSMQLEERAEQIRSKSHLIQVEREKMQMELSHKRARVELERAASTSARNYEREVDRNQELLTRIRQLQEREAGAEEKMQEQLERNRQCQQNLDAASKRLREKEDSLAQAGE

SEQ ID NO: 8253 - protein, 718 aa, Homo Sapiens
MEDLGENTMVLSTLRSLNNFISQRVEGGSGLDISTSAPGSLQMQYQQSMQLEERAEQIRSKSHLIQVEREKMQMELSHKRARVELERAASTSARNYEREVDRNQELLTRIRQLQEREAGAEEKMQEQLERNRQCQQNLDAASKRLREKEDSLAQAGETINALKGRISELQWSVMDQEMRVKRLESEKQELQEQLDLQHKKCQEANQKIQELQASQEARADHEQQIKDLEQKLSLQEQDAAIVKNMKSELVRLPRLERELKQLREESAHLREMRETNGLLQEELEGLQRKLGRQEKMQETLVGLELENERLLAKLQSWERLDQTMGLSIRTPEDLSRFVVELQQRELALKDKNSAVTSSARGLEKARQQLQEELRQVSGQLLEERKKRETHEALARRLQKRVLLLTKERDGMRAILGSYDSELTPAEYSPQLTRRMREAEDMVQKVHSHSAEMEAQLSQALEELGGQKQRADMLEMELKMLKSQSSSAEQSFLFSREEADTLRLKVEELEGERSRLEEEKRMLEAQLERRALQGDYDQSRTKVLHMSLNPTSVARQRLREDHSQLQAECERLRGLLRAMERGGTVPADLEAAAASLPSSKEVAELKKQVESAELKNQRLKEVFQTKIQEFRKACYTLTGYQIDITTENQYRLTSLYAEHPGDCLIFKATSPSGSKMQLLETEFSHTVGELIEVHLRRQDSIPAFLSSLTLELFSRQTVA

SEQ ID NO: 8254 - protein, 718 aa, Homo Sapiens; identical to SEQ ID NO: 8253

SEQ ID NO: 8255 - protein, 718 aa, Homo Sapiens; identical to SEQ ID NO: 8253

SEQ ID NO: 8256 - protein, 144 aa, Homo Sapiens
MEDLGENTMVLSTLRSLNNFISQRVEGGSGLDISTSAPGSLQMQYQQSMQREVDRNQELLTRIRQLQEREAGAEEKMQEQLERNRQCQQNLDAASKRLREKEDSLAQAGETINALKGRISELQWSVMDQEMRVKRLESEKQELQ

SEQ ID NO: 8257 - protein, 626 aa, Homo Sapiens
MLPARGCVRKRTVWPRLARVLIVTLLTLELSYAPLPCQLSGVPYNTGDPVGRWARPCIWPCPWHTTINALKGRISELQWSVMDQEMRVKRLESEKQELQEQLDLQHKKCQEANQKIQELQASQEARADHEQQIKDLEQKLSLQEQDAAIVKNMKSELVRLPRLERELKQLREESAHLREMRETNGLLQEELEGLQRKLGRQEKMQETLVGLELENERLLAKLQSWERLDQTMGLSIRTPEDLSRFVVELQQRELALKDKNSAVTSSARGLEKARQQLQEELRQVSGQLLEERKKRETHEALARRLQKRVLLLTKERDGMRAILGSYDSELTPAEYSPQLTRRMREAEDMVQKVHSHSAEMEAQLSQALEELGGQKQRADMLEMELKMLKSQSSSAEQSFLFSREEADTLRLKVEELEGERSRLEEEKRMLEAQLERRALQGDYDQSRTKVLHMSLNPTSVARQRLREDHSQLQAECERLRGLLRAMERGGTVPADLEAAAASLPSSKEVAELKKQVESAELKNQRLKEVFQTKIQEFRKACYTLTGYQIDITTENQYRLTSLYAEHPGDCLIFKATSPSGSKMQLLETEFSHTVGELIEVHLRRQDSIPAFLSSLTLELFSRQTVA

SEQ ID NO: 8258 - protein, 205 aa, Homo Sapiens
MQEQLERNRQCQQNLDAASKRLREKEDSLAQAGETINALKGRISELQWSVMDQEMRVKRLESEKQELQEQLDLQHKKCQEANQKIQELQASQEARADHEQQIKDLEQKLSLQEQDAAIVKNMKSELVRLPRLERELKQLREESAHLREMRETNGLLQEELEGLQRKLGRQEKMQETLVGLELENERLLAKLQSWERLDQTMGLSI

SEQ ID NO: 8259 - protein, 213 aa, Homo Sapiens
MQMELSHKRARVELERAASTSARNYEREVDRNQELLTRIRQLQEREAGAEEKMQEQLERNRQCQQNLDAASKRLREKEDSLAQAGETINALKGRISELQWSVMDQEMRVKRLESEKQELQEQLDLQHKKCQEANQKIQELQASQEARADHEQQIKDLEQKLSLQEQDAAIVKNMKSELVRLPRLERELKQLREESAHLREMRETNGLLQEELE

SEQ ID NO: 8260 - protein, 41 aa, Homo Sapiens
MRAILGSYDSELTPAEYSPQLTRRMREAEDMVQKVHSHSAE

SEQ ID NO: 8261 - protein, 80 aa, Homo Sapiens
MRAILGSYDSELTPAEYSPQLTRRMREAEDMVQKVHSHSAEMEAQLSQALEELGGQKQRADMLEMELKMLKSQSSSAEQS

SEQ ID NO: 8262 - protein, 266 aa, Homo Sapiens
MRELEFAKLECCLAWQLQASRRELEMELKMLKSQSSSAEQSFLFSREEADTLRLKVEELEGERSRLEEEKRMLEAQLERRALQGDYDQSRTKVLHMSLNPTSVARQRLREDHSQLQAECERLRGLLRAMERGGTVPADLEAAAASLPSSKEVAELKKQVESAELKNQRLKEVFQTKIQEFRKACYTLTGYQIDITTENQYRLTSLYAEHPGDCLIFKATSPSGSKMQLLETEFSHTVGELIEVHLRRQDSIPAFLSSLTLELFSRQ

SEQ ID NO: 8263 - protein, 122 aa, Homo Sapiens
MSLNPTSVARQRLREDHSQLQAECERLRGLLRAMERGGTVPADLEAAAASLPSSKEVAELKKQVESAELKNQRLKEVFQTKIQEFRKACYTLTGYQIDITTENQYRLTSLYAEHPGDCLIFK

SEQ ID NO: 8264 - protein, 199 aa, Homo Sapiens
MVSLRPCLPGLPTQHLEEPCPGDYSARGLEKARQQLQEELRQVSGQLLEERKKRETHEALARRLQKRVLLLTKERDGMRAILGSYDSELTPAEYSPQLTRRMREAEDMVQKVHSHSAEMEAQLSQALEELGGQKQRADMLEMELKMLKSQSSSAEQSFLFSREEADTLRLKVEELEGERSRLEEEKRMLEAQLERRALQ

SEQ ID NO: 8265 - protein, 58 aa, Homo Sapiens
MIFLTALPLFWIMISASRGGHWGAWMPSSISAFEGTCVSIPCRFDFPDELRPAVVHGV

SEQ ID NO: 8266 - protein, 158 aa, Homo Sapiens
MIFLTALPLFWIMISASRGGHWGAWMPSSISAFEGTCVSIPCRFDFPDELRPAVVHGVWYFNSPYPKNYPPVVFKSRTQVVHESFQGRSRLLGDLGLRNCTLLLSNVSPELGGKYYFRGDLGGYNQYTFSEHSVLDIVNTPNIVVPPEVVAGTEVEVS

SEQ ID NO: 8267 - protein, 582 aa, Homo Sapiens
MIFLTALPLFWIMISASRGGHWGAWMPSSISAFEGTCVSIPCRFDFPDELRPAVVHGVWYFNSPYPKNYPPVVFKSRTQVVHESFQGRSRLLGDLGLRNCTLLLSNVSPELGGKYYFRGDLGGYNQYTFSEHSVLDIVNTPNIVVPPEVVAGTEVEVSCMVPDNCPELRPELSWLGHEGLGEPAVLGRLREDEGTWVQVSLLHFVPTREANGHRLGCQASFPNTTLQFEGYASMDVKYPPVIVEMNSSVEAIEGSHVSLLCGADSNPPPLLTWMRDGTVLREAVAESLLLELEEVTPAEDGVYACLAENAYGQDNRTVGLSVMYAPWKPTVNGTMVAVEGETVSILCSTQSNPDPILTIFKEKQILSTVIYESELQLELPAVSPEDDGEYWCVAENQYGQRATAFNLSVEFAPVLLLESHCAAARDTVQCLCVVKSNPEPSVAFELPSRNVTVNESEREFVYSERSGLVLTSILTLRGQAQAPPRVICTARNLYGAKSLELPFQGAHRLMWAKIGPVGAVVAFAILIAIVCYITQTRRKKNVTESPSFSAGDNPPVLFSSDFRISGAPEKYESKEVSTLESH

SEQ ID NO: 8268 - protein, 626 aa, Homo Sapiens
MIFLTALPLFWIMISASRGGHWGAWMPSSISAFEGTCVSIPCRFDFPDELRPAVVHGVWYFNSPYPKNYPPVVFKSRTQVVHESFQGRSRLLGDLGLRNCTLLLSNVSPELGGKYYFRGDLGGYNQYTFSEHSVLDIVNTPNIVVPPEVVAGTEVEVSCMVPDNCPELRPELSWLGHEGLGEPAVLGRLREDEGTWVQVSLLHFVPTREANGHRLGCQASFPNTTLQFEGYASMDVKYPPVIVEMNSSVEAIEGSHVSLLCGADSNPPPLLTWMRDGTVLREAVAESLLLELEEVTPAEDGVYACLAENAYGQDNRTVGLSVMYAPWKPTVNGTMVAVEGETVSILCSTQSNPDPILTIFKEKQILSTVIYESELQLELPAVSPEDDGEYWCVAENQYGQRATAFNLSVEFAPVLLLESHCAAARDTVQCLCVVKSNPEPSVAFELPSRNVTVNESEREFVYSERSGLVLTSILTLRGQAQAPPRVICTARNLYGAKSLELPFQGAHRLMWAKIGPVGAVVAFAILIAIVCYITQTRRKKNVTESPSFSAGDNPPVLFSSDFRISGAPEKYESERRLGSERRLLGLRGEPPELDLSYSHSDLGKRPTKDSYTLTEELAEYAEIRVK

SEQ ID NO: 8269 - protein, 131 aa, Homo Sapiens
MPSSISAFEGTCVSIPCRFDFPDELRPAVVHGVWYFNSPYPKNYPPVVFKSRTQVVHESFQGRSRLLGDLGLRNCTLLLSNVSPELGGKYYFRGDLGGYNQYTFSEHSVLDIVNTPNIVVPPEVVAGTEVE

SEQ ID NO: 8270 - protein, 601 aa, Homo Sapiens
MPSSISAFEGTCVSIPCRFDFPDELRPAVVHGVWYFNSPYPKNYPPVVFKSRTQVVHESFQGRSRLLGDLGLRNCTLLLSNVSPELGGKYYFRGDLGGYNQYTFSEHSVLDIVNTPNIVVPPEVVAGTEVEVSCMVPDNCPELRPELSWLGHEGLGEPAVLGRLREDEGTWVQVSLLHFVPTREANGHRLGCQASFPNTTLQFEGYASMDVKYPPVIVEMNSSVEAIEGSHVSLLCGADSNPPPLLTWMRDGTVLREAVAESLLLELEEVTPAEDGVYACLAENAYGQDNRTVGLSVMYAPWKPTVNGTMVAVEGETVSILCSTQSNPDPILTIFKEKQILSTVIYESELQLELPAVSPEDDGEYWCVAENQYGQRATAFNLSVEFAPVLLLESHCAAARDTVQCLCVVKSNPEPSVAFELPSRNVTVNESEREFVYSERSGLVLTSILTLRGQAQAPPRVICTARNLYGAKSLELPFQGAHRLMWAKIGPVGAVVAFAILIAIVCYITQTRRKKNVTESPSFSAGDNPPVLFSSDFRISGAPEKYESERRLGSERRLLGLRGEPPELDLSYSHSDLGKRPTKDSYTLTEELAEYAEIRVK

SEQ ID NO: 8271 - protein, 134 aa, Homo Sapiens
MAARWRFWCVSVTMVVALLIVCDVPSASAQRKKEMVLSEKVSQLMEWTNKRPVIRMNGDKFRRLVKAPPRNYSVIVMFTALQLHRQCVVCKQADEEFQILANSWRYSSAFTNRIFFAMVDFDEGSDVFQMFQVF

SEQ ID NO: 8272 - protein, 335 aa, Homo Sapiens
MAARWRFWCVSVTMVVALLIVCDVPSASAQRKKEMVLSEKVSQLMEWTNKRPVIRMNGDKFRRLVKAPPRNYSVIVMFTALQLHRQCVVCKQADEEFQILANSWRYSSAFTNRIFFAMVDFDEGSDVFQMLNMNSAPTFINFPAKGKPKRGDTYELQVRGFSAEQIARWIADRTDVNIRVIRPPNYAGPLMLGLLLAVIGGLVYLRRSNMEFLFNKTGWAFAALCFVLAMTSGQMWNHIRGPPYAHKNPHTGHVNYIHGSSQAQFVAETHIVLLFNGGVTLGMVLLCEAATSDMDIGKRKIMCVAGIGLVVLFFSWMLSIFRSKYHGYPYSFLMS

SEQ ID NO: 8273 - protein, 367 aa, Homo Sapiens
MRKGKGPICLFSRPTLRPSRSKVSLIEGRGANMAARWRFWCVSVTMVVALLIVCDVPSASAQRKKEMVLSEKVSQLMEWTNKRPVIRMNGDKFRRLVKAPPRNYSVIVMFTALQLHRQCVVCKQADEEFQILANSWRYSSAFTNRIFFAMVDFDEGSDVFQMLNMNSAPTFINFPAKGKPKRGDTYELQVRGFSAEQIARWIADRTDVNIRVIRPPNYAGPLMLGLLLAVIGGLVYLRRSNMEFLFNKTGWAFAALCFVLAMTSGQMWNHIRGPPYAHKNPHTGHVNYIHGSSQAQFVAETHIVLLFNGGVTLGMVLLCEAATSDMDIGKRKIMCVAGIGLVVLFFSWMLSIFRSKYHGYPYSFLMS

SEQ ID NO: 8274 - protein, 367 aa, Homo Sapiens; identical to SEQ ID NO: 8273

SEQ ID NO: 8275 - protein, 234 aa, Homo Sapiens
MGPGGRVARLLAPLMWRRAVSSVAGSAVGAEPGLRLLAVQRLPVGAAFCRACQTPNFVRGLHSEPGLEERAEGTVNEGRPESDAADHTGPKFDIDMMVSLLRQENARDICVIQVPPEMRYTDYFVIVSGTSTRHLHAMAFYVVKMYKHLKCKRDPHVKIEGKDTDDWLCVDFGSMVIHLMLPETREIYELEKLWTLRSYDDQLAQIAPETVPEDFILGIEDDTSSVTPVELKCE

SEQ ID NO: 8276 - protein, 686 aa, Homo Sapiens
MLLRGVLLALQALQLAGALDLPAGSCAFEESTCGFDSVLASLPWILNEEGHYIYVDTSFGKQGEKAVLLSPDLQAEEWSCLRLVYQITTSSESLSDPSQLNLYMRFEDESFDRLLWSAKEPSDSWLIASLDLQNSSKKFKILIEGVLGQGNTASIALFEIKMTTGYCIECDFEENHLCGFVNRWNPNVNWFVGGGSIRNVHSILPQDHTFKSELGHYMYVDSVYVKHFQEVAQLISPLTTAPMAGCLSFYYQIQQGNDNVFSLYTRDVAGLYEEIWKADRPGNAAWNLAEVEFSAPYPMEVIFEVAFNGPKGGYVALDDISFSPVHCQNQTELLFSAVEASCNFEQDLCNFYQDKEGPGWTRVKVKPNMYRAGDHTTGLGYYLLANTKFTSQPGYIGRLYGPSLPGNLQYCLRFHYAIYGFLKMSDTLAVYIFEENHVVQEKIWSVLESPRGVWMQAEITFKKPMPTKVVFMSLCKSFWDCGLVALDDITIQLGSCSSSEKLPPPPGECTFEQDECTFTQEKRNRSSWHRRRGETPTSYTGPKGDHTTGVGYYMYIEASHMVYGQKARLLSRPLRGVSGKHCLTFFYHMYGGGTGLLSVYLKKEEDSEESLLWRRRGEQSISWLRALIEYSCERQHQIIFEAIRGVSIRSDIAIDDVKFQAGPCGEMEDTTQQSSGYSEDLNEIEY

SEQ ID NO: 8277 - protein, 165 aa, Homo Sapiens [sequence omitted]

SEQ ID NO: 8278 - protein, 1010 aa, Homo Sapiens
MGAYARASGVCARGCLDSAGPWTMSRALRPPLPPLCFFLLLLAAAGARAGGYETCPTVQPNMLNVHLLPHTHDDVGWLKTVDQYFYGIKNDIQHAGVQYILDSVISALLADPTRRFIYVEIAFFSRWWHQQTNATQEVVRDLVRQGRLEFANGGWVMNDEAATHYGAIVDQMTLGLRFLEDTFGNDGRPRVAWHIDPFGHSREQASLFAQMGFDGFFFGRLDYQDKWVRMQKLEMEQVWRASTSLKPPTADLFTGVLPNGYNPPRNLCWDVLCVDQPLVEDPRSPEYNAKELVDYFLNVATAQGRYYRTNHTVMTMGSDFQYENANMWFKNLDKLIRLVNAQAKGSSVHVLYSTPACYLWELNKANLTWSVKHDDFFPYADGPHQFWTGYFSSRPALKRYERLSYNFLQVCNQLEALVGLAANVGPYGSGDSAPLNEAMAVLQHHDAVSGTSRQHVANDYARQLAAGWGPCEVLLSNALARLRGFKDHFTFCQQLNISICPLSQTAARFQVIVYNPLGRKVNWMVRLPVSEGVFVVKDPNGRTVPSDVVIFPSSDSQAHPPELLFSASLPALGFSTYSVAQVPRWKPQARAPQPIPRRSWSPALTIENEHIRATFDPDTGLLMEIMNMNQQLLLPVRQTFFWYNASIGDNESDQASGAYIFRPNQQKPLPVSRWAQIHLVKTPLVQEVHQNFSAWCSQVVRLYPGQRHLELEWSVGPIPVGDTWGKEVISRFDTPLETKGRFYTDSNGREILERRRDYRPTWKLNQTEPVAGNYYPVNTRIYITDGNMQLTVLTDRSQGGSSLRDGSLELMVHRRLLKDDGRGVSEPLMENGSGAWVRGRHLVLLDTAQAAAAGHRLLAEQEVLAPQVVLAPGGGAAYNLGAPPRTQFSGLRRDLPPSVHLLTLASWGPEMVLLRLEHQFAVGEDSGRNLSAPVTLNLRDLFSTFTITRLQETTLVANQLREAASRLKWTTNTGPTPHQTPYQLDPANITLEPMEIRTFLASVQWKEVDG

SEQ ID NO: 8279 - protein, 1011 aa, Homo Sapiens
MGAYARASGVCARGCLDSAGPWTMSRALRPPLPPLCFFLLLLAAAGARAGGYETCPTVQPNMLNVHLLPHTHDDVGWLKTVDQYFYGIKNDIQHAGVQYILDSVISALLADPTRRFIYVEIAFFSRWWHQQTNATQEVVRDLVRQGRLEFANGGWVMNDEAATHYGAIVDQMTLGLRFLEDTFGNDGRPRVAWHIDPFGHSREQASLFAQMGFDGFFFGRLDYQDKWVRMQKLEMEQVWRASTSLKPPTADLFTGVLPNGYNPPRNLCWDVLCVDQPLVEDPRSPEYNAKELVDYFLNVATAQGRYYRTNHTVMTMGSDFQYENANMWFKNLDKLIRLVNAQQAKGSSVHVLYSTPACYLWELNKANLTWSVKHDDFFPYADGPHQFWTGYFSSRPALKRYERLSYNFLQVCNQLEALVGLAANVGPYGSGDSAPLNEAMAVLQHHDAVSGTSRQHVANDYARQLAAGWGPCEVLLSNALARLRGFKDHFTFCQQLNISICPLSQTAARFQVIVYNPLGRKVNWMVRLPVSEGVFVVKDPNGRTVPSDVVIFPSSDSQAHPPELLFSASLPALGFSTYSVAQVPRWKPQARAPQPIPRRSWSPALTIENEHIRATFDPDTGLLMEIMNMNQQLLLPVRQTFFWYNASIGDNESDQASGAYIFRPNQQKPLPVSRWAQIHLVKTPLVQEVHQNFSAWCSQVVRLYPGQRHLELEWSVGPIPVGDTWGKEVISRFDTPLETKGRFYTDSNGREILERRRDYRPTWKLNQTEPVAGNYYPVNTRIYITDGNMQLTVLTDRSQGGSSLRDGSLELMVHRRLLKDDGRGVSEPLMENGSGAWVRGRHLVLLDTAQAAAAGHRLLAEQEVLAPQVVLAPGGGAAYNLGAPPRTQFSGLRRDLPPSVHLLTLASWGPEMVLLRLEHQFAVGEDSGRNLSAPVTLNLRDLFSTFTITRLQETTLVANQLREAASRLKWTTNTGPTPHQTPYQLDPANITLEPMEIRTFLASVQWKEVDG

SEQ ID NO: 8280 - protein, 172 aa, Homo Sapiens
MGAYARASGVCARGCLDSAGPWTMSRALRPPLPPLCFFLLLLAAAGARAGGYEVCVFGVPVQTCPTVQPNMLNVHLLPHTHDDVGWLKTVDQYFYGIKNDIQHAGVQYILDSVISALLADPTRRFIYVEIAFFSRWWHQQTNATQEVVRDLVRQGRLEFANGGWVMNDEAAT

SEQ ID NO: 8281 - protein, 140 aa, Homo Sapiens
  misc_feature (1)..(1): Xaa can be any naturally occurring amino acid
XLAAGWGPCEVLLSNALARLRGFKDHFTFCQQLNISICPLSQTAARFQVIVYNPLGRKVNWMVRLPVSEGVFVVKDPNGRTVPSDLRQPGAPSGAAVLSLTARPGLQHLFSSPGASLEAPGPRTTAHPQKILVPCFNHRK

SEQ ID NO: 8282 - protein, 67 aa, Homo Sapiens
  misc_feature (1)..(1): Xaa can be any naturally occurring amino acid
XSDVVIFPSSDSQAHPPELLFSASLPALGFSTYSVAQVPRWKPQARAPQPIPRRSWSPALTIENEGC

SEQ ID NO: 8283 - protein, 1009 aa, Homo Sapiens
MGQLCWLPLLAPLLLLRPPGVQSAGPIRAFVVPHSHMDVGWVYTVQESMRAYAANVYTSVVEELARGQQRRFIAVEQEFFRLWWDGVASDQQKYQVRQLLEEGRLEFVIGGQVMHDEAVTHLDDQILQLTEGHGFLYETFGIRPQFSWHVDPFGASATTPTLFALAGFNAHLGSRIDYDLKAAMQEARGLQFVWRGSPSLSERQEIFTHIMDQYSYCTPSHIPFSNRSGFYWNGVAVFPKPPQDGVYPNMSEPVTPANINLYAEALVANVKQRAAWFRTPHVLWPWGCDKQFFNASVQFANMDPLLDHINSHAAELGVSVQYATLGDYFRALHALNVTWRVRDHHDFLPYSTEPFQAWTGFYTSRSSLKGLARRASALLYAGESMFTRYLWPAPRGHLDPTWALQQLQQLRWAVSEVQHHDAITGTESPKVRDMYATHLASGMLGMRKLMASIVLDELQPQAPMAASSDAGPAGHFASVYNPLAWTVTTIVTLTVGFPGVRVTDEAGHPVPSQIQNSTETPSAYDLLILTTIPGLSYRHYNIRPTAGAQEGTQEPAATVASTLQFGRRLRRRTSHAGRYLVPVANDCYIVLLDQDTNLMHSIWERQSNRTVRVTQEFLEYHVNGDVKQGPISDNYLFTPGKAAVPAWEAVEMEIVAGQLVTEIRQYFYRNMTAQNYTYAIRSRLTHVPQGHDGELLCHRIEQEYQAGPLELNREAVLRTSTNLNSQQVIYSDNNGYQMQRRPYVSYVNNSIARNYYPMVQSAFMEDGKSRLVLLSERAHGISSQGNGQVEVMLHRRLWNNFDWDLGYNLTLNDTSVVHPVLWLLLGSWSLTTALRQRSALALQHRPVVLFGDLAGTAPKLPGPQQQEAVTLPPNLHLQILSIPGWRYSSNHTEHSQNLRKGHRGEAQADLRRVLLRLYHLYEVGEDPVLSQPVTVNLEAVLQALGSVVAVEERSLTGTWDLSMLHRWSWRTGPGRHRGDTTSPSRPPGGPIITVHPKEIRTFFIHFQQQ

SEQ ID NO: 8284 - protein, 958 aa, Homo Sapiens
MGQLCWLPLLAPLLLLRPPGVQSAGPIRAFVVPHSHMDVGWVYTVQESMRAYAANVYTSVVEELARGQQRRFIAVEQEFFRLWWDGVASDQQKYQVRQLLEEGRLEFVIGGQVMHDEAVTHLDDQILQLTEGHGFLYETFGIRPQFSWHVDPFGASATTPTLFALAGFNAHLGSRIDYDLKAAMQEARGLQFVWRGSPSLSERQEIFTHIMDQYSYCTPSHIPFSNRSGFYWNGVAVFPKPPQDGVYPNMSEPVTPANINLYAELGVSVQYATLGDYFRALHALNVTWRVRDHHDFLPYSTEPFQAWTGFYTSRSSLKGLARRASALLYAGESMFTRYLWPAPRGHLDPTWALQQLQQLRWAVSEVQHHDAITGTESPKVRDMYATHLASGMLGMRKLMASIVLDELQPQAPMAASSDAGPAGHFASVYNPLAWTVTTIVTLTVGFPGVRVTDEAGHPVPSQIQNSTETPSAYDLLILTTIPGLSYRHYNIRPTAGAQEGTQEPAATVASTLQFGRRLRRRTSHAGRYLVPVANDCYIVLLDQDTNLMHSIWERQSNRTVRVTQEFLEYHVNGDVKQGPISDNYLFTPGKAAVPAWEAVEMEIVAGQLVTEIRQYFYRNMTAQNYTYAIRSRLTHVPQGHDGELLCHRIEQEYQAGPLELNREAVLRTSTNLNSQQVIYSDNNGYQMQRRPYVSYVNNSIARNYYPMVQSAFMEDGKSRLVLLSERAHGISSQGNGQVEVMLHRRLWNNFDWDLGYNLTLNDTSVVHPVLWLLLGSWSLTTALRQRSALALQHRPVVLFGDLAGTAPKLPGPQQQEAVTLPPNLHLQILSIPGWRYSSNHTEHSQNLRKGHRGEAQADLRRVLLRLYHLYEVGEDPVLSQPVTVNLEAVLQALGSVVAVEERSLTGTWDLSMLHRWSWRTGPGRHRGDTTSPSRPPGGPIITVHPKEIRTFFIHFQQQ

SEQ ID NO: 8285 - protein, 953 aa, Homo Sapiens
  misc_feature (1)..(1): Xaa can be any naturally occurring amino acid
XQLCWLPLLAPLLLLRPPGVQSAGPIRAFVVPHSHMDVGWVYTVQESMRAYAANVYTSVVEELARGQQRRFIAVEQEFFRLWWDGVASDQQKYQVRQLLEEGRLEFVIGGQVMHDEAVTHLDDQILQLTEGHGFLYETFGIRPQFSWHVDPFGASATTPTLFALAGFNAHLGSRIDYDLKAAMQEARGLQFVWRGSPSLSERQEIFTHIMDQYSYCTPSHIPFSNRSGFYWNGVAVFPKPPQDGVYPNMSEPVTPANINLYAEALVANVKQRAAWFRTPHVLWPWGCDKQFFNASVQFANMDPLLDHINSHAAELGVSVQYATLGDYFRALHALNVTWRVRDHHDFLPYSTEPFQAWTGFYTSRSSLKGLARRASALLYAGESMFTRYLWPAPRGHLDPTWALQQLQQLRWAVSEVQHHDAITGTESPKVRDMYATHLASGMLGMRKLMASIVLDELQPQAPMAASSDAGPAGHFASVYNPLAWTVTTIVTLTVGFPGVRVTDEAGHPVPSQIQNSTETPSAYDLLILTTIPGLSYRHYNIRPTAGAQEGTQEPAATVASTLQFGRRLRRRTSHAGRYLVPVANDCYIVLLDQDTNLMHSIWERQSNRTVRVTQEFLEYHVNGDVKQGPISDNYLFTPGKAAVPAWEAVEMEIVAGQLVTEIRQYFYRNMTAQNYTYAIRSRLTHVPQGHDGELLCHRIEQEYQAGPLELNREAVLRTSTNLNSQQVIYSDNNGYQMQRRPYVSYVNNSIARNYYPMVQSAFMEDGKSRLVLLSERAHGISSQGNGQVEVMLHRRLWNNFDWDLGYNLTLNDTSVVHPVLWLLLGSWSLTTALRQRSALALQHRPVVLFGDLAGTAPKLPGPQQQEAVTLPPNLHLQILSIPGWRYSSNHTEHSQNLRKGHRGEAQADLRRVLLRLYHLYEVGEDPVLSQPVTVNLEVNFPTPIQTISQGSKP

SEQ ID NO: 8286 - protein, 822 aa, Homo Sapiens
MRLHLLLLLALCGAGTTAAELSYSLRGNWSICNGNGSLELPGAVPGCVHSALFQQGLIQDSYYRFNDLNYRWVSLDNWTYSKEFKIPFEISKWQKVNLILEGVDTVSKILFNEVTIGETDNMFNRYEQCSFSWDWGPSFPTQGIWKDVRIEAYNICHLNYFTFSPIYDKSAQEWNLEIESTFDVVSSKPVGGQVIVAIPKLQTQQTYSIELQPGKRIVELFVNISKNITVETWWPHGHGNQTGYNMTVLFELDGGLNIEKSAKVYFRTVELIEEPIKGSPGLSFYFKINGFPIFLKGSNWIPADSFQDRVTSELLRLLLQSVVDANMNTLRVWGGGIYEQDEFYELCDELGIMVWQDFMFACALYPTDQGFLDSVTAEVAYQIKRLKSHPSIIIWSGNNENEEALMMNWYHISFTDRPIYIKDYVTLYVKNIRELVLAGDKSRPFITSSPTNGAETVAEAWVSQNPNSNYFGDVHFYDYISDCWNWKVFPKARFASEYGYQSWPSFSTLEKVSSTEDWSFNSKFSLHRQHHEGGNKQMLYQAGLHFKLPQSTDPLRTFKDTIYLTQVMQAQCVKTETEFYRRSRSEIVDQQGHTMGALYWQLNDIWQAPSWASLEYGGKWKMLHYFAQNFFAPLLPVGFENENTFYIYGVSDLHSDYSMTLSVRVHTWSSLEPVCSRVTERFVMKGGEAVCLYEEPVSELLRRCGNCTRESCVVSFYLSADHELLSPTNYHFLSSPKEAVGLCKAQITAIISQQGDIFVFDLETSAVAPFVWLDVGSIPGRFSDNGFLMTEKTRTILFYPWEPTSKNELEQSFHVTSLTDIY

SEQ ID NO: 8287 - protein, 879 aa, Homo Sapiens
MRLHLLLLLALCGAGTTAAELSYSLRGNWSICNGNGSLELPGAVPGCVHSALFQQGLIQDSYYRFNDLNYRWVSLDNWTYSKEFKIPFEISKWQKVNLILEGVDTVSKILFNEVTIGETDNMFNRYSFDITNVVRDVNSIELRFQSAVLYAAQQSKAHTRYQVPPDCPPLVQKGECHVNFVRKEQCSFSWDWGPSFPTQGIWKDVRIEAYNICHLNYFTFSPIYDKSAQEWNLEIESTFDVVSSKPVGGQVIVAIPKLQTQQTYSIELQPGKRIVELFVNISKNITVETWWPHGHGNQTGYNMTVLFELDGGLNIEKSAKVYFRTVELIEEPIKGSPGLSFYFKINGFPIFLKGSNWIPADSFQDRVTSELLRLLLQSVVDANMNTLRVWGGGIYEQDEFYELCDELGIMVWQDFMFACALYPTDQGFLDSVTAEVAYQIKRLKSHPSIIIWSGNNENEEALMMNWYHISFTDRPIYIKDYVTLYVKNIRELVLAGDKSRPFITSSPTNGAETVAEAWVSQNPNSNYFGDVHFYDYISDCWNWKVFPKARFASEYGYQSWPSFSTLEKVSSTEDWSFNSKFSLHRQHHEGGNKQMLYQAGLHFKLPQSTDPLRTFKDTIYLTQVMQAQCVKTETEFYRRSRSEIVDQQGHTMGALYWQLNDIWQAPSWASLEYGGKWKMLHYFAQNFFAPLLPVGFENENTFYIYGVSDLHSDYSMTLSVRVHTWSSLEPVCSRVTERFVMKGGEAVCLYEEPVSELLRRCGNCTRESCVVSFYLSADHELLSPTNYHFLSSPKEAVGLCKAQITAIISQQGDIFVFDLETSAVAPFVWLDVGSIPGRFSDNGFLMTEKTRTILFYPWEPTSKNELEQSFHVTSLTDIY

SEQ ID NO: 8288 - protein, 509 aa, Homo Sapiens
MRLHLLLLLALCGAGTTAAELSYSLRGNWSICNGNGSLELPGAVPGCVHSALFQQGLIQDSYYRFNDLNYRWVSLDNWTYSKEFKIPFEISKWQKVNLILEGVDTVSKILFNEVTIGETDNMFNRYSFDITNVVRDVNSIELRFQSAVLYAAQQSKAHTRYQVPPDCPPLVQKGECHVNFVRKEQCSFSWDWGPSFPTQGIWKDVRIEAYNICHLNYFTFSPIYDKSAQEWNLEIESTFDVVSSKPVGGQVIVAIPKLQTQQTYSIELQPGKRIVELFVNISKNITVETWWPHGHGNQTGYNMTVLFELDGGLNIEKSAKVYFRTVELIEEPIKGSPGLSFYFKINGFPIFLKGSNWIPADSFQDRVTSELLRLLLQSVVDANMNTLRVWGGGIYEQDEFYELCDELGIMVWQDFMFACALYPTDQGFLDSVTAEVAYQIKRLKSHPSIIIWSGNNENEEALMMNWYHISFTDRPIYIKDYVTLYVKNIRELVLACGKMPDTIDLTNTC

SEQ ID NO: 8289 - protein, 886 aa, Homo Sapiens
MRLHLLLLLALCGAGTTAAELSYSLRGNWSICNGNGSLELPGAVPGCVHSALFQQGLIQDSYYRFNDLNYRWVSLDNWTYSKEFKIPFEISKWQKVNLILEGVDTVSKILFNEVTIGETDNMFNRYSFDITNVVRDVNSIELRFQSAVLYAAQQSKAHTRYQVPPDCPPLVQKGECHVNFVRKEQCSFSWDWGPSFPTQGIWKDVRIEAYNICHLNYFTFSPIYDKSAQEWNLEIESTFDVVSSKPVGGQVIVAIPKLQTQQTYSIELQPGKRIVELFVNISKNITVETWWPHGHGNQTGYNMTVLFELDGGLNIEKSAKVYFRTVELIEEPIKGSPGLSFYFKINGFPIFLKGSNWIPADSFQDRVTSELLRLLLQSVVDANMNTLRVWGGGIYEQDEFYELCDELGIMVWQDFMFACALYPTDQGFLDSVTAEVAYQIKRLKSHPSIIIWSGNNENEEALMMNWYHISFTDRPIYIKDYVTLYVKNIRELVLAGDKSRPFITSSPTNGAETVAEAWVSQNPNSNYFGDVHFYDYISDCWNWKVFPKARFASEYGYQSWPSFSTLEKVSSTEDWSFNSKFSLHRQHHEGGNKQMLYQAGLHFKLPQSTDPLRTFKDTIYLTQVMQAQCVKTETEFYRRSRSEIVDQQGHTMGALYWQLNDIWQAPSWASLEYGGKWKMLHYFAQNFFAPLLPVGFENENTFYIYGVSDLHSDYSMTLSVRVHTWSSLEPVCSRVTERFVMKGGEAVCLYEEPVSELLRRCGNCTRESCVVSFYLSADHELLSPTNYHFLSSPKEAVGLCKAQITGASLNPRLCSQTYREEISNPTKITSISMTPASLSALVLEQQKLMLPWQLPGQAGMSRMNLVPVAALGPSLEQLGGHHLSAR

SEQ ID NO: 8290 - protein, 397 aa, Homo Sapiens
MRLHLLLLLALCGAGTTAAELSYSLRGNWSICNGNGSLELPGAVPGCVHSALFQQGLIQDSYYRFNDLNYRWVSLDNWTYSKEFKIPFEISKWQKVNLILEGVDTVSKILFNEVTIGETDNMFNRYSFDITNVVRDVNSIELRFQSAVLYAAQQSKAHTRYQVPPDCPPLVQKGECHVNFVRKEQCSFSWDWGPSFPTQGIWKDVRIEAYNICHLNYFTFSPIYDKSAQEWNLEIESTFDVVSSKPVGGQVIVAIPKLQTQQTYSIELQPGKRIVELFVNISKNITVETWWPHGHGNQTGYNMTVLFELDGGLNIEKSAKVYFRTVELIEEPIKGSPGLSFYFKINGFPIFLKGSNWIPADSFQDRVTSEFWGWVGCGPSAQLGQLVTAPFTVCCGC

SEQ ID NO: 8291 - protein, 413 aa, Homo Sapiens
MRLHLLLLLALCGAGTTAAELSYSLRGNWSICNGNGSLELPGAVPGCVHSALFQQGLIQDSYYRFNDLNYRWVSLDNWTYSKEFKIPFEISKWQKVNLILEGVDTVSKILFNEVTIGETDNMFNRYSFDITNVVRDVNSIELRFQSAVLYAAQQSKAHTRYQVPPDCPPLVQKGECHVNFVRKEQCSFSWDWGPSFPTQGIWKDVRIEAYNICHLNYFTFSPIYDKSAQEWNLEIESTFDVVSSKPVGGQVIVAIPKLQTQQTYSIELQPGKRIVELFVNISKNITVETWWPHGHGNQTGYNMTVLFELDGGLNIEKSAKVYFRTVELIEEPIKGSPGLSFYFKINGFPIFLKGSNWIPADSFQDRVTSELLRLLLQSVVDANMNTLRVWGGGIYEQDEFYELCDELGIMVCI

SEQ ID NO: 8292 - protein, 879 aa, Homo Sapiens; identical to SEQ ID NO: 8287

SEQ ID NO: 8293 - protein, 365 aa, Homo Sapiens
MRLHLLLLLALCGAGTTAAELSYSLRGNWSICNGNGSLELPGAVPGCVHSALFQQGLIQDSYYRFNDLNYRWVSLDNWTYSKEFKIPFEISKWQKVNLILEGVDTVSKILFNEVTIGETDNMFNRYSFDITNVVRDVNSIELRFQSAVLYAAQQSKAHTRYQVPPDCPPLVQKGECHVNFVRKEQCSFSWDWGPSFPTQGIWKDVRIEAYNICHLNYFTFSPIYDKSAQEWNLEIESTFDVVSSKPVGGQVIVAIPKLQTQQTYSIELQPGKRIVELFVNISKNITVETWWPHGHGNQTGYNMTVLFELDGGLNIEKSAKSWRLESKIKVSAELCSFRRLWERILPCPFQFLIIAGNPWLVDASL

SEQ ID NO: 8294 - protein, 925 aa, Homo Sapiens
MRLHLLLLLALCGAGTTAAELSYSLRGNWSICNGNGSLELPGAVPGCVHSALFQQGLIQDSYYRFNDLNYRWVSLDNWTYSKEFKIPFEISKWQKVNLILEGVDTVSKILFNEVTIGETDNMFNRYSFDITNVVRDVNSIELRFQSAVLYAAQQSKAHTRYQVPPDCPPLVQKGECHVNFVRKEQCSFSWDWGPSFPTQGIWKDVRIEAYNICHLNYFTFSPIYDKSAQEWNLEIESTFDVVSSKPVGGQVIVAIPKLQTQQTYSIELQPGKRIVELFVNISKNITVETWWPHGHGNQTGYNMTVLFELDGGLNIEKSAKVYFRTVELIEEPIKGSPGLSFYFKINGFPIFLKGSNWIPADSFQDRVTSELFHKKMKFFSRHSHGIIGSIFFLFKCSSPLPAGAGLAVVLQPNWANWLRLLLQSVVDANMNTLRVWGGGIYEQDEFYELCDELGIMVWQDFMFACALYPTDQGFLDSVTAEVAYQIKRLKSHPSIIIWSGNNENEEALMMNWYHISFTDRPIYIKDYVTLYVKNIRELVLAGDKSRPFITSSPTNGAETVAEAWVSQNPNSNYFGDVHFYDYISDCWNWKVFPKARFASEYGYQSWPSFSTLEKVSSTEDWSFNSKFSLHRQHHEGGNKQMLYQAGLHFKLPQSTDPLRTFKDTIYLTQVMQAQCVKTETEFYRRSRSEIVDQQGHTMGALYWQLNDIWQAPSWASLEYGGKWKMLHYFAQNFFAPLLPVGFENENTFYIYGVSDLHSDYSMTLSVRVHTWSSLEPVCSRVTERFVMKGGEAVCLYEEPVSELLRRCGNCTRESCVVSFYLSADHELLSPTNYHFLSSPKEAVGLCKAQITAIISQQGDIFVFDLETSAVAPFVWLDVGSIPGRFSDNGFLMTEKTRTILFYPWEPTSKNELEQSFHVTSLTDIY

SEQ ID NO: 8295 - protein, 62 aa, Homo Sapiens
MRLHLLLLLALCGAGTTAAELSYSLRGNWSICNGNGSLELPGAVPGCVHSALFQQGLIQKEQ

SEQ ID NO: 8296 - protein, 68 aa, Homo Sapiens
MRLHLLLLLALCGAGTTAAELSYSLRGNWSICNGNGSLELPGAVPGCVHSALFQQGLIQSLTLSPRLE

SEQ ID NO: 8297 - protein, 199 aa, Homo Sapiens
MSKAEWDTDQWKTENYINESTEAQSKQKEQKSSEDSYYRFNDLNYRWVSLDNWTYSKEFKIPFEISKWQKVNLILEGVDTVSKILFNEVTIGETDNMFNRYSFDITNVVRDVNSIELRFQSAVLYAAQQSKAHTRYQVPPDCPPLVQKGECHVNFVRKEQCSFSWDWGPSFPTQGIWKDVRIEAYNICHLNYFTFSPIY

SEQ ID NO: 8298 - protein, 215 aa, Homo Sapiens
SKILFNEVTIGETDNMFNRYSFDITNVVRDVNSIELRFQSAVLYAAQQSKAHTRYQVPPDCPPLVQKGECHVNFVRKEQCSFSWDWGPSFPTQGIWKDVRIEAYNICHLNYFTFSPIYDKSAQEWNLEIESTFDVVSSKPVGGQVIVAIPKLQTQQTYSIELQPGKRIVELFVNISKNITVETWWPHGHGNQTGYNMTVLFELDGGLNIEKSAKL

SEQ ID NO: 8299 - protein, 230 aa, Homo Sapiens
  misc_feature (1)..(1): Xaa can be any naturally occurring amino acid
XDCPPLVQKGECHVNFVRKEQCSFSWDWGPSFPTQGIWKDVRIEAYNICHLNYFTFSPIYDKSAQEWNLEIESTFDVVSSKPVGGQVIVAIPKLQTQQTYSIELQPGKRIVELFVNISKNITVETWWPHGHGNQTGYNMTVLFELDGGLNIEKSAKVYFRTVELIEEPIKGSPGLSFYFKINGFPIFLKGSNWIPADSFQDRVTSEFWGWVGCGPSAQLGQLVSLPWCLC

SEQ ID NO: 8300 - protein, 263 aa, Homo Sapiens
MADDNGEPSDDLVPAILDTAHQYSIQVAFHIQPYKGRDDITVHDNIKYIIDTYGSHGAFYRYKNSMGKSLPLFYIYDSYLTSPEAWAHLLTPNGPHSIRNTPYDGVFIALLVEEGHTHDILAAGFDGMYTYFASNGFSFGSSHQNWKAVKNFCDANNLMFIPSVGPGYIDTSIRPWNNHNTRNRVNGKYYETALQAALTVRPEIVSITSFNEWHEGTQIEKAIPKKTPTRLYLDYLPHQPSLYLELTRRWAEHFIKEKEQWLM

SEQ ID NO: 8301 - protein, 250 aa, Homo Sapiens
MARRRRRACIALFLVLLFAFGTLMGLRTLKAPDGLPALGPGLELAPFERRPEGAPAPAARAPAAPAAPPPPPPPPRTADPGGSPGPAPAEAEPAPVQSLRVYSDLHAFYYSWYGSPRREGHYIHWDHVMVPHWDPKISASYPRGRHSPPDDLGSSFYPELGPYSSRDPEVLREHMTQLKEAAIGVLVLSWYPPGMADDNGEPSDDLVPAILDTAHQYSIQVAFHIQPYKGRDDITVHDNIKYIIDTTGKL

SEQ ID NO: 8302 - protein, 457 aa, Homo Sapiens
MARRRRRACIALFLVLLFAFGTLMGLRTLKAPDGLPALGPGLELAPFERRPEGAPAPAARAPAAPAAPPPPPPPPRTADPGGSPGPAPAEAEPAPVQSLRVYSDLHAFYYSWYGSPRREGHYIHWDHVMVPHWDPKISASYPRGRHSPPDDLGSSFYPELGPYSSRDPEVLREHMTQLKEAAIGVLVLSWYPPGMADDNGEPSDDLVPAILDTAHQYSIQVAFHIQPYKGRDDITVHDNIKYIIDTYGSHGAFYRYKNSMGKSLPLFYIYDSYLTSPEAWAHLLTPNGPHSIRNTPYDGVFIALLVEEGHTHDILAAGFDGMYTYFASNGFSFGSSHQNWKAVKNFCDANNLMFIPSVGPGYIDTSIRPWNNHNTRNRVNGKYYETALQAALTVRPEIVSITSFNEWHEGTQIEKAIPKKTPTRLYLDYLPHQPSLYLELTRRWAEHFIKEKEQWLM

SEQ ID NO: 8303 - protein, 235 aa, Homo Sapiens
MITGSPQMTWCPPFWTPPISTASRYGSHGAFYRYKNSMGKSLPLFYIYDSYLTSPEAWAHLLTPNGPHSIRNTPYDGVFIALLVEEGHTHDILAAGFDGMYTYFASNGFSFGSSHQNWKAVKNFCDANNLMFIPSVGPGYIDTSIRPWNNHNTRNRVNGKYYETALQAALTVRPEIVSITSFNEWHEGTQIEKAIPKKTPTRLYLDYLPHQPSLYLELTRRWAEHFIKEKEQWLM

SEQ ID NO: 8304 - protein, 130 aa, Homo Sapiens
VYSDLHAFYYSWYGSPRREGHYIHWDHVMVPHWDPKISASYPRGRHSPPDDLGSSFYPELGPYSSRDPEVLREHMTQLKEAAIGVLVLSWYPPGMADDNGEPSDDLVPAILDTAHQYSIQVWLPWCILPL

SEQ ID NO: 8305 - protein, 185 aa, Homo Sapiens
MRRMRRMWATQGLAVALALSVLPGSRALRPGDCEVCISYLGRFYQDLKDRDVTFSPATIENELIKFCREARGKENRLCYYIGATDDAATKIINEVSKPLAHHIPVEKICEKLKKKDSQICELKYDKQIDLSTVDLKKLRVKELKKILDDWGETCKGCAEKSDYIRKINELMPKYAPKAASARTDL

SEQ ID NO: 8306 - protein, 71 aa, Homo Sapiens
  misc_feature (1)..(1): Xaa can be any naturally occurring amino acid
XATQGLAVALALSVLPGSRALRPGDCEVCISYLGRFYQDLKDRDVTFSPATIENELIKFCREARGKENRLV

SEQ ID NO: 8307 - protein, 397 aa, Homo Sapiens
MFFGGEGSLTYTLGIRGNEPVYTSTQEDCINSCCSTKNISGDKACNLMIFDTRKTARQPNCYLFFCPNEEACPLKPAKGLMSYRIITDFPSLTRNLPSQELPQEDSLLHGQFSQAVTPLAHHHTDYSKPTDISWRDTLSQKFGSSDHLEKLFKMDEASAQLLAYKEKGHSQSSQFSSDQEIAHLLPENVSALPATVAVASPHTTSATPKPATLLPTNASVTPSGTSQPQLATTAPPVTTVTSQPPTTLISTVFTRAAATLQAMATTAVLTTTFQAPTDSKGSLETIPFTEISNLTLNTGNVYNPTALSMSNVESSTMNKTASWEGREASPGSSSQGSVPENQYGLPFEKWLLIGSLLFGVLFLVIGLVLLGRILSESLRRKRYSRLDYLINGIYVDI

SEQ ID NO: 8308 - protein, 57 aa, Homo Sapiens
MFFGGEGSLTYTLVIICFLTLRLSASQNCLKKSLEDVVIDIQSSLSKGIRGNEPVYT

SEQ ID NO: 8309 - protein, 431 aa, Homo Sapiens
MFFGGEGSLTYTLVIICFLTLRLSASQNCLKKSLEDVVIDIQSSLSKGIRGNEPVYTSTQEDCINSCCSTKNISGDKACNLMIFDTRKTARQPNCYLFFCPNEEACPLKPAKGLMSYRIITDFPSLTRNLPSQELPQEDSLLHGQFSQAVTPLAHHHTDYSKPTDISWRDTLSQKFGSSDHLEKLFKMDEASAQLLAYKEKGHSQSSQFSSDQEIAHLLPENVSALPATVAVASPHTTSATPKPATLLPTNASVTPSGTSQPQLATTAPPVTTVTSQPPTTLISTVFTRAAATLQAMATTAVLTTTFQAPTDSKGSLETIPFTEISNLTLNTGNVYNPTALSMSNVESSTMNKTASWEGREASPGSSSQGSVPENQYGLPFEKWLLIGSLLFGVLFLVIGLVLLGRILSESLRRKRYSRLDYLINGIYVDI

SEQ ID NO: 8310 - protein, 350 aa, Homo Sapiens
MIFDTRKTARQPNCYLFFCPNEEACPLKPAKGLMSYRIITDFPSLTRNLPSQELPQEDSLLHGQFSQAVTPLAHHHTDYSKPTDISWRDTLSQKFGSSDHLEKLFKMDEASAQLLAYKEKGHSQSSQFSSDQEIAHLLPENVSALPATVAVASPHTTSATPKPATLLPTNASVTPSGTSQPQLATTAPPVTTVTSQPPTTLISTVFTRAAATLQAMATTAVLTTTFQAPTDSKGSLETIPFTEISNLTLNTGNVYNPTALSMSNVESSTMNKTASWEGREASPGSSSQGSVPENQYGLPFEKWLLIGSLLFGVLFLVIGLVLLGRILSESLRRKRYSRLDYLINGIYVDI

SEQ ID NO: 8311 - protein, 832 aa, Homo Sapiens
MELTGLEVALVLILQKVENGDLSNKILKITDFGLAREWHRTTKMSAAGTYAWMAPEVIRASMFSKGSDVWSYGVLLWELLTGEVPFRGIDGLAVAYGVAMNKLALPIPSTCPEPFAKLMEDCWNPDPHSRPSFTNILDQLTTIEESGFFEMPKDSFHCLQDNWKHEIQEMFDQLRAKEKELRTWEEELTRAALQQKNQEELLRRREQELAEREIDILERELNIIIHQLCQEKPRVKKRKGKFRKSRLKLKDGNRISLPSDFQHKFTVQASPTMDKRKSLINSRSSPPASPTIIPRLRAIQLTPGESSKTWGRSSVVPKEEGEEEEKRAPKKKGRTWGPGTLGQKELASGDEGLKSLVDGYKQWSSSAPNLVKGPRSSPALPGFTSLMEMALLAASWVVPIDIEEDEDSEGPGSGESRLQHSPSQSYLCIPFPRGEDGDGPSSDGIHEEPTPVNSATSTPQLTPTNSLKRGGAHHRRCEVALLGCGAVLAATGLGFDLLEAGKCQLLPLEEPEPPAREEKKRREGLFQRSSRPRRSTSPPSRKLFKKEEPMLLLGDPSASLTLLSLSSISECNSTRSLLRSDSDEIVVYEMPVSPVEAPPLSPCTHNPLVNVRVERFKRDPNQSLTPTHVTLTTPSQPSSHRRTPSDGALKPETLLASRSPSSNGLSPSPGAGMLKTPSPSRDPGEFPRLPDPNVVFPPTPRRWNTQQDSTLERPKTLEFLPRPRPSANRQRLDPWWFVSPSHARSTSPANSSSTETPSNLDSCFASSSSTVEERPGLPALLPFQAGPLPPTERTLLDLDAEGQSQDSTVPLCRAELNTHRPAPYEIQQEFWS

SEQ ID NO: 8312 - protein, 880 aa, Homo Sapiens
MELTGLEVALVLILQKVENGDLSNKILKITDFGLAREWHRTTKMSAAGTYAWMAPEVIRASMFSKGSDVWSYGVLLWELLTGEVPFRGIDGLAVAYGVAMNKLALPIPSTCPEPFAKLMEDCWNPDPHSRPSFTNILDQLTTIEESGFFEMPKDSFHCLQDNWKHEIQEMFDQLRAKEKELRTWEEELTRAALQQKNQEELLRRREQELAEREIDILERELNIIIHQLCQEKPRVKKRKGKFRKSRLKLKDGNRISLPSDFQHKFTVQASPTMDKRKSLINSRSSPPASPTIIPRLRAIQCETVSQISWGQNTQGHLSPALSSHRLVQACSIHNFCHLSSTMCIYMHILTPGESSKTWGRSSVVPKEEGEEEEKRAPKKKGRTWGPGTLGQKELASGDEGLKSLVDGYKQWSSSAPNLVKGPRSSPALPGFTSLMEMALLAASWVVPIDIEEDEDSEGPGSGESRLQHSPSQSYLCIPFPRGEDGDGPSSDGIHEEPTPVNSATSTPQLTPTNSLKRGGAHHRRCEVALLGCGAVLAATGLGFDLLEAGKCQLLPLEEPEPPAREEKKRREGLFQRSSRPRRSTSPPSRKLFKKEEPMLLLGDPSASLTLLSLSSISECNSTRSLLRSDSDEIVVYEMPVSPVEAPPLSPCTHNPLVNVRVERFKRDPNQSLTPTHVTLTTPSQPSSHRRTPSDGALKPETLLASRSPSSNGLSPSPGAGMLKTPSPSRDPGEFPRLPDPNVVFPPTPRRWNTQQDSTLERPKTLEFLPRPRPSANRQRLDPWWFVSPSHARSTSPANSSSTETPSNLDSCFASSSSTVEERPGLPALLPFQAGPLPPTERTLLDLDAEGQSQDSTVPLCRAELNTHRPAPYEIQQEFWS

SEQ ID NO: 8313 - protein, 1081 aa, Homo Sapiens
MEPSRALLGCLASAAAAAPPGEDGAGAGAEEEEEEEEEAAAAVGPGELGCDAPLPYWTAVFEYEAAGEDELTLRLGDVVEVLSKDSQVSGDEGWWTGQLNQRVGIFPSNYVTPRSAFSSRCQPGGEDPSCYPPIQLLEIDFAELTLEEIIGIGGFGKVYRAFWIGDEVAVKAARHDPDEDISQTIENVRQEAKLFAMLKHPNIIALRGVCLKEPNLCLVMEFARGGPLNRVLSGKRIPPDILVNWAVQIARGMNYLHDEAIVPIIHRDLKSSNILILQKVENGDLSNKILKITDFGLAREWHRTTKMSAAGTYAWMAPEVIRASMFSKGSDVWSYGVLLWELLTGEVPFRGIDGLAVAYGVAMNKLALPIPSTCPEPFAKLMEDCWNPDPHSRPSFTNILDQLTTIEESGFFEMPKDSFHCLQDNWKHEIQEMFDQLRAKEKELRTWEEELTRAALQQKNQEELLRRREQELAEREIDILERELNIIIHQLCQEKPRVKKRKGKFRKSRLKLKDGNRISLPSDFQHKFTVQASPTMDKRKSLINSRSSPPASPTIIPRLRAIQLTPGESSKTWGRSSVVPKEEGEEEEKRAPKKKGRTWGPGTLGQKELASGDEGLKSLVDGYKQWSSSAPNLVKGPRSSPALPGFTSLMEMEDEDSEGPGSGESRLQHSPSQSYLCIPFPRGEDGDGPSSDGIHEEPTPVNSATSTPQLTPTNSLKRGGAHHRRCEVALLGCGAVLAATGLGFDLLEAGKCQLLPLEEPEPPAREEKKRREGLFQRSSRPRRSTSPPSRKLFKKEEPMLLLGDPSASLTLLSLSSISECNSTRSLLRSDSDEIVVYEMPVSPVEAPPLSPCTHNPLVNVRVERFKRDPNQSLTPTHVTLTTPSQPSSHRRTPSDGALKPETLLASRSPSSNGLSPSPGAGMLKTPSPSRDPGEFPRLPDPNVVFPPTPRRWNTQQDSTLERPKTLEFLPRPRPSANRQRLDPWWFVSPSHARSTSPANSSSTETPSNLDSCFASSSSTVEERPGLPALLPFQAGPLPPTERTLLDLDAEGQSQDSTVPLCRAELNTHRPAPYEIQQEFWS

SEQ ID NO: 8314 - protein, 1118 aa, Homo Sapiens
MEPSRALLGCLASAAAAAPPGEDGAGAGAEEEEEEEEEAAAAVGPGELGCDAPLPYWTAVFEYEAAGEDELTLRLGDVVEVLSKDSQVSGDEGWWTGQLNQRVGIFPSNYVTPRSAFSSRCQPGGEDPSCYPPIQLLEIDFAELTLEEIIGIGGFGKVYRAFWIGDEVAVKAARHDPDEDISQTIENVRQEAKLFAMLKHPNIIALRGVCLKEPNLCLVMEFARGGPLNRVLSGKRIPPDILVNWAVQIARGMNYLHDEAIVPIIHRDLKSSNILILQKVENGDLSNKILKITDFGLAREWHRTTKMSAAGTYAWMAPEVIRASMFSKGSDVWSYGVLLWELLTGEVPFRGIDGLAVAYGVAMNKLALPIPSTCPEPFAKLMEDCWNPDPHSRPSFTNILDQLTTIEESGFFEMPKDSFHCLQDNWKHEIQEMFDQLRAKEKELRTWEEELTRAALQQKNQEELLRRREQELAEREIDILERELNIIIHQLCQEKPRVKKRKGKFRKSRLKLKDGNRISLPSDFQHKFTVQASPTMDKRKSLINSRSSPPASPTIIPRLRAIQLTPGESSKTWGRSSVVPKEEGEEEEKRAPKKKGRTWGPGTLGQKELASGDEGSPQRREKANGLSTPSESPHFHLGLKSLVDGYKQWSSSAPNLVKGPRSSPALPGFTSLMEMALLAASWVVPIDIEEDEDSEGPGSGESRLQHSPSQSYLCIPFPRGEDGDGPSSDGIHEEPTPVNSATSTPQLTPTNSLKRGGAHHRRCEVALLGCGAVLAATGLGFDLLEAGKCQLLPLEEPEPPAREEKKRREGLFQRSSRPRRSTSPPSRKLFKKEEPMLLLGDPSASLTLLSLSSISECNSTRSLLRSDSDEIVVYEMPVSPVEAPPLSPCTHNPLVNVRVERFKRDPNQSLTPTHVTLTTPSQPSSHRRTPSDGALKPETLLASRSPSSNGLSPSPGAGMLKTPSPSRDPGEFPRLPDPNVVFPPTPRRWNTQQDSTLERPKTLEFLPRPRPSANRQRLDPWWFVSPSHARSTSPANSSSTETPSNLDSCFASSSSTVEERPGLPALLPFQAGPLPPTERTLLDLDAEGQSQDSTVPLCRAELNTHRPAPYEIQQEFWS

SEQ ID NO: 8315 - protein, 1104 aa, Homo Sapiens
MEPSRALLGCLASAAAAAPPGEDGAGAGAEEEEEEEEEAAAAVGPGELGCDAPLPYWTAVFEYEAAGEDELTLRLGDVVEVLSKDSQVSGDEGWWTGQLNQRVGIFPSNYVTPRSAFSSRCQPGGEDPSCYPPIQLLEIDFAELTLEEIIGIGGFGKVYRAFWIGDEVAVKAARHDPDEDISQTIENVRQEAKLFAMLKHPNIIALRGVCLKEPNLCLVMEFARGGPLNRVLSGKRIPPDILVNWAVQIARGMNYLHDEAIVPIIHRDLKSSNILILQKVENGDLSNKILKITDFGLAREWHRTTKMSAAGTYAWMAPEVIRASMFSKGSDVWSYGVLLWELLTGEVPFRGIDGLAVAYGVAMNKLALPIPSTCPEPFAKLMEDCWNPDPHSRPSFTNILDQLTTIEESGFFEMPKDSFHCLQDNWKHEIQEMFDQLRAKEKELRTWEEELTRAALQQKNQEELLRRREQELAEREIDILERELNIIIHQLCQEKPRVKKRKGKFRKSRLKLKDGNRISLPSDFQHKFTVQASPTMDKRKSLINSRSSPPASPTIIPRLRAIQLTPGESSKTWGRSSVVPKEEGEEEEKRAPKKKGRTWGPGTLGQKELASGDEGSPQRREKANGLSTPSESPHFHLGLKSLVDGYKQWSSSAPNLVKGPRSSPALPGFTSLMEMEDEDSEGPGSGESRLQHSPSQSYLCIPFPRGEDGDGPSSDGIHEEPTPVNSATSTPQLTPTNSLKRGGAHHRRCEVALLGCGAVLAATGLGFDLLEAGKCQLLPLEEPEPPAREEKKRREGLFQRSSRPRRSTSPPSRKLFKKEEPMLLLGDPSASLTLLSLSSISECNSTRSLLRSDSDEIVVYEMPVSPVEAPPLSPCTHNPLVNVRVERFKRDPNQSLTPTHVTLTTPSQPSSHRRTPSDGALKPETLLASRSPSSNGLSPSPGAGMLKTPSPSRDPGEFPRLPDPNVVFPPTPRRWNTQQDSTLERPKTLEFLPRPRPSANRQRLDPWWFVSPSHARSTSPANSSSTETPSNLDSCFASSSSTVEERPGLPALLPFQAGPLPPTERTLLDLDAEGQSQDSTVPLCRAELNTHRPAPYEIQQEFWS

SEQ ID NO: 8316 - protein, 837 aa, Homo Sapiens
MSAAGTYAWMAPEVIRASMFSKGSDVWSYGVLLWELLTGEVPFRGIDGLAVAYGVAMNKLALPIPSTCPEPFAKLMEDCWNPDPHSRPSFTNILDQLTTIEESGFFEMPKDSFHCLQDNWKHEIQEMFDQLRAKEKELRTWEEELTRAALQQKNQEELLRRREQELAEREIDILERELNIIIHQLCQEKPRVKKRKGKFRKSRLKLKDGNRISLPSDFQHKFTVQASPTMDKRKSLINSRSSPPASPTIIPRLRAIQCETVSQISWGQNTQGHLSPALSSHRLVQACSIHNFCHLSSTMCIYMHILTPGESSKTWGRSSVVPKEEGEEEEKRAPKKKGRTWGPGTLGQKELASGDEGLKSLVDGYKQWSSSAPNLVKGPRSSPALPGFTSLMEMALLAASWVVPIDIEEDEDSEGPGSGESRLQHSPSQSYLCIPFPRGEDGDGPSSDGIHEEPTPVNSATSTPQLTPTNSLKRGGAHHRRCEVALLGCGAVLAATGLGFDLLEAGKCQLLPLEEPEPPAREEKKRREGLFQRSSRPRRSTSPPSRKLFKKEEPMLLLGDPSASLTLLSLSSISECNSTRSLLRSDSDEIVVYEMPVSPVEAPPLSPCTHNPLVNVRVERFKRDPNQSLTPTHVTLTTPSQPSSHRRTPSDGALKPETLLASRSPSSNGLSPSPGAGMLKTPSPSRDPGEFPRLPDPNVVFPPTPRRWNTQQDSTLERPKTLEFLPRPRPSANRQRLDPWWFVSPSHARSTSPANSSSTETPSNLDSCFASSSSTVEERPGLPALLPFQAGPLPPTERTLLDLDAEGQSQDSTVPLCRAELNTHRPAPYEIQQEFWS

SEQ ID NO: 8317 - protein, 55 aa, Homo Sapiens
MFGQIQSPGYPDSYPSDSEVTWNITVPDGFRIKLYFMHFNLESSYLCEYDYVKVE

SEQ ID NO: 8318 - protein, 354 aa, Homo Sapiens
MFGQIQSPGYPDSYPSDSEVTWNITVPDGFRIKLYFMHFNLESSYLCEYDYVKVETEDQVLATFCGRETTDTEQTPGQEVVLSPGSFMSITFRSDFSNEERFTGFDAHYMAVDVDECKEREDEELSCDHYCHNYIGGYYCSCRFGYILHTDNRTCRVECSDNLFTQRTGVITSPDFPNPYPKSSECLYTIELEEGFMVNLQFEDIFDIEDHPEVPCPYDYIKIKVGPKVLGPFCGEKAPEPISTQSHSVLILFHSDNSGENRGWRLSYRAAGNECPELQPPVHGKIEPSQAKYFFKDQVLVSCDTGYKVLKDNVEMDTFQIECLKDGTWSNKIPTCKKNEIDLESELKSEQVTE

SEQ ID NO: 8319 - protein, 118 aa, Homo Sapiens
MPANSRDTQGPQNKDKASRTPHRARAHRWLLLYYALCFSLSKASAHTVELNNMFGQIQSPGYPDSYPSDSEVTWNITVPDGFRIKLYFMHFNLESSYLCEYDYVKVETEDQVLATFCG

SEQ ID NO: 8320 - protein, 205 aa, Homo Sapiens [sequence omitted]

SEQ ID NO: 8321 - protein, 380 aa, Homo Sapiens
MRWLLLYYALCFSLSKASAHTVELNNMFGQIQSPGYPDSYPSDSEVTWNITVPDGFRIKLYFMHFNLESSYLCEYDYVKVETEDQVLATFCGRETTDTEQTPGQEVVLSPGSFMSITFRSDFSNEERFTGFDAHYMAVDVDECKEREDEELSCDHYCHNYIGGYYCSCRFGYILHTDNRTCRVECSDNLFTQRTGVITSPDFPNPYPKSSECLYTIELEEGFMVNLQFEDIFDIEDHPEVPCPYDYIKIKVGPKVLGPFCGEKAPEPISTQSHSVLILFHSDNSGENRGWRLSYRAAGNECPELQPPVHGKIEPSQAKYFFKDQVLVSCDTGYKVLKDNVEMDTFQIECLKDGTWSNKIPTCKKNEIDLESELKSEQVTE

SEQ ID NO: 8322 - protein, 728 aa, Homo Sapiens
MRWLLLYYALCFSLSKASAHTVELNNMFGQIQSPGYPDSYPSDSEVTWNITVPDGFRIKLYFMHFNLESSYLCEYDYVKVETEDQVLATFCGRETTDTEQTPGQEVVLSPGSFMSITFRSDFSNEERFTGFDAHYMAVDVDECKEREDEELSCDHYCHNYIGGYYCSCRFGYILHTDNRTCRVECSDNLFTQRTGVITSPDFPNPYPKSSECLYTIELEEGFMVNLQFEDIFDIEDHPEVPCPYDYIKIKVGPKVLGPFCGEKAPEPISTQSHSVLILFHSDNSGENRGWRLSYRAAGNECPELQPPVHGKIEPSQAKYFFKDQVLVSCDTGYKVLKDNVEMDTFQIECLKDGTWSNKIPTCKIVDCRAPGELEHGLITFSTRNNLTTYKSEIKYSCQEPYYKMLNNNTGIYTCSAQGVWMNKVLGRSLPTCLPECGQPSRSLPSLVKRIIGGRNAEPGLFPWQALIVVEDTSRVPNDKWFGSGALLSASWILTAAHVLRSQRRDTTVIPVSKEHVTVYLGLHDVRDKSGAVNSSAARVVLHPDFNIQNYNHDIALVQLQEPVPLGPHVMPVCLPRLEPEGPAPHMLGLVAGWGISNPNVTVDEIISSGTRTLSDVLQYVKLPVVPHAECKTSYESRSGNYSVTENMFCAGYYEGGKDTCLGDSGGAFVIFDDLSQRWVVQGLVSWGGPEECGSKQVYGVYTKVSNYVDWVWEQMGLPQSVVEPQVER

SEQ ID NO: 8323 - protein, 699 aa, Homo Sapiens
MRWLLLYYALCFSLSKASAHTVELNNMFGQIQSPGYPDSYPSDSEVTWNITVPDGFRIKLYFMHFNLESSYLCEYDYVKVETEDQVLATFCGRETTDTEQTPGQEVVLSPGSFMSITFRSDFSNEERFTGFDAHYMAVDVDECKEREDEELSCDHYCHNYIGGYYCSCRFGYILHTDNRTCRVECSDNLFTQRTGVITSPDFPNPYPKSSECLYTIELEEGFMVNLQFEDIFDIEDHPEVPCPYDYIKIKVGPKVLGPFCGEKAPEPISTQSHSVLILFHSDNSGENRGWRLSYRAAGNECPELQPPVHGKIEPSQAKYFFKDQVLVSCDTGYKVLKDNVEMDTFQIECLKDGTWSNKIPTCKIVDCRAPGELEHGLITFSTRNNLTTYKSEIKYSCQEPYYKMLNNNTGIYTCSAQGVWMNKVLGRSLPTCLPVCGLPKFSRKLMARIFNGRPAQKGTTPWIAMLSHLNGQPFCGGSLLGSSWIVTAAHCLHQSLDPEDPTLRDSDLLSPSDFKIILGKHWRLRSDENEQHLGVKHTTLHPQYDPNTFENDVALVELLESPVLNAFVMPICLPEGPQQEGAMVIVSGWGKQFLQRFPETLMEIEIPIVDHSTCQKAYAPLKKKVTRDMICAGEKEGGKDACAGDSGGPMVTLNRERGQWYLVGTVSWGDDCGKKDRYGVYSYIHHNKDWIQRVTGVRN

SEQ ID NO: 8324 - protein, 615 aa, Homo Sapiens
MSITFRSDFSNEERFTGFDAHYMAVDVDECKEREDEELSCDHYCHNYIGGYYCSCRFGYILHTDNRTCRVECSDNLFTQRTGVITSPDFPNPYPKSSECLYTIELEEGFMVNLQFEDIFDIEDHPEVPCPYDYIKIKVGPKVLGPFCGEKAPEPISTQSHSVLILFHSDNSGENRGWRLSYRAAGNECPELQPPVHGKIEPSQAKYFFKDQVLVSCDTGYKVLKDNVEMDTFQIECLKDGTWSNKIPTCKIVDCRAPGELEHGLITFSTRNNLTTYKSEIKYSCQEPYYKMLNNNTGIYTCSAQGVWMNKVLGRSLPTCLPECGQPSRSLPSLVKRIIGGRNAEPGLFPWQALIVVEDTSRVPNDKWFGSGALLSASWILTAAHVLRSQRRDTTVIPVSKEHVTVYLGLHDVRDKSGAVNSSAARVVLHPDFNIQNYNHDIALVQLQEPVPLGPHVMPVCLPRLEPEGPAPHMLGLVAGWGISNPNVTVDEIISSGTRTLSDVLQYVKLPVVPHAECKTSYESRSGNYSVTENMFCAGYYEGGKDTCLGDSGGAFVIFDDLSQRWVVQGLVSWGGPEECGSKQVYGVYTKVSNYVDWVWEQMGLPQSVVEPQVER

SEQ ID NO: 8325 - protein, 686 aa, Homo Sapiens
MRLLTLLGLLCGSVATPLGPKWPEPVFGRLASPGFPGEYANDQERRWTLTAPPGYRLRLYFTHFDLELSHLCEYDFVKLSSGAKVLATLCGQESTDTERAPGKDTFYSLGSSLDITFRSDYSNEKPFTGFEAFYAAEDIDECQVAPGEAPTCDHHCHNHLGGFYCSCRAGYVLHRNKRTCSALCSGQVFTQRSGELSSPEYPRPYPKLSSCTYSISLEEGFSVILDFVESFDVETHPETLCPYDFLKIQTDREEHGPFCGKTLPHRIETKSNTVTITFVTDESGDHTGWKIHYTSTAQPCPYPMAPPNGHVSPVQAKYILKDSFSIFCETGYELLQGHLPLKSFTAVCQKDGSWDRPMPACSIVDCGPPDDLPSGRVEYITGPGVTTYKAVIQYSCEETFYTMKVNDGKYVCEADGFWTSSKGEKSLPVCEPVCGLSARTTGGRIYGGQKAKPGDFPWQVLILGGTTAAGALLYDNWVLTAAHAVYEQKHDASALDIRMGTLKRLSPHYTQAWSEAVFIHEGYTHDAGFDNDIALIKLNNKVVINSNITPICLPRKEAESFMRTDDIGTASGWGLTQRGFLARNLMYVDIPIVDHQKCTAAYEKPPYPRGSVTANMLCAGLESGGKDSCRGDSGGALVFLDSETERWFVGGIVSWGSMNCGEAGQYGVYTKVINYIPWIENIISDF

SEQ ID NO: 8326 - protein, 185 aa, Homo Sapiens
MRLLTLLGLLCGSVATPLGPKWPEPVFGRLASPGFPGEYANDQERRWTLTAPPGYRLRLYFTHFDLELSHLCEYDFVKLSSGAKVLATLCGQESTDTERAPGKDTFYSLGSSLDITFRSDYSNEKPFTGFEAFYAAEDIDECQVAPGEAPTCDHHCHNHLGGFYCSCRAGYVLHRNKRTCSEQSL

SEQ ID NO: 8327 - protein, 496 aa, Homo Sapiens
MRVLSGTSLMLCSLLLLLQALCSPGLAPQSRGHLCRTRPTDLVFVVDSSRSVRPVEFEKVKVFLSQVIESLDVGPNATRVGMVNYASTVKQEFSLRAHVSKAALLQAVRRIQPLSTGTMTGLAIQFAITKAFGDAEGGRSRSPDISKVVIVVTDGRPQDSVQDVSARARASGVELFAIGVGSVDKATLRQIASEPQDEHVDYVESYSVIEKLSRKFQEAFCVVSDLCATGDHDCEQVCISSPGSYTCACHEGFTLNSDGKTCNVCSGGGGSSATDLVFLIDGSKSVRPENFELVKKFISQIVDTLDVSDKLAQVGLVQYSSSVRQEFPLGRFHTKKDIKAAVRNMSYMEKGTMTGAALKYLIDNSFTVSSGARPGAQKVGIVFTDGRSQDYINDAAKKAKDLGFKMFAVGVGNAVEDELREIASEPVAEHYFYTADFKTINQIGKKLQKKICVEEDPCACESLVKFQAKVEGLLQALTRKLEAVSKRLAILENTVV

SEQ ID NO: 8328 - protein, 115 aa, Homo Sapiens
MEDHNCEQLCVNVPGSFVCQCYSGYALAEDGKRCVAVDYCASENHGCEHECVNADGSYLCQCHEGFALNPDKKTCTKIDYCASSNHGCQHECVNTDDSYSCHCLKGFTLNPDKKT

SEQ ID NO: 8329 - protein, 672 aa, Homo Sapiens
MEDHNCEQLCVNVPGSFVCQCYSGYALAEDGKRCVAVDYCASENHGCEHECVNADGSYLCQCHEGFALNPDKKTCTKIDYCASSNHGCQHECVNTDDSYSCHCLKGFTLNPDKKTCRRINYCALNKPGCEHECVNMEESYYCRCHRGYTLDPNGKTCSRVDHCAQQDHGCEQLCLNTEDSFVCQCSEGFLINEDLKTCSRVDYCLLSDHGCEYSCVNMDRSFACQCPEGHVLRSDGKTCAKLDSCALGDHGCEHSCVSSEDSFVCQCFEGYILREDGKTCRRKDVCQAIDHGCEHICVNSDDSYTCECLEGFRLAEDGKRCRRKDVCKSTHHGCEHICVNNGNSYICKCSEGFVLAEDGRRCKKCTEGPIDLVFVIDGSKSLGEENFEVVKQFVTGIIDSLTISPKAARVGLLQYSTQVHTEFTLRNFNSAKDMKKAVAHMKYMGKGSMTGLALKHMFERSFTQGEGARPLSTRVPRAAIVFTDGRAQDDVSEWASKAKANGITMYAVGVGKAIEEELQEIASEPTNKHLFYAEDFSTMDEISEKLKKGICEALEDSDGRQDSPAGELPKTVQQPTESEPVTINIQDLLSCSNFAVQHRYLFEEDNLLRSTQKLSHSTKPSGSPLEEKHDQCKCENLIMFQNLANEEVRKLTQRLEEMTQRMEALENRLRYR

SEQ ID NO: 8330 - protein, 956 aa, Homo Sapiens
MEKMLAGCFLLILGQIVLLPAEARERSRGRSISRGRHARTHPQTALLESSCENKRADLVFIIDSSRSVNTHDYAKVKEFIVDILQFLDIGPDVTRVGLLQYGSTVKNEFSLKTFKRKSEVERAVKRMRHLSTGTMTGLAIQYALNIAFSEAEGARPLRENVPRVIMIVTDGRPQDSVAEVAAKARDTGILIFAIGVGQVDFNTLKSIGSEPHEDHVFLVANFSQIETLTSVFQKKLCTAHMCSTLEHNCAHFCINIPGSYVCRCKQGYILNSDQTTCRIQDLCAMEDHNCEQLCVNVPGSFVCQCYSGYALAEDGKRCVAVDYCASENHGCEHECVNADGSYLCQCHEGFALNPDKKTCTKIDYCASSNHGCQHECVNTDDSYSCHCLKGFTLNPDKKTCRRINYCALNKPGCEHECVNMEESYYCRCHRGYTLDPNGKTCSRVDHCAQQDHGCEQLCLNTEDSFVCQCSEGFLINEDLKTCSRVDYCLLSDHGCEYSCVNMDRSFACQCPEGHVLRSDGKTCAKLDSCALGDHGCEHSCVSSEDSFVCQCFEGYILREDGKTCRRKDVCQAIDHGCEHICVNSDDSYTCECLEGFRLAEDGKRCRRKDVCKSTHHGCEHICVNNGNSYICKCSEGFVLAEDGRRCKKCTEGPIDLVFVIDGSKSLGEENFEVVKQFVTGIIDSLTISPKAARVGLLQYSTQVHTEFTLRNFNSAKDMKKAVAHMKYMGKGSMTGLALKHMFERSFTQGEGARPLSTRVPRAAIVFTDGRAQDDVSEWASKAKANGITMYAVGVGKAIEEELQEIASEPTNKHLFYAEDFSTMDEISEKLKKGICEALEDSDGRQDSPAGELPKTVQQPTESEPVTINIQDLLSCSNFAVQHRYLFEEDNLLRSTQKLSHSTKPSGSPLEEKHDQCKCENLIMFQNLANEEVRKLTQRLEEMTQRMEALENRLRYR

SEQ ID NO: 8331 - protein, 915 aa, Homo Sapiens
MEKMLAGCFLLILGQIVLLPAEARERSRGRSISRGRHARTHPQTALLESSCENKRADLVFIIDSSRSVNTHDYAKVKEFIVDILQFLDIGPDVTRVGLLQYGSTVKNEFSLKTFKRKSEVERAVKRMRHLSTGTMTGLAIQYALNIAFSEAEGARPLRENVPRVIMIVTDGRPQDSVAEVAAKARDTGILIFAIGVGQVDFNTLKSIGSEPHEDHVFLVANFSQIETLTSVFQKKLCTAHMCSTLEHNCAHFCINIPGSYVCRCKQGYILNSDQTTCRIQDLCAMEDHNCEQLCVNVPGSFVCQCYSGYALAEDGKRCVAVDYCASENHGCEHECVNADGSYLCQCHEGFALNPDKKTCTRINYCALNKPGCEHECVNMEESYYCRCHRGYTLDPNGKTCSRVDHCAQQDHGCEQLCLNTEDSFVCQCSEGFLINEDLKTCSRVDYCLLSDHGCEYSCVNMDRSFACQCPEGHVLRSDGKTCAKLDSCALGDHGCEHSCVSSEDSFVCQCFEGYILREDGKTCRRKDVCQAIDHGCEHICVNSDDSYTCECLEGFRLAEDGKRCRRKDVCKSTHHGCEHICVNNGNSYICKCSEGFVLAEDGRRCKKCTEGPIDLVFVIDGSKSLGEENFEVVKQFVTGIIDSLTISPKAARVGLLQYSTQVHTEFTLRNFNSAKDMKKAVAHMKYMGKGSMTGLALKHMFERSFTQGEGARPLSTRVPRAAIVFTDGRAQDDVSEWASKAKANGITMYAVGVGKAIEEELQEIASEPTNKHLFYAEDFSTMDEISEKLKKGICEALEDSDGRQDSPAGELPKTVQQPTESEPVTINIQDLLSCSNFAVQHRYLFEEDNLLRSTQKLSHSTKPSGSPLEEKHDQCKCENLIMFQNLANEEVRKLTQRLEEMTQRMEALENRLRYR

SEQ ID NO: 8332 - protein, 956 aa, Homo Sapiens; identical to SEQ ID NO: 8330

SEQ ID NO: 8333 - protein, 937 aa, Homo Sapiens
MEKMLAGCFLLILGQIVLLPAEARERSRGRSISRGRHARTHPQTALLESSCENKRADLVFIIDSSRSVNTHDYAKVKEFIVDILQFLDIGPDVTRVGLLQYGSTVKNEFSLKTFKRKSEVERAVKRMRHLSTGTMTGLAIQYALNIAFSEAEGARPLRENVPRVIMIVTDGRPQDSVAEVAAKARDTGILIFAIGVGQVDFNTLKSIGSEPHEDHVFLVANFSQIETLTSVFQKKLCTAHMCSTLEHNCAHFCINIPGSYVCRCKQGYILNSDQTTCRIQDLCAMEDHNCEQLCVNVPGSFVCQCYSGYALAEDGKRCVAVDYCASENHGCEHECVNADGSYLCQCHEGFALNPDKKTCTKIDYCASSNHGCQHECVNTDDSYSCHCLKGFTLNPDKKTCRRINYCALNKPGCEHECVNMEESYYCRCHRGYTLDPNGKTCSRVDHCAQQDHGCEQLCLNTEDSFVCQCSEGFLINEDLKTCSRVDYCLLSDHGCEYSCVNMDRSFACQCPEGHVLRSDGKTCAKLDSCALGDHGCEHSCVSSEDSFVCQCFEGYILREDGKTCRRKDVCQAIDHGCEHICVNSDDSYTCECLEGFRLAEDGKRCRRKDVCKSTHHGCEHICVNNGNSYICKCSEGFVLAEDGRRCKKCTEGPIDLVFVIDGSKSLGEENFEVVKQFVTGIIDSLTISPKAARVGLLQYSTQVHTEFTLRNFNSAKDMKKAVAHMKYMGKGSMTGLALKHMFERSFTQGEGARPLSTRVPRAAIVFTDGRAQDDVSEWASKAKANGITMYAVGVGKAIEEELQEIASEPTNKHLFYAEDFSTMDEISEKLKKGICEALEDSDGRQDSPAGELPKTVQQPTVQHRYLFEEDNLLRSTQKLSHSTKPSGSPLEEKHDQCKCENLIMFQNLANEEVRKLTQRLEEMTQRMEALENRLRYR

SEQ ID NO: 8334 - protein, 195 aa, Homo Sapiens
QCYSGYALAEDGKRCVAVDYCASENHGCEHECVNADGSYLCQCHEGFALNPDKKTCTKIDYCASSNHGCQHECVNTDDSYSCHCLKGFTLNPDKKTCRSLPFFPSGINYCALNKPGCEHECVNMEESYYCRCHRGYTLDPNGKTCSRVDHCAQQDHGCEQLCLNTEDSFVCQCSEGFLINEDLKTCSRVDYCLLS

SEQ ID NO: 8335 - protein, 720 aa, Homo Sapiens
  misc_feature (1)..(1): Xaa can be any naturally occurring amino acid
XAEVAAKARDTGILIFAIGVGQVDFNTLKSIGSEPHEDHVFLVANFSQIETLTSVFQKKLCTAHMCSTLEHNCAHFCINIPGSYVCRCKQGYILNSDQTTCRTVDYCASENHGCEHECVNADGSYLCQCHEGFALNPDKKTCTKIDYCASSNHGCQHECVNTDDSYSCHCLKGFTLNPDKKTCRRINYCALNKPGCEHECVNMEESYYCRCHRGYTLDPNGKTCSRVDHCAQQDHGCEQLCLNTEDSFVCQCSEGFLINEDLKTCSRVDYCLLSDHGCEYSCVNMDRSFACQCPEGHVLRSDGKTCAKLDSCALGDHGCEHSCVSSEDSFVCQCFEGYILREDGKTCRRKDVCQAIDHGCEHICVNSDDSYTCECLEGFRLAEDGKRCRRKDVCKSTHHGCEHICVNNGNSYICKCSEGFVLAEDGRRCKKCTEGPIDLVFVIDGSKSLGEENFEVVKQFVTGIIDSLTISPKAARVGLLQYSTQVHTEFTLRNFNSAKDMKKAVAHMKYMGKGSMTGLALKHMFERSFTQGEGARPLSTRVPRAAIVFTDGRAQDDVSEWASKAKANGITMYAVGVGKAIEEELQEIASEPTNKHLFYAEDFSTMDEISEKLKKGICEALEDSDGRQDSPAGELPKTVQQPTVQHRYLFEEDNLLRSTQKLSHSTKPSGSPLEEKHDQCKCENLIMFQNLANEEVRKLTQRLEEMTQRMEALENRLRYR

SEQ ID NO: 8336 - protein, 183 aa, Homo Sapiens
  misc_feature (1)..(1): Xaa can be any naturally occurring amino acid
XDSCALGDHGCEHSCVSSEDSFVCQCFEGYILREDGKTCRRKDVCQAIDHGCEHICVNSDDSYTCECLEGFRLAEDGKRCRKCTEGPIDLVFVIDGSKSLGEENFEVVKQFVTGIIDSLTISPKAARVGLLQYSTQVHTEFTLRNFNSAKDMKKAVAHMKYMGKGSMTGLALKHMFERSFTQG

SEQ ID NO: 8337 - protein, 131 aa, Homo Sapiens
  misc_feature (1)..(1): Xaa can be any naturally occurring amino acid
XEDSDGRQDSPAGELPKTVQQPTESEPVTINIQDLLSCSNFAVQHRYLFEEDNLLRSTQKLSHSTKPSGSPLEEKHDQCKCENLIMFQNLANEEVRKLTQRYILFLHYASVWNAKNIIKTSHTLCRFYQLK

SEQ ID NO: 8338 - protein, 176 aa, Homo Sapiens
  misc_feature (1)..(1): Xaa can be any naturally occurring amino acid
XFTQGEGARPLSTRVPRAAIVFTDGRAQDDVSEWASKAKANGITMYAVGVGKAIEEELQEIASEPTNKHLFYAEDFSTMDEISEKLKKGICEALEDSDGRQDSPAGELPKTVQQPTVQHRYLFEEDNLLRSTQKLSHSTKPSGSPLEEKHDQCKCENLIMFQNLANEEQRSSLSAL

SEQ ID NO: 8339 - protein, 181 aa, Homo Sapiens
  misc_feature (1)..(1): Xaa can be any naturally occurring amino acid
XSIGSEPHEDHVFLVANFSQIETLTSVFQKKLCIQDLCAMEDHNCEQLCVNVPGSFVCQCYSGYALAEDGKRCVAVDYCASENHGCEHECVNADGSYLCQCHEGFALNPDKKTCTKIDYCASSNHGCQHECVNTDDSYSCHCLKGFTLNPDKKTCRRINYCALNKPGCEHECVNMEESYYC

SEQ ID NO: 8340 - protein, 155 aa, Homo Sapiens
  misc_feature (1)..(1): Xaa can be any naturally occurring amino acid
XVDYCLLSDHGCEYSCVNMDRSFACQCPEGHVLRSDGKTCAKLDSCALGDHGCEHSCVSSEDSFVCQCFEGYILREDGKTCRRKDVCQAIDHGCEHICVNSDDSYTCECLEGFRLAEDGKRCRSKMSANQPTMAANTFVLIMGIPTSANAQRDLF

SEQ ID NO: 8341 - protein, 444 aa, Homo Sapiens
MPRPAPARRLPGLLLLLWPLLLLPSAAPDPVARPGFRRLETRGPGGSPGRRPSPAAPDGAPASGTSEPGRARGAGVCKSRPLDLVFIIDSSRSVRPLEFTKVKTFVSRIIDTLDIGPADTRVAVVNYASTVKIEFQLQAYTDKQSLKQAVGRITPLSTGTMSGLAIQTAMDEAFTVEAGAREPSSNIPKVAIIVTDGRPQDQVNEVAARAQASGIELYAVGVDRADMASLKMMASEPLEEHVFYVETYGVIEKLSSRFQETFCALDRCALNTHGCEHICVNDRSGSYHCECYEGYTLNEDRKTCSAQDKCALGTHGCQHICVNDRTGSHHCECYEGYTLNADKKTCSVRDKCALGSHGCQHICVSDGAASYHCDCYPGYTLNEDKKTCSATEEARRLVSTEDACGCEATLAFQDKVSSYLQRLNTKLDDILEKLKINEYGQIHR

SEQ ID NO: 8342 - protein, 486 aa, Homo Sapiens
MPRPAPARRLPGLLLLLWPLLLLPSAAPDPVARPGFRRLETRGPGGSPGRRPSPAAPDGAPASGTSEPGRARGAGVCKSRPLDLVFIIDSSRSVRPLEFTKVKTFVSRIIDTLDIGPADTRVAVVNYASTVKIEFQLQAYTDKQSLKQAVGRITPLSTGTMSGLAIQTAMDEAFTVEAGAREPSSNIPKVAIIVTDGRPQDQVNEVAARAQASGIELYAVGVDRADMASLKMMASEPLEEHVFYVETYGVIEKLSSRFQETFCALDPCVLGTHQCQHVCISDGEGKHHCECSQGYTLNADKKTCSALDRCALNTHGCEHICVNDRSGSYHCECYEGYTLNEDRKTCSAQDKCALGTHGCQHICVNDRTGSHHCECYEGYTLNADKKTCSVRDKCALGSHGCQHICVSDGAASYHCDCYPGYTLNEDKKTCSATEEARRLVSTEDACGCEATLAFQDKVSSYLQRLNTKLDDILEKLKINEYGQIHR

SEQ ID NO: 8343 - protein, 581 aa, Homo Sapiens
MRGLLCWPVLLLLLQPWETQLQLTGPRCHTGPLDLVFVIDSSRSVRPFEFETMRQFLMGLLRGLNVGPNATRVGVIQYSSQVQSVFPLRAFSRREDMERAIRDLVPLAQGTMTGLAIQYAMNVAFSVAEGARPPEERVPRVAVIVTDGRPQDRVAEVAAQARARGIEIYAVGVQRADVGSLRAMASPPLDEHVFLVESFDLIQEFGLQFQSRLCAIDLCAEGTHGCEHHCVNSPGSYFCHCQVGFVLQQDQRSCRAIDYCSFGNHSCQHECVSTPGGPRCHCREGHDLQPDGRSCQVRDLCNGVDHGCEFQCVSEGLSYRCLCPEGRQLQADGKSCNRCREGHVDLVLLVDGSKSVRPQNFELVKRFVNQIVDFLDVSPEGTRVGLVQFSSRVRTEFPLGRYGTAAEVKQAVLAVEYMERGTMTGLALRHMVEHSFSEAQGARPRALNVPRVGLVFTDGRSQDDISVWAARAKEEGIVMYAVGVGKAVEAELREIASEPAELHVSYAPDFGTMTHLLENLRGSICPEEGISAGTELRSPCECESLVEFQGRTLGALESLTLNLAQLTARLEDLENQLANQK

SEQ ID NO: 8344 - protein, 581 aa, Homo Sapiens; identical to SEQ ID NO: 8343

SEQ ID NO: 8345 - protein, 540 aa, Homo Sapiens
MRGLLCWPVLLLLLQPWETQLQLTGPRCHTGPLDLVFVIDSSRSVRPFEFETMRQFLMGLLRGLNVGPNATRVGVIQYSSQVQSVFPLRAFSRREDMERAIRDLVPLAQGTMTGLAIQYAMNVAFSVAEGARPPEERVPRVAVIVTDGRPQDRVAEVAAQARARGIEIYAVGVQRADVGSLRAMASPPLDEHVFLVESFDLIQEFGLQFQSRLCAIDYCSFGNHSCQHECVSTPGGPRCHCREGHDLQPDGRSCQVRDLCNGVDHGCEFQCVSEGLSYRCLCPEGRQLQADGKSCNRCREGHVDLVLLVDGSKSVRPQNFELVKRFVNQIVDFLDVSPEGTRVGLVQFSSRVRTEFPLGRYGTAAEVKQAVLAVEYMERGTMTGLALRHMVEHSFSEAQGARPRALNVPRVGLVFTDGRSQDDISVWAARAKEEGIVMYAVGVGKAVEAELREIASEPAELHVSYAPDFGTMTHLLENLRGSICPEEGISAGTELRSPCECESLVEFQGRTLGALESLTLNLAQLTARLEDLENQLANQK

SEQ ID NO: 8346 - protein, 622 aa, Homo Sapiens
MRGLLCWPVLLLLLQPWETQLQLTGPRCHTGPLDLVFVIDSSRSVRPFEFETMRQFLMGLLRGLNVGPNATRVGVIQYSSQVQSVFPLRAFSRREDMERAIRDLVPLAQGTMTGLAIQYAMNVAFSVAEGARPPEERVPRVAVIVTDGRPQDRVAEVAAQARARGIEIYAVGVQRADVGSLRAMASPPLDEHVFLVESFDLIQEFGLQFQSRLCGKDQCAEGGHGCQHQCVNAWAMFHCTCNPGYKLAADNKSCLAIDLCAEGTHGCEHHCVNSPGSYFCHCQVGFVLQQDQRSCRAIDYCSFGNHSCQHECVSTPGGPRCHCREGHDLQPDGRSCQVRDLCNGVDHGCEFQCVSEGLSYRCLCPEGRQLQADGKSCNRCREGHVDLVLLVDGSKSVRPQNFELVKRFVNQIVDFLDVSPEGTRVGLVQFSSRVRTEFPLGRYGTAAEVKQAVLAVEYMERGTMTGLALRHMVEHSFSEAQGARPRALNVPRVGLVFTDGRSQDDISVWAARAKEEGIVMYAVGVGKAVEAELREIASEPAELHVSYAPDFGTMTHLLENLRGSICPEEGISAGTELRSPCECESLVEFQGRTLGALESLTLNLAQLTARLEDLENQLANQK

SEQ ID NO: 8347 - protein, 499 aa, Homo Sapiens
MRGLLCWPVLLLLLQPWETQLQLTGPRCHTGPLDLVFVIDSSRSVRPFEFETMRQFLMGLLRGLNVGPNATRVGVIQYSSQVQSVFPLRAFSRREDMERAIRDLVPLAQGTMTGLAIQYAMNVAFSVAEGARPPEERVPRVAVIVTDGRPQDRVAEVAAQARARGIEIYAVGVQRADVGSLRAMASPPLDEHVFLVESFDLIQEFGLQFQSRLCVRDLCNGVDHGCEFQCVSEGLSYRCLCPEGRQLQADGKSCNRCREGHVDLVLLVDGSKSVRPQNFELVKRFVNQIVDFLDVSPEGTRVGLVQFSSRVRTEFPLGRYGTAAEVKQAVLAVEYMERGTMTGLALRHMVEHSFSEAQGARPRALNVPRVGLVFTDGRSQDDISVWAARAKEEGIVMYAVGVGKAVEAELREIASEPAELHVSYAPDFGTMTHLLENLRGSICPEEGISAGTELRSPCECESLVEFQGRTLGALESLTLNLAQLTARLEDLENQLANQK

SEQ ID NO: 8348 - protein, 121 aa, Homo Sapiens
MDFQRGKNLRYQLLQLVEPFGVISNHLILNKINEAFIEMATTEDAQAAVDYYTTTPALVFGKPVRVHLSQKYKRIKKPEGKPDQKFDQKQELGRVIHLSNLPHSGYSDSAVLKLAEPYGKI

SEQ ID NO: 8349 - protein, 6 aa, Homo Sapiens
MGDPFM

SEQ ID NO: 8350 - protein, 25 aa, Homo Sapiens
MGDPFMLQQSTNPAPGILGPPPPSF

SEQ ID NO: 8351 - protein, 81 aa, Homo Sapiens
MGDPFMLQQSTNPAPGILGPPPPSFHLGGPAVGPRGNLGAGNGNLQGPRHMQKGRVETSRVVHIMDFQRGKNLRYQLLQLV

SEQ ID NO: 8352 - protein, 86 aa, Homo Sapiens
MGDPFMLQQSTNPAPGILGPPPPSFHLGGPAVGPRGNLGAGNGNLQGPRHMQKGRVETSRVVHIMDFQRGKNLRYQLLQLVEPFGV

SEQ ID NO: 8353 - protein, 109 aa, Homo Sapiens
MGDPFMLQQSTNPAPGILGPPPPSFHLGGPAVGPRGNLGAGNGNLQGPRHMQKGRVETSRVVHIMDFQRGKNLRYQLLQLVEPFGVISNHLILNKINEAFIEMATTEDA

SEQ ID NO: 8354 - protein, 125 aa, Homo Sapiens
MGDPFMLQQSTNPAPGILGPPPPSFHLGGPAVGPRGNLGAGNGNLQGPRHMQKGRVETSRVVHIMDFQRGKNLRYQLLQLVEPFGVISNHLILNKINEAFIEMATTEDAQAAVDYYTTTPALVFG

SEQ ID NO: 8355 - protein, 509 aa, Homo Sapiens
MGDPFMLQQSTNPAPGILGPPPPSFHLGGPAVGPRGNLGAGNGNLQGPRHMQKGRVETSRVVHIMDFQRGKNLRYQLLQLVEPFGVISNHLILNKINEAFIEMATTEDAQAAVDYYTTTPALVFGKPVRVHLSQKYKRIKKPEGKPDQKFDQKQELGRVIHLSNLPHSGYSDSAVLKLAEPYGKIKNYILMRMKSQAFIEMETREDAMAMVDHCLKKALWFQGRCVKVDLSEKYKKLVLRIPNRGIDLLKKDKSRKRSYSPDGKESPSDKKSKTDGSQKTESSTEGKEQEEKSGEDGEKDTKDDQTEQEPNMLLESEDELLVDEEEAAALLESGSSVGDETDLANLGDVASDGKKEPSDKAVKKDGSASAAAKKKLKKVDKIEELDQENEAALENGIKNEENTEPGAESSENADDPNKDTSENADGQSDENKDDYTIPDEYRIGPYQPNVPVGIDYVIPKTGFYCKLCSLFYTNEEVAKNTHCSSLPHYQKLKKFLNKLAEERRQKKET

SEQ ID NO: 8356 - protein, 509 aa, Homo Sapiens; identical to SEQ ID NO: 8355

SEQ ID NO: 8357 - protein, 559 aa, Homo Sapiens
MLGAQWRRNQPSRAAEEWSQHINGASHSRRCQLLLEIYPEWNPDNDTGHTMGDPFMLQQSTNPAPGILGPPPPSFHLGGPAVGPRGNLGAGNGNLQGPRHMQKGRVETSRVVHIMDFQRGKNLRYQLLQLVEPFGVISNHLILNKINEAFIEMATTEDAQAAVDYYTTTPALVFGKPVRVHLSQKYKRIKKPEGKPDQKFDQKQELGRVIHLSNLPHSGYSDSAVLKLAEPYGKIKNYILMRMKSQAFIEMETREDAMAMVDHCLKKALWFQGRCVKVDLSEKYKKLVLRIPNRGIDLLKKDKSRKRSYSPDGKESPSDKKSKTDGSQKTESSTEGKEQEEKSGEDGEKDTKDDQTEQEPNMLLESEDELLVDEEEAAALLESGSSVGDETDLANLGDVASDGKKEPSDKAVKKDGSASAAAKKKLKKVDKIEELDQENEAALENGIKNEENTEPGAESSENADDPNKDTSENADGQSDENKDDYTIPDEYRIGPYQPNVPVGIDYVIPKTGFYCKLCSLFYTNEEVAKNTHCSSLPHYQKLKKFLNKLAEERRQKKET

SEQ ID NO: 8358 - protein, 172 aa, Homo Sapiens
MLGAQWRRNQPSRAAEVSGPGGKHAAGQGPRVRREILGEEEWSQHINGASHSRRCQLLLEIYPEWNPDNDTGHTMGDPFMLQQSTNPAPGILGPPPPSFHLGGPAVGPRGNLGAGNGNLQGPRHMQKGRVETSRVVHIMDFQRGKNLRYQLLQLVEPFGVISNHLILNKINE

SEQ ID NO: 8359 - protein, 283 aa, Homo Sapiens
MSKSFQQSSLSRDSQGHGRDLSAAGIGLLAAATQSLSMLLESEDELLVDEEEAAALLESGSSVGDETDLANLGDVASDGKKEPSDKAVKKDGSASAAAKKKLKKRRFPGSMEGFVTLDEVGDEEDSELQKLRKSGMAFKSGDKNDDGLVEIKVDKIEELDQENEAALENGIKNEENTEPGAESSENADDPNKDTSENADGQSDENKDDYTIPDEYRIGPYQPNVPVGIDYVIPKTGFYCKLCSLFYTNEEVAKNTHCSSLPHYQKLKKFLNKLAEERRQKKET

SEQ ID NO: 8360 - protein, 47 aa, Homo Sapiens
MSKSFQQSSLSRDSQGHGRDLSAAGIGLLAAATQSLSMPASLGRMNQ

SEQ ID NO: 8361 - protein, 78 aa, Homo Sapiens
MSKSFQQSSLSRDSQGHGRDLSAAGIGLLAAATQSLSMPASLGRMNQGTARLASLMNLGMSSSLNQQGAHSALSSAST

SEQ ID NO: 8362 - protein, 78 aa, Homo Sapiens; identical to SEQ ID NO: 8361

SEQ ID NO: 8363 - protein, 87 aa, Homo Sapiens
MSKSFQQSSLSRDSQGHGRDLSAAGIGLLAAATQSLSMPASLGRMNQGTARLASLMNLGMSSSLNQQGAHSALSSASTSSHNLQSIF

SEQ ID NO: 8364 - protein, 99 aa, Homo Sapiens
MSKSFQQSSLSRDSQGHGRDLSAAGIGLLAAATQSLSMPASLGRMNQGTARLASLMNLGMSSSLNQQGAHSALSSASTSSHNLQSIFNIGSRGPLPLSS

SEQ ID NO: 8365 - protein, 100 aa, Homo Sapiens
MSKSFQQSSLSRDSQGHGRDLSAAGIGLLAAATQSLSMPASLGRMNQGTARLASLMNLGMSSSLNQQGAHSALSSASTSSHNLQSIFNIGSRGPLPLSSQ

SEQ ID NO: 8366 - protein, 107 aa, Homo Sapiens
MSKSFQQSSLSRDSQGHGRDLSAAGIGLLAAATQSLSMPASLGRMNQGTARLASLMNLGMSSSLNQQGAHSALSSASTSSHNLQSIFNIGSRGPLPLSSQHRGDADQ

SEQ ID NO: 8367 - protein, 847 aa, Homo Sapiens
MSKSFQQSSLSRDSQGHGRDLSAAGIGLLAAATQSLSMPASLGRMNQGTARLASLMNLGMSSSLNQQGAHSALSSASTSSHNLQSIFNIGSRGPLPLSSQHRGDADQASNILASFGLSARDLDELSRYPEDKITPENLPQILLQLKRRRTEEGPTLSYGRDGRSATREPPYRVPRDDWEEKRHFRRDSFDDRGPSLNPVLDYDHGSRSQESGYYDRMDYEDDRLRDGERCRDDSFFGETSHNYHKFDSEYERMGRGPGPLQERSLFEKKRGAPPSSNIEDFHGLLPKGYPHLCSICDLPVHSNKEWSQHINGASHSRRCQLLLEIYPEWNPDNDTGHTMGDPFMLQQSTNPAPGILGPPPPSFHLGGPAVGPRGNLGAGNGNLQGPRHMQKGRVETSRVVHIMDFQRGKNLRYQLLQLVEPFGVISNHLILNKINEAFIEMATTEDAQAAVDYYTTTPALVFGKPVRVHLSQKYKRIKKPEGKPDQKFDQKQELGRVIHLSNLPHSGYSDSAVLKLAEPYGKIKNYILMRMKSQAFIEMETREDAMAMVDHCLKKALWFQGRCVKVDLSEKYKKLVLRIPNRGIDLLKKDKSRKRSYSPDGKESPSDKKSKTDGSQKTESSTEGKEQEEKSGEDGEKDTKDDQTEQEPNMLLESEDELLVDEEEAAALLESGSSVGDETDLANLGDVASDGKKEPSDKAVKKDGSASAAAKKKLKKVDKIEELDQENEAALENGIKNEENTEPGAESSENADDPNKDTSENADGQSDENKDDYTIPDEYRIGPYQPNVPVGIDYVIPKTGFYCKLCSLFYTNEEVAKNTHCSSLPHYQKLKKFLNKLAEERRQKKET

SEQ ID NO: 8368 - protein, 895 aa, Homo Sapiens
MSKSFQQSSLSRDSQGHGRDLSAAGIGLLAAATQSLSMPASLGRMNQGTARLASLMNLGMSSSLNQQGAHSALSSASTSSHNLQSIFNIGSRGPLPLSSQHRGDADQASNILASFGLSARDLDELSRYPEDKITPENLPQILLQLKRRRTEEGPTLSYGRDGRSATREPPYRVPRDDWEEKRHFRRDSFDDRGPSLNPVLDYDHGSRSQESGYYDRMDYEDDRLRDGERCRDDSFFGETSHNYHKFDSEYERMGRGPGPLQERSLFEKKRGAPPSSNIEDFHGLLPKGYPHLCSICDLPVHSNKEWSQHINGASHSRRCQLLLEIYPEWNPDNDTGHTMGDPFMLQQSTNPAPGILGPPPPSFHLGGPAVGPRGNLGAGNGNLQGPRHMQKGRVETSRVVHIMDFQRGKNLRYQLLQLVEPFGVISNHLILNKINEAFIEMATTEDAQAAVDYYTTTPALVFGKPVRVHLSQKYKRIKKPEGKPDQKFDQKQELGRVIHLSNLPHSGYSDSAVLKLAEPYGKIKNYILMRMKSQAFIEMETREDAMAMVDHCLKKALWFQGRCVKVDLSEKYKKLVLRIPNRGIDLLKKDKSRKRSYSPDGKESPSDKKSKTDGSQKTESSTEGKEQEEKSGEDGEKDTKDDQTEQEPNMLLESEDELLVDEEEAAALLESGSSVGDETDLANLGDVASDGKKEPSDKAVKKDGSASAAAKKKLKKRRFPGSMEGFVTLDEVGDEEDSELQKLRKSGMAFKSGDKNDDGLVEIKVDKIEELDQENEAALENGIKNEENTEPGAESSENADDPNKDTSENADGQSDENKDDYTIPDEYRIGPYQPNVPVGIDYVIPKTGFYCKLCSLFYTNEEVAKNTHCSSLPHYQKLKKFLNKLAEERRQKKET

SEQ ID NO: 8369 - protein, 847 aa, Homo Sapiens; identical to SEQ ID NO: 8367

SEQ ID NO: 8370 - protein, 895 aa, Homo Sapiens; identical to SEQ ID NO: 8368

SEQ ID NO: 8371 - protein, 847 aa, Homo Sapiens; identical to SEQ ID NO: 8367

SEQ ID NO: 8372 - protein, 794 aa, Homo Sapiens
MSKSFQQSSLSRDSQGHGRDLSAAGIGLLAAATQSLSMPASLGRMNQGTARLASLMNLGMSSSLNQQGAHSALSSASTSSHNLQSIFNIGSRGPLPLSSQHRGDADQASNILASFGLSARDLDELSRYPEDKITPENLPQILLQLKRRRTEEGPTLSYGRDGRSATREPPYRVPRDDWEEKRHFRRDSFDDRGPSLNPVLDYDHGSRSQESGYYDRMDYEDDRLRDGERCRDDSFFGETSHNYHKFDSEYERMGRGPGPLQERSLFEKKRGAPPSSNIEDFHGLLPKGYPHLCSICDLPVHSNKEWSQHINGASHSRRCQLLLEIYPEWNPDNDTGHTMGDPFMLQQSTNPAPGILGPPPPSFHLGGPAVGPRGNLGAGNGNLQGPRHMQKGRVETSRVVHIMDFQRGKNLRYQLLQLVEPFGVISNHLILNKINEAFIEMATTEDAQAAVDYYTTTPALVFGKPVRVHLSQKYKRIKKPEGKPDQKFDQKQELGRVIHLSNLPHSGYSDSAVLKLAEPYGKIKNYILMRMKSQAFIEMETREDAMAMVDHCLKKALWFQGRCVKVDLSEKYKKLVLRIPNRGIDLLKKDKSRKRSYSPDGKESPSDKKSKTDGSQKTESSTEGKEQEEKSGEDGEKDTKDDQTEQEPNMLLESEDELLVDEEEAAALLESGSSVGDETDLANLGDVASDGKKEPSDKAVKKDGSASAAAKKKLKKVDKIEELDQENEAALENGIKNEENTEPGAESSENADDPNKDTSENADGQSDENKDDYTIPDEYRIGPYQPNVPVEISE

SEQ ID NO: 8373 - protein, 433 aa, Homo Sapiens
MSKSFQQSSLSRDSQGHGRDLSAAGIGLLAAATQSLSMPASLGRMNQGTARLASLMNLGMSSSLNQQGAHSALSSASTSSHNLQSIFNIGSRGPLPLSSQHRGDADQASNILASFGLSARDLDELSRYPEDKITPENLPQILLQLKRRRTEEGPTLSYGRDGRSATREPPYRVPRDDWEEKRHFRRDSFDDRGPSLNPVLDYDHGSRSQESGYYDRMDYEDDRLRDGERCRDDSFFGETSHNYHKFDSEYERMGRGPGPLQERSLFEKKRGAPPSSNIEDFHGLLPKGYPHLCSICDLPVHSNKEWSQHINGASHSRRCQLLLEIYPEWNPDNDTGHTMGDPFMLQQSTNPAPGILGPPPPSFHLGGPAVGPRGNLGAGNGNLQGPRHMQKGRVETSRVVHIMDFQRGKNLRYQLLQLVEPFGVISNHLILNK

SEQ ID NO: 8374 - protein, 847 aa, Homo Sapiens; identical to SEQ ID NO: 8367

SEQ ID NO: 8375 - protein, 334 aa, Homo Sapiens
  misc_feature (1)..(1): Xaa can be any naturally occurring amino acid
XERCRDDSFFGETSHNYHKFDSEYERMGRGPGPLQERSLFEKKRGAPPSSNIEDFHGLLPKGYPHLCSICDLPVHSNKEWSQHINGASHSRRCQLLLEMGDPFMLQQSTNPAPGILGPPPPSFHLGGPAVGPRGNLGAGNGNLQGPRHMQKGRVETSRVVHIMDFQRGKNLRYQLLQLVEPFGVISNHLILNKINEAFIEMATTEDAQAAVDYYTTTPALVFGKPVRVHLSQKYKRIKKPEGKPDQKFDQKQELGRVIHLSNLPHSGYSDSAVLKLAEPYGKIKNYILMRMKSQAFIEMETREDAMAMVDHCLKKALWFQGRCVKVDLSEKYKK

SEQ ID NO: 8376 - protein, 235 aa, Homo Sapiens
AIQISQQTPYWHCRLLFQLAQLHTLEKDLVSACDLLGVGAEYARVVGSEYTRALFLLSKGMLLLMERKLQEVHPLLTLCGQIVENWQGNPIQKESLRVFFLVLQVTHYLDAGQVKSVKPCLKQLQQCIQTISTLHDDEILPSNPADLFHWLPKEHMCVLVYLVTVMHSMQAGYLEKAQKYTDKALMQLEKLKSKSVLDCSPILSSFQVILLEHIIMCRLVTGHKATALQEISQVC

SEQ ID NO: 8377 - protein, 183 aa, Homo Sapiens
KIRLCVHCLQAVFPFKPPQRIEARTHLQLGSVLYHHTKNSEQARSHLEKANSVDAAKPLLRKAIQISQQTPYWHCRLLFQLAQLHTLEKDLVSACDLLGVGAEYARVVGSEYTRALFLLSKGMLLLMERKLQEVHPLLTLCGQIVENWQGNPIQKESLRVFFLVLQVTHYLDAGQVKSVKPCL

SEQ ID NO: 8378 - protein, 613 aa, Homo Sapiens
MAAQAAAAAQAAAAQAAQAEAADSWYLALLGFAEHFRTSSPPKIRLCVHCLQAVFPFKPPQRIEARTHLQLGSVLYHHTKNSEQARSHLEKAWLISQQIPQFEDVKFEAASLLSELYCQENSVDAAKPLLRKAIQISQQTPYWHCRLLFQLAQLHTLEKDLVSACDLLGVGAEYARVVGSEYTRALFLLSKGMLLLMERKLQEVHPLLTLCGQIVENWQGNPIQKESLRVFFLVLQVTHYLDAGQVKSVKPCLKQLQQCIQTISTLHDDEILPSNPADLFHWLPKEHMCVLVYLVTVMHSMQAGYLEKAQKYTDKALMQLEKLKMLDCSPILSSFQVILLEHIIMCRLVTGHKATALQEISQVCQLCQQSPRLFSNHAAQLHTLLGLYCVSVNCMDNAEAQFTTALRLTNHQELWAFIVTNLASVYIREGNRHQEVLYSLLERINPDHSFPVSSHCLRAAAFYVRGLFSFFQGRYNEAKRFLRETLKMSNAEDLNRLTACSLVLLGHIFYVLGNHRESNNMVVPAMQLASKIPDMSVQLWSSALLRDLNKACGNAMDAHEAAQMHQNFSQQLLQDHIEACSLPEHNLITWTDGPPPVQFQAQNGPNTSLASLL

SEQ ID NO: 8379 - protein, 202 aa, Homo Sapiens
AGAGGGAAAVAAGGVVTTTASGKRIRKNHACEMCGKAFRDVYHLNRHKLSHSDEKPYQCPVCQQRFKRKDRMSYHVRSHDGAVHKPYNCSHCGKSFSRPDHLNSHVRQVHSTERPFKCEKCEAAFATKDRLRAHTVRHEEKVPCHVCGKMLSSAYISDHMKVHSQGPHHVCELCNKGTCRGLPGGPGAEGGRLARRLATDTG

SEQ ID NO: 8380 - protein, 454 aa, Homo Sapiens
MDPSNWSSFIFQGHAQNPLQVGAELQSRFFASQGCAQSPFQAAPAPPPTPQAPAAEPLQVDLLPVLAAAQESAAAAAAAAAAAAAVAAAPPAPAAASTVDTAALKQPPAPPPPPPPVSAPAAEAAPPASAATIAAAAATAVVAPTSTVAVAPVASALEKKTKSKGPYICALCAKEFKNGYNLRRHEAIHTGAKAGRVPSGAMKMPTMVPLSLLSVPQLSGAGGGGGEAGAGGGAAAVAAGGVVTTTASGKRIRKNHACEMCGKAFRDVYHLNRHKLSHSDEKPYQCPVCQQRFKRKDRMSYHVRSHDGAVHKPYNCSHCGKSFSRPDHLNSHVRQVHSTERPFKCEKCEAAFATKDRLRAHTVRHEEKVPCHVCGKMLSSAYISDHMKVHSQGPHHVCELCNKGTGEVCPMAAAAAAAAAAAAAAVAAPPTAVGSLSGAEGVPVSSQPLPSQPW

SEQ ID NO: 8381 - protein, 184 aa, Homo Sapiens
MFPVFPCTLLAPPFPVLGLDSRGVGGLMNSFPPPQGHAQNPLQVGAELQSRFFASQGCAQSPFQAAPAPPPTPQAPAAEPLQVDLLPVLAAAQDGGSGSSGSSSSPSHSCGLPLGGGGGACELSATSLPTLVSSKLVAGERGEWSRVPWYKLLSPLFSHQLLFPYQPRSLQKERRKKCFLRGIR

SEQ ID NO: 8382 - protein, 186 aa, Homo Sapiens
MFPVFPCTLLAPPFPVLGLDSRGVGGLMNSFPPPQGHAQNPLQVGAELQSRFFASQGCAQSPFQAAPAPPPTPQAPAAEPLQVDLLPVLAAAQDGSGGSGSSGSSSSPSHSCGLPLGGGGGACELSATSLPTLVSSKLVAGERGEWSRVPWYKLLSPLFSHQLLFPYQPRSLQKERRKKCFLRGIR

SEQ ID NO: 8383 - protein, 493 aa, Homo Sapiens
MFPVFPCTLLAPPFPVLGLDSRGVGGLMNSFPPPQGHAQNPLQVGAELQSRFFASQGCAQSPFQAAPAPPPTPQAPAAEPLQVDLLPVLAAAQESAAAAAAAAAAAAAVAAAPPAPAAASTVDTAALKQPPAPPPPPPPVSAPAAEAAPPASAATIAAAAATAVVAPTSTVAVAPVASALEKKTKSKGPYICALCAKEFKNGYNLRRHEAIHTGAKAGRVPSGAMKMPTMVPLSLLSVPQLSGAGGGGGEAGAGGGAAAVAAGGVVTTTASGKRIRKNHACEMCGKAFRDVYHLNRHKLSHSDEKPYQCPVCQQRFKRKDRMSYHVRSHDGAVHKPYNCSHCGKSFSRPDHLNSHVRQVHSTERPFKCEKCEAAFATKDRLRAHTVRHEEKVPCHVCGKMLSSAYISDHMKVHSQGPHHVCELCNKGFTTAAYLRIHAVKDHGLQAPRADRILCKLCSVHCKTPAQLAGHMQTHLGGAAPPVPGDAPQPQPTC

SEQ ID NO: 8384 - protein, 477 aa, Homo Sapiens
MFPVFPCTLLAPPFPVLGLDSRGVGGLMNSFPPPQGHAQNPLQVGAELQSRFFASQGCAQSPFQAAPAPPPTPQAPAAEPLQVDLLPVLAAAQESAAAAAAAAAAAAAVAAAPPAPAAASTVDTAALKQPPAPPPPPPPVSAPAAEAAPPASAATIAAAAATAVVAPTSTVAVAPVASALEKKTKSKGPYICALCAKEFKNGYNLRRHEAIHTGAKAGRVPSGAMKMPTMVPLSLLSVPQLSGAGGGGGEAGAGGGAAAVAAGGVVTTTASGKRIRKNHACEMCGKAFRDVYHLNRHKLSHSDEKPYQCPVCQQRFKRKDRMSYHVRSHDGAVHKPYNCSHCGKSFSRPDHLNSHVRQVHSTERPFKCEKCEAAFATKDRLRAHTVRHEEKVPCHVCGKMLSSAYISDHMKVHSQGPHHVCELCNKGTGEVCPMAAAAAAAAAAAAAAVAAPPTAVGSLSGAEGVPVSSQPLPSQPW

SEQ ID NO: 8385 - protein, 84 aa, Homo Sapiens
MFPVFPCTLLAPPFPVLGLDSRGVGGLMNSFPPPQGHAQNPLQVGAELQSRFFASQGCAQSPFQAGSPQQSRQTSALNRTALQM

SEQ ID NO: 8386 - protein, 172 aa, Homo Sapiens
MFPVFPCTLLAPPFPVLGLDSRGVGGLMNSFPPPQGHAQNPLQVGAELQSRFFASQGCAQSPFQKCEAAFATKDRLRAHTVRHEEKVPCHVCGKMLSSAYISDHMKVHSQGPHHVCELCNKGTGEVCPMAAAAAAAAAAAAAAVAAPPTAVGSLSGAEGVPVSSQPLPSQPW

SEQ ID NO: 8387 - protein, 252 aa, Homo Sapiens [sequence omitted]

SEQ ID NO: 8388 - protein, 79 aa, Homo Sapiens
MLSSAYISDHMKVHSQGPHHVCELCNKGFTTAAYLRIHAVKDHGLQAPRADRILCKLCSVHCKTPAQLAGHMQTHLGGA

SEQ ID NO: 8389 - protein, 94 aa, Homo Sapiens
MLSSAYISDHMKVHSQGPHHVCELCNKGFTTAAYLRIHAVKDHGLQAPRADRILCKLCSVHCKTPAQLAGHMQTHLGGAAPPVPGDAPQPQPTC

SEQ ID NO: 8390 - protein, 53 aa, Homo Sapiens
MLSSAYISDHMKVHSQGPHHVCELCNKGTCRGLPGGPGAEGGRLARRLATDTG

SEQ ID NO: 8391 - protein, 78 aa, Homo Sapiens
MLSSAYISDHMKVHSQGPHHVCELCNKGTGEVCPMAAAAAAAAAAAAAAVAAPPTAVGSLSGAEGVPVSSQPLPSQPW

SEQ ID NO: 8392 - protein, 152 aa, Homo Sapiens
SFSRCARGLGRPLGRGEGGTRRRPDHLNSHVRQVHSTERPFKCEKCEAAFATKDRLRAHTVRHEEKVPCHVCGKMLSSAYISDHMKVHSQGPHHVCELCNKGTGEVCPMAAAAAAAAAAAAAAVAAPPTAVGSLSGAEGVPVSSQPLPSQPW

SEQ ID NO: 8393 - protein, 196 aa, Homo Sapiens
  misc_feature (1)..(1): Xaa can be any naturally occurring amino acid
XGAVHKPYNCSHCGKSFSRPDHLNSHVRQVHSTERPFKCEKCEAAFATKDRLRAHTVRHEEKVPCHVCGKMLSSAYISDHMKVHSQGPHHVCELCNKGTGEVCPMAAAAAAAAAAAAAAVAAPPTAVGSLSGAEGVPVSSQPLPSQPCSSPGLVFSSLFPTTEEVVALAMSSCSCVPCMYPTLHPFLLRGPHYNKF

SEQ ID NO: 8394 - protein, 177 aa, Homo Sapiens [sequence omitted]

SEQ ID NO: 8395 - protein, 504 aa, Homo Sapiens
GMGAGPACPLPPLAGGEAFPFPSPEQGLALSGAGFPGMLGALPLPLSLGQPPPSPLLNHSLFGVLTGGGGQPPPEPLLPPPGGPGPPLAPGEPEGPSLLVASLLPPPPSDLLPPPSAPPSNLLASFLPLLALGPTAGDGEGSAEGAGGPSGEPFSGLGDLSPLLFPPLSAPPTLIALNSALLAATLDPPSGTPPQPCVLSAPQPGPPTSSVTTATTDPGASSLGKAPSNSGRPPQLLSPLLGASLLGDLSSLTSSPGALPSLLQPPGPLLSGQLGLQLLPGGGAPPPLSEASSPLACLLQSLQIPPEQPEAPCLPPESPASALEPEPARPPLSALAPPHGSPDPPVPELLTGRGSGKRGRRGGGGLRGINGEARPARGRKPGSRREPGRLALKWGTRGGFNGQMERSPRRTHHWQHNGELAEGGAEPKDPPPPGPHSEDLKVPPGVVRKSRRGRRRKYNPTRNSNSSRQDITLEPSPTARAAVPLPPRARPGRPAKNKRRKLAP

SEQ ID NO: 8396 - protein, 47 aa, Homo Sapiens
MNGGNESSGADRAGGPVATSVPIGWQRCVREGAVLYIRRICNLSTVL

SEQ ID NO: 8397 - protein, 45 aa, Homo Sapiens
MNGGNESSGADRAGGPVATSVPIGWQRCVREGAVLYISPSGTELS

SEQ ID NO: 8398 - protein, 53 aa, Homo Sapiens
MNGGNESSGADRAGGPVATSVPIGWQRCVREGAVLYISPSGTELSSLEQTRSY

SEQ ID NO: 8399 - protein, 53 aa, Homo Sapiens; identical to SEQ ID NO: 8398

SEQ ID NO: 8400 - protein, 73 aa, Homo Sapiens
MNGGNESSGADRAGGPVATSVPIGWQRCVREGAVLYISPSGTELSSLEQTRSYLLSDGTCKCGLECPLNVPKV

SEQ ID NO: 8401 - protein, 148 aa, Homo Sapiens
MNGGNESSGADRAGGPVATSVPIGWQRCVREGAVLYISPSGTELSSLEQTRSYLLSDGTCKCGLECPLNVPKVFNFDPLAPVTPGGAGVGPASEEDMTKLCNHRRKAVAMATLYRSMETTCSHSSPGEGASPQMFHTVSPGPPSARPP

SEQ ID NO: 8402 - protein, 1003 aa, Homo Sapiens
MNGGNESSGADRAGGPVATSVPIGWQRCVREGAVLYISPSGTELSSLEQTRSYLLSDGTCKCGLECPLNVPKVFNFDPLAPVTPGGAGVGPASEEDMTKLCNHRRKAVAMATLYRSMETTCSHSSPGEGASPQMFHTVSPGPPSARPPCRVPPTTPLNGGPGSLPPEPPSVSQAFPTLAGPGGLFPPRLADPVPSGGSSSPRFLPRGNAPSPAPPPPPAISLNAPSYNWGAALRSSLVPSDLGSPPAPHASSSPPSDPPLFHCSDALTPPPLPPSNNLPAHPGPASQPPVSSATMHLPLVLGPLGGAPTVEGPGAPPFLASSLLSAAAKAQHPPLPPPSTLQGRRPRAQAPSASHSSSLRPSQRRPRRPPTVFRLLEGRGPQTPRRSRPRAPAPVPQPFSLPEPSQPILPSVLSLLGLPTPGPSHSDGSFNLLGSDAHLPPPPTLSSGSPPQPRHPIQPSLPGTTSGSLSSVPGAPAPPAASKAPVVPSPVLQSPSEGLGMGAGPACPLPPLAGGEAFPFPSPEQGLALSGAGFPGMLGALPLPLSLGQPPPSPLLNHSLFGVLTGGGGQPPPEPLLPPPGGPGPPLAPGEPEGPSLLVASLLPPPPSDLLPPPSAPPSNLLASFLPLLALGPTAGDGEGSAEGAGGPSGEPFSGLGDLSPLLFPPLSAPPTLIALNSALLAATLDPPSGTPPQPCVLSAPQPGPPTSSVTTATTDPGASSLGKAPSNSGRPPQLLSPLLGASLLGDLSSLTSSPGALPSLLQPPGPLLSGQLGLQLLPGGGAPPPLSEASSPLACLLQSLQIPPEQPEAPCLPPESPASALEPEPARPPLSALAPPHGSPDPPVPELLTGRGSGKRGRRGGGGLRGINGEARPARGRKPGSRREPGRLALKWGTRGGFNGQMERSPRRTHHWQHNGELAEGGAEPKDPPPPGPHSEDLKVPPGVVRKSRRGRRRKYNPTRNSNSSRQDITLEPSPTARAAVPLPPRARPGRPAKNKRRKLAP

SEQ ID NO: 8403 - protein, 66 aa, Homo Sapiens
MTKLCNHRRKAVAMATLYRSMETTCSHSSPGEGASPQMFHTVSPGPPSARPPCRVPPTTPLNGGPG

SEQ ID NO: 8404 - protein, 27 aa, Homo Sapiens
  misc_feature (1)..(1): Xaa can be any naturally occurring amino acid
XARAAVPLPPRARPGRPAKNKRRKLAP

SEQ ID NO: 8405 - protein, 190 aa, Homo Sapiens
  misc_feature (1)..(1): Xaa can be any naturally occurring amino acid
XLLSGQLGLQLLPGGGAPPPLSEASSPLACLLQSLQQIPPEQPEAPCLPPESPASALEPEPARPPLSALAPPHGSPDPPVPELLTGRGSGKRGRRGGGGLRGINGEARPARGRKPGSRREPGRLALKWGTRGGFNGQMERSPRRTHHWQHNGELAEGGAEPKDPPPPGPHSEDLKVPPGVVRKSRRGRRR

SEQ ID NO: 8406 - protein, 248 aa, Homo Sapiens
MSLFPSLPLLLLSMVAASYSETVTCEDAQKTCPAVIACSSPGINGFPGKDGRDGTKGEKGEPGQGLRGLQGPPGKLGPPGNPGPSGSPGPKGQKGDPGKSPDGDSSLAASERKALQTEMARIKKWLTFSLGKQVGNKFFLTNGEIMTFEKVKALCVKFQASVATPRNAAENGAIQNLIKEEAFLGITDEKTEGQFVDLTGNRLTYTNWNEGEPNNAGSDEDCVLLLKNGQWNDVPCSTSHLAVCEFPI

SEQ ID NO: 8407 - protein, 90 aa, Homo Sapiens
MAMLAQQMQLANAMMPGAPLQPVPMFSVAPSLATNASAAAFNPYLGPVSPSLVPAEILPTAPMLVTGNPGVPVPAAAAAAAQKLMRTDRL

SEQ ID NO: 8408 - protein, 155 aa, Homo Sapiens
MAMLAQQMQLANAMMPGAPLQPVPMFSVAPSLATNASAAAFNPYLGPVSPSLVPAEILPTAPMLVTGNPGVPVPAAAAAAAQKLMRTDRLEVCREYQRGNCNRGENDCRFAHPADSTMIDTNDNTVTVCMDYIKGRCSREKCKYFHPPAHLQAKI

SEQ ID NO: 8409 - protein, 388 aa, Homo Sapiens
MAVSVTPIRDTKWLTLEVCREFQRGTCSRPDTECKFAHPSKSCQVENGRVIACFDSLKGRCSRENCKYLHPPPHLKTQLEINGRNNLIQQKNMAMLAQQMQLANAMMPGAPLQPVPMFSVAPSLATNASAAAFNPYLGPVSPSLVPAEILPTAPMLVTGNPGVPVPAAAAAAAQKLMRTDRLEVCREYQRGNCNRGENDCRFAHPADSTMIDTNDNTVTVCMDYIKGRCSREKCKYFHPPAHLQAKIKAAQYQVNQAAAAQAAATAAAMTQSAVKSLKRPLEATFDLGIPQAVLPPLPKRPALEKTNGATAVFNTGIFQYQQALANMQLQQHTAFLPPVPMVHGATPATVSAATTSATSVPFAATATANQIPIISAEHLTSHKYVTQM

SEQ ID NO: 8410 - protein, 400 aa, Homo Sapiens
MAVSVTPIRDTKWLTLEVCREFQRGTCSRPDTECKFAHPSKSCQVENGRVIACFDSLKGRCSRENCKYLHPPPHLKTQLEINGRNNLIQQKNMAMLAQQMQLANAMMPGAPLQPVPMFSVAPSLATNASAAAFNPYLGPVSPSLVPAEILPTAPMLVTGNPGVPVPAAAAAAAQKLMRTDRLEVCREYQRGNCNRGENDCRFAHPADSTMIDTNDNTVTVCMDYIKGRCSREKCKYFHPPAHLQAKIKAAQYQVNQAAAAQAAATAAAMTQSAVKSLKRPLEATFDLGIPQAVLPPLPKRPALEKTNGATAVFNTGIFQYQQALANMQLQQHTAFLPPGSILCMTPATSVVPMVHGATPATVSAATTSATSVPFAATATANQIPIISAEHLTSHKYVTQM

SEQ ID NO: 8411 - protein, 370 aa, Homo Sapiens
MAVSVTPIRDTKWLTLEVCREFQRGTCSRPDTECKFAHPSKSCQVENGRVIACFDSLKGRCSRENCKYLHPPPHLKTQLEINGRNNLIQQKNMAMLAQQMQLANAMMPGAPLQPVPMFSVAPSLATNASAAAFNPYLGPVSPSLVPAEILPTAPMLVTGNPGVPVPAAAAAAAQKLMRTDRLEVCREYQRGNCNRGENDCRFAHPADSTMIDTNDNTVTVCMDYIKGRCSREKCKYFHPPAHLQAKIKAAQYQVNQAAAAQAAATAAAMGIPQAVLPPLPKRPALEKTNGATAVFNTGIFQYQQALANMQLQQHTAFLPPVPMVHGATPATVSAATTSATSVPFAATATANQIPIISAEHLTSHKYVTQM

SEQ ID NO: 8412 - protein, 382 aa, Homo Sapiens
MAVSVTPIRDTKWLTLEVCREFQRGTCSRPDTECKFAHPSKSCQVENGRVIACFDSLKGRCSRENCKYLHPPPHLKTQLEINGRNNLIQQKNMAMLAQQMQLANAMMPGAPLQPVPMFSVAPSLATNASAAAFNPYLGPVSPSLVPAEILPTAPMLVTGNPGVPVPAAAAAAAQKLMRTDRLEVCREYQRGNCNRGENDCRFAHPADSTMIDTNDNTVTVCMDYIKGRCSREKCKYFHPPAHLQAKIKAAQYQVNQAAAAQAAATAAAMGIPQAVLPPLPKRPALEKTNGATAVFNTGIFQYQQALANMQLQQHTAFLPPGSILCMTPATSVVPMVHGATPATVSAATTSATSVPFAATATANQIPIISAEHLTSHKYVTQM

SEQ ID NO: 8413 - protein, 340 aa, Homo Sapiens
MAVSVTPIRDTKWLTLEVCREFQRGTCSRPDTECKFAHPSKSCQVENGRVIACFDSLKGRCSRENCKYLHPPPHLKTQLEINGRNNLIQQKNMAMLAQQMQLANAMMPGAPLQPVPMFSVAPSLATNASAAAFNPYLGPVSPSLVPAEILPTAPMLVTGNPGVPVPAAAAAAAQKLMRTDRLEVCREYQRGNCNRGENDCRFAHPADSTMIDTNDNTVTVCMDYIKGRCSREKCKYFHPPAHLQAKIKAAQYQVNQAAAAQAAATAAAMFPWCTVLRQPLCPQQQHLPQVFPSLQQPQPTSPILDASTLLGATSCPAAAGKMIPIISAEHLTSHKYVTQM

SEQ ID NO: 8414 - protein, 342 aa, Homo Sapiens
MAVSVTPIRDTKWLTLEVCREFQRGTCSRPDTECKFAHPSKSCQVENGRVIACFDSLKGRCSRENCKYLHPPPHLKTQLEINGRNNLIQQKNMAMLAQQMQLANAMMPGAPLQPVPMFSVAPSLATNASAAAFNPYLGPVSPSLVPAEILPTAPMLVTGNPGVPVPAAAAAAAQKLMRTDRLEVCREYQRGNCNRGENDCRFAHPADSTMIDTNDNTVTVCMDYIKGRCSREKCKYFHPPAHLQAKIKAAQYQVNQAAAAQAAATAAAMGIPQAVLPPLPKRPALEKTNGATAVFNTGIFQYQQALANMQLQQHTAFLPPGSILCMTPATSVDTHNICRTSD

SEQ ID NO: 8415 - protein, 340 aa, Homo Sapiens; identical to SEQ ID NO: 8413

SEQ ID NO: 8416 - protein, 342 aa, Homo Sapiens; identical to SEQ ID NO: 8414

SEQ ID NO: 8417 - protein, 388 aa, Homo Sapiens; identical to SEQ ID NO: 8409

SEQ ID NO: 8418 - protein, 348 aa, Homo Sapiens
MAVSVTPIRDTKWLTLEVCREFQRGTCSRPDTECKFAHPSKSCQVENGRVIACFDSLKGRCSRENCKYLHPPPHLKTQLEINGRNNLIQQKNMAMLAQQMQLANAMMPGAPLQPVPMFSVAPSLATNASAAAFNPYLGPVSPSLVPAEILPTAPMLVTGNPGVPVPAAAAAAAQKLMRTDRLEVCREYQRGNCNRGENDCRFAHPADSTMIDTNDNTVTVCMDYIKGRCSREKCKYFHPPAHLQAKIKAAQYQVNQAAAAQAAATAAAMTQSAVKSLKRPLEATFDLGIPQAVLPPLPKRPALEKTNGATAVFNTGIFQYQQALANMQLQQHTAFLPPDTHNICRTSD

SEQ ID NO: 8419 - protein, 314 aa, Homo Sapiens
MAVSVTPIRDTKWLTLEVCREFQRGTCSRPDTECKFAHPSKSCQVENGRVIACFDSLKGRCSRENCKYLHPPPHLKTQLEINGRNNLIQQKNMAMLAQQMQLANAMMPGAPLQPVVCREYQRGNCNRGENDCRFAHPADSTMIDTNDNTVTVCMDYIKGRCSREKCKYFHPPAHLQAKIKAAQYQVNQAAAAQAAATAAAMGIPQAVLPPLPKRPALEKTNGATAVFNTGIFQYQQALANMQLQQHTAFLPPGSILCMTPATSVVPMVHGATPATVSAATTSATSVPFAATATANQIPIISAEHLTSHKYVTQM

SEQ ID NO: 8420 - protein, 314 aa, Homo Sapiens; identical to SEQ ID NO: 8419

SEQ ID NO: 8421 - protein, 302 aa, Homo Sapiens
MAVSVTPIRDTKWLTLEVCREFQRGTCSRPDTECKFAHPSKSCQVENGRVIACFDSLKGRCSRENCKYLHPPPHLKTQLEINGRNNLIQQKNMAMLAQQMQLANAMMPGAPLQPVVCREYQRGNCNRGENDCRFAHPADSTMIDTNDNTVTVCMDYIKGRCSREKCKYFHPPAHLQAKIKAAQYQVNQAAAAQAAATAAAMGIPQAVLPPLPKRPALEKTNGATAVFNTGIFQYQQALANMQLQQHTAFLPPVPMVHGATPATVSAATTSATSVPFAATATANQIPIISAEHLTSHKYVTQM

SEQ ID NO: 8422 - protein, 343 aa, Homo Sapiens
MGRCSRENCKYLHPPPHLKTQLEINGRNNLIQQKNMAMLAQQMQLANAMMPGAPLQPVPMFSVAPSLATNASAAAFNPYLGPVSPSLVPAEILPTAPMLVTGNPGVPVPAAAAAAAQKLMRTDRLEVCREYQRGNCNRGENDCRFAHPADSTMIDTNDNTVTVCMDYIKGRCSREKCKYFHPPAHLQAKIKAAQYQVNQAAAAQAAATAAAMTQSAVKSLKRPLEATFDLGIPQAVLPPLPKRPALEKTNGATAVFNTGIFQYQQALANMQLQQHTAFLPPGSILCMTPATSVVPMVHGATPATVSAATTSATSVPFAATATANQIPIISAEHLTSHKYVTQM

SEQ ID NO: 8423 - protein, 58 aa, Homo Sapiens
MLGRCSRENCKYLHPPPHLKTQLEINGRNNLIQQKNMAMLAQQMQLANAMMPGAPLQP

SEQ ID NO: 8424 - protein, 210 aa, Homo Sapiens
QQMQLANAMMPGAPLQPVPMFSVAPSLATNASAAAFNPYLGPVSPSLVPAEILPTAPMLVTGNPGVPVPAAAAAAAQKLMRTDRLEVCREYQRGNCNRGENDCRFAHPADSTMIDTNDNTVTVCMDYIKGRCSREKCKYFHPPAHLQAKIKAAQYQVNQAAAAQAAATAAAMALANMQLQQHTAFLPPGSILCMTPATSVDTHNICRTSD

SEQ ID NO: 8425 - protein, 329 aa, Homo Sapiens
  misc_feature (1)..(1): Xaa can be any naturally occurring amino acid
XVSVTPIRDTKWLTLEVCREFQRGTCSRPDTECKFAHPSKSCQVENGRVIACFDSLKGRCSRENCKYLHPPPHLKTQLEINGRNNLIQQKNMAMLAQQMQLANAMMPGAPLQPVPMFSVAPSLATNASAAAFNPYLGPVSPSLVPAEILPTAPMLVTGNPGVPVPAAAAAAAQKLMRTDRLEVCREYQRGNCNRGENDCRFAHPADSTMIDTNDNTVTVCMDYIKGRCSREKCKYFHPPAHLQAKIKAAQYQVNQAAAAQAAATAAAMGIPQAVLPPLPKRPALEKTNGATAVFNTGIFQYQQALANMQLQQHTAFLPPDTHNICRTSD

SEQ ID NO: 8426 - protein, 56 aa, Homo Sapiens
MAAASAVSVLLVAAERNRWHRLPSLLLPPRLSIQDAVFSQKTWNLLNFVSKKELFL

SEQ ID NO: 8427 - protein, 598 aa, Homo Sapiens
MAAASAVSVLLVAAERNRWHRLPSLLLPPRTWVWRQRTMKYTTATDEAYSIGPAPSQQSYLSMEKIIQVAKTSAAQAIHPGCGFLSENMEFAELCKQEGIIFIGPPPSAIRDMGIKSTSKSIMAAAGVPVVEGYHGEDQSDQCLKEHARRIGYPVMIKAVRGGGGKGMRIVRSEQEFQEQLESARREAKKSFNDDAMLIEKFVDTPRHVEVQVFGDHHGNAVYLFERDCSVQRRHQKIIEEAPAPGIKSEVRKKLGEAAVRAAKAVNYVGAGTVEFIMDSKHNFCFMEMNTRLQVEHPVTEMITGTDLVEWQLRIAAGEKIPLSQEEITLQGHAFEARIYAEDPSNNFMPVAGPLVHLSTPRADPSTRIETGVRQGDEVSVHYDPMIAKLVVWAADRQAALTKLRYSLRQYNIVGLHTNIDFLLNLSGHPEFEAGNVHTDFIPQHHKQLLLSRKAAAKESLCQAALGLILKEKAMTDTFTLQAHDQFSPFSSSSGRRLNISYTRNMTLKDGKNNVAIAVTYNHDGSYSMQIEDKTFQVLGNLYSEGDCTYLKCSVNGVASKAKLIILENTIYLFSKEGSIEIDIPVPKYLSSVSSQET

SEQ ID NO: 8428 - protein, 47 aa, Homo Sapiens
MAAASAVSVLLVAAERNRWHRLPSLLLPPRTWVWRQRTMKYTTATGR

SEQ ID NO: 8429 - protein, 47 aa, Homo Sapiens; identical to SEQ ID NO: 8428

SEQ ID NO: 8430 - protein, 725 aa, Homo Sapiens
MAAASAVSVLLVAAERNRWHRLPSLLLPPRTWVWRQRTMKYTTATGRNITKVLIANRGEIACRVMRTAKKLGVQTVAVYSEADRNSMHVDMADEAYSIGPAPSQQSYLSMEKIIQVAKTSAAQAIHPGCGFLSENMEFAELCKQEGIIFIGPPPSAIRDMGIKSTSKSIMAAAGVPVVEGYHGEDQSDQCLKEHARRIGYPVMIKAVRGGGGKGMRIVRSEQEFQEQLESARREAKKSFNDDAMLIEKFVDTPRHVEVQVFGDHHGNAVYLFERDCSVQRRHQKIIEEAPAPGIKSEVRKKLGEAAVRAAKAVNYVGAGTVEFIMDSKHNFCFMEMNTRLQVEHPVTEMITGTDLVEWQLRIAAGEKIPLSQEEITLQGHAFEARIYAEDPSNNFMPVAGPLVHLSTPRADPSTRIETGVRQGDEVSVHYDPMIAKLVVWAADRQAALTKLRYSLRQYNIVGLHTNIDFLLNLSGHPEFEAGNVHTDFIPQHHKQLLLSRKAAAKESLCQAALGLILKEKAMTDTFTLQAHDQFSPFSSSSGRRLNISYTRNMTLKDGKNNVAIAVTYNHDGSYSMQIEDKTFQVLGNLYSEGDCTYLKCSVNGVASKAKLIILENTIYLFSKEGSIEIDIPVPKYLSSVSSQETQGGPLAPMTGTIEKVFVKAGDKVKAGDSLMVMIAMKMEHTIKSPKDGTVKKVFYREGAQANRHTPLVEFEEEESDKRESE

SEQ ID NO: 8431 - protein, 112 aa, Homo Sapiens
MAAASAVSVLLVAAERNRWHRLPSLLLPPRTWVWRQRTMKYTTATGRNITKVLIANRGEIACRVMRTAKKLGVQTVAVYSEADRNSMHVDMQDDLDFTEKIKLRFLPQNLLT

SEQ ID NO: 8432 - protein, 61 aa, Homo Sapiens
MAAASAVSVLLVAAERNRWHRLPSLLLPPRTWVWRQRTMKYTTATGYPSRMRFSLRKHGIC

SEQ ID NO: 8433 - protein, 61 aa, Homo Sapiens; identical to SEQ ID NO: 8432

SEQ ID NO: 8434 - protein, 616 aa, Homo Sapiens
MEKIIQVAKTSAAQAIHPGCGFLSENMEFAELCKQEGIIFIGPPPSAIRDMGIKSTSKSIMAAAGVPVVEGYHGEDQSDQCLKEHARRIGYPVMIKAVRGGGGKGMRIVRSEQEFQEQLESARREAKKSFNDDAMLIEKFVDTPRHVEVQVFGDHHGNAVYLFERDCSVQRRHQKIIEEAPAPGIKSEVRKKLGEAAVRAAKAVNYVGAGTVEFIMDSKHNFCFMEMNTRLQVEHPVTEMITGTDLVEWQLRIAAGEKIPLSQEEITLQGHAFEARIYAEDPSNNFMPVAGPLVHLSTPRADPSTRIETGVRQGDEVSVHYDPMIAKLVVWAADRQAALTKLRYSLRQYNIVGLHTNIDFLLNLSGHPEFEAGNVHTDFIPQHHKQLLLSRKAAAKESLCQAALGLILKEKAMTDTFTLQAHDQFSPFSSSSGRRLNISYTRNMTLKDGKNNVAIAVTYNHDGSYSMQIEDKTFQVLGNLYSEGDCTYLKCSVNGVASKAKLIILENTIYLFSKEGSIEIDIPVPKYLSSVSSQETQGGPLAPMTGTIEKVFVKAGDKVKAGDSLMVMIAMKMEHTIKSPKDGTVKKVFYREGAQANRHTPLVEFEEEESDKRESE

SEQ ID NO: 8435 - protein, 575 aa, Homo Sapiens
MEKIIQVAKTSAAQHIQSIMAAAGVPVVEGYHGEDQSDQCLKEHARRIGYPVMIKAVRGGGGKGMRIVRSEQEFQEQLESARREAKKSFNDDAMLIEKFVDTPRHVEVQVFGDHHGNAVYLFERDCSVQRRHQKIIEEAPAPGIKSEVRKKLGEAAVRAAKAVNYVGAGTVEFIMDSKHNFCFMEMNTRLQVEHPVTEMITGTDLVEWQLRIAAGEKIPLSQEEITLQGHAFEARIYAEDPSNNFMPVAGPLVHLSTPRADPSTRIETGVRQGDEVSVHYDPMIAKLVVWAADRQAALTKLRYSLRQYNIVGLHTNIDFLLNLSGHPEFEAGNVHTDFIPQHHKQLLLSRKAAAKESLCQAALGLILKEKAMTDTFTLQAHDQFSPFSSSSGRRLNISYTRNMTLKDGKNNVAIAVTYNHDGSYSMQIEDKTFQVLGNLYSEGDCTYLKCSVNGVASKAKLIILENTIYLFSKEGSIEIDIPVPKYLSSVSSQETQGGPLAPMTGTIEKVFVKAGDKVKAGDSLMVMIAMKMEHTIKSPKDGTVKKVFYREGAQANRHTPLVEFEEEESDKRESE

SEQ ID NO: 8436 - protein, 434 aa, Homo Sapiens
MKYTTATGRNITKVLIANRGEIACRVMRTAKKLGVQTVAVYSEADRNSMHVDMADEAYSIGPAPSQQSYLSMEKIIQVAKTSAAQAIHPGCGFLSENMEFAELCKQEGIIFIGPPPSAIRDMGIKSTSKSIMAAAGVPVVEGYHGEDQSDQCLKEHARRIGYPVMIKAVRGGGGKGMRIVRSEQEFQEQLESARREAKKSFNDDAMLIEKFVDTPRHVEVQVFGDHHGNAVYLFERDCSVQRRHQKIIEEAPAPGIKSEVRKKLGEAAVRAAKAVNYVGAGTVEFIMDSKHNFCFMEMNTRLQVEHPVTEMITGTDLVEWQLRIAAGEKIPLSQEEITLQGHAFEARIYAEDPSNNFMPVAGPLVHLSTPRADPSTRIETGVRQGDEVSVHYDPMIAKLVVWAADRQAALTKLRYSLRQYNINSLHFRLAVEED

SEQ ID NO: 8437 - protein, 434 aa, Homo Sapiens; identical to SEQ ID NO: 8436

SEQ ID NO: 8438 - protein, 119 aa, Homo Sapiens
MVLPLPWLSRYHFLRLLLPSWSLAPQGSHGCCSQNPKASMEEQTSSRGNGKMTSPPRGPGTHRTAELARAEELLEQQLELYQALLEGQEGAWEAQALVLKIQKLKEQMRRHQESLGGGA

SEQ ID NO: 8439 - protein, 78 aa, Homo Sapiens
LGRLNHVAIAVPDLEKAAAFYKNILGAQVDNINAAVMDLKKKKIRSLSEEVKIGAHGKPVIFLHPKDCGGVLVELEQA

SEQ ID NO: 8440 - protein, 176 aa, Homo Sapiens
MARVLKAAAANAVGLFSRLQAPIPTVRASSTSQPLDQVTGSVWNLGRLNHVAIAVPDLEKAAAFYKNILGAQVSEAVPLPEHGVSVVFVNLGNTKMELLHPLGRDSPIAGFLQKNKAGGMHHICIEVDNINAAVMDLKKKKIRSLSEEVKIGAHGKPVIFLHPKDCGGVLVELEQA

SEQ ID NO: 8441 - protein, 31 aa, Homo Sapiens
MELLHPLGRDSPIAGFLQKNKAGGMHHICIE

SEQ ID NO: 8442 - protein, 31 aa, Homo Sapiens; identical to SEQ ID NO: 8441

SEQ ID NO: 8443 - protein, 1067 aa, Homo Sapiens
MAEKGASRGTLRRLWSLPRRRRGTAGRSRPDEIMHQDIVPLCAADIQDQLKKRFAYLSGGRGQDGSPVITFPDYPAFSEIPDKEFQNVMTYLTSIPSLQDAGIGFILVIDRRRDKWTSVKASVLRIAASFPANLQLVLVLRPTGFFQRTLSDIAFKFNRDDFKMKVPVIMLSSVPDLHGYIDKSQLTEDLGGTLDYCHSRWLCQRTAIESFALMVKQTAQMLQSFGTELAETELPNDVQSTSSVLCAHTEKKDKAKEDLRLALKEGHSVLESLRELQAEGSEPSVNQDQLDNQATVQRLLAQLNETEAAFDEFWAKHQQKLEQCLQLRHFEQGFREVKAILDAASQKIATFTDIGNSLAHVEHLLRDLASFEEKSGVAVERARALSLDGEQLIGNKHYAVDSIRPKCQELRHLCDQFSAEIARRRGLLSKSLELHRRLETSMKWCDEGIYLLASQPVDKCQSQDGAEAALQEIEKFLETGAENKIQELNAIYKEYESILNQDLMEHVRKVFQKQASMEEVFHRRQASLKKLAARQTRPVQPVAPRPEALAKSPCPSPGIRRGSENSSSEGGALRRGPYRRAKSEMSESRQGRGSAGEEEESLAILRRHVMSELLDTERAYVEELLCVLEGYAAEMDNPLMAHLLSTGLHNKKDVLFGNMEEIYHFHNRIFLRELENYTDCPELVGRCFLERMEDFQIYEKYCQNKPRSESLWRQCSDCPFFQECQRKLDHKLSLDSYLLKPVQRITKYQLLLKEMLKYSRNCEGAEDLQEALSSILGILKAVNDSMHLIAITGYDGNLGDLGKLLMQGSFSVWTDHKRGHTKVKELARFKPMQRHLFLHEKAVLFCKKREENGEGYEKAPSYSYKQSLNMAAVGITENVKGDAKKFEIWYNAREEVYIVQAPTPEIKAAWVNEIRKVLTSQLQACREASQHRALEQSQSLPLPAPTSTSPSRGNSRNIKKLEERKTDPLSLEGYVSSAPLTKPPEKGKGWSKTSHSLEAPEDDGGWSSAEEQINSSDAEEDGGLGPKKLVPGKYTVVADHEKGGPDALRVRSGDVVELVQEGDEGLW

SEQ ID NO: 8444 - protein, 66 aa, Homo Sapiens
MFDCWRFILCKRPGSNSYSSPQRPNEAKKEETDHQIDVSDVIRLVQDTPEATAMATAPRRSQSPGL

SEQ ID NO: 8445 - protein, 1137 aa, Homo Sapiens
MFDCWRFILCKRPGSNSYSSPQRPNEAKKEETDHQIDVSDVIRLVQDTPEATAMATDEIMHQDIVPLCAADIQDQLKKRFAYLSGGRGQDGSPVITFPDYPAFSEIPDKEFQNVMTYLTSIPSLQDAGIGFILVIDRRRDKWTSVKASVLRIAASFPANLQLVLVLRPTGFFQRTLSDIAFKFNRDDFKMKVPVIMLSSVPDLHGYIDKSQLTEDLGGTLDYCHSRWLCQRTAIESFALMVKQTAQMLQSFGTELAETELPNDVQSTSSVLCAHTEKKDKAKEDLRLALKEGHSVLESLRELQAEGSEPSVNQDQLDNQATVQRLLAQLNETEAAFDEFWAKHQQKLEQCLQLRHFEQGFREVKAILDAASQKIATFTDIGNSLAHVEHLLRDLASFEEKSGVAVERARALSLDGEQLIGNKHYAVDSIRPKCQELRHLCDQFSAEIARRRGLLSKSLELHRRLETSMKWCDEGIYLLASQPVDKCQSQDGAEAALQEIEKFLETGAENKIQELNAIYKEYESILNQDLMEHVRKVFQKQASMEEVFHRRQASLKKLAARQTRPVQPVAPRPEALAKSPCPSPGIRRGSENSSSEGGALRRGPYRRAKSEMSESRQGRGSAGEEEESLAILRRHVMSELLDTERAYVEELLCVLEGYAAEMDNPLMAHLLSTGLHNKKDVLFGNMEEIYHFHNRIFLRELENYTDCPELVGRCFLERMEDFQIYEKYCQNKPRSESLWRQCSDCPFFQECQRKLDHKLSLDSYLLKPVQRITKYQLLLKEMLKYSRNCEGAEDLQEALSSILGILKAVNDSMHLIAITGYDGNLGDLGKLLMQGSFSVWTDHKRGHTKVKELARFKPMQRHLFLHEKAVLFCKKREENGEGYEKAPSYSYKQSLNMAAVGITENVKGDAKKFEIWYNAREEVYIVQAPTPEIKAAWVNEIRKVLTSQLQACREASQHRALEQSQSLPLPAPTSTSPSRGNSRNIKKLEERKTDPLSLEGYVSSAPLTKPPEKGKGWSKTSHSLEAPEDDGGWSSAEEQINSSDAEEDGGLGPKKLVPGKYTVVADHEKGGPDALRVRSGDVVELVQEGDEGLWYVRDPTTGKEGWVPASSLSVRLGPSGSAQCLSSSGKAHVPRAHP

SEQ ID NO: 8446 - protein, 64 aa, Homo Sapiens
MFDCWRFILCKRPGSNSYSSPQRPNEAKKEETDHQIDVSDVIRLVQDTPEATAMATEVSASRPQ

SEQ ID NO: 8447 - protein, 97 aa, Homo Sapiens
MGDGKAVRISVAEMKSYYLYSEWCSWLLSVAEDEIMHQDIVPLCAADIQDQLKKRFAYLSGGRGQDGSPVITFPDYPAFSEIPDKEFQNVMTYLTSI

SEQ ID NO: 8448 - protein, 136 aa, Homo Sapiens
MHQDIVPLCAADIQDQLKKRFAYLSGGRGQDGSPVITFPDYPAFSEIPDKEFQNVMTYLTSIPSLQDAGIGFILVIDRRRDKWTSVKASVLRIAASFPANLQLVLVLRPTGFFQRTLSDIAFKFNRDDFKMKVPVI

SEQ ID NO: 8449 - protein, 1096 aa, Homo Sapiens
MPLRGGAGPSPASHGPTHGPSDPRTCLPGRGAGGMRPHGRGALGCCGLCSFYTCHGAAGDEIMHQDIVPLCAADIQDQLKKRFAYLSGGRGQDGSPVITFPDYPAFSEIPDKEFQNVMTYLTSIPSLQDAGIGFILVIDRRRDKWTSVKASVLRIAASFPANLQLVLVLRPTGFFQRTLSDIAFKFNRDDFKMKVPVIMLSSVPDLHGYIDKSQLTEDLGGTLDYCHSRWLCQRTAIESFALMVKQTAQMLQSFGTELAETELPNDVQSTSSVLCAHTEKKDKAKEDLRLALKEGHSVLESLRELQAEGSEPSVNQDQLDNQATVQRLLAQLNETEAAFDEFWAKHQQKLEQCLQLRHFEQGFREVKAILDAASQKIATFTDIGNSLAHVEHLLRDLASFEEKSGVAVERARALSLDGEQLIGNKHYAVDSIRPKCQELRHLCDQFSAEIARRRGLLSKSLELHRRLETSMKWCDEGIYLLASQPVDKCQSQDGAEAALQEIEKFLETGAENKIQELNAIYKEYESILNQDLMEHVRKVFQKQASMEEVFHRRQASLKKLAARQTRPVQPVAPRPEALAKSPCPSPGIRRGSENSSSEGGALRRGPYRRAKSEMSESRQGRGSAGEEEESLAILRRHVMSELLDTERAYVEELLCVLEGYAAEMDNPLMAHLLSTGLHNKKDVLFGNMEEIYHFHNRIFLRELENYTDCPELVGRCFLERMEDFQIYEKYCQNKPRSESLWRQCSDCPFFQECQRKLDHKLSLDSYLLKPVQRITKYQLLLKEMLKYSRNCEGAEDLQEALSSILGILKAVNDSMHLIAITGYDGNLGDLGKLLMQGSFSVWTDHKRGHTKVKELARFKPMQRHLFLHEKAVLFCKKREENGEGYEKAPSYSYKQSLNMAAVGITENVKGDAKKFEIWYNAREEVYIVQAPTPEIKAAWVNEIRKVLTSQLQACREASQHRALEQSQSLPLPAPTSTSPSRGNSRNIKKLEERKTDPLSLEGYVSSAPLTKPPEKGKGWSKTSHSLEAPEDDGGWSSAEEQINSSDAEEDGGLGPKKLVPGKYTVVADHEKGGPDALRVRSGDVVELVQEGDEGLW

SEQ ID NO: 8450 - protein, 1125 aa, Homo Sapiens
MRFWLRTEEMALEEMVQRLNAVSKHTDEIMHQDIVPLCAADIQDQLKKRFAYLSGGRGQDGSPVITFPDYPAFSEIPDKEFQNVMTYLTSIPSLQDAGIGFILVIDRRRDKWTSVKASVLRIAASFPANLQLVLVLRPTGFFQRTLSDIAFKFNRDDFKMKVPVIMLSSVPDLHGYIDKSQLTEDLGGTLDYCHSRWLCQRTAIESFALMVKQTAQMLQSFGTELAETELPNDVQSTSSVLCAHTEKKDKAKEDLRLALKEGHSVLESLRELQAEGSEPSVNQDQLDNQATVQRLLAQLNETEAAFDEFWAKHQQKLEQCLQLRHFEQGFREVKAILDAASQKIATFTDIGNSLAHVEHLLRDLASFEEKSGVAVERARALSLDGEQLIGNKHYAVDSIRPKCQELRHLCDQFSAEIARRRGLLSKSLELHRRLETSMKWCDEGIYLLASQPVDKCQSQDGAEAALQEIEKFLETGAENKIQELNAIYKEYESILNQDLMEHVRKVFQKQASMEEVFHRRQASLKKLAARQTRPVQPVAPRPEALAKSPCPSPGIRRGSENSSSEGGALRRGPYRRAKSEMSESRQGRGSAGEEEESLAILRRHVMSELLDTERAYVEELLCVLEGYAAEMDNPLMAHLLSTGLHNKKDVLFGNMEEIYHFHNRIFLRELENYTDCPELVGRCFLERMEDFQIYEKYCQNKPRSESLWRQCSDCPFFQECQRKLDHKLSLDSYLLKPVQRITKYQLLLKEMLKYSRNCEGAEDLQEALSSILGILKAVNDSMHLIAITGYDGNLGDLGKLLMQGSFSVWTDHKRGHTKVKELARFKPMQRHLFLHEKAVLFCKKREENGEGYEKAPSYSYKQSLNMAAVGITENVKGDAKKFEIWYNAREEVYIVQAPTPEIKAAWVNEIRKVLTSQLQACREASQHRALEQSQSLPLPAPTSTSPSRGNSRNIKKLEERKTDPLSLEGYVSSAPLTKPPEKGKGWSKTSHSLEAPEDDGGWSSAEEQINSSDAEEDGGLGPKKLVPGKYTVVADHEKGGPDALRVRSGDVVELVQEGDEGLWYVRDPTTGKEGWVPASSLSVRLGPSGSAQCLSSSESSPGSAVLSNSSSCSEGGQAPFSDLQG

SEQ ID NO: 8451 - protein, 136 aa, Homo Sapiens
MTVRRLSLLCRDLWALWLLLKAGADEIMHQDIVPLCAADIQDQLKKRFAYLSGGRGQDGSPVITFPDYPAFSEIPDKEFQNVMTYLTSIPSGGQESSIRPVSCRLTWEGCRGGLSSDVLVPASRKMLRMSASHQTV

SEQ ID NO: 8452 - protein, 1123 aa, Homo Sapiens
MTVRRLSLLCRDLWALWLLLKAGADEIMHQDIVPLCAADIQDQLKKRFAYLSGGRGQDGSPVITFPDYPAFSEIPDKEFQNVMTYLTSIPSLQDAGIGFILVIDRRRDKWTSVKASVLRIAASFPANLQLVLVLRPTGFFQRTLSDIAFKFNRDDFKMKVPVIMLSSVPDLHGYIDKSQLTEDLGGTLDYCHSRWLCQRTAIESFALMVKQTAQMLQSFGTELAETELPNDVQSTSSVLCAHTEKKDKAKEDLRLALKEGHSVLESLRELQAEGSEPSVNQDQLDNQATVQRLLAQLNETEAAFDEFWAKHQQKLEQCLQLRHFEQGFREVKAILDAASQKIATFTDIGNSLAHVEHLLRDLASFEEKSGVAVERARALSLDGEQLIGNKHYAVDSIRPKCQELRHLCDQFSAEIARRRGLLSKSLELHRRLETSMKWCDEGIYLLASQPVDKCQSQDGAEAALQEIEKFLETGAENKIQELNAIYKEYESILNQDLMEHVRKVFQKQASMEEVFHRRQASLKKLAARQTRPVQPVAPRPEALAKSPCPSPGIRRGSENSSSEGGALRRGPYRRAKSEMSESRQGRGSAGEEEESLAILRRHVMSELLDTERAYVEELLCVLEGYAAEMDNPLMAHLLSTGLHNKKDVLFGNMEEIYHFHNRIFLRELENYTDCPELVGRCFLERMEDFQIYEKYCQNKPRSESLWRQCSDCPFFQECQRKLDHKLSLDSYLLKPVQRITKYQLLLKEMLKYSRNCEGAEDLQEALSSILGILKAVNDSMHLIAITGYDGNLGDLGKLLMQGSFSVWTDHKRGHTKVKELARFKPMQRHLFLHEKAVLFCKKREENGEGYEKAPSYSYKQSLNMAAVGITENVKGDAKKFEIWYNAREEVYIVQAPTPEIKAAWVNEIRKVLTSQLQACREASQHRALEQSQSLPLPAPTSTSPSRGNSRNIKKLEERKTDPLSLEGYVSSAPLTKPPEKGKGWSKTSHSLEAPEDDGGWSSAEEQINSSDAEEDGGLGPKKLVPGKYTVVADHEKGGPDALRVRSGDVVELVQEGDEGLWYVRDPTTGKEGWVPASSLSVRLGPSGSAQCLSSSESSPGSAVLSNSSSCSEGGQAPFSDLQG

SEQ ID NO: 8453 - protein, 984 aa, Homo Sapiens
MTVRRLSLLCRDLWALWLLLKAGADEIMHQDIVPLCAADIQDQLKKRFAYLSGGRGQDGSPVITFPDYPAFSEIPDKEFQNVMTYLTSIPSLQDAGIGFILVIDRRRDKWTSVKASVLRIAASFPANLQLVLVLRPTGFFQRTLSDIAFKFNRDDFKMKVPVIMLSSVPDLHGYIDKSQLTEDLGGTLDYCHSRWLCQRTAIESFALMVKQTAQMLQSFGTELAETELPNDVQSTSSVLCAHTEKKDKAKEDLRLALKEGHSVLESLRELQAEGSEPSVNQDQLDNQATVQRLLAQLNETEAAFDEFWAKHQQKLEQCLQLRHFEQGFREVKAILDAASQKIATFTDIGNSLAHVEHLLRDLASFEEKSGVAVERARALSLDGEQLIGNKHYAVDSIRPKCQELRHLCDQFSAEIARRRGLLSKSLELHRRLETSMKWCDEGIYLLASQPVDKCQSQDGAEAALQEIEKFLETGAENKIQELNAIYKEYESILNQDLMEHVRKVFQKQASMEEVFHRRQASLKKLAARQTRPVQPVAPRPEALAKSPCPSPGIRRGSENSSSEGGALRRGPYRRAKSEMSESRQGRGSAGEEEESLAILRRHVMSELLDTERAYVEELLCVLEGYAAEMDNPLMAHLLSTGLHNKKDVLFGNMEEIYHFHNRIFLRELENYTDCPELVGRCFLERMEDFQIYEKYCQNKPRSESLWRQCSDCPFFQECQRKLDHKLSLDSYLLKPVQRITKYQLLLKEMLKYSRNCEGAEDLQEALSSILGILKAVNDSMHLIAITGYDGNLGDLGKLLMQGSFSVWTDHKRGHTKVKELARFKPMQRHLFLHEKAVLFCKKREENGEGYEKAPSYSYKQSLNMAAVGITENVKGDAKKFEIWYNAREEVYIVQAPTPEIKAAWVNEIRKVLTSQLQACREASQHRALEQSQSLPLPAPTSTSPSRGNSRNIKKLEERKTDPLSLEGYVSSAPLTKPPEKGKEP

SEQ ID NO: 8454 - protein, 86 aa, Homo Sapiens
MWLSQRVLPPLPFPADAWEPSEVLGIFSQHRSHATTSESLTWTSTGTSDARTGVILQDAGIGFILVIDRRRDKWTSVKASVLRIAN

SEQ ID NO: 8455 - protein, 93 aa, Homo Sapiens
SPVITFPDYPAFSEIPDKEFQNVMTYLTSIPSILFMESAASEHWGQVAEALPFLPPGSARTAVTTSPRGPLPAPSQNVFPRSFSVTAVEFNSY

SEQ ID NO: 8456 - protein, 213 aa, Homo Sapiens
TSTGTSDARTGVILQDAGIGFILVIDRRRDKWTSVKASVLRIAASFPANLQLVLVLRPTGFFQRTLSDIAFKFNRDDFKMKVPVIMLSSVPDLHGYIDKSQLTEDLGGTLDYCHSRWLCQRTAIESFALMVKQTAQMLQSFGTELAETELPNDVQSTSSVLCAHTEKKDKAKVHGGCSGWKLWGAPVSQKLRGAPVGSCGGSFVPAGVCVSST

SEQ ID NO: 8457 - protein, 336 aa, Homo Sapiens
  misc_feature (1)..(1): Xaa can be any naturally occurring amino acid
XENGEGYEKAPSYSYKQSLNMAAVGITENVKGDAKKFEIWYNAREEVYIVQAPTPEIKAAWVNEIRKVLTSQLQACREASQHRALEQSQSLPLPAPTSTSPSRGNSRNIKKLEERKTDPLSLEGYVSSAPLTKPPEKGKDDTVTSSASESSALSRKRFTLQGFANLKGQKASPTSPDKKAKRHEVKSDPTPFGVRGWSKTSHSLEAPEDDGGWSSAEEQINSSDAEEDGGLGPKKLVPGKYTVVADHEKGGPDALRVRSGDVVELVQEGDEGLWYVRDPTTGKEGWVPASSLSVRLGPSGSAQCLSSSESSPGSAVLSNSSSCSEGGQAPFSDLQG

SEQ ID NO: 8458 - protein, 296 aa, Homo Sapiens
  misc_feature (1)..(1): Xaa can be any naturally occurring amino acid
XHLFLHEKAVLFCKKREENGEGYEKAPSYSYKQSLNMAAVGITENVKGDAKKFEIWYNAREEVYIVQAPTPEIKAAWVNEIRKVLTSQLQACREASQHRALEQSQSLPLPAPTSTSPSRGNSRNIKKLEERKTDPLSLEGYVSSAPLTKPPEKGKGWSKTSHSLEAPEDDGGWSSAEEQINSSDAEEDGGLGPKKLVPGKYTVVADHEKGGPDALRVRSGDVVELVQEGDEGLWYVRDPTTGKEGWVPASSLSVRLGPSGSAQCLSSSESSPGSAVLSNSSSCSEGGQAPFSDLQG

SEQ ID NO: 8459 - protein, 189 aa, Homo Sapiens
  misc_feature (1)..(1): Xaa can be any naturally occurring amino acid
XKKLEERKTDPLSLEGYVSSAPLTKPPEKGKASPTSPDKKAKRHEVKSDPTPFGVRGWSKTSHSLEAPEDDGGWSSAEEQINSSDAEEDGGLGPKKLVPGKYTVVADHEKGGPDALRVRSGDVVELVQEGDEGLWYVRDPTTGKEGWVPASSLSVRLGPSGSAQCLSSSESSPGSAVLSNSSSCSEGGQ

SEQ ID NO: 8460 - protein, 317 aa, Homo Sapiens
  misc_feature (1)..(1): Xaa can be any naturally occurring amino acid
XLGILKAVNDSMHLIAITGYDGNLGDLGKLLMQGSFSVWTDHKRGHTKVKELARFKPMQRHLFLHEKAVLFCKKREENGEGYEKAPSYSYKQSLNMAAVGITENVKGDAKKFEIWYNAREEVYIVQAPTPEIKAAWVNEIRKVLTSQLQACREASQHRALEQSQSLPLPAPTSTSPSRGNSRNIKKLEERKTDPLSLEGYVSSAPLTKPPEKGKDDTVTSSASESSALSRKRFTLQGFANLKASPTSPDKKAKRHEVKSDPTPFGVRGWSKTSHSLEAPEDDGGWSSAEEQINSSDAEEDGGLGPKKLVPGKYTVVA

SEQ ID NO: 8461 - protein, 151 aa, Homo Sapiens
  misc_feature (1)..(1): Xaa can be any naturally occurring amino acid
XQAPTPEIKAAWVNEIRKVLTSQLQACREASQHRALEQSQSLPLPAPTSTSPSRGNSRNIKKLEERKTDPLSLEGYVSSAPLTKPPEKGKDDTVTSSASESSALSRKRFTLQGFANLKGQKGWSKTSHSLEAPEDDGGWSSAEEQINSSDA

SEQ ID NO: 8462 - protein, 87 aa, Homo Sapiens
  misc_feature (1)..(1): Xaa can be any naturally occurring amino acid
XSAPLTKPPEKGKGWSKTSHSLEAPEDDGGWSSAEEQINSSDAEEDGGLGPKKLVPTQPPVEPTRGCTFLRGDSPHPPTLYVIECCH

SEQ ID NO: 8463 - protein, 69 aa, Homo Sapiens
  misc_feature (1)..(1): Xaa can be any naturally occurring amino acid
XSEIPDKEFQNVMTYLTSIPSLQDAGIGFILVIDRRRDKWTSVKASVLRIALRARCTESEPLHPGGSGI

SEQ ID NO: 8464 - protein, 793 aa, Homo Sapiens
  misc_feature (1)..(1): Xaa can be any naturally occurring amino acid
XSQKIATFTDIGNSLAHVEHLLRDLASFEEKSGVAVERARALSLDGEQLIGNKHYAVDSIRPKCQELRHLCDQFSAEIARRRGLLSKSLELHRRLETSMKWCDEGIYLLASQPVDKCQSQDGAEAALQEIEKFLETGAENKIQELNAIYKEYESILNQDLMEHVRKVFQKQASMEEVFHRRQASLKKLAARQTRPVQPVAPRPEALAKSPCPSPGIRRGSENSSSEGGALRRGPYRRAKSEMSESRQGRGSAGEEEESLAILRRHVMSELLDTERAYVEELLCVLEGYAAEMDNPLMAHLLSTGLHNKKDVLFGNMEEIYHFHNRIFLRELENYTDCPELVGRCFLERMEDFQIYEKYCQNKPRSESLWRQCSDCPFFQECQRKLDHKLSLDSYLLKPVQRITKYQLLLKEMLKYSRNCEGAEDLQEALSSILGILKAVNDSMHLIAITGYDGNLGDLGKLLMQGSFSVWTDHKRGHTKVKELARFKPMQRHLFLHEKAVLFCKKREENGEGYEKAPSYSYKQSLNMAAVGITENVKGDAKKFEIWYNAREEVYIVQAPTPEIKAAWVNEIRKVLTSQLQACREASQHRALEQSQSLPLPAPTSTSPSRGNSRNIKKLEERKTDPLSLEGYVSSAPLTKPPEKGKASPTSPDKKAKRHEVKSDPTPFGVRGWSKTSHSLEAPEDDGGWSSAEEQINSSDAEEDGGLGPKKLVPGKYTVVADHEKGGPDALRVRSGDVVELVQEGDEGLWYVRDPTTGKEGWVPASSLSVRLGPSGSAQCLSSSGKAHVPRAHP

SEQ ID NO: 8465 - protein, 94 aa, Homo Sapiens
MEHLEGVINKPEAEMSPQELQLHYFKMHDYDGNNLLDGLELSTAITHVHKEEGSEQAPLMSEDELINIIDGVLRDDDKNNDGYIDYAEFAKSLQ

SEQ ID NO: 8466 - protein, 94 aa, Homo Sapiens; identical to SEQ ID NO: 8465

SEQ ID NO: 8467 - protein, 94 aa, Homo Sapiens; identical to SEQ ID NO: 8465

SEQ ID NO: 8468 - protein, 127 aa, Homo Sapiens
MLSVCSCRTSSGMRSQWPSARQRSSSLSTFRHIMEHLEGVINKPEAEMSPQELQLHYFKMHDYDGNNLLDGLELSTAITHVHKEEGSEQAPLMSEDELINIIDGVLRDDDKNNDGYIDYAEFAKSLQ

SEQ ID NO: 8469 - protein, 61 aa, Homo Sapiens
MTMRSLLRTPFLCGLLWAFCAPGARAEEPAASFSQPGSMGLDKNTVHDQEHIMEHLEGVIN

SEQ ID NO: 8470 - protein, 146 aa, Homo Sapiens
MTMRSLLRTPFLCGLLWAFCAPGARAEEPAASFSQPGSMGLDKNTVHDQEHIMEHLEGVINKPEAEMSPQELQLHYFKMHDYDGNNLLDGLELSTAITHVHKEEGSEQAPLMSEDELINIIDGVLRDDDKNNDGYIDYAEFAKSLQ

SEQ ID NO: 8471 - protein, 146 aa, Homo Sapiens; identical to SEQ ID NO: 8470

SEQ ID NO: 8472 - protein, 146 aa, Homo Sapiens; identical to SEQ ID NO: 8470

SEQ ID NO: 8473 - protein, 146 aa, Homo Sapiens; identical to SEQ ID NO: 8470

SEQ ID NO: 8474 - protein, 146 aa, Homo Sapiens; identical to SEQ ID NO: 8470

SEQ ID NO: 8475 - protein, 146 aa, Homo Sapiens; identical to SEQ ID NO: 8470

SEQ ID NO: 8476 - protein, 90 aa, Homo Sapiens
SQPGSMGLDKNTVHDQEHIMEHLEGVINKPEAEMSPQELQLHYFKMHDYDGNNLLDGLELSTAITHVHKEANLCTELTLRRTGTFPIKEE

SEQ ID NO: 8477 - protein, 156 aa, Homo Sapiens
GPVGPQRVAEAGGGQLGSTAQGKCDKDNTEKDITQATNSHFTHGEMQDQSIWGNPSDGELIRTQPQRLPQLQTSAQVPSGEEIGKIKNGHTGLSNGNGIHHGAKHGSADNRKLSAPVSQKMHRKIQSSLSVNSDISKKSKVNAVFSQKTGSSPEVC

SEQ ID NO: 8478 - protein, 135 aa, Homo Sapiens
MQDQSIWGNPSDGELIRTQPQRLPQLQTSAQVPSGEEIGKIKNGHTGLSNGNGIHHGAKHGSADNRKLSAPVSQKMHRKIQSSLSVNSDISKKSKVNAVFSQKTGSSPEDCCVHCILACLFCEFLTLCNIVLGQA

SEQ ID NO: 8479 - protein, 246 aa, Homo Sapiens
MSGAGEALAPGPVGPQRVAEAGGGQLGSTAQGKCDKDNTEKDITQATNSHFTHGEMQDQSIWGNPSDGELIRTQPQRLPQLQTSAQVPSGEEIGKIKNGHTGLSNGNGIHHGAKHGSADNRKLSAPVSQKMHRKIQSSLSVNSDISKKSKVNAVFSQKTGSSPEDCCVHCILACLFCEFLTLCNIVLGQASCGICTSEACCCCCGDEMGDDCNCPCDMDCGIMDACCESSDCLEICMECCGICFPS

SEQ ID NO: 8480 - protein, 43 aa, Homo Sapiens
MSGAGEALAPGPVGPQRVAEAGGGQLGSTAQGLFSRSRTAAAL

SEQ ID NO: 8481 - protein, 43 aa, Homo Sapiens; identical to SEQ ID NO: 8480

SEQ ID NO: 8482 - protein, 156 aa, Homo Sapiens
PQRVAEAGGGQLGSTAQGKCDKDNTEKDITQATNSHFTHGEMQDQSIWGNPSDGELIRTQPQRLPQLQTSAQVPSGEEIGKIKNGHTGLSNGNGIHHGAKHGSADNRKLSAPVSQKMHRKIQSSLSVNSDISKKSKVNAVFSQKTGSSPEDKQEFW

SEQ ID NO: 8483 - protein, 355 aa, Homo Sapiens
VRGVRAATAAAVAATAASGLSRREAGGRAGAAAAVVRPPGRKCGRCRRLANFPGRKRRRRRRKGLGATTGGCGEAVSSLHPAPHSPSSVRPAGRRARRQRRGAGSAERPMSGAGEALAPGPVGPQRVAEAGGGQLGSTAQGKCDKDNTEKDITQATNSHFTHGEMQDQSIWGNPSDGELIRTQPQRLPQLQTSAQVPSGEEIGKIKNGHTGLSNGNGIHHGAKHGSADNRKLSAPVSQKMHRKIQSSLSVNSDISKKSKVNAVFSQKTGSSPEDCCVHCILACLFCEFLTLCNIVLGQASCGICTSEACCCCCGDEMGDDCNCPCDMDCGIMDACCESSDCLEICMECCGICFPS

SEQ ID NO: 8484 - protein, 355 aa, Homo Sapiens; identical to SEQ ID NO: 8483

SEQ ID NO: 8485 - protein, 973 aa, Homo Sapiens
MEVTCLLLLALIPFHCRGQGVYAPAQAQIVHAGQACVVKEDNISERVYTIREGDTLMLQCLVTGHPRPQVRWTKTAGSASDKFQETSVFNETLRIERIARTQGGRYYCKAENGVGVPAIKSIRVDVQYLDEPMLTVHQTVSDVRGNFYQEKTVFLRCTVNSNPPARFIWKRGSDTLSHSQDNGVDIYEPLYTQGETKVLKLKNLRPQDYASYTCQVSVRNVCGIPDKAITFRLTNTTAPPALKLSVNETLVVNPGENVTVQCLLTGGDPLPQLQWSHGPGPLPLGALAQGGTLSIPSVQARDSGYYNCTATNNVGNPAKKTVNLLVRSMKNATFQITPDVIKESENIQLGQDLKLSCHVDAVPQEKVTYQWFKNGKPARMSKRLLVTRNDPELPAVTSSLELIDLHFSDYGTYLCMASFPGAPVPDLSVEVNISSETVPPTISVPKGRAVVTVREGSPAELQCEVRGKPRPPVLWSRVDKEAALLPSGLPLEETPDGKLRLERVSRDMSGTYRCQTARYNGFNVRPREAQVQLNVQFPPEVEPSSQDVRQALGRPVLLRCSLLRGSPQRIASAVWRFKGQLLPPPPVVPAAAEAPDHAELRLDAVTRDSSGSYECSVSNDVGSAACLFQVSAKAYSPEFYFDTPNPTRSHKLSKNYSYVLQWTQREPDAVDPVLNYRLSIRQLNQHNAVVKAIPVRRVEKGQLLEYILTDLRVPHSYEVRLTPYTTFGAGDMASRIIHYTEPINSPNLSDNTCHFEDEKICGYTQDLTDNFDWTRQNALTQNPKRSPNTGPPTDISGTPEGYYMFIETSRPRELGDRARLVSPLYNASAKFYCVSFFYHMYGKHIGSLNLLVRSRNKGALDTHAWSLSGNKGNVWQQAHVPISPSGPFQIIFEGVRGPGYLGDIAIDDVTLKKGECPRKQTDPNKGARREGGGGAESGGSCAWRGFLSVEGGCLGLNRGSECLSDGNHVALTV

SEQ ID NO: 8486 - protein, 955 aa, Homo Sapiens
MEVTCLLLLALIPFHCRGQGVYAPAQAQIVHAGQACVVKEDNISERVYTIREGDTLMLQCLVTGHPRPQVRWTKTAGSASDKFQETSVFNETLRIERIARTQGGRYYCKAENGVGVPAIKSIRVDVQYLDEPMLTVHQTVSDVRGNFYQEKTVFLRCTVNSNPPARFIWKRGSDTLSHSQDNGVDIYEPLYTQGETKVLKLKNLRPQDYASYTCQVSVRNVCGIPDKAITFRLTNTTAPPALKLSVNETLVVNPGENVTVQCLLTGGDPLPQLQWSHGPGPLPLGALAQGGTLSIPSVQARDSGYYNCTATNNVGNPAKKTVNLLVRSMKNATFQITPDVIKESENIQLGQDLKLSCHVDAVPQEKVTYQWFKNGKPARMSKRLLVTRNDPELPAVTSSLELIDLHFSDYGTYLCMASFPGAPVPDLSVEVNISSETVPPTISVPKGRAVVTVREGSPAELQCEVRGKPRPPVLWSRVDKEAALLPSGLPLEETPDGKLRLERVSRDMSGTYRCQTARYNGFNVRPREAQVQLNVQFPPEVEPSSQDVRQALGRPVLLRCSLLRGSPQRIASAVWRFKGQLLPPPPVVPAAAEAPDHAELRLDAVTRDSSGSYECSVSNDVGSAACLFQVSAKAYSPEFYFDTPNPTRSHKLSKNYSYVLQWTQREPDAVDPVLNYRLSIRQLNQHNAVVKAIPVRRVEKGQLLEYILTDLRVPHSYEVRLTPYTTFGAGDMASRIIHYTEPINSPNLSDNTCHFEDEKICGYTQDLTDNFDWTRQNALTQNPKRSPNTGPPTDISGTPEGYYMFIETSRPRELGDRARLVSPLYNASAKFYCVSFFYHMYGKHIGSLNLLVRSRNKGALDTHAWSLSGNKGNVWQQAHVPISPSGPFQIIFEGVRGPGYLGDIAIDDVTLKKGECPRKQTDPNKVVVMPGSGAPCQSSPQLWGPMAIFLLALQR

SEQ ID NO: 8487 - protein, 77 aa, Homo Sapiens
MLQCLVTGHPRPQVRWTKTAGSASDKFQETSVFNETLRIERIARTQGGRYYCKAENGVGVPAIKSIRVDVQYLDEPM

SEQ ID NO: 8488 - protein, 129 aa, Homo Sapiens
MLQCLVTGHPRPQVRWTKTAGSASDKFQETSVFNETLRIERIARTQGGRYYCKAENGVGVPAIKSIRVDVQYLDEPMLTVHQTVSDVRGNFYQEKTVFLRCTVNSNPPARFIWKRGSDTLSHSQDNGVD

SEQ ID NO: 8489 - protein, 87 aa, Homo Sapiens
  misc_feature (1)..(1): Xaa can be any naturally occurring amino acid
XHKLSKNYSYVLQWTQREPDAVDPVLNYRLSIRQLNQHNAVVKAIPVRRVEKGQLLEYILTDLRVPHSYETTPATLRMRRSVAIPRT

SEQ ID NO: 8490 - protein, 160 aa, Homo Sapiens
  misc_feature (1)..(1): Xaa can be any naturally occurring amino acid
XNQHNAVVKAIPVRRVEKGQLLEYILTDLRVPHSYEVRLTPYTTFGAGDMASRIIHYTEHNTCHFEDEKICGYTQDLTDNFDWTRQNALTQNPKRSPNTGPPTDISGTPEGYYMFIETSRPRELGDRARLVSPLYNASAKFYCVSFFYHMYGKHIGSLNL

SEQ ID NO: 8491 - protein, 87 aa, Homo Sapiens
MQHRGFLLLTLLALLALTSAVAKKKADCKYKFENWGACDGGTGTKVRQGTLKKARYNAQCQETIRVTKPCTPKTKAKAKAKKGKGKD

SEQ ID NO: 8492 - protein, 49 aa, Homo Sapiens
MQHRGFLLLTLLALLALTSAVAKKKDKVKKGGPGSECAEWAWGPCTPSS

SEQ ID NO: 8493 - protein, 131 aa, Homo Sapiens
MQHRGFLLLTLLALLALTSAVAKKKDKVKKGGPGSECAEWAWGPCTPSSKDCGVGFREGTCGAQTQRIRCRVPCNWKKEFGADCKYKFENWGACDGGTGTKVRQGTLKKARYNAQCQETIRVTKPCTPKTK

SEQ ID NO: 8494 - protein, 143 aa, Homo Sapiens
MQHRGFLLLTLLALLALTSAVAKKKDKVKKGGPGSECAEWAWGPCTPSSKDCGVGFREGTCGAQTQRIRCRVPCNWKKEFGADCKYKFENWGACDGGTGTKVRQGTLKKARYNAQCQETIRVTKPCTPKTKAKAKAKKGKGKD

SEQ ID NO: 8495 - protein, 143 aa, Homo Sapiens; identical to SEQ ID NO: 8494

SEQ ID NO: 8496 - protein, 143 aa, Homo Sapiens; identical to SEQ ID NO: 8494

SEQ ID NO: 8497 - protein, 143 aa, Homo Sapiens; identical to SEQ ID NO: 8494

SEQ ID NO: 8498 - protein, 143 aa, Homo Sapiens; identical to SEQ ID NO: 8494

SEQ ID NO: 8499 - protein, 156 aa, Homo Sapiens
MQHRGFLLLTLLALLALTSAVAKKKDKVKKGGPGSECAEWAWGPCTPSSKDCGVGFREGTCGAQTQRIRCRVPCNWKKEFGADCKYKFENWGACDGGTGTKVRQGTLKKARYNAQCQETIRVTKPCTPKTKAKAKGQRKEKGVGLSRGAAPPPPRL

SEQ ID NO: 8500 - protein, 152 aa, Homo Sapiens
MQHRGFLLLTLLALLALTSAVAKKKEEGALQCSVPGDHPRHQALHPQDQSKGQSQEREGKGLDAKPGCQGAPGVTWGLAHALPLPGPRCDPPVPSVCSLALINHALPCPSHSPAPPLSAQSGEGQGILGSLSLPQSNVSPRARFCSSPQFHY

SEQ ID NO: 8501 - protein, 123 aa, Homo Sapiens
MGVTCVSQMPVAEGKSVQQTVELLTRKLEMLGAEKQGTFCVDCETYHTAASTLGSQGQTGKLMYVMHNSEYPLSCFALFENGPCLIADTNFDVLMVKLKGFFQSAKASKIETRGTRWSMAPVW

SEQ ID NO: 8502 - protein, 212 aa, Homo Sapiens
MGVTCVSQMPVAEGKSVQQTVELLTRKLEMLGAEKQGTFCVDCETYHTAASTLGSQGQTGKLMYVMHNSEYPLSCFALFENGPCLIADTNFDVLMVKLKGFFQSAKASKIETRGTRYQYCDFLVKVGTVTMGPSARGISVEVEYGPCVVASDCWSLLLEFLQSFLGSHTPGAPAVFGNRHDAVYGPADTMVQYMELFNKIRKQQQVPVAGIR

SEQ ID NO: 8503 - protein, 145 aa, Homo Sapiens
MGVTCVSQMPVAEGKSVQQTVELLTRKLEMLGAEKQGTFCVDCETYHTAASTLGSQGQTGKLMYVMHNSEYPLSCFALFENGPCLIADTNFDVLMVKLKGFFQSAKASKIETRGTRYQYCDFLVKVGTVTMGPSARGISVEVRPW

SEQ ID NO: 8504 - protein, 61 aa, Homo Sapiens [sequence omitted]

SEQ ID NO: 8505 - protein, 140 aa, Homo Sapiens
MPVAEGKSVQQTVELLTRKLEMLGAEKQGTFCVDCETYHTAASTLGSQGQTGKLMYVMHNSEYPLSCFALFENGPCLIADTNFDVLMVKLKGFFQSAKASKIETRGTRYQYCDFLVKVGTVTMGPSARGISVEVEYGPCV

SEQ ID NO: 8506 - protein, 1140 aa, Homo Sapiens
MVISLNSCLSFICLLLCHWIGTASPLNLEDPNVCSHWESYSVTVQESYPHPFDQIYYTSCTDILNWFKCTRHRVSYRTAYRHGEKTMYRRKSQCCPGFYESGEMCVPHCADKCVHGRCIAPNTCQCEPGWGGTNCSSACDGDHWGPHCTSRCQCKNGALCNPITGACHCAAGFRGWRCEDRCEQGTYGNDCHQRCQCQNGATCDHVTGECRCPPGYTGAFCEDLCPPGKHGPQCEQRCPCQNGGVCHHVTGECSCPSGWMGTVCGQPCPEGRFGKNCSQECQCHNGGTCDAATGQCHCSPGYTGERCQDECPVGTYGVLCAETCQCVNGGKCYHVSGACLCEAGFAGERCEARLCPEGLYGIKCDKRCPCHLENTHSCHPMSGECACKPGWSGLYCNETCSPGFYGEACQQICSCQNGADCDSVTGKCTCAPGFKGIDCSTPCPLGTYGINCSSRCGCKNDAVCSPVDGSCTCKAGWHGVDCSIRCPSGTWGFGCNLTCQCLNGGACNTLDGTCTCAPGWRGEKCELPCQDGTYGLNCAERCDCSHADGCHPTTGHCRCLPGWSGVHCDSVCAEGRWGPNCSLPCYCKNGASCSPDDGICECAPGFRGTTCQRICSPGFYGHRCSQTCPQCVHSSGPCHHITGLCDCLPGFTGALCNEVCPSGRFGKNCAGICTCTNNGTCNPIDRSCQCYPGWIGSDCSQPCPPAHWGPNCIHTCNCHNGAFCSAYDGECKCTPGWTGLYCTQRCPLGFYGKDCALICQCQNGADCDHISGQCTCRTGFMGRHCEQKCPSGTYGYGCRQICDCLNNSTCDHITGTCYCSPGWKGARCDQAGVIIVGNLNSLSRTSTALPADSYQIGAIAGIIILVLVVLFLLALFIIYRHKQKGKESSMPAVTYTPAMRVVNADYTISGTLPHSNGGNANSHYFTNPSYHTLTQCATSPHVNNRDRMTVTKSKNNQLFVNLKNVNPGKRGPVGDCTGTLPADWKHGGYLNELGAFGLDRSYMGKSLKDLGKNSEYNSSNCSLSSSENPYATIKDPPVLIPKSSECGYVEMKSPARRDSPYAEINNSTSANRNVYEVEPTVSVVQGVFSNNGRLSQDPYDLPKNSHIPCHYDLLPVRDSSSSPKQEDSGGSSSNSSSSSE

SEQ ID NO: 8507 - protein, 567 aa, Homo Sapiens
MVISLNSCLSFICLLLCHWIGTASPLNLEDPNVCSHWESYSVTVQESYPHPFDQIYYTSCTDILNWFKCTRHRVSYRTAYRHGEKTMYRRKSQCCPGFYESGEMCVPHCADKCVHGRCIAPNTCQCEPGWGGTNCSSACDGDHWGPHCTSRCQCKNGALCNPITGACHCAAGFRGWRCEDRCEQGTYGNDCHQRCQCQNGATCDHVTGECRCPPGYTGAFCEDLCPPGKHGPQCEQRCPCQNGGVCHHVTGECSCPSGWMGTVCGQPCPEGRFGKNCSQECQCHNGGTCDAATGQCHCSPGYTGERCQDECPVGTYGVLCAETCQCVNGGKCYHVSGACLCEAGFAGERCEARLCPEGLYGIKCDKRCPCHLENTHSCHPMSGECACKPGWSGLYCNETCSPGFYGEACQQICSCQNGADCDSVTGKCTCAPGFKGIDCSTPCPLGTYGINCSSRCGCKNDAVCSPVDGSCTCKAGWHGVDCSIRCPSGTWGFGCNLTCQCLNGGACNTLDGTCTCAPGWRGEKCELPCQDGTYGLNCAERCDCSHADGCHPTTGHCRCLPGWSGLF

SEQ ID NO: 8508 - protein, 1140 aa, Homo Sapiens; identical to SEQ ID NO: 8506

SEQ ID NO: 8509 - protein, 567 aa, Homo Sapiens; identical to SEQ ID NO: 8507

SEQ ID NO: 8510 - protein, 1229 aa, Homo Sapiens
MGASRDRGLAALWCLGLLGGLARVAGTHYRYLWRGCYPCHLGQAGYPVSAGDQRPDVDECRTHNGGCQHRCVNTPGSYLCECKPGFRLHTDSRTCLAINSCALGNGGCQHHCVQLTITRHRCQCRPGFQLQEDGRHCVRRSPCANRNGSCMHRCQVVRGLARCECHVGYQLAADGKACEDVDECAAGLAQCAHGCLNTQGSFKCVCHAGYELGADGRQCYRIEMEIVNSCEANNGGCSHGCSHTSAGPLCTCPRGYELDTDQRTCIDVDDCADSPCCQQVCTNNPGGYECGCYAGYRLSADGCGCEDVDECASSRGGCEHHCTNLAGSFQCSCEAGYRLHEDRRGCSPLEEPMVDLDGELPFVRPLPHIAVLQDELPQLFQDDDVGADEEEAELRGEHTLTEKFVCLDDSFGHDCSLTCDDCRNGGTCLLGLDGCDCPEGWTGLICNETCPPDTFGKNCSFSCSCQNGGTCDSVTGACRCPPGVSGTNCEDGCPKGYYGKHCRKKCNCANRGRCHRLYGACLCDPGLYGRFCHLTCPPWAFGPGCSEECQCVQPHTQSCDKRDGSCSCKAGFRGERCQAECELGYFGPGCWQACTCPVGVACDSVSGECGKRCPAGFQGEDCGQECPVGTFGVNCSSSCSCGGAPCHGVTGQCRCPPGRTGEDCEADCPEGRWGLGCQEICPACQHAARCDPETGACLCLPGFVGSRCQDVCPAGWYGPSCQTRCSCANDGHCHPATGHCSCAPGWTGFSCQRACDTGHWGPDCSHPCNCSAGHGSCDAISGLCLCEAGYVGPRCEQQCPQGHFGPGCEQRCQCQHGAACDHVSGACTCPAGWRGTFCEHACPAGFFGLDCRSACNCTAGAACDAVNGSCLCPAGRRGPRCAEKCLPRDVRAGCRHSGGCLNGGLCDPHTGRCLCPAGWTGDKCQSPCLRGWFGEACAQRCSCPPGAACHHVTGACRCPPGFTGSGCEQGCPPGRYGPGCEQLCGCLNGGSCDAATGACRCPTGFLGTDCNLTCPQGRFGPNCTHVCGCGQGAACDPVTGTCLCPPGRAGVRCERGCPQNRFGVGCEHTCSCRNGGLCHASNGSCSCGLGWTGRHCELACPPGRYGAACHLECSCHNNSTCEPATGTCRCGPGFYGQACEHRRSGATCNLDCRRGQFGPSCTLHCDCGGGADCDPVSGQCHCVDGYMGPTCREGGPLRLPENPSLAQGSAGTLPASSRPTSRSGGPARH

SEQ ID NO: 8511 - protein, 1541 aa, Homo Sapiens
MSFLEEARAAGRAVVLALVLLLLPAVPVGASVPPRPLLPLQPGMPHVCAEQELTLVGRRQPCVQALSHTVPVWKAGCGWQAWCVGHERRTVYYMGYRQVYTTEARTVLRCCRGWMQQPDEEGCLSAECSASLCFHGGRCVPGSAQPCHCPPGFQGPRCQYDVDECRTHNGGCQHRCVNTPGSYLCECKPGFRLHTDSRTCLAINSCALGNGGCQHHCVQLTITRHRCQCRPGFQLQEDGRHCVRRSPCANRNGSCMHRCQVVRGLARCECHVGYQLAADGKACEDVDECAAGLAQCAHGCLNTQGSFKCVCHAGYELGADGRQCYRIEMEIVNSCEANNGGCSHGCSHTSAGPLCTCPRGYELDTDQRTCIDVDDCADSPCCQQVCTNNPGGYECGCYAGYRLSADGCGCEDVDECASSRGGCEHHCTNLAGSFQCSCEAGYRLHEDRRGCSPLEEPMVDLDGELPFVRPLPHIAVLQDELPQLFQDDDVGADEEEAELRGEHTLTEKFVCLDDSFGHDCSLTCDDCRNGGTCLLGLDGCDCPEGWTGLICNETCPPDTFGKNCSFSCSCQNGGTCDSVTGACRCPPGVSGTNCEDGCPKGYYGKHCRKKCNCANRGRCHRLYGACLCDPGLYGRFCHLTCPPWAFGPGCSEECQCVQPHTQSCDKRDGSCSCKAGFRGERCQAECELGYFGPGCWQACTCPVGVACDSVSGECGKRCPAGFQGEDCGQECPVGTFGVNCSSSCSCGGAPCHGVTGQCRCPPGRTGEDCEADCPEGRWGLGCQEICPACQHAARCDPETGACLCLPGFVGSRCQDVCPAGWYGPSCQTRCSCANDGHCHPATGHCSCAPGWTGFSCQRACDTGHWGPDCSHPCNCSAGHGSCDAISGLCLCEAGYVGPRCEQQCPQGHFGPGCEQRCQCQHGAACDHVSGACTCPAGWRGTFCEHACPAGFFGLDCRSACNCTAGAACDAVNGSCLCPAGRRGPRCAETCPAHTYGHNCSQACACFNGASCDPVHGQCHCAPGWMGPSCLQACPAGLYGDNCRHSCLCQNGGTCDPVSGHCACPEGWAGLACEKECLPRDVRAGCRHSGGCLNGGLCDPHTGRCLCPAGWTGDKCQSPCLRGWFGEACAQRCSCPPGAACHHVTGACRCPPGFTGSGCEQACPPGSFGEDCAQMCQCPGENPACHPATGTCSCAAGYHGPSCQQRCPPGRYGPGCEQLCGCLNGGSCDAATGACRCPTGFLGTDCNLTCPQGRFGPNCTHVCGCGQGAACDPVTGTCLCPPGRAGVRCERGCPQNRFGVGCEHTCSCRNGGLCHASNGSCSCGLGWTGRHCELACPPGRYGAACHLECSCHNNSTCEPATGTCRCGPGFYGQACEHPCPPGFHGAGCQGLCWCQHGAPCDPISGRCLCPAGFHGHFCERGCEPGSFGEGCHQRCDCDGGAPCDPVTGLCLCPPGRSGATCNLDCRRGQFGPSCTLHCDCGGGADCDPVSGQCHCVDGYMGPTCREGGPLRLPENPSLAQGSAGTLPASSRPTSRSGGPARH

SEQ ID NO: 8512 - protein, 1323 aa, Homo Sapiens
MSFLEEARAAGRAVVLALVLLLLPAVPVGASVPPRPLLPLQPGMPHVCAEQELTLVGRRQPCVQALSHTVPVWKAGCGWQAWCVGHERRTVYYMGYRQVYTTEARTVLRCCRGWMQQPDEEGCLSDVGECANANGGCAGRCRDTVGGFYCRWPPPSHQLQGDGETCQDVDECRTHNGGCQHRCVNTPGSYLCECKPGFRLHTDSRTCLAINSCALGNGGCQHHCVQLTITRHRCQCRPGFQLQEDGRHCVRRSPCANRNGSCMHRCQVVRGLARCECHVGYQLAADGKACEDVDECAAGLAQCAHGCLNTQGSFKCVCHAGYELGADGRQCYRIEMEIVNSCEANNGGCSHGCSHTSAGPLCTCPRGYELDTDQRTCIDVDDCADSPCCQQVCTNNPGGYECGCYAGYRLSADGCGCEDVDECASSRGGCEHHCTNLAGSFQCSCEAGYRLHEDRRGCSPLEEPMVDLDGELPFVRPLPHIAVLQDELPQLFQDDDVGADEEEAELRGEHTLTEKFVCLDDSFGHDCSLTCDDCRNGGTCLLGLDGCDCPEGWTGLICNETCPPDTFGKNCSFSCSCQNGGTCDSVTGACRCPPGVSGTNCEDGCPKGYYGKHCRKKCNCANRGRCHRLYGACLCDPGLYGRFCHLTCPPWAFGPGCSEECQCVQPHTQSCDKRDGSCSCKAGFRGERCQAECELGYFGPGCWQACTCPVGVACDSVSGECGKRCPAGFQGEDCGQECPVGTFGVNCSSSCSCGGAPCHGVTGQCRCPPGRTGEDCEADCPEGRWGLGCQEICPACQHAARCDPETGACLCLPGFVGSRCQDVCPAGWYGPSCQTRCSCANDGHCHPATGHCSCAPGWTGFSCQRACDTGHWGPDCSHPCNCSAGHGSCDAISGLCLCEAGYVGPRCEQQCPQGHFGPGCEQRCQCQHGAACDHVSGACTCPAGWRGTFCEHACPAGFFGLDCRSACNCTAGAACDAVNGSCLCPAGRRGPRCAETCPAHTYGHNCSQACACFNGASCDPVHGQCHCAPGWMGPSCLQACPAGLYGDNCRHSCLCQNGGTCDPVSGHCACPEGWAGLACEKECLPRDVRAGCRHSGGCLNGGLCDPHTGRCLCPAGWTGDKCQSPCAKGTFGPHCEGRCACRWGGPCHLATGACLCPPGWRGAPGVRMPACGAGLERPVPSAAAARLALPATTSLGPAAVPLASLAPAASRPAHPAALGRTVRRCASVPVRTRPATLPPGPAHVLLATTAPAASNDVRPGGMGQAVNSCVGVSTGAPVMRPRGPAAAPLGSSGRTATSPVRRAASAPTAPTCVGVGRGRPATL

SEQ ID NO: 8513 - protein, 248 aa, Homo Sapiens
  misc_feature (1)..(1): Xaa can be any naturally occurring amino acid
XDAATGACRCPTGFLGTDCNLTCPQGRFGPNCTHVCGCGQGAACDPVTGTCLCPPGRAGVRCERGCPQNRFGVGCEHTCSCRNGGLCHASNGSCSCGLGWTGRHCELACPPGRYGAACHLECSCHNNSTCEPATGTCRCGPGFYGQACEHPCPPGFHGAGCQGLCWCQHGAPCDPISGRCLCPAGFHGHFCERDCRRGQFGPSCTLHCDCGGGADCDPVSGQCHCVDGYMGPTCREGGPLRLPENPSL

SEQ ID NO: 8514 - protein, 1274 aa, Homo Sapiens
MAVRQAATAGTPGPRREEEAALLFERAHYRHDPRWLLPVTPRLCLACALELLPDPGVSLVRKKHMLSCFQDALVRHTSLVTQLVSQDQRVCIHFISVLFGLLCSMEDGSVTDLCIEVLIQITTQLKLEQTIRCLLDECHKELCNMPSMRGSLATLTLLGKLVDAIPALADELVMEHGNLMEHLLRGLVYPSEGIQASVCYLYGKLYSSPVAAEMLSGHFREKLFPLFLSILDGAQTKELQINCLGLLRQLLKYDLFVSMIMNQDGLGESAKNIEGSSGNTSLPLVLKKLLLSRDETLQVASAHCITAVLVHSPAKHASAFIHADIPEFLFEHLSSSSEVLVWSSCNCLTLLVEEPLFFSKCHTVYGIEAVVRSLQGSLKMNNIELHKQGLLLFAEILTRQPEEIKLFTSSAMCRDAGRALQEAVSSPVLEVAAEALKATSAFLRKDHQSTPPVQYGELQALLEAMLNRCAEFSQTLLSRRPLGHASSRDSEKAILQRGKFLLSTLEGFRSACRLAIEFQSEPSAQENPFTAPSAKKEDTLEAFSEFLLSACDSLCIPMVMRHLEQTTHPALMEVFLSILHNLFVIVPHMKEKFSKKLASSSFIRLTLELKARFCSGLSHSALNQVCSNFLYYMCLNLLSAPEKTGPPSKEELSAVSELLQHGLPQISSRSPESLAFLSDRQYMEGAARQRQYCILLLFYLAYIHEDRFVSEAELFEAVQSFLLSLQDQGERPPLVVFKASIYLLAICQDKDNTLRETMVSAIRKFLEGIPDLQLVYTHHPLLLRFFLLYPELMSRYGHRVLELWFFWEESSYEELDDVTSAGQPALPASLVVLFQLLRSIPSILLILLDLIYSSPVDTAHKVLISLRTFLRRNEDIQVGGLIRGHFLLILQRLLVEHGASPSGASGNLPLLLSLLSLMQLRNVSEQELDSVAMKLLHQVSKLCGKCSPTDVDILQPSFNFLYWSLHQTTPSSQKRAAAVLLSSTGLMELLEKMLALTLAKADSPRTALLCSAWLLTASFSAQQHKGSLQVHQTLSVEMDQVLKALSFPKKKAALLSAAILCFLRTALRQSFSSALVALVPSGAQPLPATKDTVLAPLRMSQVRSLVIGLQNLLVQKDPLLSQACVGCLEALLDYLDARSPDIALHVASQPWNRFLLFTLLDAGENSFLRPEILRLMTLFMRYRSSSVLSHEEVGDVLQGVALADLSTLSNTTLQALHGFFQQLQSMGHLADHSMAQTLQASLEGLPPSTSSGQPPLQDMLCLGGVAVSLSHIRN

SEQ ID NO: 8515 - protein, 238 aa, Homo Sapiens
MLALTLAKADSPRTALLCSAWLLTASFSAQQHKGSLQVHQTLSVEMDQVLKALSFPKKKAALLSAAILCFLRTALRQSFSSALVALVPSGAQPLPATKDTVLAPLRMSQVRSLVIGLQNLLVQKDPLLSQACVGCLEALLDYLDARSPDIALHVASQPWNRFLLFTLLDAGENSFLRPEILRLMTLLQSMGHLADHSMAQTLQASLEGLPPSTSSGQPPLQDMLCLGGVAVSLSHIRN

SEQ ID NO: 8516 - protein, 506 aa, Homo Sapiens
MNQDGLGESAKNIEGSSGNTSLPLVLKKLLLSRDETLQVASAHCITAVLVHSPAKHASAFIHADIPEFLFEHLSSSSEVLVWSSCNCLTLLVEEPLFFSKCHTVYGIEAVVRSLQGSLKMNNIELHKQGLLLFAEILTRQPEEIKLFTSSAMCRDAGRALQEAVSSPVLEVAAEALKATSAFLRKDHQSTPPVQYGELQALLEAMLNRCAEFSQTLLSRRPLGHASSRDSEKAILQRGKFLLSTLEGFRSACRLAIEFQSEPSAQENPFTAPSAKKEDTLEAFSEFLLSACDSLCIPMVMRHLEQTTHPALMEVFLSILHNLFVIVPHMKEKFSKKLASSSFIRLTLELKARFCSGLSHSALNQVCSNFLYYMCLNLLSAPEKTGPPSKEELSAVSELLQHGLPQISSRSPESLAFLSDRQYMEGAARQRQYCILLLFYLAYIHEDRFVSEAELFEAVQSFLLSLQDQGERPPLVVFKASIYLLAICQDKDNTLREQLHCSLISIS

SEQ ID NO: 8517 - protein, 63 aa, Homo Sapiens
  misc_feature (1)..(1): Xaa can be any naturally occurring amino acid
XRSSSVLSHEELQSMGHLADHSMAQTLQASLEGLPPSTSSGQPPLQDMLCLGGVAVSLSHIRN

SEQ ID NO: 8518 - protein, 385 aa, Homo Sapiens
MDVQKWYLRTSKLALALAIIRSKPADKSSREYTEHLAMLLSEEQSKWRSKVEILEAEVMQLRQKLLVSRLCSGSFKSGYVSSQLEAQEPKSSESTLTSMEDSGCDLSNEQRTESSDLSQHFVESCTPTHFPPLPLVKRPCAILQNPLSSHMQFLQYLLELKNLTESGNLKRDLTHFEKDSSTVSDSVFQLLDGLITFYRNPKLPFSRFWTEAVGTLASLISDYNLSSHILKKCSKKLEEFEKTLLHAILGNNHINQFQVQHYVSQSLVTLGNCSLLRKSIISLLLSEVNGFADDLGAINQEQASYDVSRYENIFYLFWVLEQLLQKETEEGNTSSIGHDDQEIKKFLQKHDETIFQLSDAFPLFTFYLWRVGILLSSAQIETLRK

SEQ ID NO: 8519 - protein, 325 aa, Homo Sapiens
MAQGLRLQGSRRKGRHPLFPLLALIFEKCELATCTPREPGVAGGDVCSSESFNEDIAVFAKQIRAEKPLFSSNPELDNLMIQAIQVLRFHLLELEKVHELCDNFCHRYISCLKGKMPIDLVIDDREGGSKSDSEDITRSANLTDQPSWNRDHDDTASTRSGGTPGPSSGGHTSHSGDNSSEQGDGLDNSVASPSTGDDDDPDKDKKRHKKRGIFPKVATNIMRAWLFQHLTHPYPSEEQKKQLAQDTGLTILQVNNWFINARRRIVQPMIDQSNRAVSQGTPYNPDGQPMGGFVMDGQQHMGIRAPGPMSGMGMNMGMEGQWHYM

SEQ ID NO: 8520 - protein, 390 aa, Homo Sapiens
MAQRYDDLPHYGGMDGVGIPSTMYGDPHAARSMQPVHHLNHGPPLHSHQYPHTAHTNAMAPSMGSSVNDALKRDKDAIYGHPLFPLLALIFEKCELATCTPREPGVAGGDVCSSESFNEDIAVFAKQIRAEKPLFSSNPELDNLMIQAIQVLRFHLLELEKVHELCDNFCHRYISCLKGKMPIDLVIDDREGGSKSDSEDITRSANLTDQPSWNRDHDDTASTRSGGTPGPSSGGHTSHSGDNSSEQGDGLDNSVASPSTGDDDDPDKDKKRHKKRGIFPKVATNIMRAWLFQHLTHPYPSEEQKKQLAQDTGLTILQVNNWFINARRRIVQPMIDQSNRAVSQGTPYNPDGQPMGGFVMDGQQHMGIRAPGPMSGMGMNMGMEGQWHYM

SEQ ID NO: 8521 - protein, 370 aa, Homo Sapiens
MAQRYDDLPHYGGMDGVGIPSTMYGDPHAARSMQPVHHLNHGPPLHSHQYPHTAHTNAMAPSMGSSVNDALKRDKDAIYGHPLFPLLALIFEKCELATCTPREPGVAGGDVCSSESFNEDIAVFAKQIRAEKPLFSSNPELDNLMIQAIQVLRFHLLELEKVHELCDNFCHRYISCLKGKMPIDLVIDDREGGSKSDSEDITRSANLTDQPSWNRDHDDTASTRSGGTPGPSSGGHTSHSGDNSSEQGDGLDNSVASPSTGDDDDPDKDKKRHKKRGIFPKVATNIMRAWLFQHLTHPYPSEEQKKQLAQDTGLTILQVNNWFINARRRIVQPMIDQSNRAGKSPIVTVFKSRKRKPSSSHSPGGPLPGK

SEQ ID NO: 8522 - protein, 378 aa, Homo Sapiens
MAQRYDDLPHYGGMDGVGIPSTMYGDPHAARSMQPVHHLNHGPPLHSHQYPHTAHTNAMAPSMGSSVNDALKRDKDAIYGHPLFPLLALIFEKCELATCTPREPGVAGGDVCSSESFNEDIAVFAKQIRAEKPLFSSNPELDNLMIQAIQVLRFHLLELEKVHELCDNFCHRYISCLKGKMPIDLVIDDREGGSKSDSEDITRSANLTDQPSWNRDHDDTASTRSGGTPGPSSGGHTSHSGDNSSEQGDGLDNSVASPSTGDDDDPDKDKKRHKKRGIFPKVATNIMRAWLFQHLTHPYPSEEQKKQLAQDTGLTILQVNNWFINARRRIVQPMIDQSNRAVSQGTPYNPDGQPMGGFVMDGQQHMGIRAPGKTLFLW

SEQ ID NO: 8523 - protein, 463 aa, Homo Sapiens
MQYDDLPHYGGMDGVGIPSTMYGDPHAARSMQPVHHLNHGPPLHSHQYPHTAHTNAMAPSMGSSVNDALKRDKDAIYGHPLFPLLALIFEKCELATCTPREPGVAGGDVCSSESFNEDIAVFAKQIRAEKPLFSSNPELDNLMIQAIQVLRFHLLELEKVHELCDNFCHRYISCLKGKMPIDLVIDDREGGSKSDSEDITRSANLTDQPSWNRDHDDTASTRSGGTPGPSSGGHTSHSGDNSSEQGDGLDNSVASPSTGDDDDPDKDKKRHKKRGIFPKVATNIMRAWLFQHLTHPYPSEEQKKQLAQDTGLTILQVNNWFINARRRIVQPMIDQSNRAVSQGTPYNPDGQPMGGFVMDGQQHMGIRAPGLQSMPGEYVARGGPMGVSMGQPSYTQPQMPPHPAQLRHGPPMHTYIPGHPHHPTVMMHGGPPHPGMPMSASSPTVLNTGDPTMSGQVMDIHAQ

SEQ ID NO: 8524 - protein, 121 aa, Homo Sapiens
  misc_feature (1)..(1): Xaa can be any naturally occurring amino acid
XLCFESPEISRPVFPCLQMIQAIQVLRFHLLELEKVHELCDNFCHRYISCLKGKMPIDLVIDDREGGSKSDSEDITRSANLTDQPSWNRDHDDTASTRSGGTPGPSSGGHTSHSGDNSSEQ

SEQ ID NO: 8525 - protein, 126 aa, Homo Sapiens
FPKVATNIMRAWLFQHLSAGAGRHVIAPSLRLPWSPSWGAQRRSEAPVLPDVCLGLGSPSPGPRWARPWGSDCGRPGRQSDSCWWLQHPYPSEEQKKQLAQDTGLTILQVNNWFINARRRIVQPMI

SEQ ID NO: 8526 - protein, 404 aa, Homo Sapiens
MARRYDELPHYPGIVDGPAALASFPETVPAVPGPYGPHRPPQPLPPGLDSDGLKREKDEIYGHPLFPLLALVFEKCELATCSPRDGAGAGLGTPPGGDVCSSDSFNEDIAAFAKQVRSERPLFSSNPELDNLMIQAIQVLRFHLLELEKGKMPIDLVIEDRDGGCREDFEDYPASCPSLPDQNNMWIRDHEDSGSVHLGTPGPSSGGLASQSGDNSSDQGDGLDTSVASPSSGGEDEDLDQERRRNKKRGIFPKVATNIMRAWLFQHLSRRSEAPVLPDVCLGLGSPSPGPRWARPWGSDCGRPGRQSDSCWWLQHPYPSEEQKKQLAQDTGLTILQVNNWFINARRRIVQPMIDQSNRTGQGAAFSPEGQPIGGYTETQPHVAVRPPGSVGMSLNLEGEWHYL

SEQ ID NO: 8527 - protein, 358 aa, Homo Sapiens
MARRYDELPHYPGIVDGPAALASFPETVPAVPGPYGPHRPPQPLPPGLDSDGLKREKDEIYGHPLFPLLALVFEKCELATCSPRDGAGAGLGTPPGGDVCSSDSFNEDIAAFAKQVRSERPLFSSNPELDNLMIQAIQVLRFHLLELEKGKMPIDLVIEDRDGGCREDFEDYPASCPSLPDQNNMWIRDHEDSGSVHLGTPGPSSGGLASQSGDNSSDQGDGLDTSVASPSSGGEDEDLDQERRRNKKRGIFPKVATNIMRAWLFQHLSHPYPSEEQKKQLAQDTGLTILQVNNWFINARRRIVQPMIDQSNRTGQGAAFSPEGQPIGGYTETQPHVAVRPPGSVGMSLNLEGEWHYL

SEQ ID NO: 8528 - protein, 375 aa, Homo Sapiens
MARRYDELPHYPGIVDGPAALASFPETVPAVPGPYGPHRPPQPLPPGLDSDGLKREKDEIYGHPLFPLLALVFEKCELATCSPRDGAGAGLGTPPGGDVCSSDSFNEDIAAFAKQVRSERPLFSSNPELDNLMIQAIQVLRFHLLELEKVHDLCDNFCHRYITCLKGKMPIDLVIEDRDGGCREDFEDYPASCPSLPDQNNMWIRDHEDSGSVHLGTPGPSSGGLASQSGDNSSDQGDGLDTSVASPSSGGEDEDLDQERRRNKKRGIFPKVATNIMRAWLFQHLSHPYPSEEQKKQLAQDTGLTILQVNNWFINARRRIVQPMIDQSNRTGQGAAFSPEGQPIGGYTETQPHVAVRPPGSVGMSLNLEGEWHYL

SEQ ID NO: 8529 - protein, 421 aa, Homo Sapiens
MARRYDELPHYPGIVDGPAALASFPETVPAVPGPYGPHRPPQPLPPGLDSDGLKREKDEIYGHPLFPLLALVFEKCELATCSPRDGAGAGLGTPPGGDVCSSDSFNEDIAAFAKQVRSERPLFSSNPELDNLMIQAIQVLRFHLLELEKVHDLCDNFCHRYITCLKGKMPIDLVIEDRDGGCREDFEDYPASCPSLPDQNNMWIRDHEDSGSVHLGTPGPSSGGLASQSGDNSSDQGDGLDTSVASPSSGGEDEDLDQERRRNKKRGIFPKVATNIMRAWLFQHLSRRSEAPVLPDVCLGLGSPSPGPRWARPWGSDCGRPGRQSDSCWWLQHPYPSEEQKKQLAQDTGLTILQVNNWFINARRRIVQPMIDQSNRTGQGAAFSPEGQPIGGYTETQPHVAVRPPGSVGMSLNLEGEWHYL

SEQ ID NO: 8530 - protein, 421 aa, Homo Sapiens; identical to SEQ ID NO: 8529

SEQ ID NO: 8531 - protein, 221 aa, Homo Sapiens [sequence omitted]

SEQ ID NO: 8532 - protein, 463 aa, Homo Sapiens
MCTLCTTMRGSYRRCPWISLSVCLSLCLCHCLLTPLSPSLFPPSQTLPSLPLGPPAHMSGISAWTGSSLPTEAAPGDLEGFKLGGSDTWGPQYDELPHYPGIVDGPAALASFPETVPAVPGPYGPHRPPQPLPPGLDSDGLKREKDEIYGHPLFPLLALVFEKCELATCSPRDGAGAGLGTPPGGDVCSSDSFNEDIAAFAKQVRSERPLFSSNPELDNLMIQAIQVLRFHLLELEKVHDLCDNFCHRYITCLKGKMPIDLVIEDRDGGCREDFEDYPASCPSLPDQNNMWIRDHEDSGSVHLGTPGPSSGGLASQSGDNSSDQGDGLDTSVASPSSGGEDEDLDQERRRNKKRGIFPKVATNIMRAWLFQHLSHPYPSEEQKKQLAQDTGLTILQVNNWFINARRRIVQPMIDQSNRTGQGAAFSPEGQPIGGYTETQPHVAVRPPGSVGMSLNLEGEWHYL

SEQ ID NO: 8533 - protein, 250 aa, Homo Sapiens
PPPSLSTPALPPWVAPPSTPVPPQVHDLCDNFCHRYITCLKGKMPIDLVIEDRDGGCREDFEDYPASCPSLPDQNNMWIRDHEDSGSVHLGTPGPSSGGLASQSGDNSSDQGDGLDTSVASPSSGGEDEDLDQERRRNKKRGIFPKVATNIMRAWLFQHLSHPYPSEEQKKQLAQDTGLTILQVNNWFINARRRIVQPMIDQSNRTGQGAAFSPEGQPIGGYTETQPHVAVRPPGSVGMSLNLEGEWHYL

SEQ ID NO: 8534 - protein, 178 aa, Homo Sapiens
  misc_feature (1)..(1): Xaa can be any naturally occurring amino acid
XGLSLPSQVRSERPLFSSNPELDNLGKMPIDLVIEDRDGGCREDFEDYPASCPSLPDQNNMWIRDHEDSGSVHLGTPGPSSGGLASQSGDNSSDQGDGLDTSVASPSSGGEDEDLDQERRRNKKRGIFPKVATNIMRAWLFQHLSRRSEAPVLPDVCLGLGSPSPGPRWARPWGSDCG

SEQ ID NO: 8535 - protein, 302 aa, Homo Sapiens
MRGPSGALWLLLALRTVLGGMEVRWCATSDPEQHKCGNMSEAFREAGIQPSLLCVRGTSADHCVQLIAAQEADAITLDGGAIYEAGKEHGLKPVVGEVYDQEVGTSYYAVAVVRRSSHVTIDTLKGVKSCHTGINRTVGWNVPVGYLVESGRLSVMGCDVLKAVSDYFGGSCVPGAGETSYSESLCRLCRGDSSGEGVCDKSPLERYYDYSGAFRCLAEGAGDVAFVKHSTVLENTDESPSRRQTWTRSEEEEGECPAHEEARRTMRSSAGQAWKWAPVHRPQDESDKGEFGKRAKSRDMLG

SEQ ID NO: 8536 - protein, 738 aa, Homo Sapiens
MRGPSGALWLLLALRTVLGGMEVRWCATSDPEQHKCGNMSEAFREAGIQPSLLCVRGTSADHCVQLIAAQEADAITLDGGAIYEAGKEHGLKPVVGEVYDQEVGTSYYAVAVVRRSSHVTIDTLKGVKSCHTGINRTVGWNVPVGYLVESGRLSVMGCDVLKAVSDYFGGSCVPGAGETSYSESLCRLCRGDSSGEGVCDKSPLERYYDYSGAFRCLAEGAGDVAFVKHSTVLENTDGKTLPSWGQALLSQDFELLCRDGSRADVTEWRQCHLARVPAHAVVVRADTDGGLIFRLLNEGQRLFSHEGSSFQMFSSEAYGQKDLLFKDSTSELVPIATQTYEAWLGHEYLHAMKGLLCDPNRLPPYLRWCVLSTPEIQKCGDMAVAFRRQRLKPEIQCVSAKSPQHCMERIQAEQVDAVTLSGEDIYTAGKTYGLVPAAGEHYAPEDSSNSYYVVAVVRRDSSHAFTLDELRGKRSCHAGFGSPAGWDVPVGALIQRGFIRPKDCDVLTAVSEFFNASCVPVNNPKNYPSSLCALCVGDEQGRNKCVGNSQERYYGYRGAFRCLVENAGDVAFVRHTTVFDNTNGHNSEPWAAELRSEDYELLCPNGARAEVSQFAACNLAQIPPHAVMVRPDTNIFTVYGLLDKAQDLFGDDHNKNGFKMFDSSNYHGQDLLFKDATVRAVPVGEKTTYRGWLGLDYVAALEGMSSQQCSGAAAPAPGAPLLPLLLPALAARLLPPAL

SEQ ID NO: 8537 - protein, 181 aa, Homo Sapiens
MRGPSGALWLLLALRTVLGGMEVRWCATSDPEQHKCGNMSEAFREAGIQPSLLCVRGTSADHCVQLIAAQEADAITLDGGAIYEAGKEHGLKPVVGEVYDQEVGTSYYAVAVVRRSSHVTIDTLKGVKSCHTGINRTVGWNVPVGYLVESGRLSVMGCDVLKGPKRGADLHPESSQVAHQP

SEQ ID NO: 8538 - protein, 96 aa, Homo Sapiens
MRVFCVGLLLFSVTWAAPTFQPQTEKTKQSCVEEQRAPQASLLQNSGSQNLPDPHPMPRPTSRSASGPVAAGVILMDLSRKKKTKTILVFTIWARE

SEQ ID NO: 8539 - protein, 556 aa, Homo Sapiens
MRVFCVGLLLFSVTWAAPTFQPQTEKTKQSCVEEQRITYKGHYEKHGHYVFKCVYMSPEKKNQTDVKQEEKNKDNIGFHHLGKRINQELSSKENIVQERKKDLSLSEASENKGSSKSQNYFTNRQRLNKEYSISNKENTHNGLRMSIYPKSTGNKGFEDGDDAISKLHDQEEYGAALIRNNMQHIMGPVTAIKLLGEENKENTPRNVLNIIPASMNYAKAHSKDKKKPQRDSQAQKSPVKSKSTHRIQHNIDYLKHLSKVKKIPSDFEGSGYTDLQERGDNDISPFSGDGQPFKDIPGKGEATGPDLEGKDIQTGFAGPSEAESTHLDTKKPGYNEIPEREENGGNTIGTRDETAKEADAVDVSLVEGSNDIMGSTNFKELPGREGNRVDAGSQNAHQGKVEFHYPPAPSKEKRKEGSSDAAESTNYNEIPKNGKGSTRKGVDHSNRNQATLNEKQRFPSKGKSQGLPIPSRGLDNEIKNEMDSFNGPSHENIITHGRKYHYVPHRQNNSTRNKGMPQGKGSWGRQPHSNRRFSSRRRDDSSESSDSGSSSESDGD

SEQ ID NO: 8540 - protein, 525 aa, Homo Sapiens
MRVFCVGLLLFSVTWAAPTFQPQTEKTKQSCVEEQRQEEKNKDNIGFHHLGKRINQELSSKENIVQERKKDLSLSEASENKGSSKSQNYFTNRQRLNKEYSISNKENTHNGLRMSIYPKSTGNKGFEDGDDAISKLHDQEEYGAALIRNNMQHIMGPVTAIKLLGEENKENTPRNVLNIIPASMNYAKAHSKDKKKPQRDSQAQKSPVKSKSTHRIQHNIDYLKHLSKVKKIPSDFEGSGYTDLQERGDNDISPFSGDGQPFKDIPGKGEATGPDLEGKDIQTGFAGPSEAESTHLDTKKPGYNEIPEREENGGNTIGTRDETAKEADAVDVSLVEGSNDIMGSTNFKELPGREGNRVDAGSQNAHQGKVEFHYPPAPSKEKRKEGSSDAAESTNYNEIPKNGKGSTRKGVDHSNRNQATLNEKQRFPSKGKSQGLPIPSRGLDNEIKNEMDSFNGPSHENIITHGRKYHYVPHRQNNSTRNKGMPQGKGSWGRQPHSNRRFSSRRRDDSSESSDSGSSSESDGD

SEQ ID NO: 8541 - protein, 525 aa, Homo Sapiens; identical to SEQ ID NO: 8540

SEQ ID NO: 8542 - protein, 412 aa, Homo Sapiens
MSIYPKSTGNKGFEDGDDAISKLHDQEEYGAALIRNNMQHIMGPVTAIKLLGEENKENTPRNVLNIIPASMNYAKAHSKDKKKPQRDSQAQKSPVKSKSTHRIQHNIDYLKHLSKVKKIPSDFEGSGYTDLQERGDNDISPFSGDGQPFKDIPGKGEATGPDLEGKDIQTGFAGPSEAESTHLDTKKPGYNEIPEREENGGNTIGTRDETAKEADAVDVSLVEGSNDIMGSTNFKELPGREGNRVDAGSQNAHQGKVEFHYPPAPSKEKRKEGSSDAAESTNYNEIPKNGKGSTRKGVDHSNRNQATLNEKQRFPSKGKSQGLPIPSRGLDNEIKNEMDSFNGPSHENIITHGRKYHYVPHRQNNSTRNKGMPQGKGSWGRQPHSNRRFSSRRRDDSSESSDSGSSSESDGD

SEQ ID NO: 8543 - protein, 412 aa, Homo Sapiens; identical to SEQ ID NO: 8542

SEQ ID NO: 8544 - protein, 501 aa, Homo Sapiens
MSPEKKNQTDVKQEEKNKDNIGFHHLGKRINQELSSKENIVQERKKDLSLSEASENKGSSKSQNYFTNRQRLNKEYSISNKENTHNGLRMSIYPKSTGNKGFEDGDDAISKLHDQEEYGAALIRNNMQHIMGPVTAIKLLGEENKENTPRNVLNIIPASMNYAKAHSKDKKKPQRDSQAQKSPVKSKSTHRIQHNIDYLKHLSKVKKIPSDFEGSGYTDLQERGDNDISPFSGDGQPFKDIPGKGEATGPDLEGKDIQTGFAGPSEAESTHLDTKKPGYNEIPEREENGGNTIGTRDETAKEADAVDVSLVEGSNDIMGSTNFKELPGREGNRVDAGSQNAHQGKVEFHYPPAPSKEKRKEGSSDAAESTNYNEIPKNGKGSTRKGVDHSNRNQATLNEKQRFPSKGKSQGLPIPSRGLDNEIKNEMDSFNGPSHENIITHGRKYHYVPHRQNNSTRNKGMPQGKGSWGRQPHSNRRFSSRRRDDSSESSDSGSSSESDGD

SEQ ID NO: 8545 - protein, 80 aa, Homo Sapiens
MAASRWARKAVVLLCASDLLLLLLLLPPPGSCAAEGSPGTPDESTPPPRKKKKDIRDYNDADMARLLEQWEANTCPTSTH

SEQ ID NO: 8546 - protein, 234 aa, Homo Sapiens
MAASRWARKAVVLLCASDLLLLLLLLPPPGSCAAEGSPGTPDESTPPPRKKKKDIRDYNDADMARLLEQWEKDDDIEEGDLPEHKRPSAPVDFSKIDPSKPESILKMTKKGKTLMMFVTVSGSPTEKETEEITSLWQGSLFNANYDVQRFIVGSDRAIFMLRDGSYAWEIKDFLVGQDRCADVTLEGQVYPGKGGGSKEKNKTKQDKGKKKKEGDLKSRSSKEENRAGNKREDL

SEQ ID NO: 8547 - protein, 234 aa, Homo Sapiens; identical to SEQ ID NO: 8546

SEQ ID NO: 8548 - protein, 234 aa, Homo Sapiens; identical to SEQ ID NO: 8546

SEQ ID NO: 8549 - protein, 138 aa, Homo Sapiens
MAASRWARKAVVLLCASDLLLLLLLLPPPGSCAAEGSPGTPDESTPPPRKKKKDIRDYNDADMARLLEQWETPEPLPVLPEVPSTCACLSSASLIWTCFSHLSPHALVKRVWPPAKQGLGGKESPASAWLPHRGGELK

SEQ ID NO: 8550 - protein, 173 aa, Homo Sapiens
LLSHDYGDIVAQELLYRYKQNRSGRLTIKSLCLSNGGIFPETHRPLLLQKLLKDGGVLSPILTRLMNFFLWDMWAGIRNNDGNLVIDSLLQYINQRKKFRRRWVGALASVTIPIHFIYGPLDPVNPYPEFLELYRKTLPRSTVSILDDHISHYPQLEDPMGFLNAYMGFINSF

SEQ ID NO: 8551 - protein, 118 aa, Homo Sapiens
MREWWVQVGLLAVPLLAAYLHIPPPQLSPALHSWKSSGKFFTYKGLRIFYQDSVGVVGSPEIVVLLHGFPTSSYDWYKIWEGLTLRFHRVIALDFLGFGFSDKPRPHHYSIFEQASIV

SEQ ID NO: 8552 - protein, 160 aa, Homo Sapiens
MREWWVQVGLLAVPLLAAYLHIPPPQLSPALHSWKSSGKFFTYKGLRIFYQDSVGVVGSPEIVVLLHGFPTSSYDWYKIWEGLTLRFHRVIALDFLGFGFSDKPRPHHYSIFEQASIVEALLRHLGLQNRRINLLSHDYGDIVAQELLYRYKQNRSGRLT

SEQ ID NO: 8553 - protein, 169 aa, Homo Sapiens
MREWWVQVGLLAVPLLAAYLHIPPPQLSPALHSWKSSGKFFTYKGLRIFYQDSVGVVGSPEIVVLLHGFPTSSYDWYKIWEGLTLRFHRVIALDFLGFGFSDKPRPHHYSIFEQASIVEALLRHLGLQNRRINLLSHDYGDIVAQELLYRYKQNRSGRLTIKSLCLSNG

SEQ ID NO: 8554 - protein, 188 aa, Homo Sapiens
MREWWVQVGLLAVPLLAAYLHIPPPQLSPALHSWKSSGKFFTYKGLRIFYQDSVGVVGSPEIVVLLHGFPTSSYDWYKIWEGLTLRFHRVIALDFLGFGFSDKPRPHHYSIFEQASIVEALLRHLGLQNRRINLLSHDYGDIVAQELLYRYKQNRSGRLTIKSLCLSNGGIFPETHRPLLLQKLLKDG

SEQ ID NO: 8555 - protein, 292 aa, Homo Sapiens
MREWWVQVGLLAVPLLAAYLHIPPPQLSPALHSWKSSGKFFTYKGLRIFYQDSVGVVGSPEIVVLLHGFPTSSYDWYKIWEGLTLRFHRVIALDFLGFGFSDKPRPHHYSIFEQASIVEALLRHLGLQNRRINLLSHDYGDIVAQELLYRYKQNRSGRLTIKSLCLSNGGIFPETHRPLLLQKLLKDGGVLSPILTRLMNFFVFSRGLLQYINQRKKFRRRWVGALASVTIPIHFIYGPLDPVNPYPEFLELYRKTLPRSTVSILDDHISHYPQLEDPMGFLNAYMGFINSF

SEQ ID NO: 8556 - protein, 292 aa, Homo Sapiens; identical to SEQ ID NO: 8555

SEQ ID NO: 8557 - protein, 292 aa, Homo Sapiens; identical to SEQ ID NO: 8555

SEQ ID NO: 8558 - protein, 213 aa, Homo Sapiens
MREWWVQVGLLAVPLLAAYLHIPPPQLSPALHSWKSSGKFFTYKGLRIFYQDSVGVVGSPEIVVLLHGFPTSSYDWYKIWEGLTLRFHRVIALDFLGFGFSDKPRPHHYSIFEQASIVEALLRHLGLQNRRINLLSHDYGDIVAQELLYRYKQNRSGRLTIKSLCLSNGGIFPETHRPLLLQKLLKDGGVLSPILTRLMNFFVFSRGLTPVFG

SEQ ID NO: 8559 - protein, 326 aa, Homo Sapiens
MREWWVQVGLLAVPLLAAYLHIPPPQLSPALHSWKSSGKFFTYKGLRIFYQDSVGVVGSPEIVVLLHGFPTSSYDWYKIWEGLTLRFHRVIALDFLGFGFSDKPRPHHYSIFEQASIVEALLRHLGLQNRRINLLSHDYGDIVAQELLYRYKQNRSGRLTIKSLCLSNGGIFPETHRPLLLQKLLKDGGVLSPILTRLMNFFVFSRGLTPVFGPYTRPSESELWDMWAGIRNNDGNLVIDSLLQYINQRKKFRRRWVGALASVTIPIHFIYGPLDPVNPYPEFLELYRKTLPRSTVSILDDHISHYPQLEDPMGFLNAYMGFINSF

SEQ ID NO: 8560 - protein, 326 aa, Homo Sapiens; identical to SEQ ID NO: 8559

SEQ ID NO: 8561 - protein, 326 aa, Homo Sapiens; identical to SEQ ID NO: 8559

SEQ ID NO: 8562 - protein, 325 aa, Homo Sapiens
MVRRDRLRRMREWWVQVGLLAVPLLAAYLHIPPPQLSPALHSWKSSGKFFTYKGLRIFYQDSVGVVGSPEIVVLLHGFPTSSYDWYKIWEGLTLRFHRVIALDFLGFGFSDKPASIVEALLRHLGLQNRRINLLSHDYGDIVAQELLYRYKQNRSGRLTIKSLCLSNGGIFPETHRPLLLQKLLKDGGVLSPILTRLMNFFVFSRGLTPVFGPYTRPSESELWDMWAGIRNNDGNLVIDSLLQYINQRKKFRRRWVGALASVTIPIHFIYGPLDPVNPYPEFLELYRKTLPRSTVSILDDHISHYPQLEDPMGFLNAYMGFINSF

SEQ ID NO: 8563 - protein, 335 aa, Homo Sapiens
MVRRDRLRRMREWWVQVGLLAVPLLAAYLHIPPPQLSPALHSWKSSGKFFTYKGLRIFYQDSVGVVGSPEIVVLLHGFPTSSYDWYKIWEGLTLRFHRVIALDFLGFGFSDKPRPHHYSIFEQASIVEALLRHLGLQNRRINLLSHDYGDIVAQELLYRYKQNRSGRLTIKSLCLSNGGIFPETHRPLLLQKLLKDGGVLSPILTRLMNFFVFSRGLTPVFGPYTRPSESELWDMWAGIRNNDGNLVIDSLLQYINQRKKFRRRWVGALASVTIPIHFIYGPLDPVNPYPEFLELYRKTLPRSTVSILDDHISHYPQLEDPMGFLNAYMGFINSF

SEQ ID NO: 8564 - protein, 158 aa, Homo Sapiens
AVKGEVLKVGNKSCENIHLHSEAVLCTVPNDLLKLNSELNIEWKQAISSTVLGKVIVQPDQNFTGLIAGVVSISTALLLLLGFFLWLKKRKQIKDQFPNSSQNGSCRQVQYPLTDMSPILTSGDSDISSPLLQNTVHIDLSALNPELVQAVQHVVIGP

SEQ ID NO: 8565 - protein, 214 aa, Homo Sapiens
AVKLKIDLANRETSIFSYREDPIVYEIHPTKSFISGGSTITGVGKNLNSVSVPRMVINVHEAGRNFTVACQHRSNSEIICCTTPSLQQLNLQLPLKTKAFFMLDGILSKYFDLIYVHNPVFKPFEKPVMISMGNENVLEIKGNDIDPEAVKGEVLKVGNKSCENIHLHSEAVLCTVPNDLLKLNSELNIEVGFLHSSHDVNKEASVIMLFSGLK

SEQ ID NO: 8566 - protein, 1408 aa, Homo Sapiens
MKAPAVLAPGILVLLFTLVQRSNGECKEALAKSEMNVNMKYQLPNFTAETPIQNVILHEHHIFLGATNYIYVLNEEDLQKVAEYKTGPVLEHPDCFPCQDCSSKANLSGGVWKDNINMALVVDTYYDDQLISCGSVNRGTCQRHVFPHNHTADIQSEVHCIFSPQIEEPSQCPDCVVSALGAKVLSSVKDRFINFFVGNTINSSYFPDHPLHSISVRRLKETKDGFMFLTDQSYIDVLPEFRDSYPIKYVHAFESNNFIYFLTVQRETLDAQTFHTRIIRFCSINSGLHSYMEMPLECILTEKRKKRSTKKEVFNILQAAYVSKPGAQLARQIGASLNDDILFGVFAQSKPDSAEPMDRSAMCAFPIKYVNDFFNKIVNKNNVRCLQHFYGPNHEHCFNRTLLRNSSGCEARRDEYRTEFTTALQRVDLFMGQFSEVLLTSISTFIKGDLTIANLGTSEGRFMQVVVSRSGPSTPHVNFLLDSHPVSPEVIVEHTLNQNGYTLVITGKKITKIPLNGLGCRHFQSCSQCLSAPPFVQCGWCHDKCVRSEECLSGTWTQQICLPAIYKVFPNSAPLEGGTRLTICGWDFGFRRNNKFDLKKTRVLLGNESCTLTLSESTMNTLKCTVGPAMNKHFNMSIIISNGHGTTQYSTFSYVDPVITSISPKYGPMAGGTLLTLTGNYLNSGNSRHISIGGKTCTLKSVSNSILECYTPAQTISTEFAVKLKIDLANRETSIFSYREDPIVYEIHPTKSFISTWWKEPLNIVSFLFCFASGGSTITGVGKNLNSVSVPRMVINVHEAGRNFTVACQHRSNSEIICCTTPSLQQLNLQLPLKTKAFFMLDGILSKYFDLIYVHNPVFKPFEKPVMISMGNENVLEIKGNDIDPEAVKGEVLKVGNKSCENIHLHSEAVLCTVPNDLLKLNSELNIEWKQAISSTVLGKVIVQPDQNFTGLIAGVVSISTALLLLLGFFLWLKKRKQIKDLGSELVRYDARVHTPHLDRLVSARSVSPTTEMVSNESVDYRATFPEDQFPNSSQNGSCRQVQYPLTDMSPILTSGDSDISSPLLQNTVHIDLSALNPELVQAVQHVVIGPSSLIVHFNEVIGRGHFGCVYHGTLLDNDGKKIHCAVKSLNRITDIGEVSQFLTEGIIMKDFSHPNVLSLLGICLRSEGSPLVVLPYMKHGDLRNFIRNETHNPTVKDLIGFGLQVAKGMKYLASKKFVHRDLAARNCMLDEKFTVKVADFGLARDMYDKEYYSVHNKTGAKLPVKWMALESLQTQKFTTKSDVWSFGVLLWELMTRGAPPYPDVNTFDITVYLLQGRRLLQPEYCPDPLYEVMLKCWHPKAEMRPSFSELVSRISAIFSTFIGEHYVHVNATYVNVKCVAPYPSLLSSEDNADDEVDTRPASFWETS

SEQ ID NO: 8567 - protein, 1390 aa, Homo Sapiens
MKAPAVLAPGILVLLFTLVQRSNGECKEALAKSEMNVNMKYQLPNFTAETPIQNVILHEHHIFLGATNYIYVLNEEDLQKVAEYKTGPVLEHPDCFPCQDCSSKANLSGGVWKDNINMALVVDTYYDDQLISCGSVNRGTCQRHVFPHNHTADIQSEVHCIFSPQIEEPSQCPDCVVSALGAKVLSSVKDRFINFFVGNTINSSYFPDHPLHSISVRRLKETKDGFMFLTDQSYIDVLPEFRDSYPIKYVHAFESNNFIYFLTVQRETLDAQTFHTRIIRFCSINSGLHSYMEMPLECILTEKRKKRSTKKEVFNILQAAYVSKPGAQLARQIGASLNDDILFGVFAQSKPDSAEPMDRSAMCAFPIKYVNDFFNKIVNKNNVRCLQHFYGPNHEHCFNRTLLRNSSGCEARRDEYRTEFTTALQRVDLFMGQFSEVLLTSISTFIKGDLTIANLGTSEGRFMQVVVSRSGPSTPHVNFLLDSHPVSPEVIVEHTLNQNGYTLVITGKKITKIPLNGLGCRHFQSCSQCLSAPPFVQCGWCHDKCVRSEECLSGTWTQQICLPAIYKVFPNSAPLEGGTRLTICGWDFGFRRNNKFDLKKTRVLLGNESCTLTLSESTMNTLKCTVGPAMNKHFNMSIIISNGHGTTQYSTFSYVDPVITSISPKYGPMAGGTLLTLTGNYLNSGNSRHISIGGKTCTLKSVSNSILECYTPAQTISTEFAVKLKIDLANRETSIFSYREDPIVYEIHPTKSFISGGSTITGVGKNLNSVSVPRMVINVHEAGRNFTVACQHRSNSEIICCTTPSLQQLNLQLPLKTKAFFMLDGILSKYFDLIYVHNPVFKPFEKPVMISMGNENVLEIKGNDIDPEAVKGEVLKVGNKSCENIHLHSEAVLCTVPNDLLKLNSELNIEWKQAISSTVLGKVIVQPDQNFTGLIAGVVSISTALLLLLGFFLWLKKRKQIKDLGSELVRYDARVHTPHLDRLVSARSVSPTTEMVSNESVDYRATFPEDQFPNSSQNGSCRQVQYPLTDMSPILTSGDSDISSPLLQNTVHIDLSALNPELVQAVQHVVIGPSSLIVHFNEVIGRGHFGCVYHGTLLDNDGKKIHCAVKSLNRITDIGEVSQFLTEGIIMKDFSHPNVLSLLGICLRSEGSPLVVLPYMKHGDLRNFIRNETHNPTVKDLIGFGLQVAKGMKYLASKKFVHRDLAARNCMLDEKFTVKVADFGLARDMYDKEYYSVHNKTGAKLPVKWMALESLQTQKFTTKSDVWSFGVLLWELMTRGAPPYPDVNTFDITVYLLQGRRLLQPEYCPDPLYEVMLKCWHPKAEMRPSFSELVSRISAIFSTFIGEHYVHVNATYVNVKCVAPYPSLLSSEDNADDEVDTRPASFWETS

SEQ ID NO: 8568 - protein, 764 aa, Homo Sapiens
MKAPAVLAPGILVLLFTLVQRSNGECKEALAKSEMNVNMKYQLPNFTAETPIQNVILHEHHIFLGATNYIYVLNEEDLQKVAEYKTGPVLEHPDCFPCQDCSSKANLSGGVWKDNINMALVVDTYYDDQLISCGSVNRGTCQRHVFPHNHTADIQSEVHCIFSPQIEEPSQCPDCVVSALGAKVLSSVKDRFINFFVGNTINSSYFPDHPLHSISVRRLKETKDGFMFLTDQSYIDVLPEFRDSYPIKYVHAFESNNFIYFLTVQRETLDAQTFHTRIIRFCSINSGLHSYMEMPLECILTEKRKKRSTKKEVFNILQAAYVSKPGAQLARQIGASLNDDILFGVFAQSKPDSAEPMDRSAMCAFPIKYVNDFFNKIVNKNNVRCLQHFYGPNHEHCFNRTLLRNSSGCEARRDEYRTEFTTALQRVDLFMGQFSEVLLTSISTFIKGDLTIANLGTSEGRFMQVVVSRSGPSTPHVNFLLDSHPVSPEVIVEHTLNQNGYTLVITGKKITKIPLNGLGCRHFQSCSQCLSAPPFVQCGWCHDKCVRSEECLSGTWTQQICLPAIYKVFPNSAPLEGGTRLTICGWDFGFRRNNKFDLKKTRVLLGNESCTLTLSESTMNTLKCTVGPAMNKHFNMSIIISNGHGTTQYSTFSYVDPVITSISPKYGPMAGGTLLTLTGNYLNSGNSRHISIGGKTCTLKSVSNSILECYTPAQTISTEFAVKLKIDLANRETSIFSYREDPIVYEIHPTKSFIRHVNIALIQR

SEQ ID NO: 8569 - protein, 190 aa, Homo Sapiens
MKSKSKSLAECFPYDKPLIMKAPAVLAPGILVLLFTLVQRSNGECKEALAKSEMNVNMKYQLPNFTAETPIQNVILHEHHIFLGATNYIYVLNEEDLQKVAEYKTGPVLEHPDCFPCQDCSSKANLSGGVWKDNINMALVVDTYYDDQLISCGSVNRGTCQRHVFPHNHTADIQSEVHCIFSPQIEEPSQ

SEQ ID NO: 8570 - protein, 187 aa, Homo Sapiens
LAPAARAGYSEERCSWRGSGLTQEPGSVGQLALACAEGAVEWLYPAGALRLTLGGPDPRARPGIACLRPVRPFAGAQVFAERAGGALELLLAEGPGPAGGRCVRWGPRERRALFLQATPHQDISRRVAAFRFELREDGRPELPPQAHGLGVDGACRPCSDAELLLAACTSDFGECPRHGGSLEPAFP

SEQ ID NO: 8571 - protein, 69 aa, Homo Sapiens
MGFPAAALLCALCCGLLAPAARAGYSEERCSWRGRPRRTRTSAAAWPPSALSCARTGAPSCPRRPTVSA

SEQ ID NO: 8572 - protein, 293 aa, Homo Sapiens
MGFPAAALLCALCCGLLAPAARAGYSEERCSWRGSGLTQEPGSVGQLALACAEGAVEWLYPAGALRLTLGGPDPRARPGIACLRPVRPFAGAQVFAERAGGALELLLAEGPGPAGGRCVRWGPRERRALFLQATPHQDISRRVAAFRFELREDGRPELPPQAHGLGVDGACRPCSDAELLLAACTSDFVIHGIIHGVTHDVELQESVITVVAARVLRQTPPLFQAGRSGDQGLTSIRTPLRCGVHPGPGTFLFMGWSRFGEARLGCAPRFQEFRRAYEAARAAHLHPCEVALH

SEQ ID NO: 8573 - protein, 160 aa, Homo Sapiens
MLGCICQMGVQEGGPGQLIARHGPQAHVCVHSCLGGACRPCSDAELLLAACTSDFVIHGIIHGVTHDVELQESVITVVAARVLRQTPPLFQAGRSGDQGLTSIRTPLRCGVHPGPGTFLFMGWSRFGEARLGCAPRFQEFRRAYEAARAAHLHPCEVALH

SEQ ID NO: 8574 - protein, 175 aa, Homo Sapiens
  misc_feature (1)..(1): Xaa can be any naturally occurring amino acid
XAVEWLYPAGALRLTLGGPDPRARPGIACLRPVRPFAGAQVFAERAGGALELLLAEGPGPAGGRCVRWGPRERRALFLQATPHQDISRRVAAFRFELREDGRPELPPQAHGLGVDGACRPCSDAELLLAACTSDFVIHGIIHGVTHDVELQESVITVGGPTALEVMGLSIRTLFT

SEQ ID NO: 8575 - protein, 311 aa, Homo Sapiens
MRGAARAAWGRAGQPWPRPPAPGPPPPPLPLLLLLLAGLLGGAGAQYSSDRCSWKGSGLTHEAHRKEVEQVYLRCAAGAVEWMYPTGALIVNLRPNTFSPARHLTVCIRSFTDSSGANIYLEKTGELRLLVPDGDGRPGRVQCFGLEQGGLFVEATPQQDIGRRTTGFQYELVRRHRASDLHELSAPCRPCSDTEVLLAVCTSDFAVRGSIQQVTHEPERQDSAIHLRVSRLYRQKSRVFEPVPEGDGHWQGRVRTLLECGVRPGHGDFLFTGHMHFGEARLGCAPRFKDFQRMYRDAQERGLNPCEVGTD

SEQ ID NO: 8576 - protein, 229 aa, Homo Sapiens
MYPTGALIVNLRPNTFSPARHLTVCIRSFTDSSGANIYLEKTGELRLLVPDGDGRPGRVQCFGLEQGGLFVEATPQQDIGRRTTGFQYELVRRHRASDLHELSAPCRPCSDTEVLLAVCTSDFAVRGSIQQVTHEPERQDSAIHLRVSRLYRQKSRVFEPVPEGDGHWQGRVRTLLECGVRPGHGDFLFTGHMHFGEARLGCAPRFKDFQRMYRDAQERGLNPCEVGTD

SEQ ID NO: 8577 - protein, 229 aa, Homo Sapiens; identical to SEQ ID NO: 8576

SEQ ID NO: 8578 - protein, 90 aa, Homo Sapiens
RTAVRGSIQQVTHEPERQDSAIHLRVSRLYRQKSRVFEPVPEGDGHWQGRVRTLLECGARLGCAPRFKDFQRMYRDAQERGLNPCEVGTD

SEQ ID NO: 8579 - protein, 456 aa, Homo Sapiens
MAAALKCLLTLGRWCPGLGVAPQARALAALVPGVTQVDNKSGFLQKRPHRQHPGILKLPHVRLPQALANGAQLLLLGSAGPTMENQVQTLTSYLWSRHLPVEPEELQRRARHLEKKFLENPDLSQTEEKLRGAVLHALRKTTYHWQELSYTEGLSLVYMAARLDGGFAAVSRAFHEIRARNPAFQPQTLMDFGSGTGSVTWAAHSIWGQSLREYMCVDRSAAMLVLAEKLLKGGSESGEPYIPGVFFRQFLPVSPKVQFDVVVSAFSLSELPSKADRTEVVQTLWRKTGHFLVLVENGTKAGHSLLMDARDLVLKGKEKSPLDPRPGFVFAPCPHELPCPQLTNLACSFSQAYHPIPFSWNKKPKEEKFSMVILARGSPEEAHRWPRITQPVLKRPRHVHCHLCCPDGHMQHAVLTARRHGRDLYRCARVSSWGDLLPVLTPSAFPPSTAQDPSES

SEQ ID NO: 8580 - protein, 478 aa, Homo Sapiens
MAAALKCLLTLGRWCPGLGVAPQARALAALVPGVTQVDNKSGFLQKRPHRQHPGILKLPHVRLPQALANGAQLLLLGSAGPTMENQVQTLTSYLWSRHLPVEPEELQRRARHLEKKFLENPDLSQTEEKLRGAVLHALRKTTYHWQELSYTEGLSLVYMAARLDGGFAAVSRAFHEIRARNPAFQPQTLMDFGSGTGSVTWAAHSIWGQSLREYMCVDRSAAMLVLAEKLLKGGSESGEPYIPGVFFRQFLPVSPKVQFDVVVSAFSLSELPSKADRTEVVQTLWRKTGHFLVLVENGTKAGHSLLMDARDLVLKGKEKSPLDPRPGFVFAPCPHELPCPQLTNLACSFSQAYHPIPFSWNKKPKEEKFSMVILARGSPEEAHRWPRITQPVLKRPRHVHCHLCCPDGHMQHAVLTARRHGRYGGCDQNQWDVAGSCSPRQHLFPQGFVSLCPCQLLGRSFTCAYSVCVSSIYGSGSL

SEQ ID NO: 8581 - protein, 447 aa, Homo Sapiens
MAAALKCLLTLGRWCPGLGVAPQARALAALVPGVTQVDNKSGFLQKRPHRQHPGILKLPHVRLPQALANGAQLLLLGSAGPTMENQVQTLTSYLWSRHLPVEPEELQRRARHLEKKFLENPDLSQTEEKLRGAVLHALRKTTYHWQELSYTEGLSLVYMAARLDGGFAAVSRAFHEIRARNPAFQPQTLMDFGSGTGSVTWAAHSIWGQSLREYMCVDRSAAMLVLAEKLLKGGSESGEPYIPGVFFRQFLPVSPKVQFDVVVSAFSLSELPSKADRTEVVQTLWRKTGHFLVLVENGTKAGHSLLMDARDLVLKGKEKSPLDPRPGFVFAPCPHELPCPQLTNLACSFSQAYHPIPFSWNKKPKEEKFSMVILARGSPEEAHRWPRITQPVLKRPRHVHCHLCCPDGHMQHAVLTARRHGSSWGDLLPVLTPSAFPPSTAQDPSES

SEQ ID NO: 8582 - protein, 158 aa, Homo Sapiens
MAAALKCLLTLGRWCPGLGVAPQARALAALVPGVTQVDNKSGFLQKRPHRQHPGILKLPHVRLPQALANGAQLLLLGSAGPTMENQVQTLTSYLWSRHLPVEPEELQRRARHLEKKFLENPGPDFQSLFSPQTYLRQRRNFVEQCYTHYVKLPTIGKN

SEQ ID NO: 8583 - protein, 158 aa, Homo Sapiens; identical to SEQ ID NO: 8582

SEQ ID NO: 8584 - protein, 158 aa, Homo Sapiens; identical to SEQ ID NO: 8582

SEQ ID NO: 8585 - protein, 102 aa, Homo Sapiens
MENQVQTLTSYLWSRHLPVEPEELQRRARHLEKKFLENPDLSQTEEKLRGAVLHALRKTTYHWQELSYTEGLSLVYMAARLDGGFAAVSRAFHEIRARNPAF

SEQ ID NO: 8586 - protein, 140 aa, Homo Sapiens
MENQVQTLTSYLWSRHLPVEPEELQRRARHLEKKFLENPDLSQTEEKLRGAVLHALRKTTYHWQELSYTEGLSLVYMAARLDGGFAAVSRAFHEIRARNPAFQPQTLMDFGSGTGSVTWAAHSIWGQSLREYMCVDRSAA

SEQ ID NO: 8587 - protein, 174 aa, Homo Sapiens
MENQVQTLTSYLWSRHLPVEPEELQRRARHLEKKFLENPDLSQTEEKLRGAVLHALRKTTYHWQELSYTEGLSLVYMAARLDGGFAAVSRAFHEIRARNPAFQPQTLMDFGSGTGSVTWAAHSIWGQSLREYMCVDRSAAMLVLAEKLLKGGSESGEPYIPGVFFRQFLPVSPK

SEQ ID NO: 8588 - protein, 186 aa, Homo Sapiens
MVPRPWSGSPGPGECLHSLLSERLWICRDISAQRRSAPGSPRPSDCQQLSFLPGNQPTFLCLQALAALVPGVTQVDNKSGFLQKRPHRQHPGILKLPHVRLPQALANGAQLLLLGSAGPTMENQVQTLTSYLWSRHLPVEPEELQRRARHLEKKFLENPDLSQTEEKLRGAVLHALRKTTYHWQEL

SEQ ID NO: 8589 - protein, 123 aa, Homo Sapiens
  misc_feature (1)..(1): Xaa can be any naturally occurring amino acid
XPGFVFAPCPHELPCPQLTNLACSFSQAYHPIPFSWNKKPKEEKFSMVILARGSPEEAHRWPRITQPVLKRPRHVHCHLCCPDGHMQHAVLTARRHGSSWGDLLPVLTPSAFPPSTAQDPSES

SEQ ID NO: 8590 - protein, 366 aa, Homo Sapiens
MARERPPGRGCGVLRRCLLGAVLLFGLRLCAELRRAGPGSPTRSAPPGPAWRPPGPHLPPAPGQPRGASRRQVTYVRSGRRAPPGGGGSGTPEPGCCAPRGRPRRKGPRWHIDLQPWAGSAQSLDEEAWRFLRYISTTQIACNHMNTDSLATDSSPTHKPWSVCLDDRFNLAHQIRNKQCRLYSLGLGSDDTHFEVSMANNGCEVHRFDPSVKSAHILESQHLWYHRLSIDWRDPHPAVAAQKPHSNTRKLGSILNEFGHHKIDVLKADLESAEWKVLENLILEDVLEQIGQLIFEIHLHWPGFEVSGSDSSVVRFWYSLLKELEQKDFRLFHSYKDLSKPQLFLKKDIFNASSCYTLSWVNTRWK

SEQ ID NO: 8591 - protein, 244 aa, Homo Sapiens
MDILVPLLQLLVLLLTLPLHLMALLGCWQPLCKSYFPYLMAVLTPKSNRKMESKKRELFSQIKGLTGASGKVALLELGCGTGANFQFYPPGCRVTCLDPNPHFEKFLTKSMAENRHLQYERFVVAPGEDMRQLADGSMDVVVCTLVLCSVQSPRKVLQEVRRVLRPGGVLFFWEHVAEPYGSWAFMWQQVFEPTWKHIGDGCCLTRETWKDLENAQFSEIQMERQPPPLKWLPVGPHIMGKAVK

SEQ ID NO: 8592 - protein, 276 aa, Homo Sapiens
MDILVPLLQLLVLLLTLPLHLMALLGCWQPLCKSYFPYLMAVLTPKSNRKMESKKRELFSQIKGLTGASGKVALLELGCGTGANFQFYPPGCRVTCLDPNPHFEKFLTKSMAENRHLQYERFVVAPGEDMRQLADGSMDVVVCTLVLCSVQSPRKVLQEVRRVLRPGGVLFFWEHVAEPYGSWAFMWQQVFEPTWKHIGDGCCLTRETWKDLENAQFSEIQMERQPPPLKWLPVGPHIMGKAVKSFPSSKALICSFPSLQLEQATHQPIYLPLRGT

SEQ ID NO: 8593 - protein, 243 aa, Homo Sapiens
MDRKTTSWDTKFYEKWYVCNREKLCESLQAVFVQSYLDQGTQIFLNNSIEKSGWLFIQLYHSFVSSVFSLFMSRTSINGLLGRGSMFVFSPDQFQRLLKINPDWKTHRLLDLGAGDGEVTKIMSPHFEEIYATELSETMIWQLQKKKYRVLGINEWQNTGFQYDVISCLNLLDRCDQPLTLLKDIRSVLEPTRGRVILALVLPFHPYVENVGGKWEKPSEILEIKGQNWEEQVNSLPEVFRKA

SEQ ID NO: 8594 - protein, 61 aa, Homo Sapiens
MRLLAGWLCLSLASVWLARRMWTLRSPLTRSLGMCATERNYANHSRLSLFRVTLIKEHRSS

SEQ ID NO: 8595 - protein, 74 aa, Homo Sapiens
MRLLAGWLCLSLASVWLARRMWTLRSPLTRSLYVNMTSGPGGPAAAAGGRKENHQVARKRLNVCVFTRSVSETA

SEQ ID NO: 8596 - protein, 317 aa, Homo Sapiens
MRLLAGWLCLSLASVWLARRMWTLRSPLTRSLYVNMTSGPGGPAAAAGGRKENHQWYVCNREKLCESLQAVFVQSYLDQGTQIFLNNSIEKSGWLFIQLYHSFVSSVFSLFMSRTSINGLLGRGSMFVFSPDQFQRLLKINPDWKTHRLLDLGAGDGEVTKIMSPHFEEIYATELSETMIWQLQKKKYRVLGINEWQNTGFQYDVISCLNLLDRCDQPLTLLKDIRSVLEPTRGRVILALVLPFHPYVENGGKWEKPSEILEIKGQNWEEQVNSLPEVFRKAGFVIEAFTRLPYLCEGDMYNDYYVLDDAVFVLKPV

SEQ ID NO: 8597 - protein, 318 aa, Homo Sapiens
MRLLAGWLCLSLASVWLARRMWTLRSPLTRSLYVNMTSGPGGPAAAAGGRKENHQWYVCNREKLCESLQAVFVQSYLDQGTQIFLNNSIEKSGWLFIQLYHSFVSSVFSLFMSRTSINGLLGRGSMFVFSPDQFQRLLKINPDWKTHRLLDLGAGDGEVTKIMSPHFEEIYATELSETMIWQLQKKKYRVLGINEWQNTGFQYDVISCLNLLDRCDQPLTLLKDIRSVLEPTRGRVILALVLPFHPYVENVGGKWEKPSEILEIKGQNWEEQVNSLPEVFRKAGFVIEAFTRLPYLCEGDMYNDYYVLDDAVFVLKPV

SEQ ID NO: 8598 - protein, 139 aa, Homo Sapiens
MSRTSINGLLGRGSMFVFSPDQFQRLLKINPDWKTHRLLDLGAGDGEVTKIMSPHFEEIYATELSETMIWQLQKKKYRVLGINEWQNTGFQYDVISCLNLLDRCDQPLTLLKDIRSVLEPTRGRVILALVLPFHPYVEN

SEQ ID NO: 8599 - protein, 282 aa, Homo Sapiens
MWTLRSPLTRSLYVKENHQWYVCNREKLCESLQAVFVQSYLDQGTQIFLNNSIEKSGWLFIQLYHSFVSSVFSLFMSRTSINGLLGRGSMFVFSPDQFQRLLKINPDWKTHRLLDLGAGDGEVTKIMSPHFEEIYATELSETMIWQLQKKKYRVLGINEWQNTGFQYDVISCLNLLDRCDQPLTLLKDIRSVLEPTRGRVILALVLPFHPYVENVGGKWEKPSEILEIKGQNWEEQVNSLPEVFRKAGFVIEAFTRLPYLCEGDMYNDYYVLDDAVFVLKPV

SEQ ID NO: 8600 - protein, 128 aa, Homo Sapiens
  misc_feature (1)..(1): Xaa can be any naturally occurring amino acid
XPDQFQRLLKINPDWKTHRLLDLGAGDGEVTKIMSPHFEEIYATELSETMIWQLQKKKYRVLGINEWQNTGFQYDVISCLNLLDRCDQPLTLLKDIRSVLEPTRGRVILALVLPFHPYVENGKCGQSG

SEQ ID NO: 8601 - protein, 125 aa, Homo Sapiens
  misc_feature (1)..(1): Xaa can be any naturally occurring amino acid
XSYLDQGTQIFLNNSIEKSGWLFIQLYHSFVSSVFSLFMSRTSINGVLGINEWQNTGFQYDVISCLNLLDRCDQPLTLLKDIRSVLEPTRGRVILALVLPFHPYVENVGGKWEKPSEILEIKGQN

SEQ ID NO: 8602 - protein, 489 aa, Homo Sapiens
MPSGSSAALALAAAGVLYGGDDAQGMMAAMLSHAYGPGGCGAAAAALNGEQAALLRRKSVNTTECVPVPSSEHVAEIVGRQGCKIKALRAKTNTYIKTPVRGEEPIFVVTGRKEDVAMAKREILSAAEHFSMIRASRNKNGPALGGLSCSPNLPGQTTVQVRVPYRVVGLVVGPKGATIKRIQQQTHTYIVTPSRDKEPVFEVTGMPENVDRAREEIEMHIAMRTGNYIELNEENDFHYNGTDVSFEGGTLGSAWLSSNPVPPSRARMISNYRNDSSSSLGSGSTDSYFGSNRLADFSPTSPFSTGNFWFGDTLPSVGSEDLAVDSPAFDSLPTSAQTIWTPFEPVNPLSGFGSDPSGNMKTQRRGSQPSTPRLSPTFPESIEHPLARRVRSDPPSTGNHVGLPIYIPAFSNGTNSYSSSNGGSTSSSPPESRRKHDCVICFENEVIAALVPCGHNLFCMECANKICEKRTPSCPVCQTAVTQAIQIHS

SEQ ID NO: 8603 - protein, 659 aa, Homo Sapiens
MPSGSSAALALAAAPAPLPQPPPPPPPPPPPLPPPSGGPELEGDGLLLRERLAALGLDDPSPAEPGAPALRAPAAAAQGQARRAAELSPEERAPPGRPGAPEAAELELEEDEEEGEEAELDGDLLEEEELEEAEEEDRSSLLLLSPPAATASQTQQIPGGSLGSVLLPAARFDAREAAAAAAAAGVLYGGDDAQGMMAAMLSHAYGPGGCGAAAAALNGEQAALLRRKSVNTTECVPVPSSEHVAEIVGRQGCKIKALRAKTNTYIKTPVRGEEPIFVVTGRKEDVAMAKREILSAAEHFSMIRASRNKNGPALGGLSCSPNLPGQTTVQVRVPYRVVGLVVGPKGATIKRIQQQTHTYIVTPSRDKEPVFEVTGMPENVDRAREEIEMHIAMRTGNYIELNEENDFHYNGTDVSFEGGTLGSAWLSSNPVPPSRARMISNYRNDSSSSLGSGSTDSYFGSNRLADFSPTSPFSTGNFWFGDTLPSVGSEDLAVDSPAFDSLPTSAQTIWTPFEPVNPLSGFGSDPSGNMKTQRRGSQPSTPRLSPTFPESIEHPLARRVRSDPPSTGNHVGLPIYIPAFSNGTNSYSSSNGGSTSSSPPESRRKHDCVICFENEVIAALVPCGHNLFCMECANKICEKRTPSCPVCQTAVTQAIQIHS

SEQ ID NO: 8604 - protein, 115 aa, Homo Sapiens
YGGDDAQGMMAAMLSHAYGPGGCGAAAAALNGEQAALLRRKSVNTTECVPVPSSEHVAEIVGRQGECRGGEVQLGMAPGVGGETRERSVGRKRRTRRGPQVHREGVWEEPRVDQM

SEQ ID NO: 8605 - protein, 183 aa, Homo Sapiens
MRAAYLFLLFLPAGLLAQGQYDLDPLPPFPDHVQYTHYSDQIDNPDYYDYQEVTPRPSEEQFQFQSQQQVQQEVIPAPTPEPGNAELEPTEPGPLDCREEQYPCTRLYSIHRPCKQCLNEVCFYSLRRVYVINKEICVRTVCAHEELLRADLCRDKFSKCGVMASSGLCQSVAASCARSCGSC

SEQ ID NO: 8606 - protein, 182 aa, Homo Sapiens
MRAAYLFLLFLPGLLAQGQYDLDPLPPFPDHVQYTHYSDQIDNPDYYDYQEVTPRPSEEQFQFQSQQQVQQEVIPAPTPEPGNAELEPTEPGPLDCREEQYPCTRLYSIHRPCKQCLNEVCFYSLRRVYVINKEICVRTVCAHEELLRADLCRDKFSKCGVMASSGLCQSVAASCARSCGSC

SEQ ID NO: 8607 - protein, 17 aa, Homo Sapiens
MKLHCCLFTLVASIIVP

SEQ ID NO: 8608 - protein, 109 aa, Homo Sapiens
MKLHCCLFTLVASIIVPAAFVLEDVDFDQMVSLEANRSSYNASFPSSFELSASSHSDDDVIIAKEGTSVSIECLLTASHYEDVHWHNSKGQQLDGRSRGGKWLVSDNFL

SEQ ID NO: 8609 - protein, 123 aa, Homo Sapiens
MKLHCCLFTLVASIIVPAAFVLEDVDFDQMVSLEANRSSYNASFPSSFELSASSHSDDDVIIAKEGTSVSIECLLTASHYEDVHWHNSKGQQLDGRSRGGKWLVSDNFLNITNVAFDDRGLYT

SEQ ID NO: 8610 - protein, 362 aa, Homo Sapiens
MKLHCCLFTLVASIIVPAAFVLEDVDFDQMVSLEANRSSYNASFPSSFELSASSHSDDDVIIAKEGTSVSIECLLTASHYEDVHWHNSKGQQLDGRSRGGKWLVSDNFLNITNVAFDDRGLYTCFVTSPIRASYSVTLRVIFTSGDMSVYYMIVCLIAFTITLILNVTRLCMMSSHLRKTEKAINEFFRTEGAEKLQKAFEIAKRIPIITSAKTLELAKVTQFKTMEFARYIEELARSVPLPPLILNCRAFVEEMFEAVRVDDPDDLGERIKERPALNAQGGIYVINPEMGRSNSPGGDSDDGSLNEQGQEIAVQVSVHLQSETKSIDTESQGSSHFSPPDDIGSAESNCNYKDGAYENCQL

SEQ ID NO: 8611 - protein, 216 aa, Homo Sapiens
MSVYYMIVCLIAFTITLILNVTRLCMMSSHLRKTEKAINEFFRTEGAEKLQKAFEIAKRIPIITSAKTLELAKVTQFKTMEFARYIEELARSVPLPPLILNCRAFVEEMFEAVRVDDPDDLGERIKERPALNAQGGIYVINPEMGRSNSPGGDSDDGSLNEQGQEIAVQVSVHLQSETKSIDTESQGSSHFSPPDDIGSAESNCNYKDGAYENCQL

SEQ ID NO: 8612 - protein, 73 aa, Homo Sapiens
MDRLKSHLTVCFLPSVPFLILVSTLATAKSVTNSTLNGTNVVLGSVPVIIARTDHIIVKEGNSALINCSVYGI

SEQ ID NO: 8613 - protein, 90 aa, Homo Sapiens
MDRLKSHLTVCFLPSVPFLILVSTLATAKSVTNSTLNGTNVVLGSVPVIIARTDHIIVKEGNSALINCSVYGIPDPQFKWYNSIGKLLKE

SEQ ID NO: 8614 - protein, 98 aa, Homo Sapiens
MDRLKSHLTVCFLPSVPFLILVSTLATAKSVTNSTLNGTNVVLGSVPVIIARTDHIIVKEGNSALINCSVYGIPDPQFKWYNSIGKLLKEEEDEKERG

SEQ ID NO: 8615 - protein, 409 aa, Homo Sapiens
MDRLKSHLTVCFLPSVPFLILVSTLATAKSVTNSTLNGTNVVLGSVPVIIARTDHIIVKEGNSALINCSVYGIPDPQFKWYNSIGKLLKEEEDEKERGGGKWQMHDSGLLNITKVSFSDRGKYTCVASNIYGTVNNTVTLRVIFTSGDMGVYYMVVCLVAFTIVMVLNITRLCMMSSHLKKTEKAINEFFRTEGAEKLQKAFEIAKRIPIITSAKTLELAKVTQFKTMEFARYIEELARSVPLPPLIMNCRTIMEEIMEVVGLEEQGQNFVRHTPEGQEAADRDEVYTIPNSLKRSDSPAADSDASSLHEQPQQIAIKVSVHPQSKKEHADDQEGGQFEVKDVEETELSAEHSPETAEPSTDVTSTELTSEEPTPVEVPDKVLPPAYLEATEPAVTHDKNTCIIYESHV

SEQ ID NO: 8616 - protein, 102 aa, Homo Sapiens
MDRLKSHLTVCFLPSVPFLILVSTLATAKSVTNSTLNGTNVVLGSVPVIIARTDHIIVKEGNSALINCSVYGIPDPQFKWYNSIGKLLKEEEDEKERGGGRL

SEQ ID NO: 8617 - protein, 102 aa, Homo Sapiens; identical to SEQ ID NO: 8616

SEQ ID NO: 8618 - protein, 44 aa, Homo Sapiens
MHDSGLLNITKVSFSDRGKYTCVASNIYGTVNNTVTLRVIFTSG

SEQ ID NO: 8619 - protein, 64 aa, Homo Sapiens
MHDSGLLNITKVSFSDRGKYTCVASNIYGTVNNTVTLRVIFTSGDMGVYYMVVCLVAFTIVMVL

SEQ ID NO: 8620 - protein, 157 aa, Homo Sapiens
MHDSGLLNITKVSFSDRGKYTCVASNIYGTVNNTVTLRVIFTSGDMGVYYMVVCLVAFTIVMVLNITRLCMMSSHLKKTEKAINEFFRTEGAEKLQKAFEIAKRIPIITSAKTLELAKVTQFKTMEFARYIEELARSVPLPPLIMNCRTIMEEIMEV

SEQ ID NO: 8621 - protein, 306 aa, Homo Sapiens
MHDSGLLNITKVSFSDRGKYTCVASNIYGTVNNTVTLRVIFTSGDMGVYYMVVCLVAFTIVMVLNITRLCMMSSHLKKTEKAINEFFRTEGAEKLQKAFEIAKRIPIITSAKTLELAKVTQFKTMEFARYIEELARSVPLPPLIMNCRTIMEEIMEVVGLEEQGQNFVRHTPEGQEAADRDEVYTIPNSLKRSDSPAADSDASSLHEQPQQIAIKVSVHPQSKKEHADDQEGGQFEVKDVEETELSAEHSPETAEPSTDVTSTELTSEEPTPVEVPDKVLPPAYLEATEPAVTHDKNTCIIYESHV

SEQ ID NO: 8622 - protein, 279 aa, Homo Sapiens
MGELSPLQRPLATEGTMKAQGVLLKLALLALPLLLLLSTPPCAPQVSGIRGDALERFCLQQPLDCDDIYAQGYQSDGVYLIYPSGPSVPVPVFCDMTTEGGKWTVFQKRFNGSVSFFRGWNDYKLGFGRADGEYWLGLQNMHLLTLKQKYELRVDLEDFENNTAYAKYADFSISPNAVSAEEDGYTLFVAGFEDGGAGDSLSYHSGQKFSTFDRDQDLFVQNCAALSSGAFWFRSCHFANLNGFYLGGSHLSYANGINWAQWKGFYYSLKRTEMKIRRA

SEQ ID NO: 8623 - protein, 255 aa, Homo Sapiens
MKALLALPLLLLLSTPPCAPQVSGIRGDALERFCLQQPLDCDDIYAQGYQSDGVYLIYPSGPSVPVPVFCDMTTEGGKWTVFQKRFNGSVSFFRGWNDYKLGFGRADGEYWLGLQNMHLLTLKQKYELRVDLEDFENNTAYAKYADFSISPNAVSAEEDGYTLFVAGFEDGGAGDSLSYHSGQKFSTFDRDQDLFVQNCAALSSGAFWFRSCHFANLNGFYLGGSHLSYANGINWAQWKGFYYSLKRTEMKIRRA

SEQ ID NO: 8624 - protein, 280 aa, Homo Sapiens
MVGANAKRTGDLWSWEGAVLTLSAHRQALLALPLLLLLSTPPCAPQVSGIRGDALERFCLQQPLDCDDIYAQGYQSDGVYLIYPSGPSVPVPVFCDMTTEGGKWTVFQKRFNGSVSFFRGWNDYKLGFGRADGEYWLGLQNMHLLTLKQKYELRVDLEDFENNTAYAKYADFSISPNAVSAEEDGYTLFVAGFEDGGAGDSLSYHSGQKFSTFDRDQDLFVQNCAALSSGAFWFRSCHFANLNGFYLGGSHLSYANGINWAQWKGFYYSLKRTEMKIRRA

SEQ ID NO: 8625 - protein, 151 aa, Homo Sapiens
MSLLGPKVLLFLAAFIITSDDVTQATPETFTEDPNLVNDPATDETVLAVLADIAPSTDDLECWDEKFTCTRLYSVHRPVKQCIHQLCFTSLRRMYIVNKEICSRLVCKEHEAMKDELCRQMAGLPPRRLRRSNYFRLPPCENVDLQRPNGL

SEQ ID NO: 8626 - protein, 148 aa, Homo Sapiens
MSLLGPKVLLFLAAFIITSDWIPLGVNSQRGDDVTQATPETFTEDPNLVNDPATDETECWDEKFTCTRLYSVHRPVKQCIHQLCFTSLRRMYIVNKEICSRLVCKEHEAMKDELCRQMAGLPPRRLRRSNYFRLPPCENVDLQRPNGL

SEQ ID NO: 8627 - protein, 91 aa, Homo Sapiens
MSLLGPKVLLFLAAFIITSDWIPLGVNSQRGDDVTQATPETFTEDPNLVNDPATDETVLAVLADIAPSTDDLASLSEKNTTAECWDEKFTC

SEQ ID NO: 8628 - protein, 173 aa, Homo Sapiens
MSLLGPKVLLFLAAFIITSDWIPLGVNSQRGDDVTQATPETFTEDPNLVNDPATDETVLAVLADIAPSTDDLASLSEKNTTAECWDEKFTCTRLYSVHRPVKQCIHQLCFTSLRRMYIVNKEICSRLVCKEHEAMKDELCRQMAGLPPRRLRRSNYFRLPPCENVDLQRPNGL

SEQ ID NO: 8629 - protein, 138 aa, Homo Sapiens
MSLLGPKVLLFLAAFIITSDWIPLGVNSQRGDDVTQATPETFTEDPNLVNDPATDETVLAVLADIAPSTDDLASLSEKNTTAECWDEKFTCTRLYSVHRPVKQCIHQLCFTSLRRMYIVNKEICSRLVCKEHEAMKDP

SEQ ID NO: 8630 - protein, 109 aa, Homo Sapiens
MSLLGPKVLLFLAAFIITSDWIPLGVNSQRGDDVTQATPETFTEDPNLVNDPATDETVLAVLADIAPSTDDLDELCRQMAGLPPRRLRRSNYFRLPPCENVDLQRPNGL

SEQ ID NO: 8631 - protein, 163 aa, Homo Sapiens
MSLLGPKVLLFLAAFIITSDWIPLGVNSQRGDDVTQATPETFTEDPNLVNDPATDETVLAVLADIAPSTDDLECWDEKFTCTRLYSVHRPVKQCIHQLCFTSLRRMYIVNKEICSRLVCKEHEAMKDELCRQMAGLPPRRLRRSNYFRLPPCENVDLQRPNGL

SEQ ID NO: 8632 - protein, 163 aa, Homo Sapiens; identical to SEQ ID NO: 8631

SEQ ID NO: 8633 - protein, 128 aa, Homo Sapiens
MSLLGPKVLLFLAAFIITSDWIPLGVNSQRGDDVTQATPETFTEDPNLVNDPATDETVLAVLADIAPSTDDLECWDEKFTCTRLYSVHRPVKQCIHQLCFTSLRRMYIVNKEICSRLVCKEHEAMKDP

SEQ ID NO: 8634 - protein, 163 aa, Homo Sapiens
  misc_feature (1)..(1): Xaa can be any naturally occurring amino acid
XLAAFIITSDWIPLGVNSQRGDDVTQATPETFTEDPNLVNDPATDETVLAVLADIAPSTDDLASLSEKNTTAECWDEKFTCTRLYSVHRPVKQCIHQLCFTSLRRMYIVNKEICSRLVCKEHEAMKDELCRQMAGLPPRRLRRSNYFRLPPCENVDLQRPNGL

SEQ ID NO: 8635 - protein, 79 aa, Homo Sapiens
YSVHRPVKQCIHQLCFTSLRRMYIVNKEICSRLVCKEHEAMKDELCRQMAGLPPRRLRRSNYFRLPPCENVDLQRPNGL

SEQ ID NO: 8636 - protein, 75 aa, Homo Sapiens
FDFIHDVNKKHKEFVGNWNKNAVHVNLFETPVEAQYVRLYPTSCHTACTLRFELLGCELNARKADLRRGADDREQ

SEQ ID NO: 8637 - protein, 268 aa, Homo Sapiens
MPRPRLLAALCGALLCAPSLLVALDICSKNPCHNGGLCEEISQEVRGDVFPSYTCTCLKGYAGNHCETKCVEPLGLENGNIANSQIAASSVRVTFLGLQHWVPELARLNRAGMVNAWTPSSNDDNPWIQVNLLRRMWVTGVVTQGASRLASHEYLKAFKVAYSLNGHEFDFIHDVNKKHKEFVGNWNKNAVHVNLFETPVEAQYVRLYPTSCHTACTLRFELLGCELNAATRPGACISSAGTPPMHGWTSRATSTPGLRGATVTISGC

SEQ ID NO: 8638 - protein, 335 aa, Homo Sapiens
MPRPRLLAALCGALLCAPSLLVALDICSKNPCHNGGLCEEISQEVRGDVFPSYTCTCLKGYAGNHCETKCVEPLGLENGNIANSQIAASSVRVTFLGLQHWVPELARLNRAGMVNAWTPSSNDDNPWIQVNLLRRMWVTGVVTQGASRLASHEYLKAFKVAYSLNGHEFDFIHDVNKKHKEFVGNWNKNAVHVNLFETPVEAQYVRLYPTSCHTACTLRFELLGCELNGCANPLGLKNNSIPDKQITASSSYKTWGLHLFSWNPSYARLDKQGNFNAWVAGSYGNDQWLQIFPGNWDNHSHKKNLFETPILARYVRILPVAWHNRIALRLELLGC

SEQ ID NO: 8639 - protein, 387 aa, Homo Sapiens
MPRPRLLAALCGALLCAPSLLVALDICSKNPCHNGGLCEEISQEVRGDVFPSYTCTCLKGYAGNHCETKCVEPLGLENGNIANSQIAASSVRVTFLGLQHWVPELARLNRAGMVNAWTPSSNDDNPWIQVNLLRRMWVTGVVTQGASRLASHEYLKAFKVAYSLNGHEFDFIHDVNKKHKEFVGNWNKNAVHVNLFETPVEAQYVRLYPTSCHTACTLRFELLGCELNGCANPLGLKNNSIPDKQITASSSYKTWGLHLFSWNPSYARLDKQGNFNAWVAGSYGNDQWLQVDLGSSKEVTGIITQGARNFGSVQFVASYKVAYSNDSANWTEYQDPRTGSSKIFPGNWDNHSHKKNLFETPILARYVRILPVAWHNRIALRLELLGC

SEQ ID NO: 8640 - protein, 387 aa, Homo Sapiens; identical to SEQ ID NO: 8639

SEQ ID NO: 8641 - protein, 343 aa, Homo Sapiens
MPRPRLLAALCGALLCAPSLLVALECVEPLGLENGNIANSQIAASSVRVTFLGLQHWVPELARLNRAGMVNAWTPSSNDDNPWIQVNLLRRMWVTGVVTQGASRLASHEYLKAFKVAYSLNGHEFDFIHDVNKKHKEFVGNWNKNAVHVNLFETPVEAQYVRLYPTSCHTACTLRFELLGCELNGCANPLGLKNNSIPDKQITASSSYKTWGLHLFSWNPSYARLDKQGNFNAWVAGSYGNDQWLQVDLGSSKEVTGIITQGARNFGSVQFVASYKVAYSNDSANWTEYQDPRTGSSKIFPGNWDNHSHKKNLFETPILARYVRILPVAWHNRIALRLELLGC

SEQ ID NO: 8642 - protein, 25 aa, Homo Sapiens
MPRPRLLAALCGALLCAPSLLVALG

SEQ ID NO: 8643 - protein, 43 aa, Homo Sapiens
MAAEFDTFLASGLRWFCHVDDDNYVNPRALLQLLRAFPLARDV

SEQ ID NO: 8644 - protein, 132 aa, Homo Sapiens
MAAEFDTFLASGLRWFCHVDDDNYVNPRALLQLLRAFPLARDVYVGRPSLNRPIHASEPQPHNRTRLVQFWFATGGAGFCINRKLALKMAPWASGSRFMDTSALIRLPDDCTMGYIIECKLGGRLQPSPLFH

SEQ ID NO: 8645 - protein, 130 aa, Homo Sapiens
MQCRLPRGLAGALLTLLCMGLLCLRYHLNLSPQRVQGTPELSQPNPGPPKLQLHDVFIAVKTTRAFHRLRLELLLDTWVSRTREQGPTLWSPTAPRNTATQLCPARWLLSSTPSWPVGLGGSAMWTMTTM

SEQ ID NO: 8646 - protein, 321 aa, Homo Sapiens
MQCRLPRGLAGALLTLLCMGLLCLRYHLNLSPQRVQGTPELSQPNPGPPKLQLHDVFIAVKTTRAFHRLRLELLLDTWVSRTREQTFVFTDSPDKGLQERLGSHLVVTNCSAEHSHPALSCKMAAEFDTFLASGLRWFCHVDDDNYVNPRALLQLLRAFPLARDVYVGRPSLNRPIHASEPQPHNRTRLVQFWFATGGAGFCINRKLALKMAPWASGSRFMDTSALIRLPDDCTMGYIIECKLGGRLQPSPLFHSHLETLQLLRTAQLPEQVTLSYGVFEGKLNVIKLQGPFSPEEDPSRFRSLHCLLYPDTPWCPQLGAR

SEQ ID NO: 8647 - protein, 118 aa, Homo Sapiens
MQCRLPRGLAGALLTLLCMGLLCLRYHLNLSPQRVQGTPELSQPNPGPPKLQLHDVFIAVKTTRAFHRLRLELLLDTWVSRTREQTFVFTDSPDKGLQERLGSPDSSSLLQGPTLWSP

SEQ ID NO: 8648 - protein, 127 aa, Homo Sapiens
MQCRLPRGLAGALLTLLCMGLLCLRYHLNLSPQRVQGTPELSQPNPGPPKLQLHDVFIAVKTTRAFHRLRLELLLDTWVSRTREQVTNICLHRQPRQRPPGETGVPPCGHQLLRGTQPPSSVLQDGC

SEQ ID NO: 8649 - protein, 307 aa, Homo Sapiens
MQCRLPRGLAGALLTLLCMGLLCLRYHLNLSPQRVQGTPELSQPNPGPPKLQLHDVFIAVKTTRAFHRLRLELLLDTWVSRTREQVTRSHLVVTNCSAEHSHPALSCKMAAEFDTFLASGLRWFCHVDDDNYVNPRALLQLLRAFPLARDVYVGRPSLNRPIHASEPQPHNRTRLVQFWFATGGAGFCINRKLALKMAPWASGSRFMDTSALIRLPDDCTMGYIIECKLGGRLQPSPLFHSHLETLQLLRTAQLPEQVTLSYGVFEGKLNVIKLQGPFSPEEDPSRFRSLHCLLYPDTPWCPQLGAR

SEQ ID NO: 8650 - protein, 87 aa, Homo Sapiens
  misc_feature (1)..(1): Xaa can be any naturally occurring amino acid
XSHLETLQLLRTAQLPEQISLPPLSALSRYTLVSPAGCPMNPELLGKGWAETSGCALAPKVALWVPGKCLVIGSPWQGLRVVGKPRI

SEQ ID NO: 8651 - protein, 3065 aa, Homo Sapiens
MEEKQQIILANQDGGTVAGAAPTFFVILKQPGNGKTDQGILVTNQDACALASSVSSPVKSKGKICLPADCTVGGITVTLDNNSMWNEFYHRSTEMILTKQGRRMFPYCRYWITGLDSNLKYILVMDISPVDNHRYKWNGRWWEPSGKAEPHVLGRVFIHPESPSTGHYWMHQPVSFYKLKLTNNTLDQEGHIILHSMHRYLPRLHLVPAEKAVEVIQLNGPGVHTFTFPQTEFFAVTAYQNIQITQLKIDYNPFAKGFRDDGLNNKPQRDGKQKNSSDQEGNNISSSSGHRVRLTEGQGSEIQPGDLDPLSRGHETSGKGLEKTSLNIKRDFLGFMDTDSALSEVPQLKQEISECLIASSFEDDSRVASPLDQNGSFNVVIKEEPLDDYDYELGECPEGVTVKQEETDEETDVYSNSDDDPILEKQLKRHNKVDNPEADHLSSKWLPSSPSGVAKAKMFKLDTGKMPVVYLEPCAVTRSTVKISELPDNMLSTSRKDKSSMLAELEYLPTYIENSNETAFCLGKESENGLRKHSPDLRVVQKYPLLKEPQWKYPDISDSISTERILDDSKDSVGDSLSGKEDLGRKRTTMLKIATAAKVVNANQNASPNVPGKRGRPRKLKLCKAGRPPKNTGKSLISTKNTPVSPGSTFPDVKPDLEDVDGVLFVSFESKEALDIHAVDGTTEESSSLQASTTNDSGYRARISQLEKELIEDLKTLRHKQVIHPGLQEVGLKLNSVDPTMSIDLKYLGVQLPLAPATSFPFWNLTGTNPASPDAGFPFVSRTGKTNDFTKIKGWRGKFHSASASRNEGGNSESSLKNRSAFCSDKLDEYLENEGKLMETSMGFSSNAPTSPVVYQLPTKSTSYVRTLDSVLKKQSTISPSTSYSLKPHSVPPVSRKAKSQNRQATFSGRTKSSYKSILPYPVSPKQKYSHVILGDKVTKNSSGIISENQANNFVVPTLDENIFPKQISLRQAQQQQQQQQGSRPPGLSKSQVKLMDLEDCALWEGKPRTYITEERADVSLTTLLTAQASLKTKPIHTIIRKRAPPCNNDFCRLGCVCSSLALEKRQPAHCRRPDCMFGCTCLKRKVVLVKGGSKTKHFQRKAAHRDPVFYDTLGEEAREEEEGIREEEEQLKEKKKRKKLEYTICETEPEQPVRHYPLWVKVEGEVDPEPVYIPTPSVIEPMKPLLLPQPEVLSPTVKGKLLTGIKSPRSYTPKPNPVIREEDKDPVYLYFESMMTCARVRVYERKKEDQRQPSSSSSPSPSFQQQTSCHSSPENHNNAKEPDSEQQPLKQLTCDLEDDSDKLQEKSWKSSCNEGESSSTSYMHQRSPGGPTKLIEIISDCNWEEDRNKILSILSQHINSNMPQSLKVGSFIIELASQRKSRGEKNPPVYSSRVKISMPSCQDQDDMAEKSGSETPDGPLSPGKMEDISPVQTDALDSVRERLHGGKGLPFYAGLSPAGKLVAYKRKPSSSTSGLIQVASNAKVAASRKPRTLLPSTSNSKMASSSGTATNRPGKNLKAFVPAKRPIAARPSPGGVFTQFVMSKVGALQQKIPGVSTPQTLAGTQKFSIRPSPVMVVTPVVSSEPVQVCSPVTAAVTTTTPQVFLENTTAVTPMTAISDVETKETTYSSGATTTGVVEVSETNTSTSVTSTQSTATVNLTKTTGITTPVASVAFPKSLVASPSTITLPVASTASTSLVVVTAAASSSMVTTPTSSLGSVPIILSGINGSPPVSQRPENAAQIPVATPQVSPNTVKRAGPRLLLIPVQQGSPTLRPVSNTQLQGHRMVLQPVRSPSGMNLFRHPNGQIVQLLPLHQLRGSNTQPNLQPVMFRNPGSVMGIRLPAPSKPSETPPSSTSSSAFSVMNPVIQAVGSSSAVNVITQAPSLLSSGASFVSQAGTLTLRISPPEPQSFASKTGSETKITYSSGGQPVGTASLIPLQSGSFALLQLPGQKPVPSSILQHVASLQMKRESQNPDQKDETNSIKREQETKKVLQSEGEAVDPEANVIKQNSGAATSEETLNDSLEDRGDHLDEECLPEEGCATVKPSEHSCITGSHTDQDYKDVNEEYGARNRKSSKEKVAVLEVRTISEKASNKTVQNLSKVQHQKLGDVKVEQQKGFDNPEENSSEFPVTFKEESKFELSGSKVMEQQSNLQPEAKEKECGDSLEKDRERWRKHLKGPLTRKCVGASQECKKEADEQLIKETKTCQENSDVFQQEQGISDLLGKSGITEDARVLKTECDSWSRISNPSAFSIVPRRAAKSSRGNGHFQGHLLLPGEQIQPKQEKKGGRSSADFTVLDLEEDDEDDNEKTDDSIDEIVDVVSDYQSEEVDDVEKNNCVEYIEDDEEHVDIETVEELSEEINVAHLKTTAAHTQSFKQPSCTHISADEKAAERSRKAPPIPLKLKPDYWSDKLQKEAEAFAYYRRTHTANERRRRGEMRDLFEKLKITLGLLHSSKVSKSLILTRAFSEIQGLTDQADKLIGQKNLLTRKRNILIRKVSSLSGKTEEVVLKKLEYIYAKQQALEAQKRKKKMGSDEFDISPRISKQQEGSSASSVDLGQMFINNRRGKPLILSRKKDQATENTSPLNTPHTSANLVMTPQGQLLTLKGPLFSGPVVAVSPDLLESDLKPQVAGSAVALPENDDLFMMPRIVNVTSLATEGGLVDMGGSKYPHEVPDSKPSDHLKDTVRNEDNSLEDKGRISSRGNRDGRVTLGPTQVFLANKDSGYPQIVDVSNMQKAQEFLPKKISGDMRGIQYKWKESESRGERVKSKDSSFHKLKMKDLKDSSIEMELRKVTSAIEEAALDSSELLTNMEDEDDTDETLTSLLNEIAFLNQQLNDDSVGLAELPSSMDTEFPGDARRAFISKVPPGSRATFQVEHLGTGLKELPDVQGESDSISPLLLHLEDDDFSENEKQLAEPASEPDVLKIVIDSEIKDSLLSNKKAIDGGKNTSGLPAEPESVSSPPTLHMKTGLENSNSTDTLWRPMPKLAPLGLKVANPSSDADGQSLKVMPCLAPIAAKVGSVGHKMNLTGNDQEGRESKVMPTLAPVVAKLGNSGASPSSAGK

SEQ ID NO: 8652 - protein, 1086 aa, Homo Sapiens
MEEKQQIILANQDGGTVAGAAPTFFVILKQPGNGKTDQGILVTNQDACALASSVSSPVKSKGKICLPADCTVGGITVTLDNNSMWNEFYHRSTEMILTKQGRRMFPYCRYWITGLDSNLKYILVMDISPVDNHRYKWNGRWWEPSGKAEPHVLGRVFIHPESPSTGHYWMHQPVSFYKLKLTNNTLDQEGHIILHSMHRYLPRLHLVPAEKAVEVIQLNGPGVHTFTFPQTEFFAVTAYQNIQITQLKIDYNPFAKGFRDDGLNNKPQRDGKQKNSSDQEGNNISSSSGHRVRLTEGQGSEIQPGDLDPLSRGHETSGKGLEKTSLNIKRDFLGFMDTDSALSEVPQLKQEISECLIASSFEDDSRVASPLDQNGSFNVVIKEEPLDDYDYELGECPEGVTVKQEETDEETDVYSNSDDDPILEKQLKRHNKVDNPEADHLSSKWLPSSPSGVAKAKMFKLDTGKMPVVYLEPCAVTRSTVKISELPDNMLSTSRKDKSSMLAELEYLPTYIENSNETAFCLGKESENGLRKHSPDLRVVQKYPLLKEPQWKYPDISDSISTERILDDSKDSVGDSLSGKEDLGRKRTTMLKIATAAKVVNANQNASPNVPGKRGRPRKLKLCKAGRPPKNTGKSLISTKNTPVSPGSTFPDVKPDLEDVDGVLFVSFESKEALDIHAVDGTTEESSSLQASTTNDSGYRARISQLEKELIEDLKTLRHKQVIHPGLQEVGLKLNSVDPTMSIDLKYLGVQLPLAPATSFPFWNLTGTNPASPDAGFPFVSRTGKTNDFTKIKGWRGKFHSASASRNEGGNSESSLKNRSAFCSDKLDEYLENEGKLMETSMGFSSNAPTSPVVYQLPTKSTSYVRTLDSVLKKQSTISPSTSYSLKPHSVPPVSRKAKSQNRQATFSGRTKSSYKSILPYPVSPKQKYSHVILGDKVTKNSSGIISENQANNFVVPTLDENIFPKQISLRQAQQQQQQQQGSRPPGLSKSQVKLMDLEDCALWEGKPRTYITEERADVSLTTLLTAQASLKTKPIHTIIRKRAPPCNNDFCRLGCVCSSLALEKRQPAHCRRPDCMFGCTCLKRK

SEQ ID NO: 8653 - protein, 1138 aa, Homo Sapiens
MEEKQQIILANQDGGTVAGAAPTFFVILKQPGNGKTDQGILVTNQDACALASSVSSPVKSKGKICLPADCTVGGITVTLDNNSMWNEFYHRSTEMILTKQGRRMFPYCRYWITGLDSNLKYILVMDISPVDNHRYKWNGRWWEPSGKAEPHVLGRVFIHPESPSTGHYWMHQPVSFYKLKLTNNTLDQEGHIILHSMHRYLPRLHLVPAEKAVEVIQLNGPGVHTFTFPQTEFFAVTAYQNIQITQLKIDYNPFAKGFRDDGLNNKPQRDGKQKNSSDQEGNNISSSSGHRVRLTEGQGSEIQPGDLDPLSRGHETSGKGLEKTSLNIKRDFLGFMDTDSALSEVPQLKQEISECLIASSFEDDSRVASPLDQNGSFNVVIKEEPLDDYDYELGECPEGVTVKQEETDEETDVYSNSDDDPILEKQLKRHNKVDNPEADHLSSKWLPSSPSGVAKAKMFKLDTGKMPVVYLEPCAVTRSTVKISELPDNMLSTSRKDKSSMLAELEYLPTYIENSNETAFCLGKESENGLRKHSPDLRVVQKYPLLKEPQWKYPDISDSISTERILDDSKDSVGDSLSGKEDLGRKRTTMLKIATAAKVVNANQNASPNVPGKRGRPRKLKLCKAGRPPKNTGKSLISTKNTPVSPGSTFPDVKPDLEDVDGVLFVSFESKEALDIHAVDGTTEESSSLQASTTNDSGYRARISQLEKELIEDLKTLRHKQVIHPGLQEVGLKLNSVDPTMSIDLKYLGVQLPLAPATSFPFWNLTGTNPASPDAGFPFVSRTGKTNDFTKIKGWRGKFHSASASRNEGGNSESSLKNRSAFCSDKLDEYLENEGKLMETSMGFSSNAPTSPVVYQLPTKSTSYVRTLDSVLKKQSTISPSTSYSLKPHSVPPVSRKAKSQNRQATFSGRTKSSYKSILPYPVSPKQKYSHVILGDKVTKNSSGIISENQANNFVVPTLDENIFPKQISLRQAQQQQQQQQGSRPPGLSKSQVKLMDLEDCALWEGKPRTYITEERADVSLTTLLTAQASLKTKPIHTIIRKRAPPCNNDFCRLGCVCSSLALEKRQPAHCRRPDCMFGCTCLKRKVVLVKGGSKTKHFQRKAAHRDPVFYDTLGEEAREEEEGIREEEEQLKEKKKR

SEQ ID NO: 8654 - protein, 2856 aa, Homo Sapiens
MEEKQQIILANQDGGTVAGAAPTFFVILKQPGNGKTDQGILVTNQDACALASSVSSPVKSKGKICLPADCTVGGITVTLDNNSMWNEFYHRSTEMILTKQGRRMFPYCRYWITGLDSNLKYILVMDISPVDNHRYKWNGRWWEPSGKAEPHVLGRVFIHPESPSTGHYWMHQPVSFYKLKLTNNTLDQEGHIILHSMHRYLPRLHLVPAEKAVEVIQLNGPGVHTFTFPQTEFFAVTAYQNIQITQLKIDYNPFAKGFRDDGLNNKPQRDGKQKNSSDQEGNNISSSSGHRVRLTEGQGSEIQPGDLDPLSRGHETSGKGLEKTSLNIKRDFLGFMDTDSALSEVPQLKQEISECLIASSFEDDSRVASPLDQNGSFNVVIKEEPLDDYDYELGECPEGVTVKQEETDEETDVYSNSDDDPILEKQLKRHNKVDNPEADHLSSKWLPSSPSGVAKAKMFKLDTGKMPVVYLEPCAVTRSTVKISELPDNMLSTSRKDKSSMLAELEYLPTYIENSNETAFCLGKESENGLRKHSPDLRVVQKYPLLKEPQWKYPDISDSISTERILDDSKDSVGDSLSGKEDLGRKRTTMLKIATAAKVVNANQNASPNVPGKRGRPRKLKLCKAGRPPKNTGKSLISTKNTPVSPGSTFPDVKPDLEDVDGVLFVSFESKEALDIHAVDGTTEESSSLQASTTNDSGYRARISQLEKELIEDLKTLRHKQVIHPGLQEVGLKLNSVDPTMSIDLKYLGVQLPLAPATSFPFWNLTGTNPASPDAGFPFVSRTGKTNDFTKIKGWRGKFHSASASRNEGGNSESSLKNRSAFCSDKLDEYLENEGKLMETSMGFSSNAPTSPVVYQLPTKSTSYVRTLDSVLKKQSTISPSTSYSLKPHSVPPVSRKAKSQNRQATFSGRTKSSYKSILPYPVSPKQKYSHVILGDKVTKNSSGIISENQANNFVVPTLDENIFPKQISLRQAQQQQQQQQGSRPPGLSKSQVKLMDLEDCALWEGKPRTYITEERADVSLTTLLTAQASLKTKPIHTIIRKRAPPCNNDFCRLGCVCSSLALEKRQPAHCRRPDCMFGCTCLKRKVVLVKGGSKTKHFQRKAAHRDPVFYDTLGEEAREEEEGIREEEEQLKEKKKRKKLEYTICETEPEQPVRHYPLWVKVEGEVDPEPVYIPTPSVIEPMKPLLLPQPEVLSPTVKGKLLTGIKSPRSYTPKPNPVIREEDKDPVYLYFESMMTCARVRVYERKKEDQRQPSSSSSPSPSFQQQTSCHSSPENHNNAKEPDSEQQPLKQLTCDLEDDSDKLQEKSWKSSCNEGESSSTSYMHQRSPGGPTKLIEIISDCNWEEDRNKILSILSQHINSNMPQSLKVGSFIIELASQRKSRGEKNPPVYSSRVKISMPSCQDQDDMAEKSGSETPDGPLSPGKMEDISPVQTDALDSVRERLHGGKGLPFYAGLSPAGKLVAYKRKPSSSTSGLIQVASNAKVAASRKPRTLLPSTSNSKMASSSGTATNRPGKNLKAFVPAKRPIENAAQIPVATPQVSPNTVKRAGPRLLLIPVQQGSPTLRPVSNTQLQGHRMVLQPVRSPSGMNLFRHPNGQIVQLLPLHQLRGSNTQPNLQPVMFRNPGSVMGIRLPAPSKPSETPPSSTSSSAFSVMNPVIQAVGSSSAVNVITQAPSLLSSGASFVSQAGTLTLRISPPEPQSFASKTGSETKITYSSGGQPVGTASLIPLQSGSFALLQLPGQKPVPSSILQHVASLQMKRESQNPDQKDETNSIKREQETKKVLQSEGEAVDPEANVIKQNSGAATSEETLNDSLEDRGDHLDEECLPEEGCATVKPSEHSCITGSHTDQDYKDVNEEYGARNRKSSKEKVAVLEVRTISEKASNKTVQNLSKVQHQKLGDVKVEQQKGFDNPEENSSEFPVTFKEESKFELSGSKVMEQQSNLQPEAKEKECGDSLEKDRERWRKHLKGPLTRKCVGASQECKKEADEQLIKETKTCQENSDVFQQEQGISDLLGKSGITEDARVLKTECDSWSRISNPSAFSIVPRRAAKSSRGNGHFQGHLLLPGEQIQPKQEKKGGRSSADFTVLDLEEDDEDDNEKTDDSIDEIVDVVSDYQSEEVDDVEKNNCVEYIEDDEEHVDIETVEELSEEINVAHLKTTAAHTQSFKQPSCTHISADEKAAERSRKAPPIPLKLKPDYWSDKLQKEAEAFAYYRRTHTANERRRRGEMRDLFEKLKITLGLLHSSKVSKSLILTRAFSEIQGLTDQADKLIGQKNLLTRKRNILIRKVSSLSGKTEEVVLKKLEYIYAKQQALEAQKRKKKMGSDEFDISPRISKQQEGSSASSVDLGQMFINNRRGKPLILSRKKDQATENTSPLNTPHTSANLVMTPQGQLLTLKGPLFSGPVVAVSPDLLESDLKPQVAGSAVALPENDDLFMMPRIVNVTSLATEGGLVDMGGSKYPHEVPDSKPSDHLKDTVRNEDNSLEDKGRISSRGNRDGRVTLGPTQVFLANKDSGYPQIVDVSNMQKAQEFLPKKISGDMRGIQYKWKESESRGERVKSKDSSFHKLKMKDLKDSSIEMELRKVTSAIEEAALDSSELLTNMEDEDDTDETLTSLLNEIAFLNQQLNDDSVGLAELPSSMDTEFPGDARRAFISKVPPGSRATFQVEHLGTGLKELPDVQGESDSISPLLLHLEDDDFSENEKQLAEPASEPDVLKIVIDSEIKDSLLSNKKAIDGGKNTSGLPAEPESVSSPPTLHMKTGLENSNSTDTLWRPMPKLAPLGLKVANPSSDADGQSLKVMPCLAPIAAKVGSVGHKMNLTGNDQEGRESKVMPTLAPVVAKLGNSGASPSSAGK

SEQ ID NO: 8655 - protein, 3065 aa, Homo Sapiens; identical to SEQ ID NO: 8651

SEQ ID NO: 8656 - protein, 2856 aa, Homo Sapiens; identical to SEQ ID NO: 8654

SEQ ID NO: 8657 - protein, 61 aa, Homo Sapiens [sequence omitted]

SEQ ID NO: 8658 - protein, 83 aa, Homo Sapiens
  misc_feature (1)..(1): Xaa can be any naturally occurring amino acid
XDQEGNNISSSSGHRVRLTEGQGSEIQPGDLDPLSRGHETSGKGLEKTSLNIKRDFLGFMDTDSALSEVPQLKQEISEWYSFA

SEQ ID NO: 8659 - protein, 1174 aa, Homo Sapiens
  misc_feature (1)..(1): Xaa can be any naturally occurring amino acid
XLTCDLEDDSDKLQEKSWKSSCNEGESSSTSYMHQRSPGGPTKLIEIISDCNWEEDRNKILSILSQHINSNMPQSLKVNGKSYPQAKLLLGQMGALHPANRLAAYITGRLRPSVLDLSTLSTVISKVASNAKVAASRKPRTLLPSTSNSKMASSSGTATNRPGKNLKAFVPAKRPIAARPSPGGVFTQFVMSKVGALQQKIPGVSTPQTLAGTQKFSIRPSPVMVVTPVVSSEPVQVCSPVTAAVTTTTPQVFLENTTAVTPMTAISDVETKETTYSSGATTTGVVEVSETNTSTSVTSTQSTATVNLTKTTGITTPVASVAFPKSLVASPSTITLPVASTASTSLVVVTAAASSSMVTTPTSSLGSVPIILSGINGSPPVSQRPENAAQIPVATPQVSPNTVKRAGPRLLLIPVQQGSPTLRPVSNTQLQGHRMVLQPVRSPSGMNLFRHPNGQIVQLLPLHQLRGSNTQPNLQPVMFRNPGSVMGIRLPAPSKPSETPPSSTSSSAFSVMNPVIQAVGSSSAVNVITQAPSLLSSGASFVSQAGTLTLRISPPEPQSFASKTGSETKITYSSGGQPVGTASLIPLQSGSFALLQLPGQKPVPSSILQHVASLQMKRESQNPDQKDETNSIKREQETKKVLQSEGEAVDPEANVIKQNSGAATSEETLNDSLEDRGDHLDEECLPEEGCATVKPSEHSCITGSHTDQDYKDVNEEYGARNRKSSKEKVAVLEVRTISEKASNKTVQNLSKVQHQKLGDVKVEQQKGFDNPEENSSEFPVTFKEESKFELSGSKVMEQQSNLQPEAKEKECGDSLEKDRERWRKHLKGPLTRKCVGASQECKKEADEQLIKETKTCQENSDVFQQEQGISDLLGKSGITEDARVLKTECDSWSRISNPSAFSIVPRRAAKSSRGNGHFQGHLLLPGEQIQPKQEKKGGRSSADFTVLDLEEDDEDDNEKTDDSIDEIVDVVSDYQSEEVDDVEKNNCVEYIEDDEEHVDIETVEELSEEINVAHLKTTAAHTQSFKQPSCTHISADEKAAERSRKAPPIPLKLKPDYWSDKLQKEAEAFAYYRRTHTANERRRRGEMRDLFEKLKITLGLLHSSKVSKSLILTRAFSEIQGLTDQADKLIGQKNLLTRKRNILIRKVSSLSGKTEEVVLKKLEYIYAKQQALEA

SEQ ID NO: 8660 - protein, 447 aa, Homo Sapiens
MRFRIYKRKVLILTLVVAACGFVLWSSNGRQRKNEALAPPLLDAEPARGAGGRGGDHPSVAVGIRRVSNVSAASLVPAVPQPEADNLTLRYRSLVYQLNFDQTLRNVDKAGTWAPRELVLVVQVHNRPEYLRLLLDSLRKAQGIDNVLVIFSHDFWSTEINQLIAGVNFCPVLQVFFPFSIQLYPNEFPGSDPRDCPRDLPKNAALKLGCINAEYPDSFGHYREAKFSQTKHHWWWKLHFVWERVKILRDYAGLILFLEEDHYLAPDFYHVFKKMWKLKQQECPECDVLSLGTYSASRSFYGMADKVDVKTWKSTEHNMGLALTRNAYQKLIECTDTFCTYDDYNWDWTLQYLTVSCLPKFWKVLVPQIPRIFHAGDCGMHHKKTCRPSTQSAQIESLLNNNKQYMFPETLTISEKFTVVAISPPRKNGGWGDIRDHELCKSYRRLQ

SEQ ID NO: 8661 - protein, 108 aa, Homo Sapiens
MESCSCHPGSGVQWRDHGSLQLPPPGFKMKMRRYKLFLMFCMAGLCLISFLHFFKTLSYVTFPRELASLSPNLVSSFFWNNAPVTPQASPEPGGPDLLRTPLYSHSPL

SEQ ID NO: 8662 - protein, 161 aa, Homo Sapiens
MKMRRYKLFLMFCMAGLCLISFLHFFKTLSYVTFPRELASLSPNLVSSFFWNNAPVTPQASPEPGGPDLLRTPLYSHSPLLQPLPPSKAAEELHRVDLVLPEDTTEYFVRTKAGGVCFKPGTKMLERPPPGRPEEKPEGANGSSARRPPRYLLSARERTGG

SEQ ID NO: 8663 - protein, 533 aa, Homo Sapiens
MKMRRYKLFLMFCMAGLCLISFLHFFKTLSYVTFPRELASLSPNLVSSFFWNNAPVTPQASPEPGGPDLLRTPLYSHSPLLQPLPPSKAAEELHRVDLVLPEDTTEYFVRTKAGGVCFKPGTKMLERPPPGRPEEKPEGANGSSARRPPRYLLSARERTGGRGARRKWVECVCLPGWHGPSCGVPTVVQYSNLPTKERLVPREVPRRVINAINVNHEFDLLDVRFHELGDVVDAFVVCESNFTAYGEPRPLKFREMLTNGTFEYIRHKVLYVFLDHFPPGGRQDGWIADDYLRTFLTQDGVSRLRNLRPDDVFIIDDADEIPARDGVLFLKLYDGWTEPFAFHMRKSLYGFFWKQPGTLEVVSGCTVDMLQAVYGLDGIRLRRRQYYTMPNFRQYENRTGHILVQWSLGSPLHFAGWHCSWCFTPEGIYFKLVSAQNGDFPRWGDYEDKRDLNYIRGLIRTGGWFDGTQQEYPPADPSEHMYAPKYLLKNYDRFHYLLDNPYQEPRSTAAGGWRHRGPEGRPPARGKLDEAEV

SEQ ID NO: 8664 - protein, 423 aa, Homo Sapiens
MNYSITVSIVMGIPTVKREVKSYLIETLHSLIDNLYPEEKLDCVIVVFIGETDIDYVHGVVANLEKEFSKEISSGLVEVISPPESYYPDLTNLKETFGDSKERVRWRTKQNLDYCFLMMYAQEKGIYYIQLEDDIIVKQNYFNTIKNFALQLSSEEWMILEFSQLGFIGKMFQAPDLTLIVEFIFMFYKEKPIDWLLDHILWVKVCNPEKDAKHCDRQKANLRIRFRPSLFQHVGLHSSLSGKIQKLTDKDYMKPLLLKIHVNPPAEVSTSLKVYQGHTLEKTYMGEDFFWAITPIAGDYILFKFDKPVNVESYLFHSGNQEHPGDILLNTTVEVLPFKSEGLEISKETKDKRLEDGYFRIGKFENGVAEGMVDPSLNPISAFRLSVIQNSAVWAILNEQRVFSGWWQKSRDKAEGPQAPLLF

SEQ ID NO: 8665 - protein, 535 aa, Homo Sapiens
MRLRNGTVATALAFITSFLTLSWYTTWQNGKEKLIAYQREFLALKERLRIAEHRISQRSSELNTIVQQFKRVGAETNGSKDALNKFSDNTLKLLKELTSKKSLQVPSIYYHLPHLLKNEGSLQPAVQIGNGRTGVSIVMGIPTVKREVKSYLIETLHSLIDNLYPEEKLDCVIVVFIGETDIDYVHGVVANLEKEFSKEISSGLVEVISPPESYYPDLTNLKETFGDSKERVRWRTKQNLDYCFLMMYAQEKGIYYIQLEDDIIVKQNYFNTIKNFALQLSSEEWMILEFSQLGFIGKMFQAPDLTLIVEFIFMFYKEKPIDWLLDHILWVKVCNPEKDAKHCDRQKANLRIRFRPSLFQHVGLHSSLSGKIQKLTDKDYMKPLLLKIHVNPPAEVSTSLKVYQGHTLEKTYMGEDFFWAITPIAGDYILFKFDKPVNVESYLFHSGNQEHPGDILLNTTVEVLPFKSEGLEISKETKDKRLEDGYFRIGKFENGVAEGMVDPSLNPISAFRLSVIQNSAVWAILNEIHIKKATN

SEQ ID NO: 8666 - protein, 535 aa, Homo Sapiens; identical to SEQ ID NO: 8665

SEQ ID NO: 8667 - protein, 535 aa, Homo Sapiens; identical to SEQ ID NO: 8665

SEQ ID NO: 8668 - protein, 44 aa, Homo Sapiens
MRLRNGTVATALAFITSFLTLSWYTTWQNGKGKENDSENVHEMY

SEQ ID NO: 8669 - protein, 200 aa, Homo Sapiens
MGIPSVRREVHSYLTDTLHSLISELSPQEKEDSVIVVLIAETDSQYTSAVTENIKALFPTEIHSGLLEVISPSPHFYPDFSRLRESFGDPKERVRWRTKQNLDYCFLMMYAQSKGIYYVQLEDDIVAKPNYLSTMKNFALQQPSEDWMILEFSQLGFIGKMFKSLDLSLIVEFILMFYRDKPIDWLLDHILWVKVCNPEK

SEQ ID NO: 8670 - protein, 548 aa, Homo Sapiens
MRLRNGTFLTLLLFCLCAFLSLSWYAALSGQKGDVVDVYQREFLALRDRLHAAEQESLKRSKELNLVLDEIKRAVSERQALRDGDGNRTWGRLTEDPRLKPWNGSHRHVLHLPTVFHHLPHLLAKESSLQPAVRVGQGRTGVSVVMGIPSVRREVHSYLTDTLHSLISELSPQEKEDSVIVVLIAETDSQYTSAVTENIKALFPTEIHSGLLEVISPSPHFYPDFSRLRESFGDPKERVRWRTKQNLDYCFLMMYAQSKGIYYVQLEDDIVAKPNYLSTMKNFALQQPSEDWMILEFSQLGFIGKMFKSLDLSLIVEFILMFYRDKPIDWLLDHILWVKVCNPEKDAKHCDRQKANLRIRFKPSLFQHVGTHSSLAGKIQKLKDKDFGKQALRKEHVNPPAEVSTSLKTYQHFTLEKAYLREDFFWAFTPAAGDFIRFRFFQPLRLERFFFRSGNIEHPEDKLFNTSVEVLPFDNPQSDKEALQEGRTATLRYPRSPDGYLQIGSFYKGVAEGEVDPAFGPLEALRLSIQTDSPVWVILSEIFLKKAD

SEQ ID NO: 8671 - protein, 157 aa, Homo Sapiens
MSRVAGTRTDVNELLQRWTPRCVRWHTGGARRVALDRPLVTACLPPAGDVVDVYQREFLALRDRLHAAEQESLKRSKELNLVLDEIKRAVSERQALRDGDGNRTWGRLTEDPRLKPWNGSHRHVLHLPTVFHHLPHLLAKESSLQPAVRVGQGRTGD

SEQ ID NO: 8672 - protein, 563 aa, Homo Sapiens
MSRVAGTRTDVNELLQRWTPRCVRWHTGGARRVALDRPLVTACLPPAGDVVDVYQREFLALRDRLHAAEQESLKRSKELNLVLDEIKRAVSERQALRDGDGNRTWGRLTEDPRLKPWNGSHRHVLHLPTVFHHLPHLLAKESSLQPAVRVGQGRTGVSVVMGIPSVRREVHSYLTDTLHSLISELSPQEKEDSVIVVLIAETDSQYTSAVTENIKALFPTEIHSGLLEVISPSPHFYPDFSRLRESFGDPKERVRWRTKQNLDYCFLMMYAQSKGIYYVQLEDDIVAKPNYLSTMKNFALQQPSEDWMILEFSQLGFIGKMFKSLDLSLIVEFILMFYRDKPIDWLLDHILWVKVCNPEKDAKHCDRQKANLRIRFKPSLFQHVGTHSSLAGKIQKLKDKDFGKQALRKEHVNPPAEVSTSLKTYQHFTLEKAYLREDFFWAFTPAAGDFIRFRFFQPLRLERFFFRSGNIEHPEDKLFNTSVEVLPFDNPQSDKEALQEGRTATLRYPRSPDGYLQIGSFYKGVAEGEVDPAFGPLEALRLSIQTDSPVWVILSEIFLKKAD

SEQ ID NO: 8673 - protein, 373 aa, Homo Sapiens
  misc_feature (1)..(1): Xaa can be any naturally occurring amino acid
XEDSVIVVLIAETDSQYTSAVTENIKALFPTEIHSGLLEVISPSPHFYPDFSRLRESFGDPKERVRWRTKQNLDYCFLMMYAQSKGIYYVQLEDDIVAKPNYLSTMKNFALQQPSEDWMILEFSQLGFIGKMFKSLDLSLIVEFILMFYRDKPIDWLLDHILWVKVCNPEKDAHCDRQKANLRIRFKPSLFQHVGTHSSLAGKIQKLKDKDFGKQALRKEHVNPPAEVSTSLKTYQHFTLEKAYLREDFFWAFTPAAGDFIRFRFFQPLRLERFFFRSGNIEHPEDKLFNTSVEVLPFDNPQSDKEALQEGRTATLRYPRSPDGYLQIGSFYKGVAEGEVDPAFGPLEALRLSIQTDSPVWVILSEIFLKKAD

SEQ ID NO: 8674 - protein, 429 aa, Homo Sapiens
  misc_feature (1)..(1): Xaa can be any naturally occurring amino acid
XEQESLKRSKELNLVLDEIKRAVSERQALRDGDGNRTWGRLTEDPRLKPWNGSHRHVLHLPTVFHHLPHLLAKESSLQPAVRVGQGRTGVSVVMGIPSVRREVHSYLTDTLHSLISELSPQEKEDSVIVVLIAETDSQYTSAVTENIKALFPTEIHSGLLEVISPSPHFYPDFSRLRESFGDPKERVRWRTKQNLDYCFLMMYAQSKGIYYVQLEDDIVAKPNYLSTMKNFALQQPSEDWMILEFSQLGFIGQRLWKAGAAEGACEPASRGEHEPEDIPALHPGESLPARGLLLGLHPCRGGLHPLPLLPTSKTGAVLLPQWEHRAPGGQALQHVCGGAALRQPSVRQGGPAGGPHRHPPVPSEPRRLPPDRLLLQGSGRGRGGPSLRPSGSTAPLDPDGLPCVGDSERDLPEKGRLSCGLLRVPCGQP

SEQ ID NO: 8675 - protein, 322 aa, Homo Sapiens
  misc_feature (1)..(1): Xaa can be any naturally occurring amino acid
XFPTEIHSGLLEVISPSPHFYPDFSRLRESFGDPKERVRWRTKQNLDYCFLMMYAQSKGIYYVQLEDDIVAKPNYLSTMKNFALQQPSEDWMILEFSQLGFIGKMFKSLDLSLIVEFILMFYRDKPIDWLLDHILWVKVCNPEKDAAGIKVGAHAITAVPPPLQDKDFGKQALRKEHVNPPAEVSTSLKTYQHFTLEKAYLREDFFWAFTPAAGDFIRFRFFQPLRLERFFFRSGNIEHPEDKLFNTSVEVLPFDNPQSDKEALQEGRTATLRYPRSPDGYLQIGSFYKGVAEGEVDPAFGPLEALRLSIQTDSPVWVILSE

SEQ ID NO: 8676 - protein, 240 aa, Homo Sapiens
  misc_feature (1)..(1): Xaa can be any naturally occurring amino acid
XKMFKSLDLSLIVEFILMFYRDKPIDWLLDHILWVKVCNPEKDAKHCDRQKANLRIRFKPSLFQHVGTHSSLAGKIQKLKDKDFGKQALRKEHVNPPAEVSTSLKTYQHFTLEKAYLREDFFWAFTPAAGDFIRFRFFQPLRLERGNIEHPEDKLFNTSVEVLPFDNPQSDKEALQEGRTATLRYPRSPDGYLQIGSFYKGVAEGEVDPAFGPLEALRLSIQTDSPVWVILSEIFLKKAD

SEQ ID NO: 8677 - protein, 150 aa, Homo Sapiens
  misc_feature (1)..(1): Xaa can be any naturally occurring amino acid
XLLLFCLCAFLSLSWYAALSGQKGDVVDVYQREFLALRDRLHAAEQESLKRSKELNLVLDEIKRAVSERQALRDGDGNRTWGRLTGPPIEAVERLTPARAAPAHRLPSPATPAGQGEQSAARGARGPGPHRSVGGDGHPERAARGALVPD

SEQ ID NO: 8678 - protein, 245 aa, Homo Sapiens
  misc_feature (1)..(1): Xaa can be any naturally occurring amino acid
XQYTSAVTENIKALFPTEIHSGLLEVISPSPHFYPDFSRLRESFGDPKERVRWRTKQNLDYCFLMMYAQSKGIYYVQLEDDIVAKPNYLSTMKNFALQQPSEDWMILEFSQLGFIGKMFKSLDLSLIVEFILMFYRDKPIDWLLDHILWVKVCNPEKDAKHCDRQKANLRIRFKPSLFQHVGTHSSLAGKIQKLKDKDFGKQALRKEHVNPPAEWEHRAPGGQALQHVCGGAALRQPSVRQGGPA

SEQ ID NO: 8679 - protein, 307 aa, Homo Sapiens
  misc_feature (1)..(1): Xaa can be any naturally occurring amino acid
XTSAVTENIKALFPTEIHSGLLEVISPSPHFYPDFSRLRESFGDPKERVRWRTKQNLDYCFLMMYAQSKGIYYVQLEDDIVAKPNYLSTMKNFALQQPSEDWMILEFSQLGFIARGHSLLAGWQDPETEGQRLWKAGAAEGACEPASRGEHEPEDIPALHPGESLPARGLLLGLHPCRGGLHPLPLLPTSKTGAVLLPQWEHRAPGGQALQHVCGGAALRQPSVRQGGPAGGPHRHPPVPSEPRRLPPDRLLLQGSGRGRGGPSLRPSGSTAPLDPDGLPCVGDSERDLPEKGRLSCGLLRVPCGQP

SEQ ID NO: 8680 - protein, 113 aa, Homo Sapiens
MRTKQVNLLITLVAVALFSFSCFSIYRITQTISFALGISTVNRGNYSYLKQTLTSVVSRMTLSQEKDSVVIVLVADSNEDYLHSVVKMITKKFKRQVRSGSLEVISIPAFLYS

SEQ ID NO: 8681 - protein, 166 aa, Homo Sapiens
MRTKQVNLLITLVAVALFSFSCFSIYRITQTNNQLINCRNHILEFKENMLHLRNKTEKNTQEMMKVLNRMKYEITKREILSGNLGKLFRSEDLTHFVRFFLMFYKEKPIDWLLNDIFQVKVCDAGEDLRNCMKRKKQIRIQYKPSLFQHVGIHSSFPRKEQYEKKI

SEQ ID NO: 8682 - protein, 375 aa, Homo Sapiens
MRTKQVNLLITLVAVALFSFSCFSIYRITQTNNQLINCRNHILEFKENMLHLRNKTEKNTQEMMKVLNRMKYEITKREILSGNLVAQKADILNKNETVSNTFEDLKFFFPHLRKEGRIYPDVIIGKGKTGVSFALGISTVNRGNYSYLKQTLTSVVSRMTLSQEKDSVVIVLVADSNEDYLHSVVKMITKKFKRQVRSGSLEVISIPAFLYSSMLNAKHLAEASQKLASWRIKQVLDFCILLLYAQPKAKYYLQLEDDIIAKEMYFTKITDFVGNISSNNWFFIEFSMLGFIGKLFRSEDLTHFVRFFLMFYKEKPIDWLLNDIFQVKVCDAGEDLRNCMKRKKQIRIQYKPSLFQHVGIHSSFPRKEQYEKDVY

SEQ ID NO: 8683 - protein, 374 aa, Homo Sapiens
MRTKQVNLLITLVAVALFSFSCFSIYRITQTNNQLINCRNHILEFKENMLHLRNKTEKNTQEMMKVLNRMKYEITKREILSGNLVAQKADILNKNETVSNTFEDLKFFFPHLRKEGRIYPDVIIGKGKTGVSFALGISTVNRGNYSYLKQTLTSVVSRMTLSQEKDSVVIVLVADSNEDYLHSVVKMITKKFKRQVRSGSLEVISIPAFLYSSMLNAKHLAEASQKLASWRIKQVLDFCILLLYAQPKAKYYLQLEDDIIAKEMYFTKITDFVGNISSNNWFFIEFSMLGFIGKLFRSEDLTHFVRFFLMFYKEKPIDWLLNDIFQVKVCDAGEDLRNCMKRKKQIRIQYKPSLFQHVGIHSSFPRKEQYEKKI

SEQ ID NO: 8684 - protein, 36 aa, Homo Sapiens
MRTKQVNLLITLVAVALFSFSCFSIYRITQTNSKGK

SEQ ID NO: 8685 - protein, 91 aa, Homo Sapiens
  misc_feature (1)..(1): Xaa can be any naturally occurring amino acid
XNISSNNWFFIEFSMLGFIGKLFRSEDLTHFVRFFLMFYKEKPIDWLLNDIFQRNCMKRKKQIRIQYKPSLFQHVGIHSSFPRKEQYEKKI

SEQ ID NO: 8686 - protein, 283 aa, Homo Sapiens
METGPEDPSSMPEESSPRRTPQSIPYQDLPHLVNADGQYLFCRYWKPTGTPKALIFVSHGAGEHSGRYEELARMLMGLDLLVFAHDHVGHGQSEGERMVVSDFHVFVRDVLQHVDSMQKDYPGLPVFLLGHSMGGAIAILTAAERPGHFAGMVLISPLVLANPESATTFKVDIYNSDPLICRAGLKVCFGIQLLNAVSRVERALPKLTVPFLLLQGSADRLCDSKGAYLLMELAKSQDKTLKIYEGAYHVLHKELPEVTNSVFHEINMWVSQRTATAGTASPP

SEQ ID NO: 8687 - protein, 313 aa, Homo Sapiens
METGPEDPSSMPEESSPRRTPQSIPYQDLPHLVNADGQYLFCRYWKPTGTPKALIFVSHGAGEHSGRYEELARMLMGLDLLVFAHDHVGHGQSEGERMVVSDFHVFVRDVLQHVDSMQKDYPGLPVFLLGHSMGGAIAILTAAERPGHFAGMVLISPLVLANPESATTFKVLAAKVLNLVLPNLSLGPIDSSVLSRNKTEVDIYNSDPLICRAGLKVCFGIQLLNAVSRVERALPKLTVPFLLLQGSADRLCDSKGAYLLMELAKSQDKTLKIYEGAYHVLHKELPEVTNSVFHEINMWVSQRTATAGTASPP

SEQ ID NO: 8688 - protein, 89 aa, Homo Sapiens
MLMGLDLLVFAHDHVGHGQSEGERMVVSDFHVFVRDVLQHVDSMQKDYPGLPVFLLGHSMGGAIAILTAAERPGHFAGMVLISPLVLAN

SEQ ID NO: 8689 - protein, 77 aa, Homo Sapiens
MPEESSPRRTPQSIPYQDLPHLVNADGQYLFCRYWKPTGTPKALIFVSHGAGEHSGRYEELARMLMGLDLLVFAHDH

SEQ ID NO: 8690 - protein, 303 aa, Homo Sapiens
MPEESSPRRTPQSIPYQDLPHLVNADGQYLFCRYWKPTGTPKALIFVSHGAGEHSGRYEELARMLMGLDLLVFAHDHVGHGQSEGERMVVSDFHVFVRDVLQHVDSMQKDYPGLPVFLLGHSMGGAIAILTAAERPGHFAGMVLISPLVLANPESATTFKVLAAKVLNLVLPNLSLGPIDSSVLSRNKTEVDIYNSDPLICRAGLKVCFGIQLLNAVSRVERALPKLTVPFLLLQGSADRLCDSKGAYLLMELAKSQDKTLKIYEGAYHVLHKELPEVTNSVFHEINMWVSQRTATAGTASPP

SEQ ID NO: 8691 - protein, 303 aa, Homo Sapiens; identical to SEQ ID NO: 8690

SEQ ID NO: 8692 - protein, 277 aa, Homo Sapiens
MQTRFRRIFPWKDASTKRMPEFIHFSPLKPYKGREWEKAGSEHVLETHLLPVGHGQSEGERMVVSDFHVFVRDVLQHVDSMQKDYPGLPVFLLGHSMGGAIAILTAAERPGHFAGMVLISPLVLANPESATTFKVLAAKVLNLVLPNLSLGPIDSSVLSRNKTEVDIYNSDPLICRAGLKVCFGIQLLNAVSRVERALPKLTVPFLLLQGSADRLCDSKGAYLLMELAKSQDKTLKIYEGAYHVLHKELPEVTNSVFHEINMWVSQRTATAGTASPP

SEQ ID NO: 8693 - protein, 197 aa, Homo Sapiens
PVGHGQSEGERMVVSDFHVFVRDVLQHVDSMQKDYPGLPVFLLGHSMGGAIAILTAAERPGHFAGMVLISPLVLANPESATTFKVDIYNSDPLICRAGLKVCFGIQLLNAVSRVERALPKLTVPFLLLQGSADRLCDSKGAYLLMELAKSQDKTLKIYEGAYHVLHKELPEVTNSVFHEINMWVSQRTATAGTASPP

SEQ ID NO: 8694 - protein, 155 aa, Homo Sapiens [sequence omitted]

SEQ ID NO: 8695 - protein, 209 aa, Homo Sapiens
  misc_feature (1)..(1): Xaa can be any naturally occurring amino acid
XLQGGAIAILTAAERPGHFAGMVLISPLVLANPESATTFKDYSRILKHLMEKASRMLKFWIPRPFWVLAAKVLNLVLPNLSLGPIDSSVLSRNKTEVDIYNSDPLICRAGLKVCFGIQLLNAVSRVERALPKLTVPFLLLQGSADRLCDSKGAYLLMELAKSQDKTLKIYEGAYHVLHKELPEVTNSVFHEINMWVSQRTATAGTASPP

SEQ ID NO: 8696 - protein, 103 aa, Homo Sapiens
MKSLILLAILAALAVVTLCYESHESMESYELNPFINRRNANTFISPQQRWRAKVQERIRERSKPVHELNREACDDYRLCERYAMVYGYNAAYNRYFRKRRGTK

SEQ ID NO: 8697 - protein, 128 aa, Homo Sapiens
MKSLILLAILAALAVVTLCYGEWQKEENFGFDIVSVLSLNWHRAQESHESMESYELNPFINRRNANTFISPQQRWRAKVQERIRERSKPVHELNREACDDYRLCERYAMVYGYNAAYNRYFRKRRGTK

SEQ ID NO: 8698 - protein, 74 aa, Homo Sapiens
  misc_feature (1)..(1): Xaa can be any naturally occurring amino acid
XSHESMESYELRSENALSLSTSSIGKPVMTTDFANATPWFMDTMLPIIATSGSAEGPNETEGRKKISFFLEAGT

SEQ ID NO: 8699 - protein, 77 aa, Homo Sapiens
MAGNSILLAAVSILSACQQSYFALQVGKARLKYKVTPPAVTGSPEFERVFRAHFCYLSGSGVHIWPSPILLGIFRSC

SEQ ID NO: 8700 - protein, 147 aa, Homo Sapiens
MAGNSILLAAVSILSACQQSYFALQVGKARLKYKVTPPAVTGSPEFERVFRAQQNCVEFYPIFIITLWMAGWYFNQVFATCLGLVYIYGRHLYFWGYSEAAKKRITGFRLSLGILALLTLLGALGIANSFLDEYLDLNIAKKLRRQF

SEQ ID NO: 8701 - protein, 147 aa, Homo Sapiens; identical to SEQ ID NO: 8700

SEQ ID NO: 8702 - protein, 147 aa, Homo Sapiens; identical to SEQ ID NO: 8700

SEQ ID NO: 8703 - protein, 46 aa, Homo Sapiens
MARSLVCLGVIILLSAFSGPGVRGGPMPKLADRKLCADQECSHPIS

SEQ ID NO: 8704 - protein, 131 aa, Homo Sapiens
MARSLVCLGVIILLSAFSGPGVRGGPMPKLADRKLCADQECSHPISMAVALQDYMAPDCRFLTIHRGQVVYVFSKLKGRGRLFWGGSVQGDYYGDLAARLGYFPSSIVREDQTLKPGKVDVKTDKWDFYCQ

SEQ ID NO: 8705 - protein, 131 aa, Homo Sapiens; identical to SEQ ID NO: 8704

SEQ ID NO: 8706 - protein, 131 aa, Homo Sapiens; identical to SEQ ID NO: 8704

SEQ ID NO: 8707 - protein, 95 aa, Homo Sapiens
  misc_feature (1)..(1): Xaa can be any naturally occurring amino acid
XRSLVCLGVIILLSAFSGPGVRGGPMPKLADRKLCADQECSHPISMAVALQDYMAPDCRFLTIHRGQVVFREITMEIWLLAWAISPVALSERTRP

SEQ ID NO: 8708 - protein, 58 aa, Homo Sapiens
  misc_feature (1)..(1): Xaa can be any naturally occurring amino acid
XSLVCLGVIILLSAFSGPGVRGGPMPKLADRKLCADQECSRSGRLLWRSGCSPGLFPQ

SEQ ID NO: 8709 - protein, 1412 aa, Homo Sapiens
MAKFGVHRILLLAISLTKCLESTKLLADLKKCGDLECEALINRVSAMRDYRGPDCRYLNFTKGEEISVYVKLAGEREDLWAGSKGKEFGYFPRDAVQIEEVFISEEIQMSTKESDFLCLLGVSYTFDNEDSELNGDYGENIYPYEEDKDEKSSIYESDFQIEPGFYATYESTLFEDQVPALEAPEDIGSTSESKDWEEVVVESMEQDRIPEVHVPPSSAVSGVKEWFGLGGEQAEEKAFESVIEPVQESSFRSRKIAVEDENDLEELNNGEPQTEHQQESESEIDSVPKTQSELASESEHIPKPQSTGWFGGGFTSYLGFGDEDTGLELIAEESNPPLQDFPNSISSDKEATVPCTEILTEKKDTITNDSLSLKPSWFDFGFAILGFAYAKEDKIMLDDRKNEEDGGADEHEHPLTSELDPEKEQEIETIKIIETEDQIDKKPVSEKTDESDTIPYLKKFLYNFDNPWNFQNIPKETELPFPKQILDQNNVIENEETGEFSIDNYPTDNTKVMIFKSSYSLSDMVSNIELPTRIHEEVYFEPSSSKDSDENSKPSVDTEGPALVEIDRSVENTLLNSQMVSTDNSLSSQNYISQKEDASEFQILKYLFQIDVYDFMNSAFSPIVILTERVVAALPEGMRPDSNLYGFPWELVICAAVVGFFAVLFFLWRSFRSVRSRLYVGREKKLALMLSGLIEEKSKLLEKFSLVQKEYEGYEVESSLKDASFEKEATEAQSLEATCEKLNRSNSELEDEILCLEKELKEEKSKHSEQDELMADISKRIQSLEDESKSLKSQVAEAKMTFKIFQMNEERLKIAIKDALNENSQLQESQKQLLQEAEVWKEQVSELNKQKVTFEDSKVHAEQVLNDKESHIKTLTERLLKMKDWAAMLGEDITDDDNLELEMNSESENGAYLDNPPKGALKKLIHAAKLNASLKTLEGERNQIYIQLSEVDKTKEELTEHIKNLQTEQASLQSENTHFENENQKLQQKLKVMTELYQENEMKLHRKLTVEENYRLEKEEKLSKVDEKISHATEELETYRKRAKDLEEELERTIHSYQGQIISHEKKAHDNWLAARNAERNLNDLRKENAHNRQKLTETELKFELLEKDPYALDVPNTAFGREHSPYGPSPLGWPSSETRAFLSPPTLLEGPLRLSPLLPGGGGRGSRGPGNPLDHQITNERGESSCDRLTDPHRAPSDTGSLSPPWDQDRRMMFPPPGQSYPDSALPPQRQDRFCSNSGRLSGPAELRSFNMPSLDKMDGSMPSEMESSRNDTKDDLGNLNVPDSSLPAENEATGPGFVPPPLAPIRGPLFPVDARGPFLRRGPPFPPPPPGAMFGASRDYFPPGDFPGPPPAPFAMRNVYPPRGFPPYLPPRPGFFPPPPHSEGRSEFPSGLIPPSNEPATEHPEPQQET

SEQ ID NO: 8710 - protein, 1907 aa, Homo Sapiens
MAAAPGLLVWLLVLRLPWRVPGQLDPSTGRRFSEHKLCADDECSMLMYRGEALEDFTGPDCRFVNFKKGDPVYVYYKLARGWPEVWAGSVGRTFGYFPKDLIQVVHEYTKEELQVPTDETDFVCFDGGRDDFHNYNVEELLGFLELYNSAATDSEKAVEKTLQDMEKNPELSKEREPEPEPVEANSEESDSVFSENTEDLQEQFTTQKHHSHANSQANHAQGEQASFESFEEMLQDKLKVPESENNKTSNSSQVSNEQDKIDAYKLLKKEMTLDLKTKFGSTADALVSDDETTRLVTSLEDDFDEELDTEYYAVGKEDEENQEDFDELPLLTFTDGEDMKTPAKSGVEKYPTDKEQNSNEEDKVQLTVPPGIKNDDKNILTTWGDTIFSIVTGGEETRDTMDLESSSSEEEKEDDDDALVPDSKQGKPQSATDYSDPDNVDDGLFIVDIPKTNNDKEVNAEHHIKGKGRGVQESKRGLVQDKTELEDENQEGMTVHSSVHSNNLNSMPAAEKGKDTLKSAYDDTENDLKGAAIHISKGMLHEEKPGEQILEGGSESESAQKAAGNQMNDRKIQQESLGSAPLMGDDHPNASRDSVEGDALVNGAKLHTLSVEHQREELKEELVLKTQNQPRFSSPDEIDLPRELEDEVPILGRNLPWQQERDVAATASKQMSEKIRLSEGEAKEDSLDEEFFHHKAMQGTEVGQTDQTDSTGGPAFLSKVEEDDYPSEELLEDENAINAKRSKEKNPGNQGRQFDVNLQVPDRAVLGTIHPDPEIEESKQETSMILDSEKTSETAAKGVNTGGREPNTMVEKERPLADKKAQRPFERSDFSDSIKIQTPELGEVFQNKDSDYLKNDNPEEHLKTSGLAGEPEGELSKEDHENTEKYMGTESQGSAAAEPEDDSFHWTPHTSVEPGHSDKREDLLIISSFFKEQQSLQRFQKYFNVHELEALLQEMSSKLKSAQQESLPYNMEKVLDKVFRASESQILSIAEKMLDTRVAENRDLGMNENNIFEEAAVLDDIQDLIYFVRYKHSTAEETATLVMAPPLEEGLGGAMEEMQPLHEDNFSREKTAELNVQVPEEPTHLDQRVIGDTHASEVSQKPNTEKDLDPGPVTTEDTPMDAIDANKQPETAAEEPASVTPLENAILLIYSFMFYLTKSLVATLPDDVQPGPDFYGLPWKPVFITAFLGIASFAIFLWRTVLVVKDRVYQVTEQQISEKLKTIMKENTELVQKLSNYEQKIKESKKHVQETRKQNMILSDEAIKYKDKIKTLEKNQEILDDTAKNLRVMLESEREQNVKNQDLISENKKSIEKLKDVISMNASEFSEVQIALNEAKLSEEKVKSECHRVQEENARLKKKKEQLQQEIEDWSKLHAELSEQIKSFEKSQKDLEVALTHKDDNINALTNCITQLNLLECESESEGQNKGGNDSDELANGEVGGDRNEKMKNQIKQMMDVSRTQTAISVVEEDLKLLQLKLRASVSTKCNLEDQVKKLEDDRNSLQAAKAGLEDECKTLRQKVEILNELYQQKEMALQKKLSQEEYERQEREHRLSAADEKAVSAAEEVKTYKRRIEEMEDELQKTERSFKNQIATHEKKAHENWLKARAAERAIAEEKREAANLRHKLLELTQKMAMLQEEPVIVKPMPGKPNTQNPPRRGPLSQNGSFGPSPVSGGECSPPLTVEPPVRPLSATLNRRDMPRSEFGSVDGPLPHPRWSAEASGKPSPSDPGSGTATMMNSSSRGSSPTRVLDEGKVNMAPKGPPPFPGVPLMSTPMGGPVPPPIRYGPPPQLCGPFGPRPLPPPFGPGMRPPLGLREFAPGVPPGRRDLPLHPRGFLPGHAPFRPLGSLGPREYFIPGTRLPPPTHGPQEYPPPPAVRDLLPSGSRDEPPPASQSTSQDCSQALKQSP

SEQ ID NO: 8711 - protein, 500 aa, Homo Sapiens
MAAAPGLLVWLLVLRLPWRVPGQLDPSTGRRFSEHKLCADDECSMLMYRGEALEDFTGPDCRFVNFKKGDPVYVYYKLARGWPEVWAGSVGRTFGYFPKDLIQVVHEYTKEELQVPTDETDFVCFDGGRDDFHNYNVEELLGFLELYNSAATDSEKAVEKTLQDMEKNPELSKEREPEPEPVEANSEESDSVFSENTEDLQEQFTTQKHHSHANSQANHAQGEQASFESFEEMLQDKLKVPESENNKTSNSSQVSNEQDKIDAYKLLKKEMTLDLKTKFGSTADALVSDDETTRLVTSLEDDFDEELDTEYYAVGKEDEENQEDFDELPLLTFTDGEDMKTPAKSGVEKYPTDKEQNSNEEDKVQLTVPPGIKNDDKNILTTWGDTIFSIVTGGEETRDTMDLESSSSEEEKEDDDDALVPDSKQGKPQSATDYSDPDNVDDGLFIVDIPKTNNDKEVNAEHHIKGKGRGVQESKRGLVQDKTELEDENQEGFKTEPIKL

SEQ ID NO: 8712 - protein, 785 aa, Homo Sapiens
MDSVPATVPSIAATPGDPELVGPLSVLYAAFIAKLLELVATLPDDVQPGPDFYGLPWKPVFITAFLGIASFAIFLWRTVLVVKDRVYQVTEQQISEKLKTIMKENTELVQKLSNYEQKIKESKKHVQETRKQNMILSDEAIKYKDKIKTLEKNQEILDDTAKNLRVMLESEREQNVKNQDLISENKKSIEKLKDVISMNASEFSEVQIALNEAKLSEEKVKSECHRVQEENARLKKKKEQLQQEIEDWSKLHAELSEQIKSFEKSQKDLEVALTHKDDNINALTNCITQLNLLECESESEGQNKGGNDSDELANGEVGGDRNEKMKNQIKQMMDVSRTQTAISVVEEDLKLLQLKLRASVSTKCNLEDQVKKLEDDRNSLQAAKAGLEDECKTLRQKVEILNELYQQKEMALQKKLSQEEYERQEREHRLSAADEKAVSAAEEVKTYKRRIEEMEDELQKTERSFKNQIATHEKKAHENWLKARAAERAIAEEKREAANLRHKLLELTQKMAMLQEEPVIVKPMPGKPNTQNPPRRGPLSQNGSFGPSPVSGGECSPPLTVEPPVRPLSATLNRRDMPRSEFGSVDGPLPHPRWSAEASGKPSPSDPGSGTATMMNSSSRGSSPTRVLDEGKVNMAPKGPPPFPGVPLMSTPMGGPVPPPIRYGPPPQLCGPFGPRPLPPPFGPGMRPPLGLREFAPGVPPGRRDLPLHPRGFLPGHAPFRPLGSLGPREYFIPGTRLPPPTHGPQEYPPPPAVRDLLPSGSRDEPPPASQSTSQDCSQALKQSP

SEQ ID NO: 8713 - protein, 1016 aa, Homo Sapiens
  misc_feature (1)..(1): Xaa can be any naturally occurring amino acid
XLVPDSKQGKPQSATDYSDPDNVDDGLFIVDIPKTNNDKEVNAEHHIKGKGRGVQESKRGLVQDKTELEDENQEGMTVHSSVHSNNLNSMPAAEKGKDTLKSAYDDTENDLKGAAIHISKGMLHEEKPGEQILEGGSESESAQKAAGNQMNDRKIQQESLGSAPLMGDDHPNASRDSVEGDALVNGAKLHTLSVEHQREELKEELVLKTQNQPRFSSPDEIDLPRELEDEVPILGRNLPWQQERDVAATASKQMSEKIRLSEGEAKEDSLDEEFFHHKAMQGTEVGQTDQTDSTGGPAFLSKVEEDDYPSEELLEDENAINAKRSKEKNPGNQGRQFDVNLQVPDRAVLGTIHPDPEIEESKQETSMILDSEKTSETAAKGVNTGGREPNTMVEKERPLADKKAQRPFERSDFSDSIKIQTPELGEVFQNKDSDYLKNDNPEEHLKTSGLAGEPEGELSKEDHENTEKYMGTESQGSAAAEPEDDSFHWTPHTSVEPGHSDKREDLLIISSFFKEQQSLQRFQKYFNVHELEALLQEMSSKLKSAQQESLPYNMEKVLDKVFRASESQILSIAEKMLDTRVAENRDLGMNENNIFEEAAVLDDIQDLIYFVRYKHSTAEETATLVMAPPLEEGLGGAMEEMQPLHEDNFSREKTAELNVQVPEEPTHLDQRVIGDTHASEVSQKPNTEKDLDPGPVTTEDTPMDAIDANKQPETAAEEPASVTPLENAILLIYSFMFYLTKSLVATLPDDVQPGPDFYGLPWKPVFITAFLGIASFAIFLWRTVLVVKDRVYQVTEQQISEKLKTIMKENTELVQKLSNYEQKIKESKKHVQETRKQNMILSDEAIKYKDKIKTLEKNQEILDDTAKNLRVMLESEREQNVKNQDLLQQEIEDWSKLHAELSEQIKSFEKSQKDLEVALTHKDDNINALTNCITQLNLLECESESEGQNKGGNDSDELANGEVGGDRNEKMKNQIKQMMDVSRTQTAISVVEEDLKLLQLKLRASVSTKCNLEDQV

SEQ ID NO: 8714 - protein, 107 aa, Homo Sapiens
  misc_feature (1)..(1): Xaa can be any naturally occurring amino acid
XSAEASGKPSPSDPGSGTATMMNSSSRGSSPTRVLDEGKVNMAPKGPPPFPGVPLMSTPMGGPVPPPIRYGPPPQLCGPFGPRPLPPPFDKDGRPGTVAHACNPSTL

SEQ ID NO: 8715 - protein, 388 aa, Homo Sapiens
MFRLNSLSALAELAVGSRWYHGGSQPIQIRRRLMMVAFLGASAVTASTGLLWKRAHAESPPCVDNLKSDIGDKGKNKDEGDVCNHEKKTADLAPHPEEKKKKRSGFRDRKVMEYENRIRAYSTPDKIFRYFATLKVISEPGEAEVFMTPEDFVRSITPNEKQPEHLGLDQYIIKRFDGKARFSKKKILHRVRKKSKGSILQRRKKALQKEERTRHGSTKHNEQEVRRTIMEWLEKAGVQWHHLSSLQPPTPWFKRFFCLSLLSSWDYRHTPPCPANFFIFSRDRVSPCWPGWSRYPDLMIRPPWLRKVLGLQKISQEREKFADEGSIFYTLGECGLISFSDYIFLTTVLSTPQRNFEIAFKMFDLNGDGEVDMEEFEQVQSIIRSQTS

SEQ ID NO: 8716 - protein, 480 aa, Homo Sapiens
MFRLNSLSALAELAVGSRWYHGGSQPIQIRRRLMMVAFLGASAVTASTGLLWKRAHAESPPCVDNLKSDIGDKGKNKDEGDVCNHEKKTADLAPHPEEKKKKRSGFRDRKVMEYENRIRAYSTPDKIFRYFATLKVISEPGEAEVFMTPEDFVRSITPNEKQPEHLGLDQYIIKRFDGKDFWQKISQEREKFADEGSIFYTLGECGLISFSDYIFLTTVLSTPQRNFEIAFKMFDLNGDGEVDMEEFEQVQSIIRSQTSMGMRHRDRPTTGNTLKSGLCSALTTYFFGADLKGKLTIKNFLEFQRKLQHDVLKLEFERHDPVDGRITERQFGGMLLAYSGVQSKKLTAMQRQLKKHFKEGKGLTFQEVENFFTFLKNINDVDTALSFYHMAGASLDKVTMQQVARTVAKVELSDHVCDVVFALFDCDGNGELSNKEFVSIMKQRLMRGLEKPKDMGFTRLMQAMWKCAQETAWDFALPKQ

SEQ ID NO: 8717 - protein, 482 aa, Homo Sapiens
MFRLNSLSALAELAVGSRWYHGGSQPIQIRRRLMMVAFLGASAVTASTGLLWKRAHAESPPCVDNLKSDIGDKGKNKDEGDVCNHEKKTADLAPHPEEKKKKRSGFRDRKVMEYENRIRAYSTPDKIFRYFATLKVISEPGEAEVFMTPEDFVRSITPNEKQPEHLGLDQYIIKRFDGKDFWQTEKISQEREKFADEGSIFYTLGECGLISFSDYIFLTTVLSTPQRNFEIAFKMFDLNGDGEVDMEEFEQVQSIIRSQTSMGMRHRDRPTTGNTLKSGLCSALTTYFFGADLKGKLTIKNFLEFQRKLQHDVLKLEFERHDPVDGRITERQFGGMLLAYSGVQSKKLTAMQRQLKKHFKEGKGLTFQEVENFFTFLKNINDVDTALSFYHMAGASLDKVTMQQVARTVAKVELSDHVCDVVFALFDCDGNGELSNKEFVSIMKQRLMRGLEKPKDMGFTRLMQAMWKCAQETAWDFALPKQ

SEQ ID NO: 8718 - protein, 476 aa, Homo Sapiens
MFRLNSLSALAELAVGSRWYHGGSQPIQIRRRLMMVAFLGASAVTASTGLLWKRAHAESPPCVDNLKSDIGDKGKNKDEGDVCNHEKKTADLAPHPEEKKKKRSGFRDRKVMEYENRIRAYSTPDKIFRYFATLKVISEPGEAEVFMTPEDFVRSITPNEKQPEHLGLDQYIIKRFDGKKISQEREKFADEGSIFYTLGECGLISFSDYIFLTTVLSTPQRNFEIAFKMFDLNGDGEVDMEEFEQVQSIIRSQTSMGMRHRDRPTTGNTLKSGLCSALTTYFFGADLKGKLTIKNFLEFQRKLQHDVLKLEFERHDPVDGRITERQFGGMLLAYSGVQSKKLTAMQRQLKKHFKEGKGLTFQEVENFFTFLKNINDVDTALSFYHMAGASLDKVTMQQVARTVAKVELSDHVCDVVFALFDCDGNGELSNKEFVSIMKQRLMRGLEKPKDMGFTRLMQAMWKCAQETAWDFALPKQ

SEQ ID NO: 8719 - protein, 478 aa, Homo Sapiens [sequence omitted]

SEQ ID NO: 8720 - protein, 154 aa, Homo Sapiens
MKRIYTYRRAKEIFKDTPKAPQRNFEIAFKMFDLNGDGEVDMEEFEQVQSIIRSQTSMGMRHRDRPTTGNTLKSGLCSALTTYFFGADLKGKLTIKNFLEFQRKLQHDVLKLEFERHDPVDGRITERQFGGMLLAYSGVQSKKLTAMQRQLKKH

SEQ ID NO: 8721 - protein, 278 aa, Homo Sapiens
MKRIYTYRRAKEIFKDTPKAPQRNFEIAFKMFDLNGDGEVDMEEFEQVQSIIRSQTSMGMRHRDRPTTGNTLKSGLCSALTTYFFGADLKGKLTIKNFLEFQRKLQHDVLKLEFERHDPVDGRITERQFGGMLLAYSGVQSKKLTAMQRQLKKHFKEGKGLTFQEVENFFTFLKNINDVDTALSFYHMAGASLDKVTMQQVARTVAKVELSDHVCDVVFALFDCDGNGELSNKEFVSIMKQRLMRGLEKPKDMGFTRLMQAMWKCAQETAWDFALPKQ

SEQ ID NO: 8722 - protein, 212 aa, Homo Sapiens
MVAFLGASAVTASTGLLWKRAHAESPPCVDNLKSDIGDKGKNKDEGDVCNHEKKTADLAPHPEEKKKKRSGFRDRKVMEYENRIRAYSTPDKIFRYFATLKVISEPGEAEVFMTPEDFVRSITPNEKQPEHLGLDQYIIKRFDGKKISQEREKFADEGSIFYTLGECGLISFSDYIFLTTVLSTPQRNFEIAFKMFDLNGDGEVDMEEFEQA

SEQ ID NO: 8723 - protein, 278 aa, Homo Sapiens
MVSLKAKLNHLRQSMLKQKAPQRNFEIAFKMFDLNGDGEVDMEEFEQVQSIIRSQTSMGMRHRDRPTTGNTLKSGLCSALTTYFFGADLKGKLTIKNFLEFQRKLQHDVLKLEFERHDPVDGRITERQFGGMLLAYSGVQSKKLTAMQRQLKKHFKEGKGLTFQEVENFFTFLKNINDVDTALSFYHMAGASLDKVTMQQVARTVAKVELSDHVCDVVFALFDCDGNGELSNKEFVSIMKQRLMRGLEKPKDMGFTRLMQAMWKCAQETAWDFALPKQ

SEQ ID NO: 8724 - protein, 246 aa, Homo Sapiens
  misc_feature (1)..(1): Xaa can be any naturally occurring amino acid
XNEKQPEHLGLDQYIIKRFDGKKISQEREKFADEGSIFYTLGECGLISFSDYIFLTTVLSTPQRNFEIAFKMFDLNGDGEVDMEEFEQVQSIIRSQTSMGMRHRDRPTTGNTLKSGLCSALTTYFFGADLKGKLTIKNFLEFQRKLQHDVLKLEFERHDPVDGRITERQFGGMLLAYSGVQSKKLTAMQRQLKKHFKEGKGLTFQEVENFFTFLKNINDVDTALSFYHMAGASLDKGKGTIFMGRR

SEQ ID NO: 8725 - protein, 512 aa, Homo Sapiens
MAEPSVESSSPGGSATSDDHEFDPSADMLVHDFDDERTLEEEEMMEGETNFSSEIEDLAREGDMPIHELLSLYGYGSTVRLPEEDEEEEEEEEEGEDDEDADNDDNSGCSGENKEENIKDSSGQEDETQSSNDDPSQSVASQDAQEIIRPRRCKYFDTNSEVEEESEEDEDYIPSEDWKKEIMVGSMFQAEIPVGICRYKENEKVYENDDQLLWDPEYLPEDKVIIFLKDASRRTGDEKGVEAIPEGSHIKDNEQALYELVKCNFDTEEALRRLRFNVKAAREELSVWTEEECRNFEQGLKAYGKDFHLIQANKVRTRSVGECVAFYYMWKKSERYDFFAQQTRFGKKKYNLHPGVTDYMDRLLDESESAASSRAPSPPPTASNSSNSQSEKEDGTVSTANQNGVSSNGPGEILNKEEVKVEGLHINGPTGGNKKPLHADMDTNGYETDNLTTDPKLAHMTARNENDFDEKSERPAKRRRVNSNGKESPGSSEFFQEAVSHGKFEELENTDD

SEQ ID NO: 8726 - protein, 433 aa, Homo Sapiens
MAEPSVESSSPGGSATSDDHEFDPSADMLVHDFDDERTLEEEEMMEGETNFSSEIEDLAREGDMPIHELLSLYGYGSTVRLPEEDEEEEEEEEEGEDDEDADNDDNSGCSGENKEENIKDSSGQEDETQSSNDDPSQSVASQDAQEIIRPRRCKYFDTNSEVEEESEEDEDYIPSEDWKKEIMVGSMFQAEIPVGICRYKENEKVYENDDQLLWDPEYLPEDKVIIFLKDASRRTGDEKGVEAIPEGSHIKDNEQALYELVKCNFDTEEALRRLRFNVKAAREELSVWTEEECRNFEQGLKAYGKDFHLIQANKVRTRSVGECVAFYYMWKKSERYDFFAQQTRFGKKKYNLHPGVTDYMDRLLDESESAASSRAPSPPPTASNSSNSQSEKEDGTVSTANQNGVSSNGPGILQMLLPVHFSAISSRANAFLK

SEQ ID NO: 8727 - protein, 486 aa, Homo Sapiens
MDGASSGGGGSSEGGGGSSGSGYGVVARFSQCLAEFRTWLRTNWLRFNADKTDVMLPSVESSSPGGSATSDDHEFDPSADMLVHDFDDERTLEEEEMMEGETNFSSEIEDLAREGDMPIHELLSLYGYGSTVRLPEEDEEEEEEEEEGEDDEDADNDDNSGCSGENKEENIKDSSGQEDETQSSNDDPSQSVASQDAQEIIRPRRCKYFDTNSEVEEESEEDEDYIPSEDWKKEIMVGSMFQAEIPVGICRYKENEKVYENDDQLLWDPEYLPEDKVIIFLKDASRRTGDEKGVEAIPEGSHIKDNEQALYELVKCNFDTEEALRRLRFNVKAAREELSVWTEEECRNFEQGLKAYGKDFHLIQANKVRTRSVGECVAFYYMWKKSERYDFFAQQTRFGKKKYNLHPGVTDYMDRLLDESESAASSRAPSPPPTASNSSNSQSEKEDGTVSTANQNGVSSNGPGILQMLLPVHFSAISSRANAFLK

SEQ ID NO: 8728 - protein, 565 aa, Homo Sapiens
MDGASSGGGGSSEGGGGSSGSGYGVVARFSQCLAEFRTWLRTNWLRFNADKTDVMLPSVESSSPGGSATSDDHEFDPSADMLVHDFDDERTLEEEEMMEGETNFSSEIEDLAREGDMPIHELLSLYGYGSTVRLPEEDEEEEEEEEEGEDDEDADNDDNSGCSGENKEENIKDSSGQEDETQSSNDDPSQSVASQDAQEIIRPRRCKYFDTNSEVEEESEEDEDYIPSEDWKKEIMVGSMFQAEIPVGICRYKENEKVYENDDQLLWDPEYLPEDKVIIFLKDASRRTGDEKGVEAIPEGSHIKDNEQALYELVKCNFDTEEALRRLRFNVKAAREELSVWTEEECRNFEQGLKAYGKDFHLIQANKVRTRSVGECVAFYYMWKKSERYDFFAQQTRFGKKKYNLHPGVTDYMDRLLDESESAASSRAPSPPPTASNSSNSQSEKEDGTVSTANQNGVSSNGPGEILNKEEVKVEGLHINGPTGGNKKPLHADMDTNGYETDNLTTDPKLAHMTARNENDFDEKSERPAKRRRVNSNGKESPGSSEFFQEAVSHGKFEELENTDD

SEQ ID NO: 8729 - protein, 450 aa, Homo Sapiens
MFMFNWFTDCLWTLFLSNYQPSVESSSPGGSATSDDHEFDPSADMLVHDFDDERTLEEEEMMEGETNFSSEIEDLAREGDMPIHELLSLYGYGSTVRLPEEDEEEEEEEEEGEDDEDADNDDNSGCSGENKEENIKDSSGQEDETQSSNDDPSQSVASQDAQEIIRPRRCKYFDTNSEVEEESEEDEDYIPSEDWKKEIMVGSMFQAEIPVGICRYKENEKVYENDDQLLWDPEYLPEDKVIIFLKDASRRTGDEKGVEAIPEGSHIKDNEQALYELVKCNFDTEEALRRLRFNVKAAREELSVWTEEECRNFEQGLKAYGKDFHLIQANKVRTRSVGECVAFYYMWKKSERYDFFAQQTRFGKKKYNLHPGVTDYMDRLLDESESAASSRAPSPPPTASNSSNSQSEKEDGTVSTANQNGVSSNGPGILQMLLPVHFSAISSRANAFLK

SEQ ID NO: 8730 - protein, 470 aa, Homo Sapiens
MFMFNWFTDCLWTLFLSNYQPSVESSSPGGSATSDDHEFDPSADMLVHDFDDERTLEEEEMMEGETNFSSEIEDLAREGDMPIHELLSLYGYGSTVRLPEEDEEEEEEEEEGEDDEDADNDDNSGCSGENKEENIKDSSGQEDETQSSNDDPSQSVASQDAQEIIRPRRCKYFDTNSEVEEESEEDEDYIPSEDWKKEIMVGSMFQAEIPVGICRYKENEKVYENDDQLLWDPEYLPEDKVIIFLKDASRRTGDEKGVEAIPEGSHIKDNEQALYELVKCNFDTEEALRRLRFNVKAAREELSVWTEEECRNFEQGLKAYGKDFHLIQANKVRTRSVGECVAFYYMWKKSERYDFFAQQTRFGKKKYNLHPGVTDYMDRLLDESESAASSRAPSPPPTASNSSNSQSEKEDGTVSTANQNGVSSNGPGEILNKEEVKVEGLHINGPTGILQMLLPVHFSAISSRANAFLK

SEQ ID NO: 8731 - protein, 529 aa, Homo Sapiens
MFMFNWFTDCLWTLFLSNYQPSVESSSPGGSATSDDHEFDPSADMLVHDFDDERTLEEEEMMEGETNFSSEIEDLAREGDMPIHELLSLYGYGSTVRLPEEDEEEEEEEEEGEDDEDADNDDNSGCSGENKEENIKDSSGQEDETQSSNDDPSQSVASQDAQEIIRPRRCKYFDTNSEVEEESEEDEDYIPSEDWKKEIMVGSMFQAEIPVGICRYKENEKVYENDDQLLWDPEYLPEDKVIIFLKDASRRTGDEKGVEAIPEGSHIKDNEQALYELVKCNFDTEEALRRLRFNVKAAREELSVWTEEECRNFEQGLKAYGKDFHLIQANKVRTRSVGECVAFYYMWKKSERYDFFAQQTRFGKKKYNLHPGVTDYMDRLLDESESAASSRAPSPPPTASNSSNSQSEKEDGTVSTANQNGVSSNGPGEILNKEEVKVEGLHINGPTGGNKKPLHADMDTNGYETDNLTTDPKLAHMTARNENDFDEKSERPAKRRRVNSNGKESPGSSEFFQEAVSHGKFEELENTDD

SEQ ID NO: 8732 - protein, 81 aa, Homo Sapiens
MFMFNWFTDCLWTLFLSNYQPSVESSSPGGSATSDDHEFDPSADMLVHDFDDERTLEEEEMMEGETNFSSEIEDLARVNNM

SEQ ID NO: 8733 - protein, 370 aa, Homo Sapiens
MPIHELLSLYGYGSTVRLPEEDEEEEEEEEEGEDDEDADNDDNSGCSGENKEENIKDSSGQEDETQSSNDDPSQSVASQDAQEIIRPRRCKYFDTNSEVEEESEEDEDYIPSEDWKKEIMVGSMFQAEIPVGICRYKENEKVYENDDQLLWDPEYLPEDKVIIFLKDASRRTGDEKGVEAIPEGSHIKDNEQALYELVKCNFDTEEALRRLRFNVKAAREELSVWTEEECRNFEQGLKAYGKDFHLIQANKVRTRSVGECVAFYYMWKKSERYDFFAQQTRFGKKKYNLHPGVTDYMDRLLDESESAASSRAPSPPPTASNSSNSQSEKEDGTVSTANQNGVSSNGPGILQMLLPVHFSAISSRANAFLK

SEQ ID NO: 8734 - protein, 70 aa, Homo Sapiens
MFQPLSSPDSHRKGTGFGLGIVFSLTFFKRRMWPLAFGSGMGLGMAYSNCQHDFQAPYLLHGKYVKEQEQ

SEQ ID NO: 8735 - protein, 71 aa, Homo Sapiens
RKWDRCLADAVVKIGTGFGLGIVFSLTFFKRRMWPLAFGSGMGLGMAYSNCQHDFQAPYLLHGKYVKEQEQ

SEQ ID NO: 8736 - protein, 46 aa, Homo Sapiens
  misc_feature (1)..(1): Xaa can be any naturally occurring amino acid
XKWDRCLADAVVKIEMGFHHVAQAGLELRVQTIHLPWPPNVPGLQA

SEQ ID NO: 8737 - protein, 286 aa, Homo Sapiens
MCLFQLCGLVRYMEFGPPTVNDKLMRFFDHCEKFLTEVEKNATALYHVEAFKTGPEMQNILKKVAATLQVPVNDLNADLIQVAFFTCSFDLAIKGVKSPWCDVFDIDDAKVLEYLNDLKQYWKRGYGYTINSRSSCTLFQDIFQHLDKAVEQKQRSQPISSPVILQFGHAETLLPLLSLMGYFKDKEPLTAYNYKKQMHRKFRSGLIVPYASNLIFVLYHCENAKTPKEQFRVQMLLNEKVLPLAYSQETVSFYEDLKNHYKDILQSCQTSEECELARANSTSDEL

SEQ ID NO: 8738 - protein, 312 aa, Homo Sapiens
MLRAPGCLLRTSVAPAAALAAALLSSLARCSLLEPRDPVASSLSPYFGTKTRYEDVNPVLLSGPEAPWRDPELLEGTCTPVQLVALIRHGTRYPTVKQIRKLRQLHGLLQARGSRDGGASSTGSRDLGAALADWPLWYADWMDGQLVEKGRQDMRQLALRLASLFPALFSRENYGRLRLITSSKHRCMDSSAAFLQGLWQHYHPGLPPPDVADMEFGPPTVNDKLMRFFDHCEKFLTEVEKNATALYHVEAFKTGPEMQNILKKVAATLQVPVNDLNAGLSQFLLQSSSSLVMQRLFFHCFLSWATSKTRNP

SEQ ID NO: 8739 - protein, 487 aa, Homo Sapiens
MLRAPGCLLRTSVAPAAALAAALLSSLARCSLLEPRDPVASSLSPYFGTKTRYEDVNPVLLSGPEAPWRDPELLEGTCTPVQLVALIRHGTRYPTVKQIRKLRQLHGLLQARGSRDGGASSTGSRDLGAALADWPLWYADWMDGQLVEKGRQDMRQLALRLASLFPALFSRENYGRLRLITSSKHRCMDSSAAFLQGLWQHYHPGLPPPDVADMEFGPPTVNDKLMRFFDHCEKFLTEVEKNATALYHVEAFKTGPEMQNILKKVAATLQVPVNDLNADLIQVAFFTCSFDLAIKGVKSPWCDVFDIDDAKVLEYLNDLKQYWKRGYGYTINSRSSCTLFQDIFQHLDKAVEQKQRSQPISSPVILQFGHAETLLPLLSLMGYFKDKEPLTAYNYKKQMHRKFRSGLIVPYASNLIFVLYHCENAKTPKEQFRVQMLLNEKVLPLAYSQETVSFYEDLKNHYKDILQSCQTSEECELARANSTSDEL

SEQ ID NO: 8740 - protein, 146 aa, Homo Sapiens
MKLPILRSNPEDQILYQTERYNEETFGYEVPIKEEGDYVLVLKFAEVYFAQSQQKVFDVRLNGHVVVKDLDIFDRVGHSTAHDEIIPMSIRKGKLSVQGEVSTFTGKLYIEFVKGYYDNPKVCALYIMAGTVDDVPKLQPHPGLEK

SEQ ID NO: 8741 - protein, 217 aa, Homo Sapiens
MLGAWAVEGTAVALLRLLLLLLPPAIRGPGLGVAGVAGAAGAGLPESVIWAVNAGGEAHVDVHGIHFRKDPLEGRVGRASDYGMKLPILRSNPEDQILYQTERYNEETFGYEVPIKEEGDYVLVLKFAEVYFAQSQQKMYQSFSLIRDWRRKKRKKKKKNMMKGLISKNRPIRTGCSQAPAHPTPMPRTTAASCFPSWWPSESSFQPSSASAGCENK

SEQ ID NO: 8742 - protein, 292 aa, Homo Sapiens
MLGAWAVEGTAVALLRLLLLLLPPAIRGPGLGVAGVAGAAGAGLPESVIWAVNAGGEAHVDVHGIHFRKDPLEGRVGRASDYGMKLPILRSNPEDQILYQTERYNEETFGYEVPIKEEGDYVLVLKFAEVYFAQSQQKVFDVRLNGHVVVKDLDIFDRVGHSTAHDEIIPMSIRKGKLSVQGEVSTFTGKLYIEFVKGYYDNPKVCALYIMAGTVDDVPKLQPHPGLEKKEEEEEEEEYDEGSNLKKQTNKNRVQSGPRTPNPYASDNSSLMFPILVAFGVFIPTLFCLCRL

SEQ ID NO: 8743 - protein, 173 aa, Homo Sapiens
  misc_feature (1)..(1): Xaa can be any naturally occurring amino acid
XNEETFGYEVPIKEEGDYVLVLKFAEVYFAQSQQKVFDVRLNGHVVVKDLDIFDRVGHSTAHDEIIPMSIRKGKLSVQGEVSTFTGKLYIEFVKMYQSFSLIRDWRRKKRKKKKKNMMKGLISKNRPIRTGCSQAPAHPTPMPRTTAASCFPSWWPSESSFQPSSASAGCENK

SEQ ID NO: 8744 - protein, 115 aa, Homo Sapiens
MVSRKAVAALLVVHVAAMLASQTEAFVPIFTYGELQRMQEKERNKGQKKSLSVWQRSGEEGPVDPAEPIREEENEMIKLTAPLEIGMRMNSRQLEKYPATLEGLLSEMLPQHAAK

SEQ ID NO: 8745 - protein, 114 aa, Homo Sapiens
MVSRKAVAALLVVHVAAMLASQTEAFVPIFTYGELQRMQEKERNKGQKKSLSVWQRSGEEGPVDPAEPIREEENEMIKLTAPLEIGMRMNSRQLEKYPATLEGLLSEMLPQHAK

SEQ ID NO: 8746 - protein, 108 aa, Homo Sapiens
MVSRKAVAALLVVHVAAMLASQTEAFVPIFTYGELQRMQEKERNKGQKKSLSVWQRSGEEGPVDPAEPIREEENEMIKLTAPLEIGMRMNSRQLEKYPATLEGLLTAK

SEQ ID NO: 8747 - protein, 919 aa, Homo Sapiens
MAADVFMCSPRRPRSRGRQVLLKPQVSEDDDDSDTDEPSPPPASGAATPARAHASAAPPPPRAGPGREEPPRRQQIIHSGHFMVSSPHREHPPKKGYDFDTVNKQTCQTYSFGKTSSCHLSIDASLTKLFECMTLAYSGKLVSPKWKNFKGLKLQWRDKIRLNNAIWRAWYMQYLEKRKNPVCHFVTPLDGSVDVDEHRRPEAITTEGKYWKSRIEIVIREYHKWRTYFKKRLQQHKDEDLSSLVQDDDMLYWHKHGDGWKTPVPMEEDPLLDTDMLMSEFSDTLFSTLSSHQPVAWPNPREIAHLGNADMIQPGLIPLQPNLDFMDTFEPFQDLFSSSRSIFGSMLPASASAPVPDPNNPPAQESILPTTALPTVSLPDSLIAPPTAPSLAHMDEQGCEHTSRTEDPFIQPTDFGPSEPPLSVPQPFLPVFTMPLLSPSPAPPPISPVLPLVPPPATALNPPAPPTFHQPQKFAGVNKAPSVITHTASATLTHDAPATTFSQSQGLVITTHHPAPSAAPCGLALSPVTRPPQPRLTFVHPKPVSLTGGRPKQPHKIVPAPKPEPVSLVLKNARIAPAAFSGQPQAVIMTSGPLKREGMLASTVSQSNVVIAPAAIARAPGVPEFHSSILVTDLGHGTSSPPAPVSRLFPSTAQDPLGKGEQVPLHGGSPQVTVTGPSRDCPNSGQASPCASEQSPSPQSPQNNCSGKSDPKNVAALKNRQMKHISAEQKRRFNIKMCFDMLNSLISNNSKLTSHAITLQKTVEYITKLQQERGQMQEEARRLREEIEELNATIISCQQLLPATGVPVTRRQFDHMKDMFDEYVKTRTLQNWKFWIFSIIIKPLFESFKGMVSTSSLEELHRTALSWLDQHCSLPILRPMVLSTLRQLSTSTSILTDPAQLPEQASKAVTRIGKRLGES

SEQ ID NO: 8748 - protein, 217 aa, Homo Sapiens
MDEQGCEHTSRTEDPFIQPTDFGPSEPPLSVPPPISPVLPLVPPPATALNPPAPPTFHQPQKFAGVNKAPSVITHTASATLTHDAPATTFSQSQGLVITTHHPAPSAAPCGLALSPVTRPPQPRLTFVHPKPVSLTGGRPKQPHKIVPAPKPEPVSLVLKNARIAPGEPGGETQCGAPPDPEGCFPIPKAFKLVTTTTTLVCTCMRTHIHLNETKVS

SEQ ID NO: 8749 - protein, 526 aa, Homo Sapiens
MDEQGCEHTSRTEDPFIQPTDFGPSEPPLSVPQPFLPVFTMPLLSPSPAPPPISPVLPLVPPPATALNPPAPPTFHQPQKFAGVNKAPSVITHTASATLTHDAPATTFSQSQGLVITTHHPAPSAAPCGLALSPVTRPPQPRLTFVHPKPVSLTGGRPKQPHKIVPAPKPEPVSLVLKNARIAPAAFSGQPQAVIMTSGPLKREGMLASTVSQSNVVIAPAAIARAPGVPEFHSSILVTDLGHGTSSPPAPVSRLFPSTAQDPLGKGEQVPLHGGSPQVTVTGPSRDCPNSGQASPCASEQSPSPQSPQNNCSGKSDPKNVAALKNRQMKHISAEQKRRFNIKMCFDMLNSLISNNSKLTSHAITLQKTVEYITKLQQERGQMQEEARRLREEIEELNATIISCQQLLPATGVPVTRRQFDHMKDMFDEYVKTRTLQNWKFWIFSIIIKPLFESFKGMVSTSSLEELHRTALSWLDQHCSLPILRPMVLSTLRQLSTSTSILTDPAQLPEQASKAVTRIGKRLGES

SEQ ID NO: 8750 - protein, 74 aa, Homo Sapiens
MLYWHKHGDGWKTPVPMEEDPLLDTDMLMSEFSDTLFSTLSSHQPVAWPNPREIAHLGNADMIQPGLIPLQPNL

SEQ ID NO: 8751 - protein, 308 aa, Homo Sapiens
MVLGALVALSSCPLGLRTSCLTGREAASAGWARPCGPGLHLNILLILAAAFSGQPQAVIMTSGPLKREGMLASTVSQSNVVIAPAAIARAPGVPEFHSSILVTDLGHGTSSPPAPVSRLFPSTAQDPLGKGEQVPLHGGSPQVTVTGPSRDCPNSGQASPCASEQSPSPQSPQNNCSGKSDPKNVAALKNRQMKHISAEQKRRFNIKMCFDMLNSLISNNSKLTSHAITLQKTVEYITKLQQERGQMQEEARRLREEIEELNATIISCQQLLPATGVPVTRRQFDHMKDMFDEYVKTRTLQNWKFWIV

SEQ ID NO: 8752 - protein, 171 aa, Homo Sapiens
  misc_feature (1)..(1): Xaa can be any naturally occurring amino acid
XHGGSPQVTVTGPSRDCPNSGQASPCASEQSPSPQSPQNNCSGKSDPKNVAALKNRQMKHISAEQKRRFNIKMCFDMLNSLISNNSKLTSHAITLQKTVEYITKLQQERGQMQEEARRLREEIEELNATIIDPFSVGRYFPAPGERSTPVQPPSGLQSPAPLRACLFFNHT

SEQ ID NO: 8753 - protein, 213 aa, Homo Sapiens
MAGALAGLAAGLQVPRVAPSPDSDSDTDSEDPSLRRSAGGLLRSQVIHSGHFMVSSPHSDSLPRRRDQEGSVGPSDFGPRSIDPTLTRLFECLSLAYSGKLVSPKWKNFKGLKLLCRDKIRLNNAIWRAWYIQYFFTNSRLPQPPMPSNFPEPPSFSPVVDSLFSSGTLGPEVPPASSAMTHLSGHSRLQARNSCPGPLDSSAFLSSDFLLPE

SEQ ID NO: 8754 - protein, 721 aa, Homo Sapiens
MAGALAGLAAGLQVPRVAPSPDSDSDTDSEDPSLRRSAGGLLRSQVIHSGHFMVSSPHSDSLPRRRDQEGSVGPSDFGPRSIDPTLTRLFECLSLAYSGKLVSPKWKNFKGLKLLCRDKIRLNNAIWRAWYIQYVKRRKSPVCGFVTPLQGPEADAHRKPEAVVLEGNYWKRRIELPPEDAYVGNADMIQPDLTPLQPSLDDFMDISDFFTNSRLPQPPMPSNFPEPPSFSPVVDSLFSSGTLGPEVPPASSAMTHLSGHSRLQARNSCPGPLDSSAFLSSDFLLPEDPKPRLPPPPVPPPLLHYPPPAKVPGLEPCPPPPFPPMAPPTALLQEEPLFSPRFPFPTVPPAPGVSPLPAPAAFPPTPQSVPSPAPTPFPIELLPLGYSEPAFGPCFSMPRGKPPAPSPRGQKASPPTLAPATASPPTTAGSNNPCLTQLLTAAKPEQALEPPLVSSTLLRSPGSPETVPEFPCTFLPPTPAPTPPRPPPGPATLAPSRPLLVPKAERLSPPAPSGSERRLSGDLSSMPGPGTLSVRVSPPQPILSRGRPDSNKTENRRITHISAEQKRRFNIKLGFDTLHGLVSTLSAQPSLKVSKATTLQKTAEYILMLQQERAGLQEEAQQLRDEIEELNAAINLCQQQLPATGVPITHQRFDQMRDMFDDYVRTRTLHNWKFWVFSILIRPLFESFNGMVSTASVHTLRQTSLAWLDQYCSLPALRPST

SEQ ID NO: 8755 - protein, 852 aa, Homo Sapiens
MAGALAGLAAGLQVPRVAPSPDSDSDTDSEDPSLRRSAGGLLRSQVIHSGHFMVSSPHSDSLPRRRDQEGSVGPSDFGPRSIDPTLTRLFECLSLAYSGKLVSPKWKNFKGLKLLCRDKIRLNNAIWRAWYIQYVKRRKSPVCGFVTPLQGPEADAHRKPEAVVLEGNYWKRRIEVVMREYHKWRIYYKKRLRKPSREDDLLAPKQAEGRWPPPEQWCKQLFSSVVPVLLGDPEEEPGGRQLLDLNCFLSDISDTLFTMTQSGPSPLQLPPEDAYVGNADMIQPDLTPLQPSLDDFMDISDFFTNSRLPQPPMPSNFPEPPSFSPVVDSLFSSGTLGPEVPPASSAMTHLSGHSRLQARNSCPGPLDSSAFLSSDFLLPEDPKPRLPPPPVPPPLLHYPPPAKVPGLEPCPPPPFPPMAPPTALLQEEPLFSPRFPFPTVPPAPGVSPLPAPAAFPPTPQSVPSPAPTPFPIELLPLGYSEPAFGPCFSMPRGKPPAPSPRGQKASPPTLAPATASPPTTAGSNNPCLTQLLTAAKPEQALEPPLVSSTLLRSPGSPQETVPEFPCTFLPPTPAPTPPRPPPGPATLAPSRPLLVPKAERLSPPAPSGSERRLSGDLSSMPGPGTLSVRVSPPQPILSRGRPDSNKTENRRITHISAEQKRRFNIKLGFDTLHGLVSTLSAQPSLKVSKATTLQKTAEYILMLQQERAGLQEEAQQLRDEIEELNAAINLCQQQLPATGVPITHQRFDQMRDMFDDYVRTRTLHNWKFWVFSILIRPLFESFNGMVSTASVHTLRQTSLAWLDQYCSLPALRPTVLNSLRQLGTSTSILTDPGRIPEQATRAVTEGTLGKPL

SEQ ID NO: 8756 - protein, 575 aa, Homo Sapiens
MAGALAGLAAGLQVPRVAPSPDSDSDTDSEDPSLRRSAGGLLRSQVIHSGHFMVSSPHSDSLPRRRDQEGSVGPSDFGPRSIDPTLTRLFECLSLAYSGKLVSPKWKNFKGLKLLCRDKIRLNNAIWRAWYIQYVKRRKSPVCGFVTPLQGPEADAHRKPEAVVLEGNYWKRRIEVVMREYHKWRIYYKKRLRKPSREDDLLAPKQAEGRWPPPEQWCKQLFSSVVPVLLGDPEEEPGGRQLLDLNCFLSDISDTLFTMTQSGPSPLQLPPEDAYVGNADMIQPDLTPLQPSLDDFMDISDFFTNSRLPQPPMPSNFPEPPSFSPVVDSLFSSGTLGPEVPPASSAMTHLSGHSRLQARNSCPGPLDSSAFLSSDFLLPEDPKPRLPPPPVPPPLLHYPPPAKVPGLEPCPPPPFPPMAPPTALLQEEPLFSPRFPFPTVPPAPGVSPLPAPAAFPPTPQSVPSPAPTPFPIELLPLGYSEPAFGPCFSMPRGKPPAPSPRGQKASPPTLAPATASPPTTAGSNNPCLTQLLTAAKPEQALEPPLVSSTLLRSPGSPAVNGGCQGTSAPCQALGL

SEQ ID NO: 8757 - protein, 831 aa, Homo Sapiens
MAGALAGLAAGLQVPRVAPSPDSDSDTDSEDPSLRRSAGGLLRSQVIHSGHFMVSSPHSDSLPRRRDQEGSVGPSDFGPRSIDPTLTRLFECLSLAYSGKLVSPKWKNFKGLKLLCRDKIRLNNAIWRAWYIQYVKRRKSPVCGFVTPLQGPEADAHRKPEAVVLEGNYWKRRIEVVMREYHKWRIYYKKRLRKPSREDDLLAPKQAEGRWPPPEQWCKQLFSSVVPVLLGDPEEEPGGRQLLDLNCFLSDISDTLFTMTQSGPSPLQLPPEDAYVGNADMIQPDLTPLQPSLDDFMDISDFFTNSRLPQPPMPSNFPEPPSFSPVVDSLFSSGTLGPEVPPASSAMTHLSGHSRLQARNSCPGPLDSSAFLSSDFLLPEDPKPRLPPPPVPPPLLHYPPPAKVPGLEPCPPPPFPPMAPPTALLQEEPLFSPRFPFPTVPPAPGVSPLPAPAAFPPTPQSVPSPAPTPFPIELLPLGYSEPAFGPCFSMPRGKPPAPSPRGQKASPPTLAPATASPPTTAGSNNPCLTQLLTAAKPEQALEPPLVSSTLLRSPGSPQETVPEFPCTFLPPTPAPTPPRPPPGPATLAPSRPLLVPKAERLSPPAPSGSERRLSGDLSSMPGPGTLSVRVSPPQPILSRGRPDSNKNRRITHISAEQKRRFNIKLGFDTLHGLVSTLSAQPSLKERAGLQEEAQQLRDEIEELNAAINLCQQQLPATGVPITHQRFDQMRDMFDDYVRTRTLHNWKFWVFSILIRPLFESFNGMVSTASVHTLRQTSLAWLDQYCSLPALRPTVLNSLRQLGTSTSILTDPGRIPEQATRAVTEGTLGKPL

SEQ ID NO: 8758 - protein, 833 aa, Homo Sapiens
MAGALAGLAAGLQVPRVAPSPDSDSDTDSEDPSLRRSAGGLLRSQVIHSGHFMVSSPHSDSLPRRRDQEGSVGPSDFGPRSIDPTLTRLFECLSLAYSGKLVSPKWKNFKGLKLLCRDKIRLNNAIWRAWYIQYVKRRKSPVCGFVTPLQGPEADAHRKPEAVVLEGNYWKRRIEVVMREYHKWRIYYKKRLRKPSREDDLLAPKQAEGRWPPPEQWCKQLFSSVVPVLLGDPEEEPGGRQLLDLNCFLSDISDTLFTMTQSGPSPLQLPPEDAYVGNADMIQPDLTPLQPSLDDFMDISDFFTNSRLPQPPMPSNFPEPPSFSPVVDSLFSSGTLGPEVPPASSAMTHLSGHSRLQARNSCPGPLDSSAFLSSDFLLPEDPKPRLPPPPVPPPLLHYPPPAKVPGLEPCPPPPFPPMAPPTALLQEEPLFSPRFPFPTVPPAPGVSPLPAPAAFPPTPQSVPSPAPTPFPIELLPLGYSEPAFGPCFSMPRGKPPAPSPRGQKASPPTLAPATASPPTTAGSNNPCLTQLLTAAKPEQALEPPLVSSTLLRSPGSPQETVPEFPCTFLPPTPAPTPPRPPPGPATLAPSRPLLVPKAERLSPPAPSGSERRLSGDLSSMPGPGTLSVRVSPPQPILSRGRPDSNKTENRRITHISAEQKRRFNIKLGFDTLHGLVSTLSAQPSLKERAGLQEEAQQLRDEIEELNAAINLCQQQLPATGVPITHQRFDQMRDMFDDYVRTRTLHNWKFWVFSILIRPLFESFNGMVSTASVHTLRQTSLAWLDQYCSLPALRPTVLNSLRQLGTSTSILTDPGRIPEQATRAVTEGTLGKPL

SEQ ID NO: 8759 - protein, 850 aa, Homo Sapiens
MAGALAGLAAGLQVPRVAPSPDSDSDTDSEDPSLRRSAGGLLRSQVIHSGHFMVSSPHSDSLPRRRDQEGSVGPSDFGPRSIDPTLTRLFECLSLAYSGKLVSPKWKNFKGLKLLCRDKIRLNNAIWRAWYIQYVKRRKSPVCGFVTPLQGPEADAHRKPEAVVLEGNYWKRRIEVVMREYHKWRIYYKKRLRKPSREDDLLAPKQAEGRWPPPEQWCKQLFSSVVPVLLGDPEEEPGGRQLLDLNCFLSDISDTLFTMTQSGPSPLQLPPEDAYVGNADMIQPDLTPLQPSLDDFMDISDFFTNSRLPQPPMPSNFPEPPSFSPVVDSLFSSGTLGPEVPPASSAMTHLSGHSRLQARNSCPGPLDSSAFLSSDFLLPEDPKPRLPPPPVPPPLLHYPPPAKVPGLEPCPPPPFPPMAPPTALLQEEPLFSPRFPFPTVPPAPGVSPLPAPAAFPPTPQSVPSPAPTPFPIELLPLGYSEPAFGPCFSMPRGKPPAPSPRGQKASPPTLAPATASPPTTAGSNNPCLTQLLTAAKPEQALEPPLVSSTLLRSPGSPQETVPEFPCTFLPPTPAPTPPRPPPGPATLAPSRPLLVPKAERLSPPAPSGSERRLSGDLSSMPGPGTLSVRVSPPQPILSRGRPDSNKNRRITHISAEQKRRFNIKLGFDTLHGLVSTLSAQPSLKVSKATTLQKTAEYILMLQQERAGLQEEAQQLRDEIEELNAAINLCQQQLPATGVPITHQRFDQMRDMFDDYVRTRTLHNWKFWVFSILIRPLFESFNGMVSTASVHTLRQTSLAWLDQYCSLPALRPTVLNSLRQLGTSTSILTDPGRIPEQATRAVTEGTLGKPL

SEQ ID NO: 8760 - protein, 235 aa, Homo Sapiens
PKWKNFKGLKLLCRDKIRLNNAIWRAWYIQYVKRRKSPVCGFVTPLQGPEADAHRKPEAVVLEGNYWKRRIEVVMREYHKWRIYYKKRVSGGGPGRPQSFPPAAAGYRPPRKIPGKGILTPELAPLGPSIQSRADSATVWPQRLLAASLPRGRLRKPSREDDLLAPKQAEGRWPPPEQWCKQLFSSVVPVLLGDPEEEPGGRQLLDLNCFLSDISDTLFTMTQSGPSPLQLPPED

SEQ ID NO: 8761 - protein, 469 aa, Homo Sapiens
MHSFPPLLLLLFWGVVSHSFPATLETQEQDVDLVQKYLEKYYNLKNDGRQVEKRRNSGPVVEKLKQMQEFFGLKVTGKPDAETLKVMKQPRCGVPDVAQFVLTEGNPRWEQTHLTYRIENYTPDLPRADVDHAIEKAFQLWSNVTPLTFTKVSEGQADIMISFVRGDHRDNSPFDGPGGNLAHAFQPGPGIGGDAHFDEDERWTNNFREYNLHRVAAHELGHSLGLSHSTDIGALMYPSYTFSGDVQLAQDDIDGIQAIYGRSQNPVQPIGPQTPKACDSKLTFDAITTIRGEVMFFKDRFYMRTNPFYPEVELNFISVFWPQLPNGLEAAYEFADRDEVRFFKGNKYWAVQGQNVLHGYPKDIYSSFGFPRTVKHIDAALSEENTGKTYFFVANKYWRYDEYKRSMDPGYPKMIAHDFPGIGHKVDAVFMKDGFFYFFHGTRQYKFDPKTKRILTLQKANSWFNCRKN

SEQ ID NO: 8762 - protein, 476 aa, Homo Sapiens
MMHLAFLVLLCLPVCSAYPLSGAAKEEDSNKDLAQQYLEKYYNLEKDVKQFRRKDSNLIVKKIQGMQKFLGLEVTGKLDTDTLEVMRKPRCGVPDVGHFSSFPGMPKWRKTHLTYRIVNYTPDLPRDAVDSAIEKALKVWEEVTPLTFSRLYEGEADIMISFAVKEHGDFYSFDGPGHSLAHAYPPGPGLYGDIHFDDDEKWTEDASGTNLFLVAAHELGHSLGLFHSANTEALMYPLYNSFTELAQFRLSQDDVNGIQSLYGPPPASTEEPLVPTKSVPSGSEMPAKCDPALSFDAISTLRGEYLFFKDRYFWRRSHWNPEPEFHLISAFWPSLPSYLDAAYEVNSRDTVFIFKGNEFWAIRGNEVQAGYPRGIHTLGFPPTIRKIDAAVSDKEKKKTYFFAADKYWRFDENSQSMEQGFPRLIADDFPGVEPKVDAVLQAFGFFYFFSGSSQFEFDPNARMVTHILKSNSWLHC

SEQ ID NO: 8763 - protein, 181 aa, Homo Sapiens
MMHLAFLVLLCLPVCSAYPLSGAAKEEDSNKDLAQQYLEKYYNLEKDVKQFRRKDSNLIVKKIQGMQKFLGLEVTGKLDTDTLEVMRKPRCGVPDVGHFSSFPGMPKWRKTHLTYRIVNYTPDLPRDAVDSAIEKALKVWEEVTPLTFSRLYEGEADIMISFAVKGHSLAHAYPPGPGLYG

SEQ ID NO: 8764 - protein, 113 aa, Homo Sapiens
MAPAAWLRSAAARALLPPMLLLLLQPPPLLARALPPDAHHLHAERRGPQPWHAALPSSPAPAPATQEAPRPASSLRPPRCGVPDPSDGLSARNRQKRFVLSGGRWEKTDLTYR

SEQ ID NO: 8765 - protein, 488 aa, Homo Sapiens
MAPAAWLRSAAARALLPPMLLLLLQPPPLLARALPPDAHHLHAERRGPQPWHAALPSSPAPAPATQEAPRPASSLRPPRCGVPDPSDGLSARNRQKRFVLSGGRWEKTDLTYRILRFPWQLVQEQVRQTMAEALKVWSDVTPLTFTEVHEGRADIMIDFARYWHGDDLPFDGPGGILAHAFFPKTHREGDVHFDYDETWTIGDDQGTDLLQVAAHEFGHVLGLQHTTAAKALMSAFYTFRYPLSLSPDDCRGVQHLYGQPWPTVTSRTPALGPQAGIDTNEIAPLEPDAPPDACEASFDAVSTIRGELFFFKAGFVWRLRGGQLQPGYPALASRHWQGLPSPVDAAFEDAQGHIWFFQGAQYWVYDGEKPVLGPAPLTELGLVRFPVHAALVWGPEKNKIYFFRGRDYWRFHPSTRRVDSPVPRRATDWRGVPSEIDAAFQDADGYAYFLRGRLYWKFDPVKVKALEGFPRLVGPDFFGCAEPANTFL

SEQ ID NO: 8766 - protein, 354 aa, Homo Sapiens
MAPAAWLRSAAARALLPPMLLLLLQPPPLLARALPPDAHHLHAERRGPQPWHAALPSSPAPAPATQEAPRPASSLRPPRCGVPDPSDGLSARNRQKRILRFPWQLVQEQVRQTMAEALKVWSDVTPLTFTEVHEGRADIMIDFARYWHGDDLPFDGPGGILAHAFFPKTHREGDVHFDYDETWTIGDDQGTDLLQVAAHEFGHVLGLQHTTAAKALMSAFYTFRYPLSLSPDDCRGVQHLYGQPWPTVTSRTPALGPQAGIDTNEIAPLEPDAPPDACEASFDAVSTIRGELFFFKAGFVWRLRGGQLQPGYPALASRHWQGLPSPVDAAFEDAQGHIWFFQGTTGVSTPAPGV

SEQ ID NO: 8767 - protein, 170 aa, Homo Sapiens
  misc_feature (1)..(1): Xaa can be any naturally occurring amino acid
XAHEFGHVLGLQHTTAAKALMSAFYTFRYPLSLSPDDCRGVQHLYGQPWPTVTSRTPALGPQAGIDTNEIAPLEPDAPPDACEASFDAVSTIRGELFFFKAGFVWRLRGGQLQPGYPALASRHWQGLPSPVDAAFEDAQGHIWFFQELGFPSSTGRDESLEHCRCQGLHK

SEQ ID NO: 8768 - protein, 470 aa, Homo Sapiens
MKFLLILLLQATASGALPLNSSTSLEKNNVLFGERYLEKFYGLEINKLPVTKMKYSGNLMKEKIQEMQHFLGLKVTGQLDTSTLEMMHAPRCGVPDVHHFREMPGGPVWRKHYITYRINNYTPDMNREDVDYAIRKAFQVWSNVTPLKFSKINTGMADILVVFARGAHGDFHAFDGKGGILAHAFGPGSGIGGDAHFDEDEFWTTHSGGTNLFLTAVHEIGHSLGLGHSSDPKAVMFPTYKYVDINTFRLSADDIRGIQSLYGDPKENQRLPNPDNSEPALCDPNLSFDAVTTVGNKIFFFKDRFFWLKVSERPKTSVNLISSLWPTLPSGIEAAYEIEARNQVFLFKDDKYWLISNLRPEPNYPKSIHSFGFPNFVKKIDAAVFNPRFYRTYFFVDNQYWRYDERRQMMDPGYPKLITKNFQGIGPKIDAVFYSKNKYYYFFQGSNQFEYDFLLQRITKTLKSNSWFGC

SEQ ID NO: 8769 - protein, 471 aa, Homo Sapiens
MHPGVLAAFLFLSWTHCRALPLPSGGDEDDLSEEDLQFAERYLRSYYHPTNLAGILKENAASSMTERLREMQSFFGLEVTGKLDDNTLDVMKKPRCGVPDVGEYNVFPRTLKWSKMNLTYRIVNYTPDMTHSEVEKAFKKAFKVWSDVTPLNFTRLHDGIADIMISFGIKEHGDFYPFDGPSGLLAHAFPPGPNYGGDAHFDDDETWTSSSKGYNLFLVAAHEFGHSLGLDHSKDPGALMFPIYTYTGKSHFMLPDDDVQGIQSLYGPGDEDPNPKHPKTPDKCDPSLSLDAITSLRGETMIFKDRFFWRLHPQQVDAELFLTKSFWPELPNRIDAAYEHPSHDLIFIFRGRKFWALNGYDILEGYPKKISELGLPKEVKKISAAVHFEDTGKTLLFSGNQVWRYDDTNHIMDKDYPRLIEEDFPGIGDKVDAVYEKNGYIYFFNGPIQFEYSIWSNRIVRVMPANSILWC

SEQ ID NO: 8770 - protein, 489 aa, Homo Sapiens
MHPGVLAAFLFLSWTHCRALPLPSGGDEDDLSEEDLQFAERYLRSYYHPTNLAGILKENAASSMTERLREMQSFFGLEVTGKLDDNTLDVMKKPRCGVPDVGEYNVFPRTLKWSKMNLTYRIVNYTPDMTHSEVEKAFKKAFKVWSDVTPLNFTRLHDGIADIMISFGIKEHGDFYPFDGPSGLLAHAFPPGPNYGGDAHFDDDETWTSSSKGYNLFLVAAHEFGHSLGLDHSKDPGALMFPIYTYTGKSHFMLPDDDVQGIQSLYGPGDEDPNPKHPKTPDKCDPSLSLDAITSLRGETMIFKDRFFWRLHPQQVDAELFLTKSFWPELPNRIDAAYEHPSHDLIFIFRGRKFWALNGYDILEGYPKKISELGLPKEVKKISAAVHFEDTGKTLLFSGNQVWRYDDTNHIMDKDYPRLIEEDFPGIGDKVDAVYEKNESHSVTQAGVHCRNLSSLQPPPPGFKRFSCLSLWSSWDYRLYLFFQRTHTV

SEQ ID NO: 8771 - protein, 383 aa, Homo Sapiens [sequence omitted]

SEQ ID NO: 8772 - protein, 194 aa, Homo Sapiens
MRESLLFLRLPSSPALSRRRALRWALRPPRVAQAFSGRVCGQAWLQQYGYLPPGDLRTHTQRSPQSLSAAIAAMQKFYGLQVTGKADADTMKAMRRPRCGVPDKFGAEIKANVRRKRYAIQGLKWQHNEITFCIQNYTPKVGEYATYEAIRKAFRVWESATPLRFREVPYAYIREGHEKQADIMIFFAEGFHGD

SEQ ID NO: 8773 - protein, 582 aa, Homo Sapiens
MSPAPRPPRCLLLPLLTLGTALASLGSAQSSSFSPEAWLQQYGYLPPGDLRTHTQRSPQSLSAAIAAMQKFYGLQVTGKADADTMKAMRRPRCGVPDKFGAEIKANVRRKRYAIQGLKWQHNEITFCIQNYTPKVGEYATYEAIRKAFRVWESATPLRFREVPYAYIREGHEKQADIMIFFAEGFHGDSTPFDGEGGFLAHAYFPGPNIGGDTHFDSAEPWTVRNEDLNGNDIFLVAVHELGHALGLEHSSDPSAIMAPFYQWMDTENFVLPDDDRRGIQQLYGGESGFPTKMPPQPRTTSRPSVPDKPKNPTYGPNICDGNFDTVAMLRGEMFVFKERWFWRVRNNQVMDGYPMPIGQFWRGLPASINTAYERKDGKFVFFKGDKHWVFDEASLEPGYPKHIKELGRGLPTDKIDAALFWMPNGKTYFFRGNKYYRFNEELRAVDSEYPKNIKVWEGIPESPRGSFMGSDEVFTYFYKGNKYWKFNNQKLKVEPGYPKSALRDWMGCPSGGRPDEGTEEETEVIIIEVDEEGGGAVSAAAVVLPVLLLLLVLAVGLAVFFFRRHGTPRRLLYCQRSLLDKV

SEQ ID NO: 8774 - protein, 71 aa, Homo Sapiens
MSPAPRPPRCLLLPLLTLGTALASLGSAQSSSFSPESLEELYNWGELPLPRFPWALLSALEPPDKHLDSAQ

SEQ ID NO: 8775 - protein, 143 aa, Homo Sapiens
MDPGYPAQSPLWRGVPSTLDDAMRWSDGASYFFRGQEYWKVLDGELEVAPGYPQSTARDWLVCGDSQADGSVAAGVDAAEGPRAPPGQHDQSRSEDGYEVCSCTSGASSPPGAPGPLVAATMLLLLPPLSPGALWTAAQALTL

SEQ ID NO: 8776 - protein, 118 aa, Homo Sapiens
MHRFWRGLPLHLDSVDAVYERTSDHKIVFFKGDRYWVFKDNNVEEGYPRPVSDFSLPPGGIDAAFSWAHNDRTYFFKDQLYWRYDDHTRHMDPGYPAQSPLWRGVPSTLDDAMRWSDG

SEQ ID NO: 8777 - protein, 39 aa, Homo Sapiens
MHRFWRGLPLHLDSVDAVYERTSDHKIVFFKGPAVLALR

SEQ ID NO: 8778 - protein, 169 aa, Homo Sapiens
MKTPRCSLPDLPVLTQARRRRQAPAPTKWNKRNLSWRVRTFPRDSPLGHDTVRALMYYALKVWSDIAPLNFHEVAGSAADIQIDFSKADHNDGYPFDGPGGTVAHAFFPGHHHTAGDTHFDDDEAWTFRSSDAHGMDLFAVAVHEFGHAIGLSHVAAAHSIMRPYYQGP

SEQ ID NO: 8779 - protein, 115 aa, Homo Sapiens
MQQFGGLEATGILDEATLALMKTPRCSLPDLPVLTQARRRRQAPAPTKWNKRNLSWRVRTFPRDSPLGHDTVRALMYYALKVWSDIAPLNFHEVAGSAADIQIDFSKADHNDGYP

SEQ ID NO: 8780 - protein, 519 aa, Homo Sapiens
MQQFGGLEATGILDEATLALMKTPRCSLPDLPVLTQARRRRQAPAPTKWNKRNLSWRVRTFPRDSPLGHDTVRALMYYALKVWSDIAPLNFHEVAGSAADIQIDFSKADHNDGYPFDGPGGTVAHAFFPGHHHTAGDTHFDDDEAWTFRSSDAHGMDLFAVAVHEFGHAIGLSHVAAAHSIMRPYYQGPVGDPLRYGLPYEDKVRVWQLYGVRESVSPTAQPEEPPLLPEPPDNRSSAPPRKDVPHRCSTHFDAVAQIRGEAFFFKGKYFWRLTRDRHLVSLQPAQMHRFWRGLPLHLDSVDAVYERTSDHKIVFFKGDRYWVFKDNNVEEGYPRPVSDFSLPPGGIDAAFSWAHNDRTYFFKDQLYWRYDDHTRHMDPGYPAQSPLWRGVPSTLDDAMRWSDGASYFFRGQEYWKVLDGELEVAPGYPQSTARDWLVCGDSQADGSVAAGVDAAEGPRAPPGQHDQSRSEDGYEVCSCTSGASSPPGAPGPLVAATMLLLLPPLSPGALWTAAQALTL

SEQ ID NO: 8781 - protein, 603 aa, Homo Sapiens
MRRRAARGPGPPPPGPGLSRLPLPLLLLLALGTRGGCAAPAPAPRAEDLSLGVEWLSRFGYLPPADPTTGQLQTQEELSKAITAMQQFGGLEATGILDEATLALMKTPRCSLPDLPVLTQARRRRQAPAPTKWNKRNLSWRVRTFPRDSPLGHDTVRALMYYALKVWSDIAPLNFHEVAGSAADIQIDFSKADHNDGYPFDGPGGTVAHAFFPGHHHTAGDTHFDDDEAWTFRSSDAHGMDLFAVAVHEFGHAIGLSHVAAAHSIMRPYYQGPVGDPLRYGLPYEDKVRVWQLYGVRESVSPTAQPEEPPLLPEPPDNRSSAPPRKDVPHRCSTHFDAVAQIRGEAFFFKGKYFWRLTRDRHLVSLQPAQMHRFWRGLPLHLDSVDAVYERTSDHKIVFFKGDRYWVFKDNNVEEGYPRPVSDFSLPPGGIDAAFSWAHNDRTYFFKDQLYWRYDDHTRHMDPGYPAQSPLWRGVPSTLDDAMRWSDGASYFFRGQEYWKVLDGELEVAPGYPQSTARDWLVCGDSQADGSVAAGVDAAEGPRAPPGQHDQSRSEDGYEVCSCTSGASSPPGAPGPLVAATMLLLLPPLSPGALWTAAQALTL

SEQ ID NO: 8782 - protein, 302 aa, Homo Sapiens
MYYALKVWSDIAPLNFHEVAGSAADIQIDFSKADHNDGYPFDGPGGTVAHAFFPGHHHTAGDTHFDDDEAWTFRSSDAHGMDLFAVAVHEFGHAIGLSHVAAAHSIMRPYYQGPVGDPLRYGLPYEDKVRVWQLYGVRESVSPTAQPEEPPLLPEPPDNRSSAPPRKDVPHRCSTHFDAVAQIRGEAFFFKGKYFWRLTRDRHLVSLQPAQMHRFWRGLPLHLDSVDAVYERTSDHKIVFFKGDRYWVFKDNNVEEGYPRPVSDFSLPPGGIDAAFSWAHNDRTYFFKDQLYWRYDDHTRHM

SEQ ID NO: 8783 - protein, 485 aa, Homo Sapiens
MNCQQLWLGFLLPMTVSGRVLGLAEVAPVDYLSQYGYLQKPLEGSNNFKPEDITEALRAFQEASELPVSGQLDDATRARMRQPRCGLEDPFNQKTLKYLLLARAALRQAFQDWSNVAPLTFQEVQAGAADIRLSFHGRQSSYCSNTFDGPGRVLAHADIPELGSVHFDEDEFWTEGTYRGVNLRIIAAHEVGHALGLGHSRYSQALMAPVYEGYRPHFKLHPDDVAGIQALYGKKSPVIRDEEEEETELPTVPPVPTEPSPMPDPCSSELDAMMLGPRGKTYAFKGDYVWTVSDSGPGPLFRVSALWEGLPGNLDAAVYSPRTQWIHFFKGDKVWRYINFKMSPGFPKKLNRVEPNLDAALYWPLNQKVFLFKGSGYWQWDELARTDFSSYPKPIKGLFTGVPNQPSAAMSWQDGRVYFFKGKVYWRLNQQLRVEKGYPRNISHNWMHCRPRTIDTTPSGGNTTPSGTGITLDTTLSATETTFEY

SEQ ID NO: 8784 - protein, 305 aa, Homo Sapiens
MNCQQLWLGFLLPMTVSGRVLGLAEVAPVDYLSQYGYLQKPLEGSNNFKPEDITEALRAFQEASELPVSGQLDDATRARMRQPRCGLEDPFNQKTLKYLLLGRWRKKHLTFRILNLPSTLPPHTARAALRQAFQDWSNVAPLTFQEVQAGAADIRLSFHGRQSSYCSNTFDGPGKKSPVIRDEEEEETELPTVPPVPTEPSPMPDPCSSELDAMMLGEAPPLQAVGRRWGQPADPEAWTNGSDMGLQHEQWRAPWEDLCFQGGLCVDCIRFRTGPLVPSVCPLGGAPRKPGCCCLLASNTMDSLL

SEQ ID NO: 8785 - protein, 508 aa, Homo Sapiens
MNCQQLWLGFLLPMTVSGRVLGLAEVAPVDYLSQYGYLQKPLEGSNNFKPEDITEALRAFQEASELPVSGQLDDATRARMRQPRCGLEDPFNQKTLKYLLLGRWRKKHLTFRILNLPSTLPPHTARAALRQAFQDWSNVAPLTFQEVQAGAADIRLSFHGRQSSYCSNTFDGPGRVLAHADIPELGSVHFDEDEFWTEGTYRGVNLRIIAAHEVGHALGLGHSRYSQALMAPVYEGYRPHFKLHPDDVAGIQALYGKKSPVIRDEEEEETELPTVPPVPTEPSPMPDPCSSELDAMMLGPRGKTYAFKGDYVWTVSDSGPGPLFRVSALWEGLPGNLDAAVYSPRTQWIHFFKGDKVWRYINFKMSPGFPKKLNRVEPNLDAALYWPLNQKVFLFKGSGYWQWDELARTDFSSYPKPIKGLFTGVPNQPSAAMSWQDGRVYFFKGKVYWRLNQQLRVEKGYPRNISHNWMHCRPRTIDTTPSGGNTTPSGTGITLDTTLSATETTFEY

SEQ ID NO: 8786 - protein, 81 aa, Homo Sapiens
MNCQQLWLGFLLPMTVSGRVLGLAEVAPVDYLSQYGYLQKPLEGSNNFKPEDITEALRESPGPCRHPRAGQCALRRRRVLD

SEQ ID NO: 8787 - protein, 108 aa, Homo Sapiens
MNCQQLWLGFLLPMTVSGRVLGLAEVAPVDYLSQYGYLQKPLEGSNNFKPEDITEALRPLEKEAPDFPHLEPALHPSTPHSPGSPASSLPGLEQCGSLDLPRGAGWCG

SEQ ID NO: 8788 - protein, 63 aa, Homo Sapiens
MNCQQLWLGFLLPMTVSGRVLGLAEVAPVDYLSQYGYLQKPLEGSNNFKPEDITEALSLRSAG

SEQ ID NO: 8789 - protein, 252 aa, Homo Sapiens
GTTEDYDRDKKYGFCPETGYSLFLVAAHEFGHAMGLEHSQDPGALMAPIYTYTKNFRLSQDDIKGIQELYGASPDIDLGTGPTPTLGPVTPEICKQDIVFDGIAQIRGEIFFFKDRFIWRTVTPRDKPMGPLLVATFWPELPEKIDAVYEAPQEEKAVFFAGNEYWIYSASTLERGYPKPLTSLGLPPDVQRVDAAFNWSKNKKTYIFAGDKFWRYNEVKKKMDPGFPKLIADAWNAIPDNLDAVVDLQGGG

SEQ ID NO: 8790 - protein, 660 aa, Homo Sapiens
MEALMARGALTGPLRALCLLGCLLSHAAAAPSPIIKFPGDVAPKTDKELAVQYLNTFYGCPKESCNLFVLKDTLKKMQKFFGLPQTGDLDQNTIETMRKPRCGNPDVANYNFFPRKPKWDKNQITYRIIGYTPDLDPETVDDAFARAFQVWSDVTPLRFSRIHDGEADIMINFGRWEHGDGYPFDGKDGLLAHAFAPGTGVGGDSHFDDDELWTLGEGQVVRVKYGNADGEYCKFPFLFNGKEYNSCTDTGRSDGFLWCSTTYNFEKDGKYGFCPHEALFTMGGNAEGQPCKFPFRFQGTSYDSCTTEGRTDGYRWCGTTEDYDRDKKYGFCPETAMSTVGGNSEGAPCVFPFTFLGNKYESCTSAGRSDGKMWCATTANYDDDRKWGFCPDQGYSLFLVAAHEFGHAMGLEHSQDPGALMAPIYTYTKNFRLSQDDIKGIQELYGASPDIDLGTGPTPTLGPVTPEICKQDIVFDGIAQIRGEIFFFKDRFIWRTVTPRDKPMGPLLVATFWPELPEKIDAVYEAPQEEKAVFFAGNEYWIYSASTLERGYPKPLTSLGLPPDVQRVDAAFNWSKNKKTYIFAGDKFWRYNEVKKKMDPGFPKLIADAWNAIPDNLDAVVDLQGGGHSYFFKGAYYLKLENQSLKSVKFGSIKSDWLGC

SEQ ID NO: 8791 - protein, 118 aa, Homo Sapiens
MQKFFGLPQTGDLDQNTIETMRKPRCGNPDVANYNFFPRKPKWDKNQITYRIIGYTPDLDPETVDDAFARAFQVWSDVTPLRFSRIHDGEADIMINFGRWEHGDGYPFDGKDGLLAHA

SEQ ID NO: 8792 - protein, 201 aa, Homo Sapiens
MQKFFGLPQTGDLDQNTIETMRKPRCGNPDVANYNFFPRKPKWDKNQITYRIIGYTPDLDPETVDDAFARAFQVWSDVTPLRFSRIHDGEADIMINFGRWEHGDGYPFDGKDGLLAHAFAPGTGVGGDSHFDDDELWTLGEGQVVRVKYGNADGEYCKFPFLFNGKEYNSCTDTGRSDGFLWCSTTYNFEKDGKYGFCPHE

SEQ ID NO: 8793 - protein, 584 aa, Homo Sapiens
MQKFFGLPQTGDLDQNTIETMRKPRCGNPDVANYNFFPRKPKWDKNQITYRIIGYTPDLDPETVDDAFARAFQVWSDVTPLRFSRIHDGEADIMINFGRWEHGDGYPFDGKDGLLAHAFAPGTGVGGDSHFDDDELWTLGEGQVVRVKYGNADGEYCKFPFLFNGKEYNSCTDTGRSDGFLWCSTTYNFEKDGKYGFCPHEALFTMGGNAEGQPCKFPFRFQGTSYDSCTTEGRTDGYRWCGTTEDYDRDKKYGFCPETAMSTVGGNSEGAPCVFPFTFLGNKYESCTSAGRSDGKMWCATTANYDDDRKWGFCPDQGYSLFLVAAHEFGHAMGLEHSQDPGALMAPIYTYTKNFRLSQDDIKGIQELYGASPDIDLGTGPTPTLGPVTPEICKQDIVFDGIAQIRGEIFFFKDRFIWRTVTPRDKPMGPLLVATFWPELPEKIDAVYEAPQEEKAVFFAGNEYWIYSASTLERGYPKPLTSLGLPPDVQRVDAAFNWSKNKKTYIFAGDKFWRYNEVKKKMDPGFPKLIADAWNAIPDNLDAVVDLQGGGHSYFFKGAYYLKLENQSLKSVKFGSIKSDWLGC

SEQ ID NO: 8794 - protein, 584 aa, Homo Sapiens; identical to SEQ ID NO: 8793

SEQ ID NO: 8795 - protein, 610 aa, Homo Sapiens
MQYLNTFYGCPKESCNLFVLKDTLKKMQKFFGLPQTGDLDQNTIETMRKPRCGNPDVANYNFFPRKPKWDKNQITYRIIGYTPDLDPETVDDAFARAFQVWSDVTPLRFSRIHDGEADIMINFGRWEHGDGYPFDGKDGLLAHAFAPGTGVGGDSHFDDDELWTLGEGQVVRVKYGNADGEYCKFPFLFNGKEYNSCTDTGRSDGFLWCSTTYNFEKDGKYGFCPHEALFTMGGNAEGQPCKFPFRFQGTSYDSCTTEGRTDGYRWCGTTEDYDRDKKYGFCPETAMSTVGGNSEGAPCVFPFTFLGNKYESCTSAGRSDGKMWCATTANYDDDRKWGFCPDQGYSLFLVAAHEFGHAMGLEHSQDPGALMAPIYTYTKNFRLSQDDIKGIQELYGASPDIDLGTGPTPTLGPVTPEICKQDIVFDGIAQIRGEIFFFKDRFIWRTVTPRDKPMGPLLVATFWPELPEKIDAVYEAPQEEKAVFFAGNEYWIYSASTLERGYPKPLTSLGLPPDVQRVDAAFNWSKNKKTYIFAGDKFWRYNEVKKKMDPGFPKLIADAWNAIPDNLDAVVDLQGGGHSYFFKGAYYLKLENQSLKSVKFGSIKSDWLGC

SEQ ID NO: 8796 - protein, 22 aa, Homo Sapiens
  misc_feature (1)..(1): Xaa can be any naturally occurring amino acid
XLENQSLKSVKFGSIKSDWLGC

SEQ ID NO: 8797 - protein, 483 aa, Homo Sapiens
MKVLPASGLAVFLIMALKFSTAAPSLVAASPRTWRNNYRLAQAYLDKYYTNKEGHQIGEMVARGSNSMIRKIKELQAFFGLQVTGKLDQTTMNVIKKPRCGVPDVANYRLFPGEPKWKKNTLTYRISKYTPSMSSVEVDKAVEMALQAWSSAVPLSFVRINSGEADIMISFENGDHGDSYPFDGPRGTLAHAFAPGEGLGGDTHFDNAEKWTMGTNGFNLFTVAAHEFGHALGLAHSTDPSALMYPTYKYKNPYGFHLPKDDVKGIQALYGPRKVFLGKPTLPHAPHHKPSIPDLCDSSSSFDAVTMLGKELLLFKDRIFWRRQVHLRTGIRPSTITSSFPQLMSNVDAAYEVAERGTAYFFKGPHYWITRGFQMQGPPRTIYDFGFPRHVQQIDAAVYLREPQKTLFFVGDEYYSYDERKRKMEKDYPKNTEEEFSGVNGQIDAAVELNGYIYFFSGPKTYKYDTEKEDVVSVVKSSSWIGC

SEQ ID NO: 8798 - protein, 569 aa, Homo Sapiens
MLAASIFRPTLLLCWLAAPWPTQPESLFHSRDRSDLEPSPLRQAKPIADLHAAQRFLSRYGWSGVWAAWGPSPEGPPETPKGAALAEAVRRFQRANALPASGELDAATLAAMNRPRCGVPDMRPPPPSAPPSPPGPPPRARSRRSPRAPLSLSRRGWQPRGYPDGGAAQAFSKRTLSWRLLGEALSSQLSVADQRRIVALAFRMWSEVTPLDFREDLAAPGAAVDIKLGFGRGRHLGCPRAFDGSGQEFAHAWRLGDIHFDDDEHFTPPTSDTGISLLKVAVHEIGHVLGLPHTYRTGSIMQPNYIPQEPAFELDWSDRKAIQKLYGSCEGSFDTAFDWIRKERNQYGEVMVRFSTYFFRNSWYWLYENRNNRTRYGDPIQILTGWPGIPTHNIDAFVHIWTWKRDERYFFQGNQYWRYDSDKDQALTEDEQGKSYPKLISEGFPGIPSPLDTAFYDRRQKLIYFFKESLVFAFDVNRNRVLNSYPKRITEVFPAVIPQNHPFRNIDSAYYSYAYNSIFFFKGNAYWKVVNDKDKQQNSWLPANGLFPKKFISEKWFDVCDVHISTLNM

SEQ ID NO: 8799 - protein, 183 aa, Homo Sapiens
MDPGTVATMRKPRCSLPDVLGVAGLVRRRRRYALSGSVWKKRTLTWRVRSFPQSSQLSQETVRVLMSYALMAWGMESGLTFHEVDSPQGQEPDILIDFARAFHQDSYPFDGLGGTLAHAFFPGEHPISGDTHFDDEETWTFGSKASQQLEQELAGGSPVDEELGFSRGWRVNPLGPGSPERLS

SEQ ID NO: 8800 - protein, 562 aa, Homo Sapiens
MRLRLRLLALLLLLLAPPARAPKPSAQDVSLGVDWLTRYGYLPPPHPAQAQLQSPEKLRDAIKVMQRFAGLPETGRMDPGTVATMRKPRCSLPDVLGVAGLVRRRRRYALSGSVWKKRTLTWRVRSFPQSSQLSQETVRVLMSYALMAWGMESGLTFHEVDSPQGQEPDILIDFARAFHQDSYPFDGLGGTLAHAFFPGEHPISGDTHFDDEETWTFGSKDGEGTDLFAVAVHEFGHALGLGHSSAPNSIMRPFYQGPVGDPDKYRLSQDDRDGLQQLYGKAPQTPYDKPTRKPLAPPPQPPASPTHSPSFPIPDRCEGNFDAIANIRGETFFFKGPWFWRLQPSGQLVSPRPARLHRFWEGLPAQVRVVQAAYARHRDGRILLFSGPQFWVFQDRQLEGGARPLTELGLPPGEEVDAVFSWPQNGKTYLVRGRQYWRYDEAAARPDPGYPRDLSLWEGAPPSPDDVTVSNAGDTYFFKGAHYWRFPKNSIKTEPDAPQPMGPNWLDCPAPSSGPRAPRPPKATPVSETCDCQCELNQAAGRWPAPIPLLLLPLLVGGVASR

SEQ ID NO: 8801 - protein, 261 aa, Homo Sapiens
MQLVILRVTIFLPWCFAVPVPPAADHKGWDFVEGYFHQFFLTKKESPLLTQETQTQLLQQFHRNGTDLLDMQMHALLHQPHCGVPDGSDTSISPGRCKWNKHTLTYRIINYPHDMKPSAVKDSIYNAVSIWSNVTPLIFQQVQNGDADIKVSFWQWAHEDGWPFDGPGGILGHAFLPNSGNPGVVHFDKNEHWSASDTGYNLFLVATHEIGHSLGLQHSGNQSSIMYPTYWYHDPRTFQLSADDIQRIQHLYGEKCSSDIP

SEQ ID NO: 8802 - protein, 261 aa, Homo Sapiens; identical to SEQ ID NO: 8801

SEQ ID NO: 8803 - protein, 513 aa, Homo Sapiens
MKRLLLLFLFFITFSSAFPLVRMTENEENMQLAQAYLNQFYSLEIEGNHLVQSKNRSLIDDKIREMQAFFGLTVTGKLDSNTLEIMKTPRCGVPDVGQYGYTLPGWRKYNLTYRIINYTPDMARAAVDEAIQEGLEVWSKVTPLKFTKISKGIADIMIAFRTRVHGRCPRYFDGPLGVLGHAFPPGPGLGGDTHFDEDENWTKDGAGFNLFLVAAHEFGHALGLSHSNDQTALMFPNYVSLDPRKYPLSQDDINGIQSIYGGLPKEPAKPKEPTIPHACDPDLTFDAITTFRREVMFFKGRHLWRIYYDITDVEFELIASFWPSLPADLQAAYENPRDKILVFKDENFWMIRGYAVLPDYPKSIHTLGFPGRVKKIDAAVCDKTTRKTYFFVGIWCWRFDEMTQTMDKGFPQRVVKHFPGISIRVDAAFQYKGFFFFSRGSKQFEYDIKTKNITRIMRTNTWFQCKEPKNSSFGFDINKEKAHSGGIKILYHKSLSLFIFGIVHLLKNTSIYQ

SEQ ID NO: 8804 - protein, 89 aa, Homo Sapiens
DFETWDSYSPQGRRPETQGPKYCHSSFDAITVDRQQQLYIFKGSHFWEVAADGNVSEPRPLQERWVGLPPNIEAAAVSLNDGDFYFFKA

SEQ ID NO: 8805 - protein, 189 aa, Homo Sapiens
KYGYLNEQVPKAPTSTRFSDAIRAFQWVSQLPVSGVLDRATLRQMTRPRCGVTDTNSYAAWAERISDLFARHRTKMRRKKRFAKQGGALAHAFLPRRGEAHFDQDERWSLSRRRGRNLFVVLAHEIGHTLGLTHSPAPRALMAPYYKRLGRDALLSWDDVLAVQSLYGKPLGGSVAVQLPGKLFTDFET

SEQ ID NO: 8806 - protein, 130 aa, Homo Sapiens
MVARVGLLLRALQLLLWGHLDAQPAERGGQELRKEAEAFLEKYGYLNEQVPKAPTSTRFSDAIRAFQWVSQLPVSGVLDRATLRQMTRPRCGVTDTNSYAAWAERISDLFARHRTKMRRKKRFAKQGEHC

SEQ ID NO: 8807 - protein, 510 aa, Homo Sapiens
MVARVGLLLRALQLLLWGHLDAQPAERGGQELRKEAEAFLEKYGYLNEQVPKAPTSTRFSDAIRAFQWVSQLPVSGVLDRATLRQMTRPRCGVTDTNSYAAWAERISDLFARHRTKMRRKKRFAKQGNKWYKQHLSYRLVNWPEHLPEPAVRGAVRAAFQLWSNVSALEFWEAPATGPADIRLTFFQGDHNDGLGNAFDGPGGALAHAFLPRRGEAHFDQDERWSLSRRRGRNLFVVLAHEIGHTLGLTHSPAPRALMAPYYKRLGRDALLSWDDVLAVQSLYGKPLGGSVAVQLPGKLFTDFETWDSYSPQGRRPETQGPKYCHSSFDAITVGSHFWEVAADGNVSEPRPLQERWVGLPPNIEAAAVSLNDGDFYFFKGGRCWRFRGPKPVWGLPQLCRAGGLPRHPDAALFFPPLRRLILFKGARYYVLARGGLQVEPYYPRSLQDWGGIPEEVSGALPRPDGSIIFFRDDRYWRLDQAKLQATTSGRWATELPWMGCWHANSGSALF

SEQ ID NO: 8808 - protein, 393 aa, Homo Sapiens
MVARVGLLLRALQLLLWGHLDAQPAERGGQELRKEAEAFLEKYGYLNEQVPKAPTSTRFSDAIRAFQWVSQLPVSGVLDRATLRQMTRPRCGVTDTNSYAAWAERISDLFARHRTKMRRKKRFAKQGNKWYKQHLSYRLVNWPEHLPEPAVRGAVRAAFQLWSNVSALEFWEAPATGPADIRLTFFQGDHNDGLGNAFDGPGGALAHAFLPRRGEAHFDQDERWSLSRRRGRNLFVVLAHEIGHTLGLTHSPAPRALMAPYYKRLGRDALLSWDDVLAVQSLYGKPLGGSVAVQLPGKLFTDFETWDSYSPQGRRPETQGPKYCHSSFDAITVDRQQQLYIFKGSHFWEVAADGNVSEPRPLQERWVGLPPNIEAAAVSLNDGDFYFFKVQSV

SEQ ID NO: 8809 - protein, 520 aa, Homo Sapiens
MVARVGLLLRALQLLLWGHLDAQPAERGGQELRKEAEAFLEKYGYLNEQVPKAPTSTRFSDAIRAFQWVSQLPVSGVLDRATLRQMTRPRCGVTDTNSYAAWAERISDLFARHRTKMRRKKRFAKQGNKWYKQHLSYRLVNWPEHLPEPAVRGAVRAAFQLWSNVSALEFWEAPATGPADIRLTFFQGDHNDGLGNAFDGPGGALAHAFLPRRGEAHFDQDERWSLSRRRGRNLFVVLAHEIGHTLGLTHSPAPRALMAPYYKRLGRDALLSWDDVLAVQSLYGKPLGGSVAVQLPGKLFTDFETWDSYSPQGRRPETQGPKYCHSSFDAITVDRQQQLYIFKGSHFWEVAADGNVSEPRPLQERWVGLPPNIEAAAVSLNDGDFYFFKGGRCWRFRGPKPVWGLPQLCRAGGLPRHPDAALFFPPLRRLILFKGARYYVLARGGLQVEPYYPRSLQDWGGIPEEVSGALPRPDGSIIFFRDDRYWRLDQAKLQATTSGRWATELPWMGCWHANSGSALF

SEQ ID NO: 8810 - protein, 42 aa, Homo Sapiens
MKSLPILLLLCVAVCSAYPLDGAAREISRKLLRPQKRCETVC

SEQ ID NO: 8811 - protein, 477 aa, Homo Sapiens
MKSLPILLLLCVAVCSAYPLDGAARGEDTSMNLVQKYLENYYDLKKDVKQFVRRKDSGPVVKKIREMQKFLGLEVTGKLDSDTLEVMRKPRCGVPDVGHFRTFPGIPKWRKTHLTYRIVNYTPDLPKDAVDSAVEKALKVWEEVTPLTFSRLYEGEADIMISFAVREHGDFYPFDGPGNVLAHAYAPGPGINGDAHFDDDEQWTKDTTGTNLFLVAAHEIGHSLGLFHSANTEALMYPLYHSLTDLTRFRLSQDDINGIQSLYGPPPDSPETPLVPTEPVPPEPGTPANCDPALSFDAVSTLRGEILIFKDRHFWRKSLRKLEPELHLISSFWPSLPSGVDAAYEVTSKDLVFIFKGNQFWAIRGNEVRAGYPRGIHTLGFPPTVRKIDAAISDKEKNKTYFFVEDKYWRFDEKRNSMEPGFPKQIAEDFPGIDSKIDAVFEEFGFFYFFTGSSQLEFDPNAKKVTHTLKSNSWLNC

SEQ ID NO: 8812 - protein, 99 aa, Homo Sapiens
  misc_feature (1)..(1): Xaa can be any naturally occurring amino acid
XNQFWAIRGNEVRAGYPRGIHTLGFPPTVRKIDAAISDKEKNKTYFFVEDKYWRFDEKRNSMEPGFPKQIAEDFPGIDSKIDAVFEEFDRAGTECCLHS

SEQ ID NO: 8813 - protein, 267 aa, Homo Sapiens
MRLTVLCAVCLLPGSLALPLPQEAGGMSELQWEQAQDYLKRFYLYDSETKNANSLEAKLKEMQKFFGLPITGMLNSRVIEIMQKPRCGVPDVAEYSLFPNSPKWTSKVVTYRIVSYTRDLPHITVDRLVSKALNMWGKEIPLHFRKVVWGTADIMIGFARGAHGDSYPFDGPGNTLAHAFAPGTGLGGDAHFDEDERWTDGSSLGINFLYAATHELGHSLGMGHSSDPNAVMYPTYGNGDPQNFKLSQDDIKGIQKLYGKRSNSRKK

SEQ ID NO: 8814 - protein, 467 aa, Homo Sapiens [sequence omitted]

SEQ ID NO: 8815 - protein, 56 aa, Homo Sapiens
MFSLKTLPFLLLLHVQISKAFPVSSKEKNTKTVQHKAISEANQMQPPDLGLPSLQN

SEQ ID NO: 8816 - protein, 56 aa, Homo Sapiens; identical to SEQ ID NO: 8815

SEQ ID NO: 8817 - protein, 36 aa, Homo Sapiens
MFSLKTLPFLLLLHVQISKAFPVSSKEKNTKTVQNK

SEQ ID NO: 8818 - protein, 43 aa, Homo Sapiens
MFSLKTLPFLLLLHVQISKAFPVSSKEKNTKTVQRQKYLKSDK

SEQ ID NO: 8819 - protein, 344 aa, Homo Sapiens
  misc_feature (1)..(1): Xaa can be any naturally occurring amino acid
XKEKNTKTVQDYLEKFYQLPSNQYQSTRKNGTNVIVEKLKEMQRFFGLNVTGKPNEETLDMMKKPRCGVPDSGGFMLTPGNPKWERTNLTYRIRNYTPQLSEAEVERAIKDAFELWSVASPLIFTRISQGEADINIAFYQRDHGDNSPFDGPNGILAHAFQPGQGIGGDAHFDAEETWTNTSANYNLFLVAAHEFGHSLGLAHSSDPGALMYPNYAFRETSNYSLPQDDIDGIQAIYGLSSNPIQPTGPSTPKPCDPSLTFDAITTLRGEILFFKDRYFWRRHPQLQRVEMNFISLFWPSLPTGIQAAYEDFDRDLIFLFKDMITKDNSWSQVIPKAYQVPFQE

SEQ ID NO: 8820 - protein, 707 aa, Homo Sapiens
MSLWQPLVLVLLVLGCCFAAPRQRQSTLVLFPGDLRTNLTDRQLAEEYLYRYGYTRVAEMRGESKSLGPALLLLQKQLSLPETGELDSATLKAMRTPRCGVPDLGRFQTFEGDLKWHHHNITYWIQNYSEDLPRAVIDDAFARAFALWSAVTPLTFTRVYSRDADIVIQFGVAEHGDGYPFDGKDGLLAHAFPPGPGIQGDAHFDDDELWSLGKGVVVPTRFGNADGAACHFPFIFEGRSYSACTTDGRSDGLPWCSTTANYDTDDRFGFCPSERLYTQDGNADGKPCQFPFIFQGQSYSACTTDGRSDGYRWCATTANYDRDKLFGFCPTRADSTVMGGNSAGELCVFPFTFLGKEYSTCTSEGRGDGRLWCATTSNFDSDKKWGFCPDQGYSLFLVAAHEFGHALGLDHSSVPEALMYPMYRFTEGPPLHKDDVNGIRHLYGPRPEPEPRPPTTTTPQPTAPPTVCPTGPPTVHPSERPTAGPTGPPSAGPTGPPTAGPSTATTVPLSPVDDACNVNIFDAIAEIGNQLYLFKDGKYWRFSEGRGSRPQGPFLIADKWPALPRKLDSVFEERLSKKLFFFSGRQVWVYTGASVLGPRRLDKLGLGADVAQVTGALRSGRGKMLLFSGRRLWRFDVKAQMVDPRSASEVDRMFPGVPLDTHDVFQYREKAYFCQDRFYWRVSSRSELNQVDQVGYVTYDILQCPED

SEQ ID NO: 8821 - protein, 1228 aa, Homo Sapiens
MKGARLFVLLSSLWSGGIGLNNSKHSWTIPEDGNSQKTMPSASVPPNKIQSLQILPTTRVMSAEIATTPEARTSEDSLLKSTLPPSETSAPAEGVRNQTLTSTEKAEGVVKLQNLTLPTNASIKFNPGAESVVLSNSTLKFLQSFARKSNEQATSLNTVGGTGGIGGVGGTGGVGNRAPRETYLSRGDSSSSQRTDYQKSNFETTRGKNWCAYVHTRLSPTVILDNQVTYVPGGKGPCGWTGGSCPQRSQKISNPVYRMQHKIVTSLDWRCCPGYSGPKCQLRAQEQQSLIHTNQAESHTAVGRGVAEQQQQQGCGDPEVMQKMTDQVNYQAMKLTLLQKKIDNISLTVNDVRNTYSSLEGKVSEDKSREFQSLLKGLKSKSINVLIRDIVREQFKIFQNDMQETVAQLFKTVSSLSEDLESTRQIIQKVNESVVSIAAQQKFVLVQENRPTLTDIVELRNHIVNVRQEMTLTCEKPIKELEVKQTHLEGALEQEHSRSILYYESLNKTLSKLKEVHEQLLSTEQVSDQKNAPAAESVSNNVTEYMSTLHENIKKQSLMMLQMFEDLHIQESKINNLTVSLEMEKESLRGECEDMLSKCRNDFKFQLKDTEENLHVLNQTLAEVLFPMDNKMDKMSEQLNDLTYDMEILQPLLEQGASLRQTMTYEQPKEAIVIRKKIENLTSAVNSLNFIIKELTKRHNLLRNEVQGRDDALERRINEYALEMEDGLNKTMTIINNAIDFIQDNYALKETLSTIKDNSEIHHKCTSDMETILTFIPQFHRLNDSIQTLVNDNQRYNFVLQVAKTLAGIPRDEKLNQSNFQKMYQMFNETTSQVRKYQQNMSHLEEKLLLTTKISKNFETRLQDIESKVTQTLIPYYISVKKGSVVTNERDQALQLQVLNSRFKALEAKSIHLSINFFSLNKTLHEVLTMCHNASTSVSELNATIPKWIKHSLPDIQLLQKGLTEFVEPIIQIKTQAALSNLTCCIDRSLPGSLANVVKSQKQVKSLPKKINALKKPTVNLTTVLIGRTQRNTDNIIYPEEYSSCSRHPCQNGGTCINGRTSFTCACRHPFTGDNCTIKLVEENALAPDFSKGSYRYAPMVAFFASHTYGMTIPGPILFNNLDVNYGASYTPRTGKFRIPYLGVYVFKYTIESFSAHISGFLVVDGIDKLAFESENINSEIHCDRVLTGDALLELNYGQEVWLRLAKGTIPAKFPPVTTFSGYLLYRT

SEQ ID NO: 8822 - protein, 1228 aa, Homo Sapiens; identical to SEQ ID NO: 8821

SEQ ID NO: 8823 - protein, 970 aa, Homo Sapiens
MQHKIVTSLDWRCCPGYSGPKCQLRAQEQQSLIHTNQAESHTAVGRGVAEQQQQQGCGDPEVMQKMTDQVNYQAMKLTLLQKKIDNISLTVNDVRNTYSSLEGKVSEDKSREFQSLLKGLKSKSINVLIRDIVREQFKIFQNDMQETVAQLFKTVSSLSEDLESTRQIIQKVNESVVSIAAQQKFVLVQENRPTLTDIVELRNHIVNVRQEMTLTCEKPIKELEVKQTHLEGALEQEHSRSILYYESLNKTLSKLKEVHEQLLSTEQVSDQKNAPAAESVSNNVTEYMSTLHENIKKQSLMMLQMFEDLHIQESKINNLTVSLEMEKESLRGECEDMLSKCRNDFKFQLKDTEENLHVLNQTLAEVLFPMDNKMDKMSEQLNDLTYDMEILQPLLEQGASLRQTMTYEQPKEAIVIRKKIENLTSAVNSLNFIIKELTKRHNLLRNEVQGRDDALERRINEYALEMEDGLNKTMTIINNAIDFIQDNYALKETLSTIKDNSEIHHKCTSDMETILTFIPQFHRLNDSIQTLVNDNQRYNFVLQVAKTLAGIPRDEKLNQSNFQKMYQMFNETTSQVRKYQQNMSHLEEKLLLTTKISKNFETRLQDIESKVTQTLIPYYISVKKGSVVTNERDQALQLQVLNSRFKALEAKSIHLSINFFSLNKTLHEVLTMCHNASTSVSELNATIPKWIKHSLPDIQLLQKGLTEFVEPIIQIKTQAALSNLTCCIDRSLPGSLANVVKSQKQVKSLPKKINALKKPTVNLTTVLIGRTQRNTDNIIYPEEYSSCSRHPCQNGGTCINGRTSFTCACRHPFTGDNCTIKLVEENALAPDFSKGSYRYAPMVAFFASHTYGMTIPGPILFNNLDVNYGASYTPRTGKFRIPYLGVYVFKYTIESFSAHISGFLVVDGIDKLAFESENINSEIHCDRVLTGDALLELNYGQEVWLRLAKGTIPAKFPPVTTFSGYLLYRT

SEQ ID NO: 8824 - protein, 204 aa, Homo Sapiens
MAHKPVYQVKQKVLTSLAWRCCPGYTGPNCEHHDSMAIPEPADPGDSHQEPQDGPVSFKPGHLAAVINEVEVQQEQQEHLLGDLQNDVHRVADSLPGLWKALPGNLTAAVMEANQTGHEFPDRSLEQVLLPHVDTFLQVHFSPIWRSFNQSLHSLTQAIRNLSLDVEANRQAISRVQDSAVARADFQELGAKFEAKVQENTQRV

SEQ ID NO: 8825 - protein, 295 aa, Homo Sapiens
MGTSASWAGGMGIKGQPEAAKSWRKPKQSNWCPYPMSKLVTLLALCKTEKFLIHSQQPCPQGAPDCQKVKVMYRMAHKPVYQVKQKVLTSLAWRCCPGYTGPNCEHHDSMAIPEPADPGDSHQEPQDGPVSFKPGHLAAVINEVEVQQEQQEHLLGDLQNDVHRVADSLPGLWKALPGNLTAAVMEANQTGHEFPDRSLEQVLLPHVDTFLQVHFSPIWRSFNQSLHSLTQAIRNLSLDVEANRQAISRVQDSAVARADFQELGAKFEAKVQENTQRVGQLRQDVEDRLHAQHFT

SEQ ID NO: 8826 - protein, 109 aa, Homo Sapiens
MILSLLFSLGGPLGWGLLGAWAQASSTSLSDLQSSRTPGVWKAEAEDTGKDPVGRIMDSRIPALLRQEARTGGSALAPPVDLGVAQQPSPLACFPVTGAPTQCPSWSPY

SEQ ID NO: 8827 - protein, 949 aa, Homo Sapiens
MILSLLFSLGGPLGWGLLGAWAQASSTSLSDLQSSRTPGVWKAEAEDTGKDPVGRNWCPYPMSKLVTLLALCKTEKFLIHSQQPCPQGAPDCQKVKVMYRMAHKPVYQVKQKVLTSLAWRCCPGYTGPNCEHHDSMAIPEPADPGDSHQEPQDGPVSFKPGHLAAVINEVEVQQEQQEHLLGDLQNDVHRVADSLPGLWKALPGNLTAAVMEANQTGHEFPDRSLEQVLLPHVDTFLQVHFSPIWRSFNQSLHSLTQAIRNLSLDVEANRQAISRVQDSAVARADFQELGAKFEAKVQENTQRVGQLRQDVEDRLHAQHFTLHRSISELQADVDTKLKRLHKAQEAPGTNGSLVLATPGAGARPEPDSLQARLGQLQRNLSELHMTTARREEELQYTLEDMRATLTRHVDEIKELYSESDETFDQISKVERQVEELQVNHTALRELRVILMEKSLIMEENKEEVERQLLELNLTLQHLQGGHADLIKYVKDCNCQKLYLDLDVIREGQRDATRALEETQVSLDERRQLDGSSLQALQNAVDAVSLAVDAHKAEGERARAATSRLRSQVQALDDEVGALKAAAAEARHEVRQLHSAFAALLEDALRHEAVLAALFGEEVLEEMSEQTPGPLPLSYEQIRVALQDAASGLQEQALGWDELAARVTALEQASEPPRPAEHLEPSHDAGREEAATTALAGLARELQSLSNDVKNVGRCCEAEAGAGAASLNASLHGLHNALFATQRSLEQHQRLFHSLFGNFQGLMEANVSLDLGKLQTMLSRKGKKQQKDLEAPRKRDKKEAEPLVDIRVTGPVPGALGAALWEAGSPVAFYASFSEGTAALQTVKFNTTYINIGSSYFPEHGYFRAPERGVYLFAVSVEFGPGPGTGQLVFGGHHRTPVCTTGQGSGSTATVFAMAELQKGERVWFELTQGSITKRSLSGTAFGGFLMFKT

SEQ ID NO: 8828 - protein, 123 aa, Homo Sapiens
MSKLVTLLALCKTEKFLIHSQQPCPQGAPDCQKVKVMYRMAHKPVYQVKQKVLTSLAWRCCPGYTGPNCEHHDSMAIPEPADPGDSHQEPQDGPVSFKPGHLAAVINEVEVQQEQQEHLLGDL

SEQ ID NO: 8829 - protein, 613 aa, Homo Sapiens
MCCWPLLLLWGLLPGTAAGGSGRTYPHRTLLDSEGKYWLGWSQRGSQIAFRLQVRTAGYVGFGFSPTGAMASADIVVGGVAHGRPYLQDYFTNANRELKKDAQQDYHLEYAMENSTHTIIEFTRELHTCDINDKSITDSTVRVIWAYHHEDAGEAGPKYHDSNRGTKSLRLLNPEKTSVLSTALPYFDLVNQDVPIPNKDTTYWCQMFKIPVFQEKHHVIKVEPVIQRGHESLVHHILLYQCSNNFNDSVLESGHECYHPNMPDAFLTCETVIFAWAIGGEGFSYPPHVGLSLGTPLDPHYVLLEVHYDNPTYEEGLIDNSGLRLFYTMDIRKYDAGVIEAGLWVSLFHTIPPGMPEFQSEGHCTLECLEEALEAEKPSGIHVFAVLLHAHLAGRGIRLRHFRKGKEMKLLAYDDDFDFNFQEFQYLKEEQTILPGDNLITECRYNTKDRAEMTWGGLSTRSEMCLSYLLYYPRINLTRCASIPDIMEQLQFIGVKEIYRPVTTWPFIIKSPKQYKNLSFMDAMNKFKWTKKEGLSFNKLVLSLPVNVRCSKTDNAEWSIQGMTALPPDIERPYKAEPLVCGTSSSSSLHRDFSINLLVCLLLLSCTLSTKSL

SEQ ID NO: 8830 - protein, 115 aa, Homo Sapiens
MCCWPLLLLWGLLPGTAAGGSGRTYPHRTLLDSEGKYWLGWSQRGSQIAFRLQVRTAGYVGFGFSPTGAMASADIVVGGVAHGRPYLQPCLLVSKTEACDAKCLQQQGNCCRATC

SEQ ID NO: 8831 - protein, 545 aa, Homo Sapiens
MNSFLSVFRYPDFSFPYFPQDYFTNANRELKKDAQQDYHLEYAMENSTHTIIEFTRELHTCDINDKSITDSTVRVIWAYHHEDAGEAGPKYHDSNRGTKSLRLLNPEKTSVLSTALPYFDLVNQDVPIPNKDTTYWCQMFKIPVFQEKHHVIKVEPVIQRGHESLVHHILLYQCSNNFNDSVLESGHECYHPNMPDAFLTCETVIFAWAIGGEGFSYPPHVGLSLGTPLDPHYVLLEVHYDNPTYEEGLIDNSGLRLFYTMDIRKYDAGVIEAGLWVSLFHTIPPGMPEFQSEGHCTLECLEEALEAEKPSGIHVFAVLLHAHLAGRGIRLRHFRKGKEMKLLAYDDDFDFNFQEFQYLKEEQTILPGDNLITECRYNTKDRAEMTWGGLSTRSEMCLSYLLYYPRINLTRCASIPDIMEQLQFIGVKEIYRPVTTWPFIIKSPKQYKNLSFMDAMNKFKWTKKEGLSFNKLVLSLPVNVRCSKTDNAEWSIQGMTALPPDIERPYKAEPLVCGTSSSSSLHRDFSINLLVCLLLLSCTLSTKSL

SEQ ID NO: 8832 - protein, 125 aa, Homo Sapiens
MAVFLQLLPLLLSRAQGNPGASLDGRPGDRVNLSCGGVSHPIRWVWAPSFPACKGLSKGRRPILWASSSGTPTVPPLQPFVGRLRSLDSAPDPAAGRWVGARTGSFGPGLVAAQAPAPATDSTTP

SEQ ID NO: 8833 - protein, 193 aa, Homo Sapiens
MAVFLQLLPLLLSRAQGNPGASLDGRPGDRVNLSCGGVSHPIRWVWAPSFPACKGLSKGRRPILWASSSGTPTVPPLQPFVGRLRSLDSGIRRLELLLSAGDSGTFFCKGRHEDESRTVLHVLGDRTYCKAPGPTHALSPPHSSTCENRAPEASKGGRAQDSRGPGPGTEPALCGSGPSSPQQAPPAVHSGPC

SEQ ID NO: 8834 - protein, 197 aa, Homo Sapiens
MAVFLQLLPLLLSRAQGNPGASLDGRPGDRVNLSCGGVSHPIRWVWAPSFPACKGLSKGRRPILWASSSGTPTVPPLQPFVGRLRSLDSGIRRLELLLSAGDSGTFFCKGRHEDESRTVLHVLGDRTYCKAPGPTHAPLVKTEPQRPVKEEEPKIPGDLDQEPSLLYADLDHLALSRPRRLSTADPADASTIYAVVV

SEQ ID NO: 8835 - protein, 217 aa, Homo Sapiens
MAVFLQLLPLLLSRAQGNPGASLDGRPGDRVNLSCGGVSHPIRWVWAPSFPACKGLSKGRRPILWASSSGTPTVPPLQPFVGRLRSLDSGIRRLELLLSAGDSGTFFCKGRHEDESRTVLHVLGDRTYCKAPGPTHGACPRNRFDHSLDLLCPPHIAPLVKTEPQRPVKEEEPKIPGDLDQEPSLLYADLDHLALSRPRRLSTADPADASTIYAVVV

SEQ ID NO: 8836 - protein, 237 aa, Homo Sapiens
MAVFLQLLPLLLSRAQGNPGASLDGRPGDRVNLSCGGVSHPIRWVWAPSFPACKGLSKGRRPILWASSSGTPTVPPLQPFVGRLRSLDSGIRRLELLLSAGDSGTFFCKGRHEDESRTVLHVLGDRTYCKAPGPTHGSVYPQLLIPLLGAGLVLGLGALGLVWWLHRRLPPQPIRPLPRFALSPPHSSTCENRAPEASKGGRAQDSRGPGPGTEPALCGSGPSSPQQAPPAVHSGPC

SEQ ID NO: 8837 - protein, 222 aa, Homo Sapiens
MAVFLQLLPLLLSRAQGNPGASLDGRPGDRVNLSCGGVSHPIRWVWAPSFPACKGLSKGRRPILWASSSGTPTVPPLQPFVGRLRSLDSGIRRLELLLSAGDSGTFFCKGRHEDESRTVLHVLGDRTYCKAPGPTHGSVYPQLLIPLLGAGLVLGLGALGLVWWLHRRLPPQPIRPLPRFALSPPHSSTCENRAPEASKGGRAQDSRGPGPGTGKGMGMGRG

SEQ ID NO: 8838 - protein, 241 aa, Homo Sapiens
MAVFLQLLPLLLSRAQGNPGASLDGRPGDRVNLSCGGVSHPIRWVWAPSFPACKGLSKGRRPILWASSSGTPTVPPLQPFVGRLRSLDSGIRRLELLLSAGDSGTFFCKGRHEDESRTVLHVLGDRTYCKAPGPTHGSVYPQLLIPLLGAGLVLGLGALGLVWWLHRRLPPQPIRPLPRFAPLVKTEPQRPVKEEEPKIPGDLDQEPSLLYADLDHLALSRPRRLSTADPADASTIYAVVV

SEQ ID NO: 8839 - protein, 220 aa, Homo Sapiens
MAVFLQLLPLLLSRAQGNPGASLDGRPGDRVNLSCGGVSHPIRWVWAPSFPACKGLSKGRRPILWASSSGTPTVPPLQPFVGRLRSLDSGIRRLELLLSAGDSGTFFCKGRHEDESRTVLHVLGDRTYCKAPGPTHGSVYPQLLIPLLGAGLVLGLGALGLVWWLHRRLPPQPIRPLPRFAPLVKTEPQRPVKEEEPKIPGDLDQEPVRAWGWEGDSQNL

SEQ ID NO: 8840 - protein, 745 aa, Homo Sapiens
MGVPFFSSLRCMVDLGPCWAGGLTAEMKLLLALAGLLAILATPQPSEGAAPAVLGEVDTSLVLSSMEEAKQLVDKAYKERRESIKQRLRSGSASPMELLSYFKQPVAATRTAVRAADYLHVALDLLERKLRSLWRRPFNVTDVLTPAQLNVLSKSSGCAYQDVGVTCPEQDKYRTITGMCNNRRSPTLGASNRAFVRWLPAEYEDGFSLPYGWTPGVKRNGFPVALARAVSNEIVRFPTDQLTPDQERSLMFMQWGQLLDHDLDFTPEPAARASFVTGVNCETSCVQQPPCFPLKIPPNDPRIKNQADCIPFFRSCPACPGSNITIRNQINALTSFVDASMVYGSEEPLARNLRNMSNQLGLLAVNQRFQDNGRALLPFDNLHDDPCLLTNRSARIPCFLAGDTRSSEMPELTSMHTLLLREHNRLATELKSLNPRWDGERLYQEARKIVGAMVQIITYRDYLPLVLGPTAMRKYLPTYRSYNDSVDPRIANVFTNAFRYGHTLIQPFMFRLDNRYQPMEPNPRVPLSRVFFASWRVVLEGGIDPILRGLMATPAKLNRQNQIAVDEIRERLFEQVMRIGLDLPALNMQRSRDHGLPGYNAWRRFCGLPQPETVGQLGTVLRNLKLARKLMEQYGTPNNIDIWMGGVSEPLKRKGRVGPLLACIIGTQFRKLRDGDRFWWENEGVFSMQQRQALAQISLPRIICDNTGITTVSKNNIFMSNSYPRDFVNCSTLPALNLASWREAS

SEQ ID NO: 8841 - protein, 87 aa, Homo Sapiens [sequence omitted]

SEQ ID NO: 8842 - protein, 74 aa, Homo Sapiens
MWRSRWDASVLKAEALALLPCGLGMAFSQSHVMAARRHQHSRLIIEVDEYSSNPTQAFTFYNINQGRFQPPHVQ

SEQ ID NO: 8843 - protein, 119 aa, Homo Sapiens
MWRSRWDASVLKAEALALLPCGLGMAFSQSHVMAARRHQHSRLIIEVDEYSSNPTQAFTFYNINQGRFQPPHVQMVDPVPHDAPKPPGYTRFVCVSDTHSRTDPIQMPYGDVLIHAGDF

SEQ ID NO: 8844 - protein, 326 aa, Homo Sapiens
MWRSRWDASVLKAEALALLPCGLGMAFSQSHVMAARRHQHSRLIIEVDEYSSNPTQAFTFYNINQGRFQPPHVQMVDPVPHDAPKPPGYTRFVCVSDTHSRTDPIQMPYGDVLIHAGDFTELGLPSEVKKFNEWLGSLPYEYKIVIAGNHELTFDQEFMADLIKQDFYYFPSVSKLKPENYENVQSLLTNCIYLQDSEVTVRGFRIYGSPWQPWFYGWGFNLPRGQALLEKWNLIPEGVDILITHGPPLGFLDWVPKKMQRVGCVELLNTVQRRVQPRLHVFGHIHEGYGVMADGTTTYVNASVCTVNYQPVNPPIVIDLPTPRNS

SEQ ID NO: 8845 - protein, 326 aa, Homo Sapiens; identical to SEQ ID NO: 8844

SEQ ID NO: 8846 - protein, 209 aa, Homo Sapiens
MAASAGAGAVIAAPDSRRWLWSVLAAALGLLTAGVSALEVYTPKEIFVANGTQGKLTCKFKSTSTTGGLTSVSWSFQPEGADTTVSFFHYSQGQVYLGNYPPFKDRISWAGDLDKKDASINIENMQFIHNGTYICDVKNPPDIVVQPGHIRLYVVEKENLPVFPVWVVVGIVTAVVLGLTLLISMILAVLYRRKNSKRDYTGAQSYMHS

SEQ ID NO: 8847 - protein, 269 aa, Homo Sapiens
MAASAGAGAVIAAPDSRRWLWSVLAAALGLLTAGVSALEVYTPKEIFVANGTQGKLTCKFKSTSTTGGLTSVSWSFQPEGADTTVSFFHYSQGQVYLGNYPPFKDRISWAGDLDKKDASINIENMQFIHNGTYICDVKNPPDIVVQPGHIRLYVVEKENLPVFPVWVVVGIVTAVVLGLTLLISMILAVLYRRKNSKRDYTGCSTSESLSPVKQAPRKSPSDTEGLVKSLPSGSHQGPVIYAQLDHSGGHHSDKINKSESVVYADIRKN

SEQ ID NO: 8848 - protein, 119 aa, Homo Sapiens
MAASAGAGAVIAAPDSRRWLWSVLAAALGLLTAGVSALEVYTPKEIFVANGTQGKLTCKFKSTSTTGGLTSVSWSFQPEGADTTVSGPVIYAQLDHSGGHHSDKINKSESVVYADIRKN

SEQ ID NO: 8849 - protein, 95 aa, Homo Sapiens
MAASAGAGAVIAAPDSRRWLWSVLAAALGLLTAGVSALEVYTPKEIFVANGTQGKLTCKFKSTSTTGGLTSVSWSFQPEGADTTVSRICLCFQFG

SEQ ID NO: 8850 - protein, 183 aa, Homo Sapiens
PFSSVTAGVSALEVYTPKEIFVANGTQGKLTCKFKSTSTTGGLTSVSWSFQPEGADTTVSFFHYSQGQVYLGNYPPFKDRISWAGDLDKKDASINIENMQFIHNGTYICDVKNPPDIVVQPGHIRLYVVEKENLPVFPVWVVVGIVTAVVLGLTLLISMILAVLYRRKNSKRDYTGAQSYMHS

SEQ ID NO: 8851 - protein, 296 aa, Homo Sapiens
MGELMAFLLPLIIVLMVKHSDSRTHSLRYFRLGVSDPIHGVPEFISVGYVDSHPITTYDSVTRQKEPRAPWMAENLAPDHWERYTQLLRGWQQMFKVELKRLQRHYNHSDNVAHTIKQAWEANQHELLYQKNWLEEECIAWLKRFLEYGKDTLQRTEPPLVRVNRKETFPGVTALFCKAHGFYPPEIYMTWMKNGEEIVQEIDYGDILPSGDGTYQAWASIELDPQSSNLYSCHVEHCGVHMVLQVPQESETIPLVMKAVSGSIVLVIVLAGVGVLVWRRRPREQNGAIYLPTPDR

SEQ ID NO: 8852 - protein, 341 aa, Homo Sapiens
MGELMAFLLPLIIVLMVKHSDSRTHSLRYFRLGVSDPIHGVPEFISVGYVDSHPITTYDSVTRQKEPRAPWMAENLAPDHWERYTQLLRGWQQMFKVELKRLQRHYNHSGSHTYQRMIGCELLEDGSTTGFLQYAYDGQDFLIFNKDTLSWLAVDNVAHTIKQAWEANQHELLYQKNWLEEECIAWLKRFLEYGKDTLQRTEPPLVRVNRKETFPGVTALFCKAHGFYPPEIYMTWMKNGEEIVQEIDYGDILPSGDGTYQAWASIELDPQSSNLYSCHVEHCGVHMVLQVPQESETIPLVMKAVSGSIVLVIVLAGVGVLVWRRRPREQNGAIYLPTPDR

SEQ ID NO: 8853 - protein, 341 aa, Homo Sapiens; identical to SEQ ID NO: 8852

SEQ ID NO: 8854 - protein, 214 aa, Homo Sapiens
MGELMAFLLPLIIVLMVKHSDSRTHSLRYFRLGVSDPIHGVPEFISVGYVDSHPITTYDSVTRQKEPRAPWMAENLAPDHWERYTQLLRGWQQMFKVELKRLQRHYNHSGSHTYQRMIGCELLEDGSTTGFLQYAYDGQDFLIFNKDTLSWLAVDNVAHTIKQAWEANQHELLYQKNWLEEECIAWLKRFLEYGKDTLQRTEQNGAIYLPTPDR

SEQ ID NO: 8855 - protein, 249 aa, Homo Sapiens
MGELMAFLLPLIIVLMVKHSDSRTHSLRYFRLGVSDPIHGVPEFISVGYVDSHPITTYDSVTRQKEPRAPWMAENLAPDHWERYTQLLRGWQQMFKVELKRLQRHYNHSGSHTYQRMIGCELLEDGSTTGFLQYAYDGQDFLIFNKDTLSWLAVDNVAHTIKQAWEANQHELLYQKNWLEEECIAWLKRFLEYGKDTLQRTESETIPLVMKAVSGSIVLVIVLAGVGVLVWRRRPREQNGAIYLPTPDR

SEQ ID NO: 8856 - protein, 249 aa, Homo Sapiens; identical to SEQ ID NO: 8855

SEQ ID NO: 8857 - protein, 103 aa, Homo Sapiens
MALCALTRALRSLNLAPPTVAAPAPSLFPAAQMMNNGLLQQPSALMLLPCRPVLTSVALNANFVSWKSRTKYTITPVKMRKSGGRDHTGAGNVRSNSRPSIQR

SEQ ID NO: 8858 - protein, 96 aa, Homo Sapiens
MALCALTRALRSLNLAPPTVAAPAPSLFPAAQMMNNGLLQQPSALMLLPCRPVLTSVALNANFVSWKSRTKYTITPVKMRKSGGRDHTGGNKDRGI

SEQ ID NO: 8859 - protein, 225 aa, Homo Sapiens
MALCALTRALRSLNLAPPTVAAPAPSLFPAAQMMNNGLLQQPSALMLLPCRPVLTSVALNANFVSWKSRTKYTITPVKMRKSGGRDHTGRIRVHGIGGGHKQRYRMIDFLRFRPEETKSGPFEEKVIQVRYDPCRSADIALVAGGSRKRWIIATENMQAGDTILNSNHIGRMAVAAREGDAHPLGALPVGTLINNVESEPGRGAQYIRAAGAGNVRSNSRPSIQR

SEQ ID NO: 8860 - protein, 305 aa, Homo Sapiens [sequence omitted]

SEQ ID NO: 8861 - protein, 94 aa, Homo Sapiens
MALCALTRALRSLNLAPPTVAAPAPSLFPAAQVIHLTREEGCFHSGCRRWGLRACEAGVASLVRSHADDEQWPPPTALCLDVAPLPPSSYFCGP

SEQ ID NO: 8862 - protein, 49 aa, Homo Sapiens
MAASSLTVTLGRLASACSHSILRPSGPGAASLWSASRRFNSQSTSYLPG

SEQ ID NO: 8863 - protein, 49 aa, Homo Sapiens; identical to SEQ ID NO: 8862

SEQ ID NO: 8864 - protein, 150 aa, Homo Sapiens
MAASSLTVTLGRLASACSHSILRPSGPGAASLWSASRRFNSQSTSYLPGYVPKTSLSSPPWPEVVLPDPVEETRHHAEVVKKVNEMIVTGQYGRLFAVVHFASRQWKVTSEDLILIGNELDLACGERIRLEKVLLVGADNFTLLGKPLLG

SEQ ID NO: 8865 - protein, 205 aa, Homo Sapiens
MAASSLTVTLGRLASACSHSILRPSGPGAASLWSASRRFNSQSTSYLPGYVPKTSLSSPPWPEVVLPDPVEETRHHAEVVKKVNEMIVTGQYGRLFAVVHFASRQWKVTSEDLILIGNELDLACGERIRLEKVLLVGADNFTLLGKPLLGKDLVRVEATVIEKTESWPRIIMRFRKRKNFKKKRIVTTPQTVLRINSIEIAPCLL

SEQ ID NO: 8866 - protein, 36 aa, Homo Sapiens
MAASSLTVTLGRLASACSHSILRPSGPGADMFLKHP

SEQ ID NO: 8867 - protein, 120 aa, Homo Sapiens
MIVTGQYGRLFAVVHFASRQWKVTSEDLILIGNELDLACGERIRLEKVLLVGADNFTLLGKPLLGKDLVRVEATVIEKTESWPRIIMRFRKRKNFKKKRIVTTPQTVLRINSIEIAPCLL

SEQ ID NO: 8868 - protein, 195 aa, Homo Sapiens
MIVTGQYGRLFAVVHFASRQWKVTSEDLILIGNELDLACGERIRLEKVLLVGADNFTLLGKPLLGKDLVRVEATVIEKTESWPRIIMRFRKRKNFKKKRSKLEKVPLGPVARCWLPRRMRTEGVGHVGLGTGSPGRSQPGCHCPLATLILEGAPRGSSLAPLLLHAPRVTPPRSPSPPRSARDPTSLPFSSTLRA

SEQ ID NO: 8869 - protein, 38 aa, Homo Sapiens
EMESELTACVDVAGALWIHNLRSRGKLALGKSTTVEDK

SEQ ID NO: 8870 - protein, 212 aa, Homo Sapiens
MAAAVLGQLGALWIHNLRSRGKLALGLLSFHSVLPQSYIHTSASLDISRKWEKKNKIVYPPQLPGEPRRPAEIYHCRRQIKYSKDKMWYLAKLIRGMSIDQALAQLEFNDKKGAKIIKEVLLEAQDMAVRDHNVEFRSNLYIAESTSGRGQCLKRIRYHGRGRFGIMEKVYCHYFVKLVEGPPPPPEPPKTAVAHAKEYIQQLRSRTIVHTL

SEQ ID NO: 8871 - protein, 206 aa, Homo Sapiens
MAAAVLGQLGALWIHNLRSRGKLALGVLPQSYIHTSASLDISRKWEKKNKIVYPPQLPGEPRRPAEIYHCRRQIKYSKDKMWYLAKLIRGMSIDQALAQLEFNDKKGAKIIKEVLLEAQDMAVRDHNVEFRSNLYIAESTSGRGQCLKRIRYHGRGRFGIMEKVYCHYFVKLVEGPPPPPEPPKTAVAHAKEYIQQLRSRTIVHTL

SEQ ID NO: 8872 - protein, 232 aa, Homo Sapiens
MAAAVLGQLGKDFLVVKRQKGVEMESELTACVDVAGALWIHNLRSRGKLALGVLPQSYIHTSASLDISRKWEKKNKIVYPPQLPGEPRRPAEIYHCRRQIKYSKDKMWYLAKLIRGMSIDQALAQLEFNDKKGAKIIKEVLLEAQDMAVRDHNVEFRSNLYIAESTSGRGQCLKRIRYHGRGRFGIMEKVYCHYFVKLVEGPPPPPEPPKTAVAHAKEYIQQLRSRTIVHTL

SEQ ID NO: 8873 - protein, 126 aa, Homo Sapiens
MWYLAKLIRGMSIDQALAQLEFNDKKGAKIIKEVLLEAQDMAVRDHNVEFRSNLYIAESTSGRGQCLKRIRYHGRGRFGIMEKVYCHYFVKLVEGPPPPPEPPKTAVAHAKEYIQQLRSRTIVHTL

SEQ ID NO: 8874 - protein, 68 aa, Homo Sapiens
MRLSALLALASKVTLPPHYRYGMSPPGSVADKRKNPPWIRRRPVVVEPISDEDWYLFCGDTVEILEGK

SEQ ID NO: 8875 - protein, 99 aa, Homo Sapiens
MRLSALLALASKVTLPPHYRYGMSPPGSVADKRKNPPWIRRRPVVVEPISDEDWYLFCGDTVEILEGKDAGKQGKVVQVIRQRNWVVVGGLNTHYRYIG

SEQ ID NO: 8876 - protein, 173 aa, Homo Sapiens
MRLSALLALASKVTLPPHYRYGMSPPGSVADKRKNPPWIRRRPVVVEPISDEDWYLFCGDTVEILEGKDAGKQGKVVQVIRQRNWVVVGGLNTHYRYIGKTMDYRGTMIPSEAPLLHRQVKLVDPMDRKPTEIEWRFTEAGERVRVSTRSGRIIPKPEFPRADGIVPETWIDG

SEQ ID NO: 8877 - protein, 216 aa, Homo Sapiens
MRLSALLALASKVTLPPHYRYGMSPPGSVADKRKNPPWIRRRPVVVEPISDEDWYLFCGDTVEILEGKDAGKQGKVVQVIRQRNWVVVGGLNTHYRYIGKTMDYRGTMIPSEAPLLHRQVKLVDPMDRKPTEIEWRFTEAGERVRVSTRSGRIIPKPEFPRADGIVPETWIDGPKDTSVEDALERTYVPCLKTLQEEVMEAMGIKETRKYKKVYWY

SEQ ID NO: 8878 - protein, 216 aa, Homo Sapiens; identical to SEQ ID NO: 8877

SEQ ID NO: 8879 - protein, 148 aa, Homo Sapiens
MASVVLALRTRTAVTSLLSPTPATALAVRYASKKSGGSSKNLGGKSSGRRQGIKKMEGHYVHAGNIIATQRHFRWHPGAHVGVGKNKCLYALEEGIVRYTKEVYVPHPRNTEAVDLITRLPKGAVLYKTFVHVVPAKPEGTFKLVAML

SEQ ID NO: 8880 - protein, 94 aa, Homo Sapiens
MASVVLALRTRTAVTSLLSPTPATALAVRYASKKSGGSSKNLGGKSSGRRQGIKKMEGHYVHAGNIIATQRHFRWHPGAHVSCSVAAPLFPFLG

SEQ ID NO: 8881 - protein, 84 aa, Homo Sapiens
MASVVLALRTRTAVTSLLSPTPATALAVRYASKKSGGSSKNLGGKSSGRRQGIKKMEGHYVHAGNIIATQRHFRWHPGAHWRWK

SEQ ID NO: 8882 - protein, 93 aa, Homo Sapiens
MEGHYVHAGNIIATQRHFRWHPGAHVGVGKNKCLYALEEGIVRYTKEVYVPHPRNTEAVDLITRLPKGAVLYKTFVHVVPAKPEGTFKLVAML

SEQ ID NO: 8883 - protein, 93 aa, Homo Sapiens; identical to SEQ ID NO: 8882

SEQ ID NO: 8884 - protein, 136 aa, Homo Sapiens
  misc_feature (1)..(1): Xaa can be any naturally occurring amino acid
XSPTPATALAVRYASKKSGGSSKNLGGKSSGRRQGIKKMEGHYVHAGNIIATQRHFRWHPGAHVCVLQVGVGKNKCLYALEEGIVRYTKEVYVPHPRNTEAVDLITRLPKGAVLYKTFVHVVPAKPEGTFKLVAML

SEQ ID NO: 8885 - protein, 188 aa, Homo Sapiens [sequence omitted]

SEQ ID NO: 8886 - protein, 107 aa, Homo Sapiens
MALAMLVLVVSPWSAARGVLRNYWERLLRKLPQSRPGFPSPPWGPALAVQGPAMFTEPANDTSGSKENSSLLDSIFWMAAPKNRRTIEVNRCRRRNPQKLIKVKVMH

SEQ ID NO: 8887 - protein, 42 aa, Homo Sapiens
  misc_feature (1)..(1): Xaa can be any naturally occurring amino acid
XENSSLLDSIFWMAAPKNRRTIEVNRCRRRNPQKLIKVKSSC

SEQ ID NO: 8888 - protein, 36 aa, Homo Sapiens
MAVLAGSLLGPTSRLAGMSISRATSNARTSTAGSGA

SEQ ID NO: 8889 - protein, 92 aa, Homo Sapiens [sequence omitted]

SEQ ID NO: 8890 - protein, 92 aa, Homo Sapiens [sequence omitted]

SEQ ID NO: 8891 - protein, 92 aa, Homo Sapiens [sequence omitted]

SEQ ID NO: 8892 - protein, 184 aa, Homo Sapiens
MPRRPSGYFLSSGGAGSGSGRALGEGSGSQSRNSWSSVLTVSGHSSITMWLPSSMSFRNARSRICRRRRAQGLERLWAPESPAAGTAGPTADMAVLAGSLLGPTSRSAALLGGRWLQPRAWLGFPDAWGLPTPQQARGKARGNEYQPSNIKRKNKHGWVRRLSTPAGVQVILRRMLKGRKSLSH

SEQ ID NO: 8893 - protein, 95 aa, Homo Sapiens
MAASAFAGAVRAASGILRPLNILASSTYRNCVKNASLISALSTGRFSHIQTPVVSSTPRLTTSERNLTCGHTSVILNRLAIRKNYGKRHLQGRSD

SEQ ID NO: 8894 - protein, 170 aa, Homo Sapiens
MAASAFAGAVRAASGILRPLNILASSTYRNCVKNASLISALSTGRFSHIQTPVVSSTPRLTTSERNLTCGHTSVILNRMAPVLPSVLKLPVRSLTYFSARKGKRKTVKAVIDRFLRLHCGLWVRRKAGYKKKLWKKTPARKKRLREFVFCNKTQSKLLDKMTTSFWKRRN

SEQ ID NO: 8895 - protein, 177 aa, Homo Sapiens
MAASAFAGAVRAASGILRPLNILASSTYRNCVKNASLISALSTGRFSHIQTPVVSSTPRLTTSERNLTCGHTSVILNRMAPVLPSVLKLPVRSLTYFSARKGKRKTVKAVIDRFLRLHCGLWVRRKAGYKKKLWKKTPARKKRLREFVFCNKTQSKLLDKMTTSFWKRRNWHSPICR

SEQ ID NO: 8896 - protein, 188 aa, Homo Sapiens [sequence omitted]

SEQ ID NO: 8897 - protein, 122 aa, Homo Sapiens
MAALGTVLFSVRRLHCSVAAWAGGQWRLQQGLAANPSGYGPLTELPDWSYADGRPAPPMKGQLRRKAERETFARRVVLLSQEMDAGLQAWQLRQQKLQEEQRKQENALKPKGASLKSPLPSQ

SEQ ID NO: 8898 - protein, 110 aa, Homo Sapiens
MAALGTVLFSVRRLHCSVAAWAGGQWRLQQGLAANPSGYGPLTELPDWSYADGRPAPPMKGQLRRKAERETFAVSETSCTAVTGNGRWITSMAAQAAEVAGRTKEAGKCS

SEQ ID NO: 8899 - protein, 72 aa, Homo Sapiens
MAALGTVLFSVRRLHCSVAAWAGGQWRLQQGLAANPSGYGPLTELPDWSYAETSCTAVTGNGRWITSMAAQA

SEQ ID NO: 8900 - protein, 123 aa, Homo Sapiens
MAALGTVLFTGVRRLHCSVAAWAGGQWRLQQGLAANPSGYGPLTELPDWSYADGRPAPPMKGQLRRKAERETFARRVVLLSQEMDAGLQAWQLRQQKLQEEQRKQENALKPKGASLKSPLPSQ

SEQ ID NO: 8901 - protein, 87 aa, Homo Sapiens
MAALGTVLFTGVRRLHCSVAAWAGGQWRLQQGLAANPSGYGPLTELPDWSYAETSCTAVTGNGRWITSMAAQAAEVAGRTKEAGKCS

SEQ ID NO: 8902 - protein, 64 aa, Homo Sapiens
MKGQLRRKAERETFARRVVLLSQEMDAGLQAWQLRQQKLQEEQRKQENALKPKGASLKSPLPSQ

SEQ ID NO: 8903 - protein, 64 aa, Homo Sapiens; identical to SEQ ID NO: 8902

SEQ ID NO: 8904 - protein, 64 aa, Homo Sapiens; identical to SEQ ID NO: 8902

SEQ ID NO: 8905 - protein, 52 aa, Homo Sapiens
MKGQLRRKAERETFAVSETSCTAVTGNGRWITSMAAQAAEVAGRTKEAGKCS

SEQ ID NO: 8906 - protein, 51 aa, Homo Sapiens
MRRRVVLLSQEMDAGLQAWQLRQQKLQEEQRKQENALKPKGASLKSPLPSQ

SEQ ID NO: 8907 - protein, 52 aa, Homo Sapiens
MVKIFSTCYLLDELYCCHRKWTLDYKHGSSGSRSCRKNKGSRKMLLNPKGLH

SEQ ID NO: 8908 - protein, 5 aa, Homo Sapiens
MAAVG

SEQ ID NO: 8909 - protein, 9 aa, Homo Sapiens
MAAVGSLLG

SEQ ID NO: 8910 - protein, 164 aa, Homo Sapiens
MAAVGSLLGLAASSWLGGQNASDHSLWLLRKPRGSSCPGTGHQLCRLRQSTVKATGPALRRLHTSSWRADSSRASLTRVHRQAYARLYPVLLVKQDGSTIHIRYREPRRMLAMPIDLDTLSPEERRARLRKREAQLQSRKEYEQELSDDLHVERYRQFWTRTKK

SEQ ID NO: 8911 - protein, 164 aa, Homo Sapiens; identical to SEQ ID NO: 8910

SEQ ID NO: 8912 - protein, 24 aa, Homo Sapiens
MAAVGSLLGRLRQSTVKATGPALR

SEQ ID NO: 8913 - protein, 43 aa, Homo Sapiens
MAAVGSLLGRLRQSTVKATGPALRRLHTSSWRADSSRASLTRV

SEQ ID NO: 8914 - protein, 76 aa, Homo Sapiens
MAAVGSLLGRLRQSTVKATGPALRRLHTSSWRADSSRASLTRVHRQAYARLYPVLLVKQDGSTIHIRYREPRRMLA

SEQ ID NO: 8915 - protein, 128 aa, Homo Sapiens
MAAVGSLLGRLRQSTVKATGPALRRLHTSSWRADSSRASLTRVHRQAYARLYPVLLVKQDGSTIHIRYREPRRMLAMPIDLDTLSPEERRARLRKREAQLQSRKEYEQELSDDLHVERYRQFWTRTKK

SEQ ID NO: 8916 - protein, 128 aa, Homo Sapiens; identical to SEQ ID NO: 8915

SEQ ID NO: 8917 - protein, 128 aa, Homo Sapiens; identical to SEQ ID NO: 8915

SEQ ID NO: 8918 - protein, 128 aa, Homo Sapiens; identical to SEQ ID NO: 8915

SEQ ID NO: 8919 - protein, 128 aa, Homo Sapiens; identical to SEQ ID NO: 8915

SEQ ID NO: 8920 - protein, 128 aa, Homo Sapiens; identical to SEQ ID NO: 8915

SEQ ID NO: 8921 - protein, 128 aa, Homo Sapiens; identical to SEQ ID NO: 8915

SEQ ID NO: 8922 - protein, 128 aa, Homo Sapiens; identical to SEQ ID NO: 8915

SEQ ID NO: 8923 - protein, 128 aa, Homo Sapiens; identical to SEQ ID NO: 8915

SEQ ID NO: 8924 - protein, 128 aa, Homo Sapiens; identical to SEQ ID NO: 8915

SEQ ID NO: 8925 - protein, 128 aa, Homo Sapiens; identical to SEQ ID NO: 8915

SEQ ID NO: 8926 - protein, 128 aa, Homo Sapiens; identical to SEQ ID NO: 8915

SEQ ID NO: 8927 - protein, 128 aa, Homo Sapiens; identical to SEQ ID NO: 8915

SEQ ID NO: 8928 - protein, 128 aa, Homo Sapiens; identical to SEQ ID NO: 8915

SEQ ID NO: 8929 - protein, 128 aa, Homo Sapiens; identical to SEQ ID NO: 8915

SEQ ID NO: 8930 - protein, 128 aa, Homo Sapiens; identical to SEQ ID NO: 8915

SEQ ID NO: 8931 - protein, 55 aa, Homo Sapiens
MLAMPIDLDTLSPEERRARLRKREAQLQSRKEYEQELSDDLHVERYRQFWTRTKK

SEQ ID NO: 8932 - protein, 55 aa, Homo Sapiens; identical to SEQ ID NO: 8931

SEQ ID NO: 8933 - protein, 55 aa, Homo Sapiens; identical to SEQ ID NO: 8931

SEQ ID NO: 8934 - protein, 128 aa, Homo Sapiens
MAAFMLGSLLRTFKQMVPSSASGQVRSHYVDWRMWRDVKRRKMAYEYADERLRINSLRKNTILPKILQDVADEEIAALPRDSCPVRIRNRCVMTSRPRGVKRRWRLSRIVFRHLADHGQLSGIQRATW

SEQ ID NO: 8935 - protein, 60 aa, Homo Sapiens
MAAFMLGSLLRTFKQVRPLLLSTPLPLTAESHNPRVPHGSATCSARWFLHQLQAKFEVTM

SEQ ID NO: 8936 - protein, 200 aa, Homo Sapiens
GTTVLLWSLLRSSPGVERVCFRARIQPWHGGLLQPLPCSFEMGLPRRRFSSEAASYLLKSILAESGSPETKKPTFMDEEVQSILTKMTGLNLQKTFKPAIQELKPPTYKLMTQAQLEEATRQAVEAAKVRLKMPPVLEERVPINDVLAEDKILEGTETTKYVFTDISYSIPHRERFIVVREPSGTLRKASWEERDRMIQV

SEQ ID NO: 8937 - protein, 360 aa, Homo Sapiens
MAPLGTTVLLWSLLRSSPGVERVCFRARIQPWHGGLLQPLPCSFEMGLPRRRFSSEAAESGSPETKKPTFMDEEVQSILTKMTGLNLQKTFKPAIQELKPPTYKLMTQAQLEEATRQAVEAAKVRLKMPPVLEERVPINDVLAEDKILEGTETTKYVFTDISYSIPHRERFIVVREPSGTLRKASWEERDRMIQVYFPKEGRKILTPIIFKEENLRTMYSQDRHVDVLNLCFAQFEPDSTEYIKVHHKTYEDIDKRGKYDLLRSTRYFGGMVWYFVNNKKIDGLLIDQIQRDLIDDATNLVQLYHVLHPDGQSAQGAKDQAAEGINLIKVFAKTEAQKGAYIELTLQTYQEALSRHSAAS

SEQ ID NO: 8938 - protein, 360 aa, Homo Sapiens; identical to SEQ ID NO: 8937

SEQ ID NO: 8939 - protein, 168 aa, Homo Sapiens
MAPLGTTVLLWSLLRSSPGVERVCFRARIQPWHGGLLQPLPCSFEMGLPRRRFSSEAESGSPETKKPTFMDEEVQSILTKMTGLNLQKTFKPAIQELKPPTYKLMTQAQLEEATRQAVEAAKVRLKMPPVLEERVPINDVLAEDKILEGTETTKYVFTDISYSIPHRC

SEQ ID NO: 8940 - protein, 359 aa, Homo Sapiens
MAPLGTTVLLWSLLRSSPGVERVCFRARIQPWHGGLLQPLPCSFEMGLPRRRFSSEAESGSPETKKPTFMDEEVQSILTKMTGLNLQKTFKPAIQELKPPTYKLMTQAQLEEATRQAVEAAKVRLKMPPVLEERVPINDVLAEDKILEGTETTKYVFTDISYSIPHRERFIVVREPSGTLRKASWEERDRMIQVYFPKEGRKILTPIIFKEENLRTMYSQDRHVDVLNLCFAQFEPDSTEYIKVHHKTYEDIDKRGKYDLLRSTRYFGGMVWYFVNNKKIDGLLIDQIQRDLIDDATNLVQLYHVLHPDGQSAQGAKDQAAEGINLIKVFAKTEAQKGAYIELTLQTYQEALSRHSAAS

SEQ ID NO: 8941 - protein, 319 aa, Homo Sapiens
MSRNETEHRYLGTHFGAESGSPETKKPTFMDEEVQSILTKMTGLNLQKTFKPAIQELKPPTYKLMTQAQLEEATRQAVEAAKVRLKMPPVLEERVPINDVLAEDKILEGTETTKYVFTDISYSIPHRERFIVVREPSGTLRKASWEERDRMIQVYFPKEGRKILTPIIFKEENLRTMYSQDRHVDVLNLCFAQFEPDSTEYIKVHHKTYEDIDKRGKYDLLRSTRYFGGMVWYFVNNKKIDGLLIDQIQRDLIDDATNLVQLYHVLHPDGQSAQGAKDQAAEGINLIKVFAKTEAQKGAYIELTLQTYQEALSRHSAAS

SEQ ID NO: 8942 - protein, 51 aa, Homo Sapiens
MVQTGRSEGIPGWEQSMSKGREIPGSDSESGSPETKKPTFMDEEVQSILTK

SEQ ID NO: 8943 - protein, 121 aa, Homo Sapiens
  misc_feature (1)..(1): Xaa can be any naturally occurring amino acid
XKYVFTDISYSIPHRERFIVVREPSGTLRKASWEERDRMIQVYFPKEGRKILTPIIFKEENLRFEPDSTEYIKVHHKTYEDIDKRGKYDLLRSTRYFGGMVWYFVNNKKIDGLLIDQIQRD

SEQ ID NO: 8944 - protein, 165 aa, Homo Sapiens
  misc_feature (1)..(1): Xaa can be any naturally occurring amino acid
XTTVLLWSLLRSSPGVERVCFRARIQPWHGGLLQPLPCSFEMGLPRRRFSSEAAESGSPETKKPTFMDEEVQSILTKMTGLNLQKTFKPAIQELKPPTYKLMTQAQLEEATRQAVEAAKVRLKMPPVLEERVPINDVLAEDKILEGTETTKYVFTDISYSIPHRC

SEQ ID NO: 8945 - protein, 86 aa, Homo Sapiens
MAALCRTRAVAAESHFLRVFLFFRPFRGVGTESGSESGSSNAKEPKTRAGGFASALERHSELLQKVEPLQKEIPERNQGPVAAIRS

SEQ ID NO: 8946 - protein, 187 aa, Homo Sapiens
MAALCRTRAVAAESHFLRVFLFFRPFRGVGTESGSESGSSNAKEPKTRAGGFASALERHSELLQKVEPLQKGSPKNVESFASMLRHSPLTQMGPAKDKLVIGRIFHIVENDLYIDFGGKFHCVCRRPEVDGEKYQKGTRVRLRLLDLELTSRFLGATTDTTVLEANAVLLGIQESKDSRSKEEHHEK

SEQ ID NO: 8947 - protein, 109 aa, Homo Sapiens
MLPRLVLNSWVQVILLRWPPKVLGLQMTDMGPAKDKLVIGRIFHIVENDLYIDFGGKFHCVCRRPEVDGEKYQKGTRVRLRLLDLELTSRFLGATTDTTVLEANAVLLG

SEQ ID NO: 8948 - protein, 125 aa, Homo Sapiens
MLPRLVLNSWVQVILLRWPPKVLGLQMTDMGPAKDKLVIGRIFHIVENDLYIDFGGKFHCVCRRPEVDGEKYQKGTRVRLRLLDLELTSRFLGATTDTTVLEANAVLLGIQESKDSRSKEEHHEK

SEQ ID NO: 8949 - protein, 103 aa, Homo Sapiens
MLRHSPLTQMGPAKDKLVIGRIFHIVENDLYIDFGGKFHCVCRRPEVDGEKYQKGTRVRLRLLDLELTSRFLGATTDTTVLEANAVLLGIQESKDSRSKEEHH

SEQ ID NO: 8950 - protein, 143 aa, Homo Sapiens
  misc_feature (1)..(1): Xaa can be any naturally occurring amino acid
XFCVAFAYWAGSVHTALVFLGLNAGGKGSPKNVESFASMLRHSPLTQMGPAKDKLVIGRIFHIVENDLYIDFGGKFHCVCRRPEVDGEKYQKGTRVRLRLLDLELTSRFLGATTDTTVLEANAVLLGIQESKDSRSKEEHHEK

SEQ ID NO: 8951 - protein, 83 aa, Homo Sapiens
  misc_feature (1)..(1): Xaa can be any naturally occurring amino acid
XMLRHSPLTQMGPAKDKLVIGRIFHIVENDLYIDFGGKFHCVCRRPEVDGESPISWYAVWRRFSQVMITCFSSNSDFGKHRKR

SEQ ID NO: 8952 - protein, 163 aa, Homo Sapiens
  misc_feature (1)..(1): Xaa can be any naturally occurring amino acid
XTRAVAAESHFLRVFLFFRPFRGVGTESGSESGSSNAKEPKTRAGGFASALERHSELLQKRWGFAMLPRLVLNSWVQVILLRWPPKVLGLQMTDGSPKNVESFASMLRHSPLTQMGPAKDKLVIGRIFHIVENDLYIDFGGKFHCVCRRPEVDGEKYQKGTRV

SEQ ID NO: 8953 - protein, 170 aa, Homo Sapiens
MESTSQDRRATHVITIKPNETVLTAFPYRPHSSLLDFLKGEPRVLGATQILLALIIVGFGTIFALNYIGFSQRLPLVVLTGYPFWGALIFILTGYLTVTDKKSKLLGQGVTGMNVISSLVAITGITFTILSYRHQDKYCQMPSFEEICVFSRTLFIDFILLTPPHSSHFL

SEQ ID NO: 8954 - protein, 712 aa, Homo Sapiens
MESTSQDRRATHVITIKPNETVLTAFPYRPHSSLLDFLKGEPRVLGATQILLALIIVGFGTIFALNYIGFSQRLPLVVLTGYPFWGALIFILTGYLTVTDKKSKLLGQGVTGMNVISSLVAITGITFTILSYRHQDKYCQMPSFEEICVFSRTLFIGILLILLIISIAELSISVTIASFRSKCWTQSDEVLFFLPSDVTQNSEQPAPEENDQLQFVLQEEFSSDDSTTNAQSVIFGGYAFFKLTLSRSPLVSQPGNKGREFVPDEQKQSILPSPKFSEEEIEPLPPTLEKKPSENMSIQLDSTFKQMKDEDLQSAIVQPSQMQTKLLQDQAASLQVFPSHSALKLEDISPEDLPSQALPVEGLSEQTMPSKSTSSHVKQSSNLTANDLPPQGILSQDTSSQDMLFHDMTSQDMQSLDMLSQDTPSHAMPPQDIPSQDMLSQALSAHAILPEASTSHIVQFPEIQHLLQQPPDLQPENTEPQNQQILQMSYQDIRSEVMEETKEWKSEEELHRRKSSRRHSLNQQTKALQYLRRHSLDVQAKGQKSSKRHSLDQQSKGWQSPKQKSLDQQIKDWLSPKRHSVDKQAQLNQTKEQLPDQQAEDQQAKGEQYPEGQSKDGQVKDQQTDKEQNSKKQTQDQQTEDQPAQEKKSPKGQFQNVQAEGQQAQVEKVPKLLCQDSESQIQQYQFWQFHKGNLQAGQPRTVNLLAKNPLTG

SEQ ID NO: 8955 - protein, 679 aa, Homo Sapiens
MESTSQDRRATHVITIKPNETVLTAFPYRPHSSLLDFLKGEPRVLGATQILLALIIVGFGTIFALNYIGFSQRLPLVVLTGYPFWGALIFILTGYLTVTDKKSKLLGQGVTGMNVISSLVAITGITFTILSYRHQDKYCQMPSFEEICVFSRTLFIVLFFLPSDVTQNSEQPAPEENDQLQFVLQEEFSSDDSTTNAQSVIFGGYAFFKLTLSRSPLVSQPGNKGREFVPDEQKQSILPSPKFSEEEIEPLPPTLEKKPSENMSIQLDSTFKQMKDEDLQSAIVQPSQMQTKLLQDQAASLQVFPSHSALKLEDISPEDLPSQALPVEGLSEQTMPSKSTSSHVKQSSNLTANDLPPQGILSQDTSSQDMLFHDMTSQDMQSLDMLSQDTPSHAMPPQDIPSQDMLSQALSAHAILPEASTSHIVQFPEIQHLLQQPPDLQPENTEPQNQQILQMSYQDIRSEVMEETKEWKSEEELHRRKSSRRHSLNQQTKALQYLRRHSLDVQAKGQKSSKRHSLDQQSKGWQSPKQKSLDQQIKDWLSPKRHSVDKQAQLNQTKEQLPDQQAEDQQAKGEQYPEGQSKDGQVKDQQTDKEQNSKKQTQDQQTEDQPAQEKKSPKGQFQNVQAEGQQAQVEKVPKLLCQDSESQIQQYQFWQFHKGNLQAGQPRTVNLLAKNPLTG

SEQ ID NO: 8956 - protein, 153 aa, Homo Sapiens
MESTSQDRRATHVITIKPNETVLTAFPYRPHSSLLDFLKGEPRVLGATQILLALIIVGFGTIFALNYIGFSQRLPLVVLTGYPFWGALIGQGVTGMNVISSLVAITGITFTILSYRHQDKYCQMPSFEEICVFSRTLFIDFILLTPPHSSHFL

SEQ ID NO: 8957 - protein, 153 aa, Homo Sapiens; identical to SEQ ID NO: 8956

SEQ ID NO: 8958 - protein, 148 aa, Homo Sapiens
MESTSQDRRATHVITIKPNETVLTAFPYRPHSSLLDFLKGEPRVLGATQILLALIIVGFGTIFALNYIGFSQRLPLVVLTGYPFWGALIGQGVTGMNVISSLVAITGITFTILSYRHQDKYCQMPSFEEICVFSRTLFIGILLILLII

SEQ ID NO: 8959 - protein, 695 aa, Homo Sapiens
MESTSQDRRATHVITIKPNETVLTAFPYRPHSSLLDFLKGEPRVLGATQILLALIIVGFGTIFALNYIGFSQRLPLVVLTGYPFWGALIGQGVTGMNVISSLVAITGITFTILSYRHQDKYCQMPSFEEICVFSRTLFIGILLILLIISIAELSISVTIASFRSKCWTQSDEVLFFLPSDVTQNSEQPAPEENDQLQFVLQEEFSSDDSTTNAQSVIFGGYAFFKLTLSRSPLVSQPGNKGREFVPDEQKQSILPSPKFSEEEIEPLPPTLEKKPSENMSIQLDSTFKQMKDEDLQSAIVQPSQMQTKLLQDQAASLQVFPSHSALKLEDISPEDLPSQALPVEGLSEQTMPSKSTSSHVKQSSNLTANDLPPQGILSQDTSSQDMLFHDMTSQDMQSLDMLSQDTPSHAMPPQDIPSQDMLSQALSAHAILPEASTSHIVQFPEIQHLLQQPPDLQPENTEPQNQQILQMSYQDIRSEVMEETKEWKSEEELHRRKSSRRHSLNQQTKALQYLRRHSLDVQAKGQKSSKRHSLDQQSKGWQSPKQKSLDQQIKDWLSPKRHSVDKQAQLNQTKEQLPDQQAEDQQAKGEQYPEGQSKDGQVKDQQTDKEQNSKKQTQDQQTEDQPAQEKKSPKGQFQNVQAEGQQAQVEKVPKLLCQDSESQIQQYQFWQFHKGNLQAGQPRTVNLLAKNPLTG

SEQ ID NO: 8960 - protein, 662 aa, Homo Sapiens
MESTSQDRRATHVITIKPNETVLTAFPYRPHSSLLDFLKGEPRVLGATQILLALIIVGFGTIFALNYIGFSQRLPLVVLTGYPFWGALIGQGVTGMNVISSLVAITGITFTILSYRHQDKYCQMPSFEEICVFSRTLFIVLFFLPSDVTQNSEQPAPEENDQLQFVLQEEFSSDDSTTNAQSVIFGGYAFFKLTLSRSPLVSQPGNKGREFVPDEQKQSILPSPKFSEEEIEPLPPTLEKKPSENMSIQLDSTFKQMKDEDLQSAIVQPSQMQTKLLQDQAASLQVFPSHSALKLEDISPEDLPSQALPVEGLSEQTMPSKSTSSHVKQSSNLTANDLPPQGILSQDTSSQDMLFHDMTSQDMQSLDMLSQDTPSHAMPPQDIPSQDMLSQALSAHAILPEASTSHIVQFPEIQHLLQQPPDLQPENTEPQNQQILQMSYQDIRSEVMEETKEWKSEEELHRRKSSRRHSLNQQTKALQYLRRHSLDVQAKGQKSSKRHSLDQQSKGWQSPKQKSLDQQIKDWLSPKRHSVDKQAQLNQTKEQLPDQQAEDQQAKGEQYPEGQSKDGQVKDQQTDKEQNSKKQTQDQQTEDQPAQEKKSPKGQFQNVQAEGQQAQVEKVPKLLCQDSESQIQQYQFWQFHKGNLQAGQPRTVNLLAKNPLTG

SEQ ID NO: 8961 - protein, 94 aa, Homo Sapiens
MESTSQDRRATHVITIKPNETVLTAFPYRPHSSLLDFLKGEPRVLGATQILLALIIVGFGTIFALNYIGFSQRLPLVVLTGYPFWGALIVSTVD

SEQ ID NO: 8962 - protein, 567 aa, Homo Sapiens
MNVISSLVAITGITFTILSYRHQDKYCQMPSFEEICVFSRTLFIVLFFLPSDVTQNSEQPAPEENDQLQFVLQEEFSSDDSTTNAQSVIFGGYAFFKLTLSRSPLVSQPGNKGREFVPDEQKQSILPSPKFSEEEIEPLPPTLEKKPSENMSIQLDSTFKQMKDEDLQSAIVQPSQMQTKLLQDQAASLQVFPSHSALKLEDISPEDLPSQALPVEGLSEQTMPSKSTSSHVKQSSNLTANDLPPQGILSQDTSSQDMLFHDMTSQDMQSLDMLSQDTPSHAMPPQDIPSQDMLSQALSAHAILPEASTSHIVQFPEIQHLLQQPPDLQPENTEPQNQQILQMSYQDIRSEVMEETKEWKSEEELHRRKSSRRHSLNQQTKALQYLRRHSLDVQAKGQKSSKRHSLDQQSKGWQSPKQKSLDQQIKDWLSPKRHSVDKQAQLNQTKEQLPDQQAEDQQAKGEQYPEGQSKDGQVKDQQTDKEQNSKKQTQDQQTEDQPAQEKKSPKGQFQNVQAEGQQAQVEKVPKLLCQDSESQIQQYQFWQFHKGNLQAGQPRTVNLLAKNPLTG

SEQ ID NO: 8963 - protein, 139 aa, Homo Sapiens
  misc_feature (1)..(1): Xaa can be any naturally occurring amino acid
XRVLGATQILLALIIVGFGTIFALNYIGFSQRLPLVVLTGYPFWGALIFILTGYLTVTDKKSKLLGQGVTGMNVISSLVAITGITFTILSYRHQDKYCQMPSFEEICVFSRTLFIVSGLILHEESLKSSLNCVHDVMIH

SEQ ID NO: 8964 - protein, 214 aa, Homo Sapiens
MASHEVDNAELGSASAHGTPGSEAGPEELNTSVYQPIDGSPDYQKAKLQVLGAIQILNAAMILALGVFLGSLQYPYHFQKHFFFFTFYTGYPIWGAVFFCSSGTLSVVAGIKPTRTWIQNSFGMNIASATIALVGTAFLSLNIAVNIQSLRSCHSSSESPDLCNYMGSISNGMVSLLLILTLLELCVTISTIAMWCNANCCNSREEISSPPNSV

SEQ ID NO: 8965 - protein, 168 aa, Homo Sapiens
MASHEVDNAELGSASAHGTPGSEAGPEELNTSVYQPIDGSPDYQKAKLQVLGFCSSGTLSVVAGIKPTRTWIQNSFGMNIASATIALVGTAFLSLNIAVNIQSLRSCHSSSESPDLCNYMGSISNGMVSLLLILTLLELCVTISTIAMWCNANCCNSREEISSPPNSV

SEQ ID NO: 8966 - protein, 168 aa, Homo Sapiens; identical to SEQ ID NO: 8965

SEQ ID NO: 8967 - protein, 83 aa, Homo Sapiens
MASHEVDNAELGSASAHGTPGSEAGPEELNTSVYQPIDGSPDYQKAKLQVLGSIQREEDEDEDLYDNLLPLNEYSVVQEPCLL

SEQ ID NO: 8968 - protein, 91 aa, Homo Sapiens
MNIASATIALVGTAFLSLNIAVNIQSLRSCHSSSESPDLCNYMGSISNGMVSLLLILTLLELCVTISTIAMWCNANCCNSREEISSPPNSV

SEQ ID NO: 8969 - protein, 1137 aa, Homo Sapiens
MSRRKPASGGLAASSSAPARQAVLSRFFQSTGSLKSTSSSTGAADQVDPGAAAAAAAAAAAAPPAPPAPAFPPQLPPHIATEIDRRKKRPLENDGPVKKKVKKVQQKEGGSDLGMSGNSEPKKCLRTRNVSKSLEKLKEFCCDSALPQSRVQTESLQERFAVLPKCTDFDDISLLHAKNAVSSEDSKRQINQKDTTLFDLSQFGSSNTSHENLQKTASKSANKRSKSIYTPLELQYIEMKQQHKDAVLCVECGYKYRFFGEDAEIAARELNIYCHLDHNFMTASIPTHRLFVHVRRLVAKGYKVGVVKQTETAALKAIGDNRSSLFSRKLTALYTKSTLIGEDVNPLIKLDDAVNVDEIMTDTSTSYLLCISENKENVRDKKKGNIFIGIVGVQPATGEVVFDSFQDSASRSELETRMSSLQPVELLLPSALSEQTEALIHRATSVSVQDDRIRVERMDNIYFEYSHAFQAVTEFYAKDTVDIKGSQIISGIVNLEKPVICSLAAIIKYLKEFNLEKMLSKPENFKQLSSKMEFMTINGTTLRNLEILQNQTDMKTKGSLLWVLDHTKTSFGRRKLKKWVTQPLLKLREINARLDAVSEVLHSESSVFGQIENHLRKLPDIERGLCSIYHKKCSTQEFFLIVKTLYHLKSEFQAIIPAVNSHIQSDLLRTVILEIPELLSPVEHYLKILNEQAAKVGDKTELFKDLSDFPLIKKRKDEIQGVIDEIRMHLQEIRKILKNPSAQYVTVSGQEFMIEIKNSAVSCIPTDWVKVGSTKAVSRFHSPFIVENYRHLNQLREQLVLDCSAEWLDFLEKFSEHYHSLCKAVHHLATVDCIFSLAKVAKQGDYCRPTVQEERKIVIKNGRHPVIDVLLGEQDQYVPNNTDLSEDSERVMIITGPNMGGKSSYIKQVALITIMAQIGSYVPAEEATIGIVDGIFTRMGAADNIYKGQSTFMEELTDTAEIIRKATSQSLVILDELGRGTSTHDGIAIAYATLEYFIRDVKSLTLFVTHYPPVCELEKNYSHQVGNYHMGFLVSEDESKLDPGAAEQVPDFVTFLYQITRGIAARSYGLNVAKLADVPGEILKKAAHKSKELEGLINTKRKRLKYFAKLWTMHNAQDLQKWTEEFNMEETQTSLLH

SEQ ID NO: 8970 - protein, 166 aa, Homo Sapiens
GYSRPRYSPQVLGVRIQNGRHPLMELCARTFVPNSTECGGDKGRVKVITGPNSSGKSIYLKQVAKAVNNATAQSLVLIDEFGKGTNTVDGLALLAAVLRHWLARGPTCPHIFVATNFLSLVQLQLLPQGPLVQYLDWPRVSGQEGGLRRCCEGQPCLPHSCPGWAS

SEQ ID NO: 8971 - protein, 333 aa, Homo Sapiens
KILFLSSIIPFDCLLTVRALGGLLKFLGRRRIGVELEDYNVSVPILGFKKFMLTHLVNIDQDTYSVLQIFKSESHPSVYKVASGLKEGLSLFGILNRCHCKWGEKLLRLWFTRPTHDLGELSSRLDVIQFFLLPQNLDMAQMLHRLLGHIKNVPLILKRMKLSHTKVSDWQVLYKTVYSALGLRDACRSLPQSIQLFRDIAQEFSDDLHHIASLIGKVYLSPQVDFEGSLAENRFTVLPNIDPEIDEKKRRLMGLPSFLTEVARKELENLDSRIPSCSVIYIPLIGFLLSIPRLPSMVEASDFEINGLDFMFLSEEKLHYRSARTKELDALLG

SEQ ID NO: 8972 - protein, 822 aa, Homo Sapiens
MASLGANPRRTPQGPRPGAASSGFPSPAPVPGPREAEEEEVEEEEELAEIHLCVLWNSGYLGIAYYDTSDSTIHFMPDAPDHESLKLLQRVLDEINPQSVVTSAKQDENMTRFLGKLASQEHREPKRPEIIFLPSVDFGLEISKQRLLSGNYSFIPDAMTATEKILFLSSIIPFDCLLTPPGDLRFTPIPLLIPSQVRALGGLLKFLGRRRIGVELEDYNVSVPILGFKKFMLTHLVNIDQDTYSVLQIFKSESHPSVYKVASGLKEGLSLFGILNRCHCKWGEKLLRLWFTRPTHDLGELSSRLDVIQFFLLPQNLDMAQMLHRLLGHIKNVPLILKRMKLSHTKVSDWQVLYKTVYSALGLRDACRSLPQSIQLFRDIAQEFSDDLHHIASLIGKVVDFEGSLAENRFTVLPNIDPEIDEKKRRLMGLPSFLTEVARKELENLDSRIPSCSVIYIPLIGFLLSIPRLPSMVEASDFEINGLDFMFLSEEKLHYRSARTKELDALLGDLHCEIRDQETLLMYQLQCQVLARAAVLTRVLDLASRLDVLLALASAARDYGYSRPRYSPQVLGVRIQNGRHPLMELCARTFVPNSTECGGDKGRVKVITGPNSSGKSIYLKQVGLITFMALVGSFVPAEEAEIGAVDAIFTRIHSCESISLGLSTFMIDLNQQVAKAVNNATAQSLVLIDEFGKGTNTVDGLALLAAVLRHWLARGPTCPHIFVATNFLSLVQLQLLPQGPLVQYLTMETCEDGNDLVFFYQVSDLIRSGKPIKPVKDLLKKNQMENCQTLVDKFMKLDLEDPNLDLNVFMSQEVLPAATSIL

SEQ ID NO: 8973 - protein, 194 aa, Homo Sapiens
MASLGANPRRTPQGPRPGAASSGFPSPAPVPGPREAEEEEVEEEEELAEIHLCVLWNSGYLGIAYYDTSDSTIHFMPDAPDHESLKLLQRVLDEINPQSVVTSAKQDENMTRFLGKLASQEHREPKRPEIIFLPSVDFGLEISKQRLLSGNYSFIPDAMTATEKILFLSSIIPFDCLLTVRALGGLLKFLGRRR

SEQ ID NO: 8974 - protein, 834 aa, Homo Sapiens
MASLGANPRRTPQGPRPGAASSGFPSPAPVPGPREAEEEEVEEEEELAEIHLCVLWNSGYLGIAYYDTSDSTIHFMPDAPDHESLKLLQRVLDEINPQSVVTSAKQDENMTRFLGKLASQEHREPKRPEIIFLPSVDFGLEISKQRLLSGNYSFIPDAMTATEKILFLSSIIPFDCLLTVRALGGLLKFLGRRRIGVELEDYNVSVPILGFKKFMLTHLVNIDQDTYSVLQIFKSESHPSVYKVASGLKEGLSLFGILNRCHCKWGEKLLRLWFTRPTHDLGELSSRLDVIQFFLLPQNLDMAQMLHRLLGHIKNVPLILKRMKLSHTKVSDWQVLYKTVYSALGLRDACRSLPQSIQLFRDIAQEFSDDLHHIASLIGKVVDFEGSLAENRFTVLPNIDPEIDEKKRRLMGLPSFLTEVARKELENLDSRIPSCSVIYIPLIGFLLSIPRLPSMVEASDFEINGLDFMFLSEEKLHYRSARTKELDALLGDLHCEIRDQETLLMYQLQCQVLARAAVLTRVLDLASRLDVLLALASAARDYGYSRPRYSPQVLGVRIQNGRHPLMELCARTFVPNSTECGGDKGRVKVITGPNSSGKSIYLKQVGLITFMALVGSFVPAEEAEIGAVDAIFTRIHSCESISLGLSTFMIDLNQVAKAVNNATAQSLVLIDEFGKGTNTVDGLALLAAVLRHWLARGPTCPHIFVATNFLSLVQLQLLPQGPLVQYLTMETCEDGNDLVFFYQVCEGVAKASHASHTAAQAGLPDKLVARGKEVSDLIRSGKPIKPVKDLLKKNQMENCQTLVDKFMKLDLEDPNLDLNVFMSQEVLPAATSIL

SEQ ID NO: 8975 - protein, 835 aa, Homo Sapiens
MASLGANPRRTPQGPRPGAASSGFPSPAPVPGPREAEEEEVEEEEELAEIHLCVLWNSGYLGIAYYDTSDSTIHFMPDAPDHESLKLLQRVLDEINPQSVVTSAKQDENMTRFLGKLASQEHREPKRPEIIFLPSVDFGLEISKQRLLSGNYSFIPDAMTATEKILFLSSIIPFDCLLTVRALGGLLKFLGRRRIGVELEDYNVSVPILGFKKFMLTHLVNIDQDTYSVLQIFKSESHPSVYKVASGLKEGLSLFGILNRCHCKWGEKLLRLWFTRPTHDLGELSSRLDVIQFFLLPQNLDMAQMLHRLLGHIKNVPLILKRMKLSHTKVSDWQVLYKTVYSALGLRDACRSLPQSIQLFRDIAQEFSDDLHHIASLIGKVVDFEGSLAENRFTVLPNIDPEIDEKKRRLMGLPSFLTEVARKELENLDSRIPSCSVIYIPLIGFLLSIPRLPSMVEASDFEINGLDFMFLSEEKLHYRSARTKELDALLGDLHCEIRDQETLLMYQLQCQVLARAAVLTRVLDLASRLDVLLALASAARDYGYSRPRYSPQVLGVRIQNGRHPLMELCARTFVPNSTECGGDKGRVKVITGPNSSGKSIYLKQVGLITFMALVGSFVPAEEAEIGAVDAIFTRIHSCESISLGLSTFMIDLNQQVAKAVNNATAQSLVLIDEFGKGTNTVDGLALLAAVLRHWLARGPTCPHIFVATNFLSLVQLQLLPQGPLVQYLTMETCEDGNDLVFFYQVCEGVAKASHASHTAAQAGLPDKLVARGKEVSDLIRSGKPIKPVKDLLKKNQMENCQTLVDKFMKLDLEDPNLDLNVFMSQEVLPAATSIL

SEQ ID NO: 8976 - protein, 834 aa, Homo Sapiens; identical to SEQ ID NO: 8974

SEQ ID NO: 8977 - protein, 637 aa, Homo Sapiens
MASLGANPRRTPQGPRPGAASSGFPSPAPVPGPREAEEEEVEEEEELAEIHLCVLWNSGYLGIAYYDTSDSTIHFMPDAPDHESLKLLQRVLDEINPQSVVTSAKQDENMTRFLGKLASQEHREPKRPEIIFLPSVDFGLEISKQRLLSGNYSFIPDAMTATEKILFLSSIIPFDCLLTVRALGGLLKFLGRRRIGVELEDYNVSVPILGFKKFMLTHLVNIDQDTYSVLQIFKSESHPSVYKVASGLKEGLSLFGILNRCHCKWGEKLLRLWFTRPTHDLGELSSRLDVIQFFLLPQNLDMAQMLHRLLGHIKNVPLILKRMKLSHTKVSDWQVLYKTVYSALGLRDACRSLPQSIQLFRDIAQEFSDDLHHIASLIGKVVDFEGSLAENRFTVLPNIDPEIDEKKRRLMGLPSFLTEVARKELENLDSRIPSCSVIYIPLIGFLLSIPRLPSMVEASDFEINGLDFMFLSEEKLHYRSARTKELDALLGDLHCEIRDQETLLMYQLQCQVLARAAVLTRVLDLASRLDVLLALASAARDYGYSRPRYSPQVLGVRIQNGRHPLMELCARTFVPNSTECGGDKGRVKVITGPNSSGKSIYLKQLRIHLPWPLHLHDRPQPGGESSEQCHCTVAGPY

SEQ ID NO: 8978 - protein, 508 aa, Homo Sapiens
MWPVLLFVFLSQTVYSALGLRDACRSLPQSIQLFRDIAQEFSDDLHHIASLIGKVVDFEGSLAENRFTVLPNIDPEIDEKKRRLMGLPSFLTEVARKELENLDSRIPSCSVIYIPLIGFLLSIPRLPSMVEASDFEINGLDFMFLSEEKLHYRSARTKELDALLGDLHCEIRDQETLLMYQLQCQVLARAAVLTRVLDLASRLDVLLALASAARDYGYSRPRYSPQVLGVRIQNGRHPLMELCARTFVPNSTECGGDKGRVKVITGPNSSGKSIYLKQVGLITFMALVGSFVPAEEAEIGAVDAIFTRIHSCESISLGLSTFMIDLNQVAKAVNNATAQSLVLIDEFGKGTNTVDGLALLAAVLRHWLARGPTCPHIFVATNFLSLVQLQLLPQGPLVQYLTMETCEDGNDLVFFYQVCEGVAKASHASHTAAQAGLPDKLVARGKEVSDLIRSGKPIKPVKDLLKKNQMENCQTLVDKFMKLDLEDPNLDLNVFMSQEVLPAATSIL

SEQ ID NO: 8979 - protein, 156 aa, Homo Sapiens
TAQSLVLIDEFGKGTNTVDGLALLAAVLRHWLARGPTCPHIFVATNFLSLVQLQLLPQGPLVQYLVCEGVAKASHASHTAAQAGLPDKLVARGKEVSDLIRSGKPIKPVKDLLKKNQMENCQTLVDKFMKLDLEDPNLDLNVFMSQEVLPAATSIL

SEQ ID NO: 8980 - protein, 159 aa, Homo Sapiens
  misc_feature (1)..(1): Xaa can be any naturally occurring amino acid
XDAPDHESLKLLQRVLDEINPQSVVTSAKQDENMTRFLGKLASQEHREPKRPEIIFLPSVDFGLEISKQRLLSGNYSFIPDAMTATEKILFLSSIIPFDCLLTVRALGGLLKFLGRRRIGVELEDYNVSVPILGFKKFMLTHLVNIDQDTYRNPQQMPL

SEQ ID NO: 8981 - protein, 43 aa, Homo Sapiens
  misc_feature (1)..(1): Xaa can be any naturally occurring amino acid
XRIGVELEDYNVSVPILGFKKFMLTHLVNIDQDTYRNPQQMPL

SEQ ID NO: 8982 - protein, 170 aa, Homo Sapiens
MALPTARPLLGSCGTPALGSLLFLLFSLGWVQPSRTLAGETGQEAAPLDGVLANPPNISSLSPRQLLGFPCAEVSGLSTERVRELAVALAQKNVKLSTEQLRCLAHRLSEPPEDLDALPLDLLLFLNPDAFSGPQACTRFFSRITKANVDLLPRGAPERQRLLPAALACW

SEQ ID NO: 8983 - protein, 333 aa, Homo Sapiens [sequence omitted]

SEQ ID NO: 8984 - protein, 630 aa, Homo Sapiens
MALPTARPLLGSCGTPALGSLLFLLFSLGWVQPSRTLAGETGQEAAPLDGVLANPPNISSLSPRQLLGFPCAEVSGLSTERVRELAVALAQKNVKLSTEQLRCLAHRLSEPPEDLDALPLDLLLFLNPDAFSGPQACTRFFSRITKANVDLLPRGAPERQRLLPAALACWGVRGSLLSEADVRALGGLACDLPGRFVAESAEVLLPRLVSCPGPLDQDQQEAARAALQGGGPPYGPPSTWSVSTMDALRGLLPVLGQPIIRSIPQGIVAAWRQRSSRDPSWRQPERTILRPRFRREVEKTACPSGKKAREIDESLIFYKKWELEACVDAALLATQMDRVNAIPFTYEQLDVLKHKLDELYPQGYPESVIQHLGYLFLKMSPEDIRKWNVTSLETLKALLEVNKGHEMSPQAPRRPLPQVATLIDRFVKGRGQLDKDTLDTLTAFYPGYLCSLSPEELSSVPPSSIWAVRPQDLDTCDPRQLDVLYPKARLAFQNMNGSEYFVKIQSFLGGAPTEDLKALSQQNVSMDLATFMKLRTDAVLPLTVAEVQKLLGPHVEGLKAEERHRPVRDWILRQRQDDLDTLGLGLQGGIPNGYLVLDLSMQEALSGTPCLLGPGPVLTVLALLLASTLA

SEQ ID NO: 8985 - protein, 622 aa, Homo Sapiens
MALPTARPLLGSCGTPALGSLLFLLFSLGWVQPSRTLAGETGQEAAPLDGVLANPPNISSLSPRQLLGFPCAEVSGLSTERVRELAVALAQKNVKLSTEQLRCLAHRLSEPPEDLDALPLDLLLFLNPDAFSGPQACTRFFSRITKANVDLLPRGAPERQRLLPAALACWGVRGSLLSEADVRALGGLACDLPGRFVAESAEVLLPRLVSCPGPLDQDQQEAARAALQGGGPPYGPPSTWSVSTMDALRGLLPVLGQPIIRSIPQGIVAAWRQRSSRDPSWRQPERTILRPRFRREVEKTACPSGKKAREIDESLIFYKKWELEACVDAALLATQMDRVNAIPFTYEQLDVLKHKLDELYPQGYPESVIQHLGYLFLKMSPEDIRKWNVTSLETLKALLEVNKGHEMSPQVATLIDRFVKGRGQLDKDTLDTLTAFYPGYLCSLSPEELSSVPPSSIWAVRPQDLDTCDPRQLDVLYPKARLAFQNMNGSEYFVKIQSFLGGAPTEDLKALSQQNVSMDLATFMKLRTDAVLPLTVAEVQKLLGPHVEGLKAEERHRPVRDWILRQRQDDLDTLGLGLQGGIPNGYLVLDLSMQEALSGTPCLLGPGPVLTVLALLLASTLA

SEQ ID NO: 8986 - protein, 622 aa, Homo Sapiens; identical to SEQ ID NO: 8985

SEQ ID NO: 8987 - protein, 622 aa, Homo Sapiens; identical to SEQ ID NO: 8985

SEQ ID NO: 8988 - protein, 398 aa, Homo Sapiens
VEKTACPSGKKAREIDESLIFYKKWELEACVDAALLATQMDRVNAIPFTYEQLDVLKHKLDELYPQGYPESVIQHLGYLFLKMSPEDIRKWNVTSLETLKALLEVNKGHEMSPQVATLIDRFVKGRGQLDKDTLDTLTAFYPGYLCSLSPEELSSVPPSSIWAVRPQDLDTCDPRQLDVLYPKARLAFQNMNGSEYFVKIQSFLGGAPTEDLKALSQQNVSMDLATFMKLRTDAVLPLTVAEVQKLLGPHVEGLKAEERHRPVRDWILRQRQDDLDTLGLGLQGGIPNGYLVLDLSMQGGRGGQARAGGRAGGVEVGALSHPSLCRGPLGDALPPRTWTCSHRPGTAPSLHPGLRAPLPCWPQPCWGSPPGQEQARVVPVPPQENSRSVNGNMPPADT

SEQ ID NO: 8989 - protein, 334 aa, Homo Sapiens
  misc_feature (1)..(1): Xaa can be any naturally occurring amino acid
XSWRQPERTILRPRFRREVEKTACPSGKKAREIDESLIFYKKWELEACVDAALLATQMDRVNAIPFTYEQLDVLKHKLDELYPQGYPESVIQHLGYLFLKMSPEDIRKWNVTSLETLKALLEVNKGHEMSPQVATLIDRFVKGRGQLDKDTLDTLTAFYPGYLCSLSPEELSSVPPSSIWAVRPQDLDTCDPRQLDVLYPKARLAFQNMNGSEYFVKIQSFLGGAPTEDLKALSQQNVSMDLATFMKLRTDAVLPLTVAEVQKLLGPHVEGLKAEERHRPVRDWILRQRQDDLDTLGLGLQGGIPNGYLVLDLSMQGPGPVLTVLALLLASTLA

SEQ ID NO: 8990 - protein, 114 aa, Homo Sapiens
MNVLLGSVVIFATFVTLCNASCYFIPNEGVPGDSTRKCMDLKGNKHPINSEWQTDNCETCTCYETEISCCTLVSTPVGYDKDNCQRIFKKEDCKYIVVEKKDPKKTCSVSEWII

SEQ ID NO: 8991 - protein, 77 aa, Homo Sapiens
MNVLLGSVVIFATFVTLCNASCYFIPNEGVPGDSTRMFLHLWVMTKTTAKESSRRRTASISWWRRRTQKRPVLSVNG

SEQ ID NO: 8992 - protein, 59 aa, Homo Sapiens
MAVFGMGCFWGAERKFWVLKGVYSTQVGFAGGYTSNPTYKEVCSDVQNNSMFISLFKSF

SEQ ID NO: 8993 - protein, 82 aa, Homo Sapiens
MAVFGMGCFWGAERKFWVLKGVYSTQVGFAGGYTSNPTYKEVCSEKTGHAEVVRVVYQPEHMSFEELLKVFWENHDPTQGMR

SEQ ID NO: 8994 - protein, 169 aa, Homo Sapiens
MAVFGMGCFWGAERKFWVLKGVYSTQVGFAGGYTSNPTYKEVCSEKTGHAEVVRVVYQPEHMSFEELLKVFWENHDPTQGMRQGNDHGTQYRSAIYPTSAKQMEAALSSKENYQKVLSEHGFGPITTDIREGQTFYYAEDYHQQYLSKNPNGYCGLGGTGVSCPVGIKK

SEQ ID NO: 8995 - protein, 192 aa, Homo Sapiens
MCSEPKHHVNGNRTVEPFPEGTQMAVFGMGCFWGAERKFWVLKGVYSTQVGFAGGYTSNPTYKEVCSEKTGHAEVVRVVYQPEHMSFEELLKVFWENHDPTQGMRQGNDHGTQYRSAIYPTSAKQMEAALSSKENYQKVLSEHGFGPITTDIREGQTFYYAEDYHQQYLSKNPNGYCGLGGTGVSCPVGIKK

SEQ ID NO: 8996 - protein, 195 aa, Homo Sapiens
MLSATRRACQLLLLHSLFPVPRMGNSASNIVSPQEALPGRKEQTPVAAKHHVNGNRTVEPFPEGTQMAVFEKTGHAEVVRVVYQPEHMSFEELLKVFWENHDPTQGMRQGNDHGTQYRSAIYPTSAKQMEAALSSKENYQKVLSEHGFGPITTDIREGQTFYYAEDYHQQYLSKNPNGYCGLGGTGVSCPVGIKK

SEQ ID NO: 8997 - protein, 213 aa, Homo Sapiens
MLSATRRACQLLLLHSLFPVPRMGNSASNIVSPQEALPGRKEQTPVAAKHHVNGNRTVEPFPEGTQMAVFGMGCFWGAERKFWVLKGVYSTQVGFAGGYTSNPTYKEVCSEKTGHAEVVRVVYQPEHMSFEELLKVFWENHDPTQGMRQGNDHGTQYRSAIYPTSAKQMEAALSSKENYQKLVLPCSSSAMLGLTAASSAQLAWVQPSSRKHY

SEQ ID NO: 8998 - protein, 235 aa, Homo Sapiens
MLSATRRACQLLLLHSLFPVPRMGNSASNIVSPQEALPGRKEQTPVAAKHHVNGNRTVEPFPEGTQMAVFGMGCFWGAERKFWVLKGVYSTQVGFAGGYTSNPTYKEVCSEKTGHAEVVRVVYQPEHMSFEELLKVFWENHDPTQGMRQGNDHGTQYRSAIYPTSAKQMEAALSSKENYQKVLSEHGFGPITTDIREGQTFYYAEDYHQQYLSKNPNGYCGLGGTGVSCPVGIKK

SEQ ID NO: 8999 - protein, 91 aa, Homo Sapiens
  misc_feature (1)..(1): Xaa can be any naturally occurring amino acid
XKTGHAEVVRVVYQPEHMSFEELLKVFWENHDPTQGMRQGNDHGTQYRSAIYPTSAKQMEAALSSKENYQKVPKHVHWKKRTQTGLQTEGR

SEQ ID NO: 9000 - protein, 182 aa, Homo Sapiens
MARLLWLLRGLTLGTAPRRAVRGQAGGGGPGTGPGLGEAGSLATCELPLAKSEWQKKLTPEQFYVTREKGTEPPFSGIYLNNKEAGMYHCVCCDSPLFSSEKKYCSGTGWPSFSEAHGTSGSDESHTGILRRLDTSLGSARTEVVCKQCEAHLGHVFPDGPGPNGQRFCINSVALKFKPRKH

SEQ ID NO: 9001 - protein, 120 aa, Homo Sapiens
  misc_feature (1)..(1): Xaa can be any naturally occurring amino acid
XSLATCELPLAKSEWQKKLTPEQFYVTREKGTEPPFSGIYLNNKEAGMYHCVCCDSPLFRSLLDIQKEVFSIKGSRSPSTSRGNGFDSEVLRKSTALALGGLRFPRLMVRLALMKATQGS

SEQ ID NO: 9002 - protein, 84 aa, Homo Sapiens
GEYTHHKDPGIYKCVVCGTPLFKSETKFDSGSGWPSFHDVINSEAITFTDDFSYGMHRVETSCSQQEGPHQMLPLNLGFPGLQN

SEQ ID NO: 9003 - protein, 117 aa, Homo Sapiens
MSAFNLLHLVTKSQPVALRACGLPSGSCRDKKNCKVVFSQQELRKRLTPLQYHVTQEKGTESAFEGEYTHHKDPGIYKCVVCGTPLFKSETKFDSGSGWPSFHDVINSEAITFTDDF

SEQ ID NO: 9004 - protein, 164 aa, Homo Sapiens
MSAFNLLHLVTKSQPVALRACGLPSGSCRDKKNCKVVFSQQELRKRLTPLQYHVTQEKGTESAFEGEYTHHKDPGIYKCVVCGTPLFKSETKFDSGSGWPSFHDVINSEAITFTDDFSYGMHRVETSCSQCGAHLGHIFDDGPRPTGKRYCINSAALSFTPADS

SEQ ID NO: 9005 - protein, 185 aa, Homo Sapiens
MSAFNLLHLVTKSQPVALRACGLPSGSCRDKKNCKVVFSQQELRKRLTPLQYHVTQEKGTESAFEGEYTHHKDPGIYKCVVCGTPLFKSETKFDSGSGWPSFHDVINSEAITFTDDFSYGMHRVETSCSQCGAHLGHIFDDGPRPTGKRYCINSAALSFTPADSSGTAEGGSGVASPAQADKAEL

SEQ ID NO: 9006 - protein, 185 aa, Homo Sapiens; identical to SEQ ID NO: 9005

SEQ ID NO: 9007 - protein, 185 aa, Homo Sapiens; identical to SEQ ID NO: 9005

SEQ ID NO: 9008 - protein, 185 aa, Homo Sapiens; identical to SEQ ID NO: 9005

SEQ ID NO: 9009 - protein, 185 aa, Homo Sapiens; identical to SEQ ID NO: 9005

SEQ ID NO: 9010 - protein, 185 aa, Homo Sapiens; identical to SEQ ID NO: 9005

SEQ ID NO: 9011 - protein, 44 aa, Homo Sapiens
MSPRRTLPRPLSLCLSLCLCLCLAAALGSAQSALAPVLCFSFCW

SEQ ID NO: 9012 - protein, 192 aa, Homo Sapiens
MSPRRTLPRPLSLCLSLCLCLCLAAALGSAQSGSCRDKKNCKVVFSQQELRKRLTPLQYHVTQEKGTESAFEGEYTHHKDPGIYKCVVCGTPLFKSETKFDSGSGWPSFHDVINSEAITFTDDFSYGMHRVETSCSQCGAHLGHIFDDGPRPTGKRYCINSAALSFTPADSSGTAEGGSGVASPAQADKAEL

SEQ ID NO: 9013 - protein, 160 aa, Homo Sapiens
MSPRRTLPRPLSLCLSLCLCLCLAAALGSAQSGSCRDKKNCKVVFSQQELRKRLTPLQYHVTQEKGTESAFEGEYTHHKDPGIYKCVVCGTPLFKSETKFDSGSGWPSFHDVINSEAITFTDDFSYGMHRVETSCSQVSSSFLKTQYIAFRTPGCAKYSN

SEQ ID NO: 9014 - protein, 117 aa, Homo Sapiens
  misc_feature (1)..(1): Xaa can be any naturally occurring amino acid
XLRKRLTPLQYHVTQEKGTESAFEGEYTHHKDPGIYKCVVCGTPLFKSETKFDSGSGWPSFHDVINSEAITFTDDFSYGMHRVETSCSQQEGPHQMLPLNLGFPGLQNCEPINFYSF

SEQ ID NO: 9015 - protein, 174 aa, Homo Sapiens
  misc_feature (1)..(1): Xaa can be any naturally occurring amino acid
XRRRLPGLSMSPRRTLPRPLSLCLSLCLCLCLAAALGSAQSGSCRDKKNCKVVFSQQELRKRLTPLQYHVTQEKGTESAFEGEYTHHKDPGIYKCVVCGTPLFKSETKFDSGSGWPSFHDVINSEAITFTDDFSYGMHRVETSCSQQEGPHQMLPLNLGFPGLQNCEPINFYSF

SEQ ID NO: 9016 - protein, 725 aa, Homo Sapiens
MGLWWVTVQPPARRMGWLPLLLLLTQCLGVPGQRSPLNDFQVLRGTELQHLLHAVVPGPWQEDVADAEECAGRCGPLMDCRAFHYNVSSHGCQLLPWTQHSPHTRLRRSGRCDLFQKKDYVRTCIMNNGVGYRGTMATTVGGLPCQAWSHKFPNDHKYTPTLRNGLEENFCRNPDGDPGGPWCYTTDPAVRFQSCGIKSCREAACVWCNGEEYRGAVDRTESGRECQRWDLQHPHQHPFEPGKFLDQGLDDNYCRNPDGSERPWCYTTDPQIEREFCDLPRCGSEAQPRQEATTVSCFRGKGEGYRGTANTTTAGVPCQRWDAQIPHQHRFTPEKYACKDLRENFCRNPDGSEAPWCFTLRPGMRAAFCYQIRRCTDDVRPQDCYHGAGEQYRGTVSKTRKGVQCQRWSAETPHKPQFTFTSEPHAQLEENFCRNPDGDSHGPWCYTMDPRTPFDYCALRRCADDQPPSILDPPDQVQFEKCGKRVDRLDQRRSKLRVVGGHPGNSPWTVSLRNRQGQHFCGGSLVKEQWILTARQCFSSCHMPLTGYEVWLGTLFQNPQHGEPSLQRVPVAKMVCGPSGSQLVLLKLERSVTLNQRVALICLPPEWYVVPPGTKCEIAGWGETKGTGNDTVLNVALLNVISNQECNIKHRGRVRESEMCTEGLLAPVGACEGDYGGPLACFTHNCWVLEGIIIPNRVCARSRWPAVFTRVSVFVDWIHKVMRLG

SEQ ID NO: 9017 - protein, 195 aa, Homo Sapiens
  misc_feature (1)..(1): Xaa can be any naturally occurring amino acid
XAGPAFLRGVSSEGAVDTDCPAVLLLLNPQHGEPSLQRVPVAKMVCGPSGSQLVLLKLERSVTLNQRVALICLPPEWYVVPPGTKCEIAGWGETKGTGNDTVLNVALLNVISNQECNIKHRGRVRESEMCTEGLLAPVGACEGDYGGPLACFTHNCWVLEGIIIPNRVCARSRWPAVFTRVSVFVDWIHKVMRLG

SEQ ID NO: 9018 - protein, 375 aa, Homo Sapiens
MQKLQLCVYIYLFMLIVAGPVDLNENSEQKENVEKEGLCNACTWRQNTKSSRIEAIKIQILSKLRLETAPNISKDVIRQLLPKAPPLRELIDQYDVQRDDSSDGSLEDDDYHATTETIITMPTESDFLMQVDGKPKCCFFKFSSKIQYNKVVKAQLWIYLRPVETPTTVFVQILRLIKPMKDGTRYTGIRSLKLDMNPGTGIWQSIDVKTVLQNWLKQPESNLGIEIKALDENGHDLAVTFPGPGEDGLNPFLEVKVTDTPKRSRRDFGLDCDEHSTESRCCRYPLTVDFEAFGWDWIIAPKRYKANYCSGECEFVFLQKYPHTHLVHQANPRGSAGPCCTPTKMSPINMLYFNGKEQIIYGKIPAMVVDRCGCS

SEQ ID NO: 9019 - protein, 62 aa, Homo Sapiens
MDPNCSCAAAGVSCTCASSCKCKECKCTSCKKSCCSCCPVGCAKCAQGCICKGASEKCSCCA

SEQ ID NO: 9020 - protein, 39 aa, Homo Sapiens
MDPNCSCAAGCCSCCPVGCAKCAQGCICKGASEKCSCCA

SEQ ID NO: 9021 - protein, 61 aa, Homo Sapiens
MDPNCSCAAGVSCTCASSCKCKECKCTSCKKSCCSCCPVGCAKCAQGCICKGASEKCSCCA

SEQ ID NO: 9022 - protein, 68 aa, Homo Sapiens
MDPNCSCAAGVSCTCASSCKCKECKCTSCKKSECGAISRNLGLWLRLGGNPRLSLSACFWGTGLPLSL

SEQ ID NO: 9023 - protein, 36 aa, Homo Sapiens
MAATSLMSALAARLLQPAHSCSLRLRPFHLAAVRAY

SEQ ID NO: 9024 - protein, 267 aa, Homo Sapiens
MAATSLMSALAARLLQPAHSCSLRLRPFHLAAVRNEAVVISGRKLAQQIKQEVRQEVEEWVASGNKRPHLSVILVGENPASHSYVLNKTRAAAVVEHIDERRICNAVSPDKDVDGFHVINVGRMCLDQYSMLPATPWGVWEIIKRTGIPTLGKNVVVAGRSKNVGMPIAMLLHTDGAHERPGGDATVTISHRYTPKEQLKKHTILADIVISAAGVRQKAGYITPVPGGVGPMTVAMLMKNTIIAAKKVLRLEEREVLKSKELGVATN

SEQ ID NO: 9025 - protein, 222 aa, Homo Sapiens
MAATSLMSALAARLLQPAHSCSLRLRPFHLAAVRNEAVVISGRKLAQQIKQEVRQEVEEWVASGNKRPHLSVILVGENPASHSYVLNKTRAAAVVGDATVTISHRYTPKEQLKKHTILADIVISAAGIPNLITADMIKEGAAVIDVGINRVHDPVTAKPKLVGDVDFEGVRQKAGYITPVPGGVGPMTVAMLMKNTIIAAKKVLRLEEREVLKSKELGVATN

SEQ ID NO: 9026 - protein, 350 aa, Homo Sapiens
MAATSLMSALAARLLQPAHSCSLRLRPFHLAAVRNEAVVISGRKLAQQIKQEVRQEVEEWVASGNKRPHLSVILVGENPASHSYVLNKTRAAAVVGINSETIMKPASISEEELLNLINKLNNDDNVDGLLVQLPLPEHIDERRICNAVSPDKDVDGFHVINVGRMCLDQYSMLPATPWGVWEIIKRTGIPTLGKNVVVAGRSKNVGMPIAMLLHTDGAHERPGGDATVTISHRYTPKEQLKKHTILADIVISAAGIPNLITADMIKEGAAVIDVGINRVHDPVTAKPKLVGDVDFEGVRQKAGYITPVPGGVGPMTVAMLMKNTIIAAKKVLRLEEREVLKSKELGVATN

SEQ ID NO: 9027 - protein, 37 aa, Homo Sapiens
MAATSLMSALAARLLQPAHSCSLRLRPFHLAAVRNQQ

SEQ ID NO: 9028 - protein, 292 aa, Homo Sapiens
MAGARAAAAAASAGSSASSGNQPPQELGLGELLEEFSRTQYRAKDGSGTGGSKCWDLVQQTQNYLKLLLSLVNSDDDSGLLVHCISGWDRTPLFISLLRLSLWADGLIHTSLKPTEILYLTVAYDWFLFGHMLVDRLSKGEEIFFFCFNFLKHITSEEFSALKTQRRKSLPARDGGFTLEDICMLRRKDRGSTTSLGSDFSLVMESSPGATGSFTYEAVELVPAGAPTQAAWLAALSDRETRLQEVRSAFLAAYSSTVGLRAVAPSPSGAIGGLLEQFARGVGLRSISSNAL

SEQ ID NO: 9029 - protein, 71 aa, Homo Sapiens
MAGARAAAAAASAGSSASSGNQPPQELGLGELLEEFSRTQYRAKDGSGTGGSKSSYRQTWRASCQLRPSPP

SEQ ID NO: 9030 - protein, 158 aa, Homo Sapiens
MAGARAAAAAASAGSSASSGNQPPQELGLGELLEEFSRTQYRAKDGSGTGGSKVERIEKRCLELFGRDYCFSVIPNTNGDICGHYPRHIVFLEYESSEKEKDTFESTVQGVQMMPGQMWRTSRRRTVLFEVVTRIFLIRSEAMTSSCFDTCQSNTSVT

SEQ ID NO: 9031 - protein, 188 aa, Homo Sapiens
MAGARAAAAAASAGSSASSGNQPPQELGLGELLEEFSRTQYRAKDGSGTGGSKVERIEKRCLELFGRDYCFSVIPNTNGDICGHYPRHIVFLEYESSEKEKDTFESTVQVSKLQDLIHRSKMARCRGRFVCPVILFKGKGVQMMPGQMWRTSRRRTVLFEVVTRIFLIRSEAMTSSCFDTCQSNTSVT

SEQ ID NO: 9032 - protein, 650 aa, Homo Sapiens
MAGARAAAAAASAGSSASSGNQPPQELGLGELLEEFSRTQYRAKDGSGTGGSKVERIEKRCLELFGRDYCFSVIPNTNGDICGHYPRHIVFLEYESSEKEKDTFESTVQVSKLQDLIHRSKMARCRGRFVCPVILFKGKHICRSATLAGWGELYGRSGYNYFFSGGADDAWADVEDVTEEDCALRSGDTHLFDKVRGYDIKLLRYLSVKYICDLMVENKKVKFGMNVTSSEKVDKAQRYADFTLLSIPYPGCEFFKEYKDRDYMAEGLIFNWKQDYVDAPLSIPDFLTHSLNIDWSQYQCWDLVQQTQNYLKLLLSLVNSDDDSGLLVHCISGWDRTPLFISLLRLSLWADGLIHTSLKPTEILYLTVAYDWFLFGHMLVDRLSKGEEIFFFCFNFLKHITSEEFSALKTQRRKSLPARDGGFTLEDICMLRRKDRGSTTSLGSDFSLVMESSPGATGSFTYEAVELVPAGAPTQAAWRKSHSSSPQSVLWNRPQPSEDRLPSQQGLAEARSSSSSSSNHSDNFFRMGSSPLEVPKPRSVDHPLPGSSLSTDYGSWQMVTGCGSIQERAVLHTDSSLPFSFPDELPNSCLLAALSDRETRLQEVRSAFLAAYSSTVGLRAVAPSPSGAIGGLLEQFARGVGLRSISSNAL

SEQ ID NO: 9033 - protein, 598 aa, Homo Sapiens
MAGARAAAAAASAGSSASSGNQPPQELGLGELLEEFSRTQYRAKDGSGTGGSKVERIEKRCLELFGRDYCFSVIPNTNGDICGHYPRHIVFLEYESSEKEKDTFESTVQVSKLQDLIHRSKMARCRGRFVCPVILFKGKHICRSATLAGWGELYGRSGYNYFFSGGADDAWADVEDVTEEDCALRSGDTHLFDKVRGYDIKLLRYLSVKYICDLMVENKKVKFGMNVTSSEKVDKAQRYADFTLLSIPYPGCEFFKEYKDRDYMAEGLIFNWKQDYVDAPLSIPDFLTHSLNIDWSQYQCWDLVQQTQNYLKLLLSLVNSDDDSGLLVHCISGWDRTPLFISLLRLSLWADGLIHTSLKPTEILYLTVAYDWFLFGHMLVDRLSKGEEIFFFCFNFLKHITSEEFSALKTQRRKSLPARDGGFTLEDICMLRRKDRGSTTSLGSDFSLVMESSPGATGSFTYEAVELVPAGAPTQAAWRKSHSSSPQSVLWNRPQPSEDRLPSQQGLAEARSSSSSSSNHSDNFFRMGSSPLEVPKPRLAALSDRETRLQEVRSAFLAAYSSTVGLRAVAPSPSGAIGGLLEQFARGVGLRSISSNAL

SEQ ID NO: 9034 - protein, 538 aa, Homo Sapiens
MAGARAAAAAASAGSSASSGNQPPQELGLGELLEEFSRTQYRAKDGSGTGGSKVERIEKRCLELFGRDYCFSVIPNTNGDICGHYPRHIVFLEYESSEKEKDTFESTVQVSKLQDLIHRSKMARCRGRFVCPVILFKGKHICRSATLAGWGELYGRSGYNYFFSGGADDAWADVEDVTEEDCALRSGDTHLFDKVRGYDIKLLRYLSVKYICDLMVENKKVKFGMNVTSSEKVDKAQRYADFTLLSIPYPGCEFFKEYKDRDYMAEGLIFNWKQDYVDAPLSIPDFLTHSLNIDWSQYQCWDLVQQTQNYLKLLLSLVNSDDDSGLLVHCISGWDRTPLFISLLRLSLWADGLIHTSLKPTEILYLTVAYDWFLFGHMLVDRLSKGEEIFFFCFNFLKHITSEEFSALKTQRRKSLPARDGGFTLEDICMLRRKDRGSTTSLGSDFSLVMESSPGATGSFTYEAVELVPAGAPTQAAWLAALSDRETRLQEVRSAFLAAYSSTVGLRAVAPSPSGAIGGLLEQFARGVGLRSISSNAL

SEQ ID NO: 9035 - protein, 187 aa, Homo Sapiens
MAGARAAAAAASAGSSASSGNQPPQELGLGELLEEFSRTQYRAKDGSGTGGSKVERIEKRCLELFGRDYCFSVIPNTNGDICGHYPRHIVFLEYESSEKEKDTSGDTHLFDKVRGYDIKLLRYLSVKYICDLMVENKKVKFGMNVTSSEKVDKAQRYADFTLLSIPYPVLGSGATNTKLPEAAAFLS

SEQ ID NO: 9036 - protein, 154 aa, Homo Sapiens
MALLILLLVPLLLPDSGSEAYSGCEFFKEYKDRDYMAEGLIFNWKQDYVDAPLSIPDFLTHSLNIDWSQYQCWDLVQQTQNYLKLLLSLVNSDDDSGLLVHCISGWDRTPLFISLLRLSLWADGLIHTSLKPTEILYLTVAYDWFLFGHMLVDR

SEQ ID NO: 9037 - protein, 60 aa, Homo Sapiens
MDAQATTIFSQGVQMMPGQMWRTSRRRTVLFEVVTRIFLIRSEAMTSSCFDTCQSNTSVT

SEQ ID NO: 9038 - protein, 36 aa, Homo Sapiens
MSHCAWPETELELDVGEPVKEPLADLTRKGLRVPYR

SEQ ID NO: 9039 - protein, 24 aa, Homo Sapiens
MATRGFSCLLLVISEIDLSVKRWV

SEQ ID NO: 9040 - protein, 725 aa, Homo Sapiens
MGAASVRAGARLVEVALCSFTVTCLEVMRRFLLLYATQQGQAKAIAEEICEQAVVHGFSADLHCISESDKYDLKTETAPLVVVVSTTGTGDPPDTARKFVKEIQNQTLPVDFFAHLRYGLLGLGDSEYTYFCNGGKIIDKRLQELGARHFYDTGHADDCVGLELVVEPWIAGLWPALRKHFRSSRGQEEISGALPVASPASSRTDLVKSELLHIESQVELLRFDDSGRKDSEVLKQNAVNSNQSNVVIEDFESSLTRSVPPLSQASLNIPGLPPEYLQVHLQESLGQEESQVSVTSADPVFQVPISKAVQLTTNDAIKTTLLVELDISNTDFSYQPGDAFSVICPNSDSEVQSLLQRLQLEDKREHCVLLKIKADTKKKGATLPQHIPAGCSLQFIFTWCLEIRAIPKKAFLRALVDYTSDSAEKRRLQELCSKQGAADYSRFVRDACACLLDLLLAFPSCQPPLSLLLEHLPKLQPRPYSCASSSLFHPGKLHFVFNIVEFLSTATTEVLRKGVCTGWLALLVASVLQPNIHASHEDSGKALAPKISISPRTTNSFHLPDDPSIPIIMVGPGTGIAPFIGFLQHREKLQEQHPDGNFGAMWLFFGCRHKDRDYLFRKELRHFLKHGILTHLKVSFSRDAPVGEEEAPAKYVQDNIQLHGQQVARILLQENGHIYVCGDAKNMAKDVHDALVQIISKEVGVEKLEAMKTLATLKEEKRYLQDIWS

SEQ ID NO: 9041 - protein, 41 aa, Homo Sapiens
MRRFLLLYATQQGQAKAIAEEICEQAVVHGFSADLHCISES

SEQ ID NO: 9042 - protein, 46 aa, Homo Sapiens
MRRFLLLYATQQGQAKAIAEEICEQAVVHGFSADLHCISESDKCEK

SEQ ID NO: 9043 - protein, 58 aa, Homo Sapiens
MRRFLLLYATQQGQAKAIAEEICEQAVVHGFSADLHCISESDKVSVIQNTPTFAMGGR

SEQ ID NO: 9044 - protein, 58 aa, Homo Sapiens; identical to SEQ ID NO: 9043

SEQ ID NO: 9045 - protein, 92 aa, Homo Sapiens
MRRFLLLYATQQGQAKAIAEEICEQAVVHGFSADLHCISESDKYDLKTETAPLVVVVSTTGTGDPPDTARKFVKEIQNQTLPVDFFAHLRSR

SEQ ID NO: 9046 - protein, 112 aa, Homo Sapiens
MRRFLLLYATQQGQAKAIAEEICEQAVVHGFSADLHCISESDKYDLKTETAPLVVVVSTTGTGDPPDTARKFVKEIQNQTLPVDFFAHLRYGLLGLGDSEYTYFCNGGKIID

SEQ ID NO: 9047 - protein, 156 aa, Homo Sapiens
MRRFLLLYATQQGQAKAIAEEICEQAVVHGFSADLHCISESDKYDLKTETAPLVVVVSTTGTGDPPDTARKFVKEIQNQTLPVDFFAHLRYGLLGLGDSEYTYFCNGGKIIDKRLQELGARHFYDTGHADDCVGLELVVEPWIAGLWPALRKHFRS

SEQ ID NO: 9048 - protein, 698 aa, Homo Sapiens
MRRFLLLYATQQGQAKAIAEEICEQAVVHGFSADLHCISESDKYDLKTETAPLVVVVSTTGTGDPPDTARKFVKEIQNQTLPVDFFAHLRYGLLGLGDSEYTYFCNGGKIIDKRLQELGARHFYDTGHADDCVGLELVVEPWIAGLWPALRKHFRSSRGQEEISGALPVASPASSRTDLVKSELLHIESQVELLRFDDSGRKDSEVLKQNAVNSNQSNVVIEDFESSLTRSVPPLSQASLNIPGLPPEYLQVHLQESLGQEESQVSVTSADPVFQVPISKAVQLTTNDAIKTTLLVELDISNTDFSYQPGDAFSVICPNSDSEVQSLLQRLQLEDKREHCVLLKIKADTKKKGATLPQHIPAGCSLQFIFTWCLEIRAIPKKAFLRALVDYTSDSAEKRRLQELCSKQGAADYSRFVRDACACLLDLLLAFPSCQPPLSLLLEHLPKLQPRPYSCASSSLFHPGKLHFVFNIVEFLSTATTEVLRKGVCTGWLALLVASVLQPNIHASHEDSGKALAPKISISPRTTNSFHLPDDPSIPIIMVGPGTGIAPFIGFLQHREKLQEQHPDGNFGAMWLFFGCRHKDRDYLFRKELRHFLKHGILTHLKVSFSRDAPVGEEEAPAKYVQDNIQLHGQQVARILLQENGHIYVCGDAKNMAKDVHDALVQIISKEVGVEKLEAMKTLATLKEEKRYLQDIWS

SEQ ID NO: 9049 - protein, 372 aa, Homo Sapiens
  misc_feature (1)..(1): Xaa can be any naturally occurring amino acid
XFTVTCLEVMRRFLLLYATQQGQAKAIAEEICEQAVVHGFSADLHCISESDKYDLKTETAPLVVVVSTTGTGDPPDTARKFVKEIQNQTLPVDFFAHLRYGLLGLGDSEYTYFCNGGKIIDKRLQELGARHFYDTGHADDCVGLELVVEPWIAGLWPALRKHFRSSRGQEEISGALPVASPASSRTDLVKSELLHIESQVELLRFDDSGRKDSEVLKQNAVNSNQSNVVIEDFESSLTRSVPPLSQASLNIPGLPPEYLQVHLQESLGQEESQVSVTSADPVFQVPISKAVQLTTNDAIKTTLLVELDISNTDFSYQPGDAFSVICPNSDSEVQSLLQRLQLEDKREHCVLLKIKADTKKKGIFASPCGLYQ

SEQ ID NO: 9050 - protein, 160 aa, Homo Sapiens
  misc_feature (1)..(1): Xaa can be any naturally occurring amino acid
XVRAGARLVEVALCRFVPGWRGVGLGDSEYTYFCNGGKIIDKRLQELGARHFYDTGHADDCVGLELVVEPWIAGLWPALRKHFRSSRGQEEISGALPVASPASSRTDLVKSELLHIESQVELLRFDDSGRKDSEVLKQNAVNSNQSNVVIEDFESSLTRS

SEQ ID NO: 9051 - protein, 81 aa, Homo Sapiens
  misc_feature (1)..(1): Xaa can be any naturally occurring amino acid
XVRAGARLVEVALCSFTVTCLEVMRRFLLLYATQQGQAKAIAEEICEQAVVHGFSADLHCISESDKVSVIQNTPTFAMGGR

SEQ ID NO: 9052 - protein, 115 aa, Homo Sapiens
  misc_feature (1)..(1): Xaa can be any naturally occurring amino acid
XVRAGARLVEVALCSFTVTCLEVMRRFLLLYATQQGQAKAIAEEICEQAVVHGFSADLHCISESDKYDLKTETAPLVVVVSTTGTGDPPDTARKFVKEIQNQTLPVDFFAHLRSR

SEQ ID NO: 9053 - protein, 178 aa, Homo Sapiens
MARAPLRPENTIVRGSANQCQDTYRAEELTGHTTGLSLNNDRLYKLTYSTEVLLDRGKGKLQDSVGYRISSNVDVALLWRNPDGDDDQLIQITMKDVNVENVNQQRGEKSIFKGKSPSKIMGKENLEALQRPTLLHLIHGKVKEFYSYQNEAVAIENIKRGLASLFQTQLSSGTTNEV

SEQ ID NO: 9054 - protein, 55 aa, Homo Sapiens
MARAPLRPENTIVRGSANQCQDTYRAEELTGRPSIITRIHKTEEGDRRDGQSDMK

SEQ ID NO: 9055 - protein, 42 aa, Homo Sapiens
MARAPLRPENTIVRGSANQCQDTYRAEELTGSEEGHSLTGCH

SEQ ID NO: 9056 - protein, 56 aa, Homo Sapiens
MEERGGVYAGRGLELVFWEWEVVTVMSVFSRSRIKCVPADVYSFIYSCEYWMKELR

SEQ ID NO: 9057 - protein, 921 aa, Homo Sapiens
MEERGGVYAGRGLELVFWEWEVVTVMSVFSRSRIKCVPADVYSFIYSCHTTGLSLNNDRLYKLTYSTEVLLDRGKGKLQDSVGYRISSNVDVALLWRNPDGDDDQLIQITMKDVNVENVNQQRGEKSIFKGKSPSKIMGKENLEALQRPTLLHLIHGKVKEFYSYQNEAVAIENIKRGLASLFQTQLSSGTTNEVDISGNCKVTYQAHQDKVIKIKALDSCKIARSGFTTPNQVLGVSSKATSVTTYKIEDSFVIAVLAEETHNFGLNFLQTIKGKIVSKQKLELKTTEAGPRLMSGKQAAAIIKAVDSKYTAIPIVGQVFQSHCKGCPSLSELWRSTRKYLQPDNLSKAEAVRNFLAFIQHLRTAKKEEILQILKMENKEVLPQLVDAVTSAQTSDSLEAILDFLDFKSDSSIILQERFLYACGFASHPNEELLRALISKFKGSIGSSDIRETVMIITGTLVRKLCQNEGCKLKAVVEAKKLILGGLEKAEKKEDTRMYLLALKNALLPEGIPSLLKYAEAGEGPISHLATTALQRYDLPFITDEVKKTLNRIYHQNRKVHEKTVRTAAAAIILNNNPSYMDVKNILLSIGELPQEMNKYMLAIVQDILRFEMPASKIVRRVLKEMVAHNYDRFSRSGSSSAYTGYIERSPRSASTYSLDILYSGSGILRRSNLNIFQYIGKAGLHGSQVVIEAQGLEALIAATPDEGEENLDSYAGMSAILFDVQLRPVTFFNGYSDLMSKMLSASGDPISVVKGLILLIDHSQELQLQSGLKANIEVQGGLAIDISGAMEFSLWYRESKTRVKNRVTVVITTDITVDSSFVKAGLETSTETEAGLEFISTVQFSQYPFLVCMQMDKDEAPFRQFEKKYERLSTGRGYVSQKRKESVLAGCEFPLHQENSEMCKVVFAPQPDSTSSGWF

SEQ ID NO: 9058 - protein, 50 aa, Homo Sapiens
MEERGGVYAGRGLELVFWEWEVVTVMSVFSRSRIKCVPADVYSFIYSCPV

SEQ ID NO: 9059 - protein, 72 aa, Homo Sapiens
MEERGGVYAGRGLELVFWEWEVVTVMSVFSRSRIKCVPADVYSFIYSCRPSIITRIHKTEEGDRRDGQSDMK

SEQ ID NO: 9060 - protein, 59 aa, Homo Sapiens
MEERGGVYAGRGLELVFWEWEVVTVMSVFSRSRIKCVPADVYSFIYSCSEEGHSLTGCH

SEQ ID NO: 9061 - protein, 894 aa, Homo Sapiens
MILLAVLFLCFISSYSASVKGHTTGLSLNNDRLYKLTYSTEVLLDRGKGKLQDSVGYRISSNVDVALLWRNPDGDDDQLIQITMKDVNVENVNQQRGEKSIFKGKSPSKIMGKENLEALQRPTLLHLIHGKVKEFYSYQNEAVAIENIKRGLASLFQTQLSSGTTNEVDISGNCKVTYQAHQDKVIKIKALDSCKIARSGFTTPNQVLGVSSKATSVTTYKIEDSFVIAVLAEETHNFGLNFLQTIKGKIVSKQKLELKTTEAGPRLMSGKQAAAIIKAVDSKYTAIPIVGQVFQSHCKGCPSLSELWRSTRKYLQPDNLSKAEAVRNFLAFIQHLRTAKKEEILQILKMENKEVLPQLVDAVTSAQTSDSLEAILDFLDFKSDSSIILQERFLYACGFASHPNEELLRALISKFKGSIGSSDIRETVMIITGTLVRKLCQNEGCKLKAVVEAKKLILGGLEKAEKKEDTRMYLLALKNALLPEGIPSLLKYAEAGEGPISHLATTALQRYDLPFITDEVKKTLNRIYHQNRKVHEKTVRTAAAAIILNNNPSYMDVKNILLSIGELPQEMNKYMLAIVQDILRFEMPASKIVRRVLKEMVAHNYDRFSRSGSSSAYTGYIERSPRSASTYSLDILYSGSGILRRSNLNIFQYIGKAGLHGSQVVIEAQGLEALIAATPDEGEENLDSYAGMSAILFDVQLRPVTFFNGYSDLMSKMLSASGDPISVVKGLILLIDHSQELQLQSGLKANIEVQGGLAIDISGAMEFSLWYRESKTRVKNRVTVVITTDITVDSSFVKAGLETSTETEAGLEFISTVQFSQYPFLVCMQMDKDEAPFRQFEKKYERLSTGRGYVSQKRKESVLAGCEFPLHQENSEMCKVVFAPQPDSTSSGWF

SEQ ID NO: 9062 - protein, 894 aa, Homo Sapiens; identical to SEQ ID NO: 9061

SEQ ID NO: 9063 - protein, 151 aa, Homo Sapiens
MILLAVLFLCFISSYSASVKGHTTGLSLNNDRLYKLTYSTEVLLDRGKGKLQDSVGYRISSNVDVALLWRNPDGDDDQLIQITMKDVNVENVNQQRGEKSIFKGKSPSKIMGKENLEALQRPTLLHLIHGKVKGRLDSTTFSPTSYFSSLQ

SEQ ID NO: 9064 - protein, 45 aa, Homo Sapiens
MSLVAEAFVSQIAAAEPWPENATLYQQLKGEQILLSDNAASLAVQ

SEQ ID NO: 9065 - protein, 263 aa, Homo Sapiens
MSLVAEAFVSQIAAAEPWPENATLYQQLKGEQILLSDNAASLAVQAFLQMCNLPIKVVCRANAEYMSPSGKVPFIHVGNQVVSELGPIVQFVKAKGHSLSDGLEEVQKAEMKAYMELVNNMLLTAELYLQWCDEATVGEITHARYGSPYPWPLNHILAYQKQWEVKRKMKAIGWGKKTLDQVLEDVDQCCQALSQRLGTQPYFFNKQPTELDALVFGHLYTILTTQLTNDELSEKVKNYSNLLAFCRRIEQHYFEDRGKGRLS

SEQ ID NO: 9066 - protein, 229 aa, Homo Sapiens
MSLVAEAFVSQIAAAEPWPENATLYQQLKGEQILLSDNAASLAVQAFLQMCNLPIKVVCRANAEYMSPSGKVPFIHVGNQVVSELGPIVQFVKAKGHSLSDGLEEVQKAEMKAYMELVNNMLLTAELYLQWCDEATVGEWEVKRKMKAIGWGKKTLDQVLEDVDQCCQALSQRLGTQPYFFNKQPTELDALVFGHLYTILTTQLTNDELSEKVKNYSNLLAFCRRIEQH

SEQ ID NO: 9067 - protein, 207 aa, Homo Sapiens
MSLVAEAFVSQIAGKVPFIHVGNQVVSELGPIVQFVKAKGHSLSDGLEEVQKAEMKAYMELVNNMLLTAELYLQWCDEATVGEITHARYGSPYPWPLNHILAYQKQWEVKRKMKAIGWGKKTLDQVLEDVDQCCQALSQRLGTQPYFFNKQPTELDALVFGHLYTILTTQLTNDELSEKVKNYSNLLAFCRRIEQHYFEDRGKGRLS

SEQ ID NO: 9068 - protein, 37 aa, Homo Sapiens
MSLVAEAFVSQIAGWSAVAQPGLTATSASRVQAILLP

SEQ ID NO: 9069 - protein, 228 aa, Homo Sapiens
ASSTHHSTVPPLTSSNHSTSPQLSTGVSFFFLSFHISNLQFNSSLEDPSTDYYQELQRDISEMFLQIYKQGGFLGLSNIKFRPGSVVVQLTLAFREGTINVHDVETQFNQYKTEAASRYNLTISDVSVSDVPFPFSAQSGAGVPGWGIALLVLVCVLVALAIVYLIALAVCQCRRKNYGQLDIFPARDTYHPMSEYPTYHTHGRYVPPSSTDRSPYEKEWRVDRERLA

SEQ ID NO: 9070 - protein, 135 aa, Homo Sapiens
MTPGTQSPFFLLLLLTVLTATTAPKPATVVTGSGHASSTPGGEKETSATQRSSVPSSTEKNAALHQAQLLLWCTTAPLPGLPQPQPARALHSQFPATTLILLPPLPAIAPRLMPVALTIARSQHRLLPRAAERHF

SEQ ID NO: 9071 - protein, 241 aa, Homo Sapiens
MTPGTQSPFFLLLLLTVLTATTAPKPATVVTGSGHASSTPGGEKETSATQRSSVPSSTEKNAFLQIYKQGGFLGLSNIKFRPGSVVVQLTLAFREGTINVHDVETQFNQYKTEAASRYNLTISDVSVSDVPFPFSAQSGAGVPGWGIALLVLVCVLVALAIVYLIALAVCQCRRKNYGQLDIFPARDTYHPMSEYPTYHTHGRYVPPSSTDRSPYEKVSAGNGGSSLSYTNPAVAATSANL

SEQ ID NO: 9072 - protein, 159 aa, Homo Sapiens
MTPGTQSPFFLLLLLTVLTATTAPKPATVVTGSGHASSTPGGEKETSATQRSSVPSSTEKNAFNSSLEDPSTDYYQELQRDISEMAVCQCRRKNYGQLDIFPARDTYHPMSEYPTYHTHGRYVPPSSTDRSPYEKVSAGNGGSSLSYTNPAVAATSANL

SEQ ID NO: 9073 - protein, 264 aa, Homo Sapiens
MTPGTQSPFFLLLLLTVLTATTAPKPATVVTGSGHASSTPGGEKETSATQRSSVPSSTEKNAFNSSLEDPSTDYYQELQRDISEMFLQIYKQGGFLGLSNIKFRPGSVVVQLTLAFREGTINVHDVETQFNQYKTEAASRYNLTISDVSVSDVPFPFSAQSGAGVPGWGIALLVLVCVLVALAIVYLIALAVCQCRRKNYGQLDIFPARDTYHPMSEYPTYHTHGRYVPPSSTDRSPYEKVSAGNGGSSLSYTNPAVAATSANL

SEQ ID NO: 9074 - protein, 189 aa, Homo Sapiens
MTPGTQSPFFLLLLLTVLTATTAPKPATVVTGSGHASSTPGGEKETSATQRSSVPSSTEKNAFNSSLEDPSTDYYQELQRDISEMSGAGVPGWGIALLVLVCVLVALAIVYLIALAVCQCRRKNYGQLDIFPARDTYHPMSEYPTYHTHGRYVPPSSTDRSPYEKVSAGNGGSSLSYTNPAVAATSANL

SEQ ID NO: 9075 - protein, 80 aa, Homo Sapiens
MTPGTQSPFFLLLLLTVLTATTAPKPATVVTGSGHASSTPGGEKETSATQRSSVPSSTEKNAIPAPTTTKSCRETFLKCE

SEQ ID NO: 9076 - protein, 239 aa, Homo Sapiens
MTPGTQSPFFLLLLLTVLTATTAPKPATVVTGSGHASSTPGGEKETSATQRSSVPSSTEKNAIPAPTTTKSCRETFLKWPGSVVVQLTLAFREGTINVHDVETQFNQYKTEAASRYNLTISDVSVSDVPFPFSAQSGAGVPGWGIALLVLVCVLVALAIVYLIALAVCQCRRKNYGQLDIFPARDTYHPMSEYPTYHTHGRYVPPSSTDRSPYEKVSAGNGGSSLSYTNPAVAATSANL

SEQ ID NO: 9077 - protein, 268 aa, Homo Sapiens
MTPGTQSPFFLLLLLTVLTATTAPKPATVVTGSGHASSTPGGEKETSATQRSSVPSSTEKNALSTGVSFFFLSFHISNLQFNSSLEDPSTDYYQELQRDISEMFLQIYKQGGFLGLSNIKFRPGSVVVQLTLAFREGTINVHDVETQFNQYKTEAASRYNLTISDVSVSDVPFPFSAQSGAGVPGWGIALLVLVCVLVALAIVYLIALAVCQCRRKNYGQLDIFPARDTYHPMSEYPTYHTHGRYVPPSSTDRSPYEKEWRVDRERLA

SEQ ID NO: 9078 - protein, 123 aa, Homo Sapiens
MTPGTQSPFFLLLLLTVLTATTAPKPATVVTGSGHASSTPGGEKETSATQRSSVPSSTEKNALSTGVSFFFLSFHISNLQFNSSLEDPSTDYYQELQRDISEMFLQIYKQGGFLGLSNIKFSE

SEQ ID NO: 9079 - protein, 166 aa, Homo Sapiens
MTPGTQSPFFLLLLLTVLTATTAPKPATVVTGSGHASSTPGGEKETSATQRSSVPSSTEKNASGAGVPGWGIALLVLVCVLVALAIVYLIALAVCQCRRKNYGQLDIFPARDTYHPMSEYPTYHTHGRYVPPSSTDRSPYEKVSAGNGGSSLSYTNPAVAATSANL

SEQ ID NO: 9080 - protein, 484 aa, Homo Sapiens
MTPGTQSPFFLLLLLTVLTATTAPKPATVVTGSGHASSTPGGEKETSATQRSSVPSSTEKNAVSMTSSVLSSHSPGSGSSTTQGQDVTLAPATEPASGSAATWGQDVTSVPVTRPALGSTTPPAHDVTSAPDNKPAPGSTAPPAHGVTSAPDTRPAPGSTAPPAHGVTSAPDNRPALGSTAPPVHNVTSASGSASGSASTLVHNGTSARATTTPASKSTPFSIPSHHSDTPTTLASHSTKTDASSTHHSTVPPLTSSNHSTSPQLSTGVSFFFLSFHISNLQFNSSLEDPSTDYYQELQRDISEMFLQIYKQGGFLGLSNIKFRPGSVVVQLTLAFREGTINVHDVETQFNQYKTEAASRYNLTISDVSVSDVPFPFSAQSGAGVPGWGIALLVLVCVLVALAIVYLIALAVCQCRRKNYGQLDIFPARDTYHPMSEYPTYHTHGRYVPPSSTDRSPYEKVSAGNGGSSLSYTNPAVAATSANL

SEQ ID NO: 9081 - protein, 213 aa, Homo Sapiens
MTPGTQSPFFLLLLLTVLTGSGHASSTPGGEKETSATQRSSVPSSTEKNAVSMTSSVLSSHSPGSGSSTTQGQDVTLAPATEPASGSAATWGQDVTSVPVTRPALGSTTPPAGVPGWGIALLVLVCVLVALAIVYLIALAVCQCRRKNYGQLDIFPARDTYHPMSEYPTYHTHGRYVPPSSTDRSPYEKVSAGNGGSSLSYTNPAVAATSANL

SEQ ID NO: 9082 - protein, 126 aa, Homo Sapiens
MTPGTQSPFFLLLLLTVLTVVTGSGHASSTPGGEKETSATQRSSVPSSTEKNAALHQAQLLLWCTTAPLPGLPQPQPARALHSQFPATTLILLPPLPAIAPRLMPVALTIARSQHRLLPRAAERHF

SEQ ID NO: 9083 - protein, 255 aa, Homo Sapiens
MTPGTQSPFFLLLLLTVLTVVTGSGHASSTPGGEKETSATQRSSVPSSTEKNAFNSSLEDPSTDYYQELQRDISEMFLQIYKQGGFLGLSNIKFRPGSVVVQLTLAFREGTINVHDVETQFNQYKTEAASRYNLTISDVSVSDVPFPFSAQSGAGVPGWGIALLVLVCVLVALAIVYLIALAVCQCRRKNYGQLDIFPARDTYHPMSEYPTYHTHGRYVPPSSTDRSPYEKVSAGNGGSSLSYTNPAVAATSANL

SEQ ID NO: 9084 - protein, 96 aa, Homo Sapiens
MTPGTQSPFFLLLLLTVLTVVTGSGHASSTPGGEKETSATQRSSVPSSTEKNAFNSSLEDPSTDYYQELQRDISEMFLQIYKQGGFLGLSNIKFSE

SEQ ID NO: 9085 - protein, 149 aa, Homo Sapiens
MTPGTQSPFFLLLLLTVLTVVTGSGHASSTPGGEKETSATQRSSVPSSTEKNAFNSSLEDPSTDYYQELQRDISEMFLQIYKQGGFLGLSNIKFSLGLGCQAGASRCWCWSVFWLRWPLSISLPWLSVSAAERTTGSWTSFQPGIPTIL

SEQ ID NO: 9086 - protein, 203 aa, Homo Sapiens
MTPGTQSPFFLLLLLTVLTVVTGSGHASSTPGGEKETSATQRSSVPSSTEKNAIPAPTTTKSCRETFLKCFCRFINKGVFWASPILSSVSDVPFPFSAQSGAGVPGWGIALLVLVCVLVALAIVYLIALAVCQCRRKNYGQLDIFPARDTYHPMSEYPTYHTHGRYVPPSSTDRSPYEKVSAGNGGSSLSYTNPAVAATSANL

SEQ ID NO: 9087 - protein, 230 aa, Homo Sapiens
MTPGTQSPFFLLLLLTVLTVVTGSGHASSTPGGEKETSATQRSSVPSSTEKNAIPAPTTTKSCRETFLKWPGSVVVQLTLAFREGTINVHDVETQFNQYKTEAASRYNLTISDVSVSDVPFPFSAQSGAGVPGWGIALLVLVCVLVALAIVYLIALAVCQCRRKNYGQLDIFPARDTYHPMSEYPTYHTHGRYVPPSSTDRSPYEKVSAGNGGSSLSYTNPAVAATSANL

SEQ ID NO: 9088 - protein, 229 aa, Homo Sapiens
MTPGTQSPFFLLLLLTVLTVVTGSGHASSTPGGEKETSATQRSSVPSSTEKNAIYKQGGFLGLSNIKFRPGSVVVQLTLAFREGTINVHDVETQFNQYKTEAASRYNLTISDVSVSDVPFPFSAQSGAGVPGWGIALLVLVCVLVALAIVYLIALAVCQCRRKNYGQLDIFPARDTYHPMSEYPTYHTHGRYVPPSSTDRSPYEKVSAGNGGSSLSYTNPAVAATSANL

SEQ ID NO: 9089 - protein, 168 aa, Homo Sapiens
MTPGTQSPFFLLLLLTVLTVVTGSGHASSTPGGEKETSATQRSSVPSSTEKNALSTGVSFFFLSFHISNLQFNSSLEDPSTDYYQELQRDISEMAVCQCRRKNYGQLDIFPARDTYHPMSEYPTYHTHGRYVPPSSTDRSPYEKVSAGNGGSSLSYTNPAVAATSANL

SEQ ID NO: 9090 - protein, 198 aa, Homo Sapiens
MTPGTQSPFFLLLLLTVLTVVTGSGHASSTPGGEKETSATQRSSVPSSTEKNALSTGVSFFFLSFHISNLQFNSSLEDPSTDYYQELQRDISEMFLQIYKQGGFLGLSNIKFRPGSVVVQLTLAFREGTINVHDVETQFNQYKTEAASRYNLTISDVSGCLSVPPKELRAAGHLSSPGYLPSYERVPHLPHPWALCAP

SEQ ID NO: 9091 - protein, 273 aa, Homo Sapiens
MTPGTQSPFFLLLLLTVLTVVTGSGHASSTPGGEKETSATQRSSVPSSTEKNALSTGVSFFFLSFHISNLQFNSSLEDPSTDYYQELQRDISEMFLQIYKQGGFLGLSNIKFRPGSVVVQLTLAFREGTINVHDVETQFNQYKTEAASRYNLTISDVSVSDVPFPFSAQSGAGVPGWGIALLVLVCVLVALAIVYLIALAVCQCRRKNYGQLDIFPARDTYHPMSEYPTYHTHGRYVPPSSTDRSPYEKVSAGNGGSSLSYTNPAVAATSANL

SEQ ID NO: 9092 - protein, 475 aa, Homo Sapiens
MTPGTQSPFFLLLLLTVLTVVTGSGHASSTPGGEKETSATQRSSVPSSTEKNAVSMTSSVLSSHSPGSGSSTTQGQDVTLAPATEPASGSAATWGQDVTSVPVTRPALGSTTPPAHDVTSAPDNKPAPGSTAPPAHGVTSAPDTRPAPGSTAPPAHGVTSAPDNRPALGSTAPPVHNVTSASGSASGSASTLVHNGTSARATTTPASKSTPFSIPSHHSDTPTTLASHSTKTDASSTHHSTVPPLTSSNHSTSPQLSTGVSFFFLSFHISNLQFNSSLEDPSTDYYQELQRDISEMFLQIYKQGGFLGLSNIKFRPGSVVVQLTLAFREGTINVHDVETQFNQYKTEAASRYNLTISDVSVSDVPFPFSAQSGAGVPGWGIALLVLVCVLVALAIVYLIALAVCQCRRKNYGQLDIFPARDTYHPMSEYPTYHTHGRYVPPSSTDRSPYEKVSAGNGGSSLSYTNPAVAATSANL

SEQ ID NO: 9093 - protein, 1262 aa, Homo Sapiens
MTPGTQSPFFLLLLLTVLTVVTGSGHASSTPGGEKETSATQRSSVPSSTEKNAVSMTSSVLSSHSPGSGSSTTQGQDVTLAPATEPASGSAATWGQDVTSVPVTRPALGSTTPPAHDVTSAPDNKPAPGSTAPPAHGVTSAPDTRPAPGSTAPQAHGVTSAPDTRPAPGSTAPPAHGVTSAPDTRPAPGSTAPPAHGVTSAPDTRSAPGSTAPAAHGVTSAPDTRSVPGSTAPQAHGVTSAPDTRPAPGSTAPPAHGVTSAPDTRPVPGSTAPPAHGVTSAPDTRPAPGSTAPPAHGVTSAPDTRPAPGSTAPQAHGVTSAPDTRPAPGSTAPPAHGVTSAPDTRPAPGSTAPPAHGVTSAPDTRPAPGSTAPAAHGVTSAPDTRPAPGSTAPQAHGVTSAPDTRPAPGSTAPPAHGVTSAPDTRPAPGSTAPPAHGVTSAPDTRPAPGSTAPPAHGVTSAPDTRPAPGSTAPAAHGVTSAPDTRPAPGSTAPQAHGVTSAPDTRPAPGSTAPPAHGVTSAPDTRPAPGSTAPPAHGVTSAPDTRPAPGSTAPPTHGVTSAPDTSPAPGSTAPPAHGVTSAPDTRPAPGYTAPAAHGVTSAPDTRPAPGSTAPQAHGVTSAPDTRPAPGSTAPPAHGVTSAPDTRPAPGSTAPPAHGVTSAPDTRPAPGSTAPPAHGVTSAPESRPAPGSTARAAHGVTSAPESRPAPGSTAPPAHGVTSAPDTRPAPGSTAPPAHGVTSAPDTRPAPGSTAPPAHGVTSAPDTRPAPGSTAPPAHGVTSAPDTRPAPGSTAPPAHGVTSAPDTRPSPPGSTAPPAHGVTSAPDTRPAPGSTAPPVHGVTSAPDTRPAPGSTAPPAHGVTSAPDTRPAPGSTAPPAHGVTSAPDTRPAPGSTAPPAHGVTSAPDTRRAPGSTPAPGSTAPPAHGVTSAPDTRPAPGSTAPPAHGVTSAPDNRPALGSTAPPVHNVTSASGSASGSASTLVHNGTSARATTTPASKSTPFSIPSHHSDTPTTLASHSTKTDASSTHHSTVPPLTSSNHSTSPQLSTGVSFFFLSFHISNLQFNSSLEDPSTDYYQELQRDISEMFLQIYKQGGFLGLSNIKFRPGSVVVQLTLAFREGTINVHDVETQFNQYKTEAASRYNLTISDVSVSDVPFPFSAQSGAGVPGWGIALLVLVCVLVALAIVYLIALAVCQCRRKNYGQLDIFPARDTYHPMSEYPTYHTHGRYVPPSSTDRSPYEKVSAGNGGSSLSYTNPAVAATSANL

SEQ ID NO: 9094 - protein, 85 aa, Homo Sapiens
TEAASRYNLTISDVSVWGWGARLGHRAAGAGLCSGCAGHCLSHCLGCLSVPPKELRAAGHLSSPGYLPSYERVPHLPHPWALCAP

SEQ ID NO: 9095 - protein, 512 aa, Homo Sapiens
MKAIIHLTLLALLSVNTATNQGNSADAVTTTETATSGPTVAAADTTETNFPETASTTANTPSFPTATSPAPPIISTHSSSTIPTPAPPIISTHSSSTIPIPTAADSESTTNVNSLATSDIITASSPNDGLITMVPSETQSNNEMSPTTEDNQSSGPPTGTALLETSTLNSTGPSNPCQDDPCADNSLCVKLHNTSFCLCLEGYYYNSSTCKKGKVFPGKISVTVSETFDPEEKHSMAYQDLHSEITSLFKDVFGTSVYGQTVILTVSTSLSPRSEMRADDKFVNVTIVTILAETTSDNEKTVTEKINKAIRSSSSNFLNYDLTLRCDYYGCNQTADDCLNGLACDCKSDLQRPNPQSPFCVASSLKCPDACNAQHKQCLIKKSGGAPECACVPGYQEDANGNCQKCAFGYSGLDCKDKFQLILTIVGTIAGIVILSMIIALIVTARSNNKTKHIEEENLIDEDFQNLKLRSTGFTNLGAEGSVFPKVRITASRDSQMQNPYSRHSSMPRPDY

SEQ ID NO: 9096 - protein, 184 aa, Homo Sapiens
MKAIIHLTLLALLSVNTEDNQSSGPPTGTALLETSTLNSTGPSNPCQDDPCADNSLCVKLHNTSFCLCLEGYYYNSSTCKKGKVFPGKISVTVSETFDPEEKHSMAYQDLHSEITSLFKDVFGTSVYGQTVILTVSTSLSPRSEMRADDKFVNVTIVTILAETTSDNEKTVTEKINKAIRSSSS

SEQ ID NO: 9097 - protein, 709 aa, Homo Sapiens
MGCLWGLALPLFFFCWEVGVSGSSAGPSTRRADTAMTTDDTEVPAMTLAPGHAALETQTLSAETSSRASTPAGPIPEAETRGAKRISPARETRSFTKTSPNFMVLIATSVETSAASGSPEGAGMTTVQTITGSDPREAIFDTLCTDDSSEEAKTLTMDILTLAHTSTEAKGLSSESSASSDSPHPVITPSRASESSASSDGPHPVITPSRASESSASSDGPHPVITPSRASESSASSDGPHPVITPSRASESSASSDGPHPVITPSRASESSASSDGPHPVITPSRASESSASSDGPHPVITPSRASESSASSDGPHPVITPSRASESSASSDGPHPVITPSRASESSASSDGLHPVITPSRASESSASSDGPHPVITPSRASESSASSDGPHPVITPSWSPGSDVTLLAEALVTVTNIEVINCSITEIETTTSSIPGASDTDLIPTEGVKASSTSDPPALPDSTEAKPHITEVTASAETLSTAGTTESAAPDATVGTPLPTNSATEREVTAPGATTLSGALVTVSRNPLEETSALSVETPSYVKVSGAAPVSIEAGSAVGKTTSFAGSSASSYSPSEAALKNFTPSETPTMDIATKGPFPTSRDPLPSVPPTTTNSSRGTNSTLAKITTSAKTTMKPPTATPTTARTRPTTDVSAGENGGFLLLRLSVASPEDLTDPRVAERLMQQLHRELHAHAPHFQVSLLRVRRG

SEQ ID NO: 9098 - protein, 723 aa, Homo Sapiens
MGCLWGLALPLFFFCWEVGVSGSSAGPSTRRADTAMTTDDTEVPAMTLAPGHAALETQTLSAETSSRASTPAGPIPEAETRGAKRISPARETRSFTKTSPNFMVLIATSVETSAASGSPEGAGMTTVQTITGSDPREAIFDTLCTDDSSEEAKTLTMDILTLAHTSTEAKGLSSESSASSDSPHPVITPSRASESSASSDGPHPVITPSRASESSASSDGPHPVITPSRASESSASSDGPHPVITPSRASESSASSDGPHPVITPSRASESSASSDGPHPVITPSRASESSASSDGPHPVITPSRASESSASSDGPHPVITPSRASESSASSDGPHPVITPSRASESSASSDGLHPVITPSRASESSASSDGPHPVITPSRASESSASSDGPHPVITPSWSPGSDVTLLAEALVTVTNIEVINCSITEIETTTSSIPGASDTDLIPTEGVKASSTSDPPALPDSTEAKPHITEVTASAETLSTAGTTESAAPDATVGTPLPTNSATEREVTAPGATTLSGALVTVSRNPLEETSALSVETPSYVKVSGAAPVSIEAGSAVGKTTSFAGSSASSYSPSEAALKNFTPSETPTMDIATKGPFPTSRDPLPSVPPTTTNSSRGTNSTLAKITTSAKTTMKPPTATPTTARTRPTTDVSAGENGGFLLLRLSVASPEDLTDPRVAERLMQQMERSLALSPRLECSGVISAHCKLHLLGSRDSPASAS

SEQ ID NO: 9099 - protein, 538 aa, Homo Sapiens
MGCLWGLALPLFFFCWEVGVSGSSAGPSTRRADTAMTTDDTEVPAMTLAPGHAALETQTLSAETSSRASTPAGPIPEAETRGAKRISPARETRSFTKTSPNFMVLIATSVETSAASGSPEGAGMTTVQTITGSDPREAIFDTLCTDDSSEEAKTLTMDILTLAHTSTEAKGLSSESSASSDSPHPVITPSRASESSASSDGPHPVITPSRASESSASSDGPHPVITPSWSPGSDVTLLAEALVTVTNIEVINCSITEIETTTSSIPGASDTDLIPTEGVKASSTSDPPALPDSTEAKPHITEVTASAETLSTAGTTESAAPDATVGTPLPTNSATEREVTAPGATTLSGALVTVSRNPLEETSALSVETPSYVKVSGAAPVSIEAGSAVGKTTSFAGSSASSYSPSEAALKNFTPSETPTMDIATKGPFPTSRDPLPSVPPTTTNSSRGTNSTLAKITTSAKTTMKPPTATPTTARTRPTTDVSAGENGGFLLLRLSVASPEDLTDPRVAERLMQQLHRELHAHAPHFQVSLLRVRRG

SEQ ID NO: 9100 - protein, 674 aa, Homo Sapiens
MTTDDTEVPAMTLAPGHAALETQTLSAETSSRASTPAGPIPEAETRGAKRISPARETRSFTKTSPNFMVLIATSVETSAASGSPEGAGMTTVQTITGSDPREAIFDTLCTDDSSEEAKTLTMDILTLAHTSTEAKGLSSESSASSDSPHPVITPSRASESSASSDGPHPVITPSRASESSASSDGPHPVITPSRASESSASSDGPHPVITPSRASESSASSDGPHPVITPSRASESSASSDGPHPVITPSRASESSASSDGPHPVITPSRASESSASSDGPHPVITPSRASESSASSDGPHPVITPSRASESSASSDGLHPVITPSRASESSASSDGPHPVITPSRASESSASSDGPHPVITPSWSPGSDVTLLAEALVTVTNIEVINCSITEIETTTSSIPGASDTDLIPTEGVKASSTSDPPALPDSTEAKPHITEVTASAETLSTAGTTESAAPDATVGTPLPTNSATEREVTAPGATTLSGALVTVSRNPLEETSALSVETPSYVKVSGAAPVSIEAGSAVGKTTSFAGSSASSYSPSEAALKNFTPSETPTMDIATKGPFPTSRDPLPSVPPTTTNSSRGTNSTLAKITTSAKTTMKPPTATPTTARTRPTTDVSAGENGGFLLLRLSVASPEDLTDPRVAERLMQQLHRELHAHAPHFQVSLLRVRRG

SEQ ID NO: 9101 - protein, 128 aa, Homo Sapiens
  misc_feature (1)..(1): Xaa can be any naturally occurring amino acid
XPTMDIATKGPFPTSRDPLPSVPPTTTNSSRGTNSTLAKITTSAKTTMKPPTATPTTARTRPTTDVSAGENGGFLLLRLSVASPEDLTDPRVAERLMQQLMTQGTHSAHVPSMVGVNPLPIVPGGFQH

SEQ ID NO: 9102 - protein, 3323 aa, Homo Sapiens
MQLLGLLGLLWMLKASPWATGTLSTATSISQVPFPRAEAASAVLSNSPHSRDLAGWPLGVPQLASPAPGHRENAPMTLTTSPHDTLISETLLNSPVSSNTSTTPTSKFAFKVETTPPTVLVYSATTECVYPTSFIITISHPTSICVTTTQVAFTSSYTSTPVTQKPVTTVTSTYSMTTTEKGTSAMTSSPSTTTARETPIVTVTPSSVSATDTTFHTTISSTTRTTERTPLPTGSIHTTTSPTPVFTTLKTAVTSTSPITSSITSTNTVTSMTTTASQPTATNTLSSPTRTILSSTPVLSTETITSGITNTTPLSTLVTTLPTTISRSTPTSETTYTTSPTSTVTDSTTKIAYSTSMTGTLSTETSLPPTSSSLPTTETATTPMTNLVTTTTEISSHSTPSFSSSTIYSTVSTSTTAISSLPPTSGTMVTSTTMTPSSLSTDIPFTTPTTITHHSVGSTGFLTTATDLTSTFTVSSSSAMSTSVIPSSPSIQNTETSSLVSMTSATTPNVRPTFVSTLSTPTSSLLTTFPATYSFSSSMSASSAGTTHTESISSPPASTSTLHTTAESTLAPTTTTSFTTSTTMEPPSTTAATTGTGQTTFTSSTATFPETTTPTPTTDMSTESLTTAMTSPPITSSVTSTNTVTSMTTTTSPPTTTNSFTSLTSMPLSSTPVPSTEVVTSGTINTIPPSILVTTLPTPNASSMTTSETTYPNSPTGPGTNSTTEITYPTTMTETSSTATSLPPTSPLVSTAKTAKTPTTNLVTTTTKTTSHSTTSFTSSTVYSTASTYTTAITSVPTTLGTMVTSTSMISSTVSTGIPTSQPTTITPSSVGISGSLPMMTDLTSVYTVSNMSARPTTVIPSSPTVQNTEISISVSMTSATTPSGGPTFTSTENTPTRSLLTSFPMTHSFSSSMSESSAGTTHTESISSPRGTTSTLHTTVESTPSPTTTTSFTTSTMMEPPSSTVSTTGRGQTTFPSSTATFPETTTLTPTTDISTVSLTTAMTSPPPVSSSITPTNTMTSMRTTTYWPTATNTLSPLTSSILSSTPVPSTEMITSHTTNTTPLSTLVTTLLTTITRSTPTSETTYPTSPTSIVSDSTTEITYSTSITGTLSTATTLPPTSSSLPTTETATMTPTTTLITTTPNTTSLSTPSFTSSTIYSTVSTSTTAISSASPTSGTMVTSTTMTPSSLSTDTPSTTPTTITYPSVGSTGFLTTATDLTSTFTVSSSSAMSTSVIPSSPSIQNTETSSLVSMTSATTPSLRPTITSTDSTLTSSLLTTFPSTYSFSSSMSASSAGTTHTETISSLPASTNTIHTTAESALAPTTTTSFTTSPTMEPPSTTVATTGTGQTTFPSSTATFLETTTLTPTTDFSTESLTTAMTSTPPITSSITPTDTMTSMRTTTSWPTATNTLSPLTSSILSSTPVPSTEVTTSHTTNTNPVSTLVTTLPITITRSTLTSETAYPSSPTSTVTESTTEITYPTTMTETSSTATSLPPTSSLVSTAETAKTPTTNLVTTTTKTTSHSTTSFTSSTIYSTASTPTTAITSVPTTLGTMVTSTSMIPSTVSTGIPTSQPTTITPSSVGISGSLPMMTDLTSVYTVSSMSARPTSVIPSSPTVQNTETSIFVSMMSATTPSGGPTFTSTENTPTRSLLTSFPVTHSFSSSMSASSVGTTHTQSISSPPAITSTLHTTAESTPSPTTTMSFTTFTKMETPSSTVATTGTGQTTFTSSTATSPKTTTLTPTSDISTGSFKTAVSSTPPITSSITSTYTVTSMTTTTPLGPTATNTLPSFTSSVSSSTPVPSTEAITSGTTNTTPLSTLVTTFSNSDTSSTPTSETTYPTSLTSALTDSTTRTTYSTNMTGTLSTVTSLRPTSSSLLTTVTATVPTTNLVTTTTKITSHSTPSFTSSIATTETPSHSTPRFTSSITTTETPSHSTPRFTSSITNTKTTSHSSPSFTSSITTTETTSHNTPSLTSSITTTKTTSHSTPSYTSLITTTTTTSHSTPSFTSSITTTETTSHNTPSLTSSITTTETTSHSTPSFTSSITTETTSHSTPSFTSLITITEITSHSTLSYTTSITTTETPSHSTLSFTSSITTTETTSHSTPSFTSSITTSEMPSHSTPSFTSSITTTENATHSTPNFTSSITTTETTSHSTPSFTSLITTTETTSHRWGTTETTSYSTPSFTSSNTITETTSHSTPSYITSITTTETPSSSTPSFSSSITTTETTSHSTPGFTSSITTTETTSHSTPSFTSSITTTETTSHDTPSFTSSITTSETPSHSTPSSTSLITTTKTTSHSTPSFTSSITTTETTSHSAHSFTSSITTTETTSHNTRSFTSSITTTETNSHSTTSFTSSITTTETTSHSTPSFSSSITTTETPLHSTPGLTSWVTTTKTTSHITPGLTSSITTTETTSHSTPGFTSSITTTETTSESTPSLSSSTIYSTVSTSTTAITSHFTTSETAVTPTPVTPSSLSTDIPTTSLRTLTPSSVGTSTSLTTTTDFPSIPTDISTLPTRTHIISSSPSIQSTETSSLVGTTSPTMSTVRMTLRITENTPISSFSTSIVVIPETPTQTPPVLTSATGTQTSPAPTTVTFGSTDSSTSTLHTLTPSTALSTIVSTSQVPIPSTHSSTLQTTPSTPSLQTSLTSTSEFTTESFTRGSTSTNAILTSFSTIIWSSTPTIIMSSSPSSASITPVFSTTIHSVPSSPYIFSTENVGSASITGFPSLSSSATTSTSSTSSSLTTALTEITPFSYISLPSTTPCPGTITITIVPASPTDPCVEMDPSTEATSPPTTPLTVFPFTTEMVTCPTSISIQTTLTTYMDTSSMMPESESSISPNASSSTGTGTVPTNTVFTSTRLPTSETWLSNSSVIPLPLPGVSTIPLTMKPSSSLPTILRTSSKSTHPSPPTTRTSETPVATTQTPTTLTSRRTTRITSQMTTQSTLTTTAGTCDNGGTWEQGQCACLPGFSGDRCQLQTRCQNGGQWDGLKCQCPSTFYGSSCEFAVEQVDLDVVETEVGMEVSVDQQFSPDLNDNTSQAYRDFNKTFWNQMQKIFADMQGFTFKGVEILSLRNGSIVVDYLVLLEMPFSPQLESEYEQVKTTLKEGLQNASQDVNSCQDSQTLCFKPDSIKVNNNSKTELTPAAICRRAAPTGYEEFYFPLVEATRLRCVTKCTSGVDNAIDCHQGQCVLETSGPTCRCYSTDTHWFSGPRCEVAVHWRALVGGLTAGAALLVLLLLALGVRAVRSGWWGGQRRGRSWDQDRKWFETWDEEVVGTFSNWGFEDDGTDKDTNFYVALENVDTTMKVHIKRPEMTSSSV

SEQ ID NO: 9103 - protein, 3265 aa, Homo Sapiens
MQLLGLLGLLWMLKASPWATGTLSTATSISQVPFPRAEAASAVLSNSPHSRDLAGWPLGVPQLASPAPGHRENAPMTLTTSPHDTLISETLLNSPVSSNTSTTPTSKFAFKVETTPPTVLVYSATTECVYPTSFIITISHPTSICVTTTQVAFTSSYTSTPVTQKPVTTVTSTYSMTTTEKGTSAMTSSPSTTTARETPIVTVTPSSVSATDTTFHTTISSTTRTTERTPLPTGSIHTTTSPTPVFTTLKTAVTSTSPITSSITSTNTVTSMTTTASQPTATNTLSSPTRTILSSTPVLSTETITSGITNTTPLSTLVTTLPTTISRSTPTSETTYTTSPTSTVTDSTTKIAYSTSMTGTLSTETSLPPTSSSLPTTETATTPMTNLVTTTTEISSHSTPSFSSSTIYSTVSTSTTAISSLPPTSGTMVTSTTMTPSSLSTDIPFTTPTTITHHSVGSTGFLTTATDLTSTFTVSSSSAMSTSVIPSSPSIQNTETSSLVSMTSATTPNVRPTFVSTLSTPTSSLLTTFPATYSFSSSMSASSAGTTHTESISSPPASTSTLHTTAESTLAPTTTTSFTTSTTMEPPSTTAATTGTGQTTFTSSTATFPETTTPTPTTDMSTESLTTAMTSPPITSSVTSTNTVTSMTTTTSPPTTTNSFTSLTSMPLSSTPVPSTEVVTSGTINTIPPSILVTTLPTPNASSMTTSETTYPNSPTGPGTNSTTEITYPTTMTETSSTATSLPPTSPLVSTAKTAKTPTTNLVTTTTKTTSHSTTSFTSSTVYSTASTYTTAITSVPTTLGTMVTSTSMISSTVSTGIPTSQPTTITPSSVGISGSLPMMTDLTSVYTVSNMSARPTTVIPSSPTVQNTEISISVSMTSATTPSGGPTFTSTENTPTRSLLTSFPMTHSFSSSMSESSAGTTHTESISSPRGTTSTLHTTVESTPSPTTTTSFTTSTMMEPPSSTVSTTGRGQTTFPSSTATFPETTTLTPTTDISTVSLTTAMTSPPPVSSSITPTNTMTSMRTTTYWPTATNTLSPLTSSILSSTPVPSTEMITSHTTNTTPLSTLVTTLLTTITRSTPTSETTYPTSPTSIVSDSTTEITYSTSITGTLSTATTLPPTSSSLPTTETATMTPTTTLITTTPNTTSLSTPSFTSSTIYSTVSTSTTAISSASPTSGTMVTSTTMTPSSLSTDTPSTTPTTITYPSVGSTGFLTTATDLTSTFTVSSSSAMSTSVIPSSPSIQNTETSSLVSMTSATTPSLRPTITSTDSTLTSSLLTTFPSTYSFSSSMSASSAGTTHTETISSLPASTNTIHTTAESALAPTTTTSFTTSPTMEPPSTTVATTGTGQTTFPSSTATFLETTTLTPTTDFSTESLTTAMTSTPPITSSITPTDTMTSMRTTTSWPTATNTLSPLTSSILSSTPVPSTEVTTSHTTNTNPVSTLVTTLPITITRSTLTSETAYPSSPTSTVTESTTEITYPTTMTETSSTATSLPPTSSLVSTAETAKTPTTNLVTTTTKTTSHSTTSFTSSTIYSTASTPTTAITSVPTTLGTMVTSTSMIPSTVSTGIPTSQPTTITPSSVGISGSLPMMTDLTSVYTVSSMSARPTSVIPSSPTVQNTETSIFVSMMSATTPSGGPTFTSTENTPTRSLLTSFPVTHSFSSSMSASSVGTTHTQSISSPPAITSTLHTTAESTPSPTTTMSFTTFTKMETPSSTVATTGTGQTTFTSSTATSPKTTTLTPTSDISTGSFKTAVSSTPPITSSITSTYTVTSMTTTTPLGPTATNTLPSFTSSVSSSTPVPSTEAITSGTTNTTPLSTLVTTFSNSDTSSTPTSETTYPTSLTSALTDSTTRTTYSTNMTGTLSTVTSLRPTSSSLLTTVTATVPTTNLVTTTTKITSHSTPSFTSSIATTETPSHSTPRFTSSITTTETPSHSTPRFTSSITNTKTTSHSSPSFTSSITTTETTSHNTPSLTSSITTTKTTSHSTPSYTSLITTTTTTSHSTPSFTSSITTTETTSHNTPSLTSSITTTETTSHSTPSFTSSITTETTSHSTPSFTSLITITEITSHSTLSYTTSITTTETPSHSTLSFTSSITTTETTSHSTPSFTSSITTSEMPSHSTPSFTSSITTTENATHSTPNFTSSITTTETTSHSTPSFTSLITTTETTSHRWGTTETTSYSTPSFTSSNTITETTSHSTPSYITSITTTETPSSSTPSFSSSITTTETTSHSTPGFTSSITTTETTSHSTPSFTSSITTTETTSHDTPSFTSSITTSETPSHSTPSSTSLITTTKTTSHSTPSFTSSITTTETTSHSAHSFTSSITTTETTSHNTRSFTSSITTTETNSHSTTSFTSSITTTETTSHSTPSFSSSITTTETPLHSTPGLTSWVTTTKTTSHITPGLTSSITTTETTSHSTPGFTSSITTTETTSESTPSLSSSTIYSTVSTSTTAITSHFTTSETAVTPTPVTPSSLSTDIPTTSLRTLTPSSVGTSTSLTTTTDFPSIPTDISTLPTRTHIISSSPSIQSTETSSLVGTTSPTMSTVRMTLRITENTPISSFSTSIVVIPETPTQTPPVLTSATGTQTSPAPTTVTFGSTDSSTSTLHTLTPSTALSTIVSTSQVPIPSTHSSTLQTTPSTPSLQTSLTSTSEFTTESFTRGSTSTNAILTSFSTIIWSSTPTIIMSSSPSSASITPVFSTTIHSVPSSPYIFSTENVGSASITGFPSLSSSATTSTSSTSSSLTTALTEITPFSYISLPSTTPCPGTITITIVPASPTDPCVEMDPSTEATSPPTTPLTVFPFTTEMVTCPTSISIQTTLTTYMDTSSMMPESESSISPNASSSTGTGTVPTNTVFTSTRLPTSETWLSNSSVIPLPLPGVSTIPLTMKPSSSLPTILRTSSKSTHPSPPTTRTSETPVATTQTPTTLTSRRTTRITSQMTTQSTLTTTAGTCDNGGTWEQGQCACLPGFSGDRCQLQTRCQNGGQWDGLKCQCPSTFYGSSCEFAVEQVDLDVVETEVGMEVSVDQQFSPDLNDNTSQAYRDFNKTFWNQMQKIFADMQGFTFKGVEILSLRNGSIVVDYLVLLEMPFSPQLESEYEQVKTTLKEGLQNASQDVNSCQDSQTLCFKPDSIKVNNNSKTELTPAAICRRAAPTGYEEFYFPLVEATRLRCVTKCTSGVDNAIDCHQGQCVLETSGPTCRSWDQDRKWFETWDEEVVGTFSNWGFEDDGTDKDTNFYVALENVDTTMKVHIKRPEMTSSSV

SEQ ID NO: 9104 - protein, 1002 aa, Homo Sapiens
  misc_feature (1)..(1): Xaa can be any naturally occurring amino acid
XITITEITSHSTLSYTTSITTTETPSHSTLSFTSSITTTETTSHSTPSFTSSITTSEMPSHSTPSFTSSITTTENATHSTPNFTSSITTTETTSHSTPSFTSLITTTETTSHRWGTTETTSYSTPSFTSSNTITETTSHSTPSYITSITTTETPSSSTPSFSSSITTTETTSHSTPGFTSSITTTETTSHSTPSFTSSITTTETTSHDTPSFTSSITTSETPSHSTPSSTSLITTTKTTSHSTPSFTSSITTTETTSHSAHSFTSSITTTETTSHNTRSFTSSITTTETNSHSTTSFTSSITTTETTSHSTPSFSSSITTTETPLHSTPGLTSWVTTTKTTSHITPGLTSSITTTETTSHSTPGFTSSITTTETTSESTPSLSSSTIYSTVSTSTTAITSHFTTSETAVTPTPVTPSSLSTDIPTTSLRTLTPSSVGTSTSLTTTTDFPSIPTDISTLPTRTHIISSSPSIQSTETSSLVGTTSPTMSTVRMTLRITENTPISSFSTSIVVIPETPTQTPPVLTSATGTQTSPAPTTVTFGSTDSSTSTLHTLTPSTALSTIVSTSQVPIPSTHSSTLQTTPSTPSLQTSLTSTSEFTTESFTRGSTSTNAILTSFSTIIWSSTPTIIMSSSPSSASITPVFSTTIHSVPSSPYIFSTENVGSASITGFPSLSSSATTSTSSTSSSLTTALTEITPFSYISLPSTTPCPGTITITIVPASPTDPCVEMDPSTEATSPPTTPLTVFPFTTEMVTCPTSISIQTTLTTYMDTSSMMPESESSISPNASSSTGTGTVPTNTVFTSTRLPTSETWLSNSSVIPLPLPGVSTIPLTMKPSSSLPTILRTSSKSTHPSPPTTRTSETPVATTQTPTTLTSRRTTRITSQMTTQSTLTTTAGTCDNGGTWEQGQCACLPGFSGDRCQLQTRCQNGGQWDGLKCQCPSTFYGSSCEFAVEQVDLDAEDFCRHAGLHLQGCGDPVPEEWQHRGGLPGPAGDALQPPAGERV

SEQ ID NO: 9105 - protein, 5654 aa, Homo Sapiens
MSVGRRKLALLWALALALACTRHTGHAQDGSSESSYKHHPALSPIARGPSGVPLRGATVFPSLRTIPVVRASNPAHNGRVCSTWGSFHYKTFDGDVFRFPGLCNYVFSEHCGAAYEDFNIQLRRSQESAAPTLSRVLMKVDGVVIQLTKGSVLVNGHPVLLPFSQSGVLIQQSSSYTKVEARLGLVLMWNHDDSLLLELDTKYANKTCGLCGDFNGMPVVSELLSHNTKLTPMEFGNLQKMDDPTDQCQDPVPEPPRNCSTGFGICEELLHGQLFSGCVALVDVGSYLEACRQDLCFCEDTDLLSCVCHTLAEYSRQCTHAGGLPQDWRGPDFCPQKCPNNMQYHECRSPCADTCSNQEHSRACEDHCVAGCFCPEGTVLDDIGQTGCVPVSKCACVYNGAAYAPGATYSTDCTNCTCSGGRWSCQEVPCPGTCSVLGGAHFSTFDGKQYTVHGDCSYVLTKPCDSSAFTVLAELRRCGLTDSETCLKSVTLSLDGAQTVVVIKASGEVFLNQIYTQLPISAANVTIFRPSTFFIIAQTSLGLQLNLQLVPTMQLFMQLAPKLRGQTCGLCGNFNSIQADDFRTLSGVVEATAAAFFNTFKTQAACPNIRNSFEDPCSLSVENEKYAQHWCSQLTDADGPFGRCHAAVKPGTYYSNCMFDTCNCERSEDCLCAALSSYVHACAAKGVQLGGWRDGVCTKPMTTCPKSMTYHYHVSTCQPTCRSLSEGDITCSVGFIPVDGCICPKGTFLDDTGKCVQASNCPCYHRGSMIPNGESVHDSGAICTCTHGKLSCIGGQAPAPVCAAPMVFFDCRNATPGDTGAGCQKSCHTLDMTCYSPQCVPGCVCPDGLVADGEGGCITAEDCPCVHNEASYRAGQTIRVGCNTCTCDSRMWRCTDDPCLATCAVYGDGHYLTFDGQSYSFNGDCEYTLVQNHCGGKDSTQDSFRVVTENVPCGTTGTTCSKAIKIFLGGFELKLSHGKVEVIGTDESQEVPYTIRQMGIYLVVDTDIGLVLLWDKKTSIFINLSPEFKGRVCGLCGNFDDIAVNDFATRSRSVVGDVLEFGNSWKLSPSCPDALAPKDPCTANPFRKSWAQKQCSILHGPTFAACHAHVEPARYYEACVNDACACDSGGDCECFCTAVAAYAQACHEVGLCVSWRTPSICPLFCDYYNPEGQCEWHYQPCGVPCLRTCRNPRGDCLRDVRGLEGCYPKCPPEAPIFDEDKMQCVATCPTPPLPPRCHVHGKSYRPGAVVPSDKNCQSCLCTERGVECTYKAEACVCTYNGQRFHPGDVIYHTTDGTGGCISARCGANGTIERRVYPCSPTTPVPPTTFSFSTPPLVVSSTHTPSNGPSSAHTGPPSSAWPTTAGTSPRTRLPTASASLPPVCGEKCLWSPWMDVSRPGRGTDSGDFDTLENLRAHGYRVCESPRSVECRAEDAPGVPLRALGQRVQCSPDVGLTCRNREQASGLCYNYQIRVQCCTPLPCSTSSSPAQTTPPTTSKTTETRASGSSAPSSTPGTVSLSTARTTPAPGTATSVKKTFSTPSPPPVPATSTSSMSTTAPGTSVVSSKPTPTEPSTSSCLQELCTWTEWIDGSYPAPGINGGDFDTFQNLRDEGYTFCESPRSVQCRAESFPNTPLADLGQDVICSHTEGLICLNKNQLPPICYNYEIRIQCCETVNVCRDITRLPKTVATTRPTPHPTGAQTQTTFTTHMPSASTEQPTATSRGGPTATSVTQGTHTTLVTRNCHPRCTWTKWFDVDFPSPGPHGGDKETYNNIIRSGEKICRRPEEITRLQCRAKSHPEVSIEHLGQVVQCSREEGLVCRNQDQQGPFKMCLNYEVRVLCCETPRGCHMTSTPGSTSSSPAQTTPSTTSKTTETQASGSSAPSSTPGTVSLSTARTTPAPGTATSVKKTFSTPSPPPVPATSTSSMSTTAPGTSVVSSKPTPTEPSTSSCLQELCTWTEWIDGSYPAPGINGGDFDTFQNLRDEGYTFCESPRSVQCRAESFPNTPLADLGQDVICSHTEGLICLNKNQLPPICYNYEIRIQCCETVNVCRDITRPPKTVATTRPTPHPTGAQTQTTFTTHMPSASTEQPTATSRGGPTATSVTQGTHTTPVTRNCHPRCTWTTWFDVDFPSPGPHGGDKETYNNIIRSGEKICRRPEEITRLQCRAKSHPEVSIEHLGQVVQCSREEGLVCRNQDQQGPFKMCLNYEVRVLCCETPKGCPVTSTPVTAPSTPSGRATSPTQSTSSWQKSRTTTLVTTSTTSTPQTSTTYAHTTSTTSAPTARTTSAPTTRTTSASPASTTSGPGNTPSPVPTTSTISAPTTSITSAPTTSTTSAPTSSTTSGPGTTPSPVPTTSITSAPTTSTTSAPTTSTTSARTSSTTSATTTSRISGPETTPSPVPTTSTTSATTTSTTSAPTTSTTSAPTSSTTSSPQTSTTSAPTTSTTSGPGTTPSPVPTTSTTSAPTTRTTSAPKSSTTSAATTSTTSGPETTPRPVPTTSTTSSPTTSTTSAPTTSTTSASTTSTTSGAGTTPSPVPTTSTTSAPTTSTTSAPISSTTSATTTSTTSGPGTTPSPVPTTSTTSAPTTSTTSGPGTTPSAVPTTSITSAPTTSTNSAPISSTTSATTTSRISGPETTPSPVPTASTTSASTTSTTSGPGTTPSPVPTTSTISVPTTSTTSASTTSTTSASTTSTTSGPGTTPSPVPTTSTTSAPTTSTTSAPTTSTISAPTTSTTSATTTSTTSAPTPRRTSAPTTSTISASTTSTTSATTTSTTSATTTSTISAPTTSTTLSPTTSTTSTTITSTTSAPISSTTSTPQTSTTSAPTTSTTSGPGTTSSPVPTTSTTSAPTTSTTSAPTTRTTSVPTSSTTSTATTSTTSGPGTTPSPVPTTSTTSAPTTRTTSAPTTSTTSAPTTSTTSAPTSSTTSATTTSTISVPTTSTTSVPGTTPSPVPTTSTISVPTTSTTSASTTSTTSGPGTTPSPVPTTSTTSAPTTSTTSAPTTSTISAPTTSTPSAPTTSTTLAPTTSTTSAPTTSTTSTPTSSTTSSPQTSTTSASTTSITSGPGTTPSPVPTTSTTSAPTTSTTSAATTSTISAPTTSTTSAPTTSTTSASTASKTSGLGTTPSPIPTTSTTSPPTTSTTSASTASKTSGPGTTPSPVPTTSTIFAPRTSTTSASTTSTTPGPGTTPSPVPTTSTASVSKTSTSHVSISKTTHSQPVTRDCHLRCTWTKWFDIDFPSPGPHGGDKETYNNIIRSGEKICRRPEEITRLQCRAESHPEVSIEHLGQVVQCSREEGLVCRNQDQQGPFKMCLNYEVRVLCCETPKGCPVTSTPVTAPSTPSGRATSPTQSTSSWQKSRTTTLVTTSTTSTPQTSTTSAPTTSTTSAPTTSTTSAPTTSTTSTPQTSISSAPTSSTTSAPTSSTISARTTSIISAPTTSTTSSPTTSTTSATTTSTTSAPTSSTTSTPQTSKTSAATSSTTSGSGTTPSPVTTTSTASVSKTSTSHVSVSKTTHSQPVTRDCHPRCTWTKWFDVDFPSPGPHGGDKETYNNIIRSGEKICRRPEEITRLQCRAKSHPEVSIEHLGQVVQCSREEGLVCRNQDQQGPFKMCLNYEVRVLCCETPKGCPVTSTSVTAPSTPSGRATSPTQSTSSWQKSRTTTLVTSSITSTTQTSTTSAPTTSTTPASIPSTTSAPTTSTTSAPTTSTTSAPTTSTTSTPQTTTSSAPTSSTTSAPTTSTISAPTTSTISAPTTSTTSAPTASTTSAPTSTSSAPTTNTTSAPTTSTTSAPITSTISAPTTSTTSTPQTSTISSPTTSTTSTPQTSTTSSPTTSTTSAPTTSTTSAPTTSTTSTPQTSISSAPTSSTTSAPTASTISAPTTSTTSFHTTSTTSPPTSSTSSTPQTSKTSAATSSTTSGSGTTPSPVPTTSTASVSKTSTSHVSVSKTTHSQPVTRDCHPRCTWTKWFDVDFPSPGPHGGDKETYNNIIRSGEKICRRPEEITRLQCRAESHPEVSIEHLGQVVQCSREEGLVCRNQDQQGPFKMCLNYEVRVLCCETPKGCPVTSTPVTAPSTPSGRATSPTQSTSSWQKSRTTTLVTTSTTSTPQTSTTSAPTTSTIPASTPSTTSAPTTSTTSAPTTSTTSAPTHRTTSGPTTSTTLAPTTSTTSAPTTSTNSAPTTSTISASTTSTISAPTTSTISSPTSSTTSTPQTSKTSAATSSTTSGSGTTPSPVPTTSTTSASTTSTTSAPTTSTTSGPGTTPSPVPSTSTTSAATTSTTSAPTTRTTSAPTSSMTSGPGTTPSPVPTTSTTSAPTTSTTSGPGTTPSPVPTTSTTSAPITSTTSGPGSTPSPVPTTSTTSAPTTSTTSASTASTTSGPGTTPSPVPTTSTTSAPTTRTTSASTASTTSGPGSTPSPVPTTSTTSAPTTRTTPASTASTTSGPGTTPSPVPTTSTTSASTTSTISLPTTSTTSAPITSMTSGPGTTPSPVPTTSTTSAPTTSTTSASTASTTSGPGTTPSPVPTTSTTSAPTTSTTSASTASTTSGPGTSLSPVPTTSTTSAPTTSTTSGPGTTPSPVPTTSTTSAPTTSTTSGPGTTPSPVPTTSTTPVSKTSTSHLSVSKTTHSQPVTSDCHPLCAWTKWFDVDFPSPGPHGGDKETYNNIIRSGEKICRRPEEITRLQCRAESHPEVNIEHLGQVVQCSREEGLVCRNQDQQGPFKMCLNYEVRVLCCETPRGCPVTSVTPYGTSPTNALYPSLSTSMVSASVASTSVASSSVASSSVAYSTQTCFCNVADRLYPAGSTIYRHRDLAGHCYYALCSQDCQVVRGVDSDCPSTTLPPAPATSPSISTSEPVTELGCPNAVPPRKKGETWATPNCSEATCEGNNVISLRPRTCPRVEKPTCANGYPAVKVADQDGCCHHYQCQCVCSGWGDPHYITFDGTYYTFLDNCTYVLVQQIVPVYGHFRVLVDNYFCGAEDGLSCPRSIILEYHQDRVVLTRKPVHGVMTNEIIFNNKVVSPGFRKNGIVVSRIGVKMYATIPELGVQVMFSGLIFSVEVPFSKFANNTEGQCGTCTNDRKDECRTPRGTVVASCSEMSGLWNVSIPDQPACHRPHPTPTTVGPTTVGSTTVGPTTVGSTTVGPTTPPAPCLPSPICQLILSKVFEPCHTVIPPLLFYEGCVFDRCHMTDLDVVCSSLELYAALCASHDICIDWRGRTGHMCPFTCPADKVYQPCGPSNPSYCYGNDSASLGALPEAGPITEGCFCPEGMTLFSTSAQVCVPTGCPRCLGPHGEPVKVGHTVGMDCQECTCEAATWTLTCRPKLCPLPPACPLPGFVPVPAAPQAGQCCPQYSCACNTSRCPAPVGCPEGARAIPTYQEGACCPVQNCSWTVCSINGTLYQPGAVVSSSLCETCRCELPGGPPSDAFVVSCETQICNTHCPVGFEYQEQSGQCCGTCVQVACVTNTSKSPAHLFYPGETWSDAGNHCVTHQCEKHQDGLVVVTTKKACPPLSCSLDEARMSKDGCCRFCPPPPPPYQNQSTCAVYHRSLIIQQQGCSSSEPVRLAYCRGNCGDSSSMYSLEGNTVEHRCQCCQELRTSLRNVTLHCTDGSSRAFSYTEVEECGCMGRRCPAPGDTQHSEEAEPEPSQEAESGSWERGVPVSPMH

SEQ ID NO: 9106 - protein, 5762 aa, Homo Sapiens
MGAPSACRTLVLALAAMLVVPQAETQGPVEPSWENAGHTMDGGAPTSSPTRRVSFVPPVTVFPSLSPLNPAHNGRVCSTWGDFHYKTFDGDVFRFPGLCNYVFSEHCRAAYEDFNVQLRRGLVGSRPVVTRVVIKAQGLVLEASNGSVLINGQREELPYSRTGLLVEQSGDYIKVSIRLVLTFLWNGEDSALLELDPKYANQTCGLCGDFNGLPAFNEFYAHNARLTPLQFGNLQKLDGPTEQCPDPLPLPAGNCTDEEGICHRTLLGPAFAECHALVDSTAYLAACAQDLCRCPTCPCATFVEYSRQCAHAGGQPRNWRCPELCPRTCPLNMQHQECGSPCTDTCSNPQRAQLCEDHCVDGCFCPPGTVLDDITHSGCLPLGQCPCTHGGRTYSPGTSFNTTCSSCTCSGGLWQCQDLPCPGTCSVQGGAHISTYDEKLYDLHGDCSYVLSKKCADSSFTVLAELRKCGLTDNENCLKAVTLSLDGGDTAIRVQADGGVFLNSIYTQLPLSAANITLFTPSSFFIVVQTGLGLQLLVQLVPLMQVFVRLDPAHQGQMCGLCGNFNQNQADDFTALSGVVEATGAAFANTWKAQAACANARNSFEDPCSLSVENENYARHWCSRLTDPNSAFSRCHSIINPKPFHSNCMFDTCNCERSEDCLCAALSSYVHACAAKGVQLSDWRDGVCTKYMQNCPKSQRYAYVVDACQPTCRGLSEADVTCSVSFVPVDGCTCPAGTFLNDAGACVPAQECPCYAHGTVLAPGEVVHDEGAVCSCTGGKLSCLGASLQKSTGCAAPMVYLDCSNSSAGTPGAECLRSCHTLDVGCFSTHCVSGCVCPPGLVSDGSGGCIAEEDCPCVHNEATYKPGETIRVDCNTCTCRNRRWECSHRLCLGTCVAYGDGHFITFDGDRYSFEGSCEYILAQDYCGDNTTHGTFRIVTENIPCGTTGTTCSKAIKLFVESYELILQEGTFKAVARGPGGDPPYKIRYMGIFLVIETHGMAVSWDRKTSVFIRLHQDYKGRVCGLCGNFDDNAINDFATRSRSVVGDALEFGNSWKLSPSCPDALAPKDPCTANPFRKSWAQKQCSILHGPTFAACRSQVDSTKYYEACVNDACACDSGGDCECFCTAVAAYAQACHDAGLCVSWRTPDTCPLFCDFYNPHGGCEWHYQPCGAPCLKTCRNPSGHCLVDLPGLEGCYPKCPPSQPFFNEDQMKCVAQCGCYDKDGNYYDVGARVPTAENCQSCNCTPSGIQCAHSLEACTCTYEDRTYSYQDVIYNTTDGLGACLIAICGSNGTIIRKAVACPGTPATTPFTFTTAWVPHSTTSPALPVSTVCVREVCRWSSWYNGHRPEPGLGGGDFETFENLRQRGYQVCPVLADIECRAAQLPDMPLEELGQQVDCDRMRGLMCANSQQSPPLCHDYELRVLCCEYVPCGPSPAPGTSPQPSLSASTEPAVPTPTQTTATEKTTLWVTPSIRSTAALTSQTGSSSGPVTVTPSAPGTTTCQPRCQWTEWFDEDYPKSEQLGGDVESYDKIRAAGGHLCQQPKDIECQAESFPNWTLAQVGQKVHCDVHFGLVCRNWEQEGVFKMCYNYRIRVLCCSDDHCRGRATTPPPTTELETATTTTTQALFSTPQPTSSPGLTRAPPASTTAVPTLSEGLTSPRYTSTLGTATTGGPTTPAGSTEPTVPGVATSTLPTRSALPGTTGSLGTWRPSQPPTLAPTTMATSRARPTGTASTASKEPLTTSLAPTLTSELSTSQAETSTPRTETTMSPLTNTTTSQGTTRCQPKCEWTEWFDVDFPTSGVAGGDMETFENIRAAGGKMCWAPKSIECRAENYPEVSIDQVGQVLTCSLETGLTCKNEDQTGRFNMCFNYNVRVLCCDDYSHCPSTPATSSTATPSSTPGTTWILTKPTTTATTTASTGSTATPTSTLRTAPPPKVLTTTATTPTVTSSKATPSSSPGTATALPALRSTATTPTATSVTPIPSSSLGTTWTRLSQTTTPTATMSTATPSSTPETAHTSTVLTATATTTGATGSVATPSSTPGTAHTTKVPTTTTTGFTATPSSSPGTALTPPVWISTTTTPTTRGSTVTPSSIPGTTHTATVLTTTTTTVATGSMATPSSSTQTSGTPPSLTTTATTITATGSTTNPSSTPGTTPIPPVLTTTATTPAATSNTVTPSSALGTTHTPPVPNTMATTHGRSLPPSSPHTVRTAWTSATSGILGTTHITEPSTVTSHTLAATTGTTQHSTPALSSPHPSSRTTESPPSPGTTTPGHTTATSRTTATATPSKTRTSTLLPSSPTSAPITTVVTMGCEPQCAWSEWLDYSYPMPGPSGGDFDTYSNIRAAGGAVCEQPLGLECRAQAQPGVPLRELGQVVECSLDFGLVCRNREQVGKFKMCFNYEIRVFCCNYGHCPSTPATSSTAMPSSTPGTTWILTELTTTATTTESTGSTATPSSTPGTTWILTEPSTTATVTVPTGSTATASSTQATAGTPHVSTTATTPTVTSSKATPFSSPGTATALPALRSTATTPTATSFTAIPSSSLGTTWTRLSQTTTPTATMSTATPSSTPETVHTSTVLTTTATTTGATGSVATPSSTPGTAHTTKVLTTTTTGFTATPSSSPGTARTLPVWISTTTTPTTRGSTVTPSSIPGTTHTPTVLTTTTTTVATGSMATPSSSTQTSGTPPSLTTTATTITATGSTTNPSSTPGTTPIPPVLTTTATTPAATSSTVTPSSALGTTHTPPVPNTTATTHGRSLSPSSPHTVRTAWTSATSGTLGTTHITEPSTGTSHTPAATTGTTQHSTPALSSPHPSSRTTESPPSPGTTTPGHTRATSRTTATATPSKTRTSTLLPSSPTSAPITTVVTMGCEPQCAWSEWLDYSYPMPGPSGGDFDTYSNIRAAGGAVCEQPLGLECRAQAQPGVPLRELGQVVECSLDFGLVCRNREQVGKFKMCFNYEIRVFCCNYGHCPSTPATSSTATPSSTPGTTWILTEQTTAATTTATTGSTAIPSSTPGTAPPPKVLTSTATTPTATSSKATSSSSPRTATTLPVLTSTATKSTATSFTPIPSFTLGTTGTLPEQTTTPMATMSTIHPSSTPETTHTSTVLTTKATTTRATSSMSTPSSTPGTTWILTELTTAATTTAATGPTATPSSTPGTTWILTEPSTTATVTVPTGSTATASSTRATAGTLKVLTSTATTPTVISSRATPSSSPGTATALPALRSTATTPTATSVTAIPSSSLGTAWTRLSQTTTPTATMSTATPSSTPETVHTSTVLTTTTTTTRATGSVATPSSTPGTAHTTKVPTTTTTGFTATPSSSPGTALTPPVWISTTTTPTTRGSTVTPSSIPGTTHTATVLTTTTTTVATGSMATPSSSTQTSGTPPSLTTTATTITATGSTTNPSSTPGTTPIPPVLTTTATTPAATSSTVTPSSALGTTHTPPVPNTTATTHGRSLPPSSPHTVRTAWTSATSGILGTTHITEPSTVTSHTPAATTSTTQHSTPALSSPHPSSRTTESPPSPGTTTPGHTRGTSRTTATATPSKTRTSTLLPSSPTSAPITTVVTTGCEPQCAWSEWLDYSYPMPGPSGGDFDTYSNIRAAGGAVCEQPLGLECRAQAQPGVPLRELGQVVECSLDFGLVCRNREQVGKFKMCFNYEIRVFCCNYGHCPSTPATSSTATPSSTPGTTWILTKLTTTATTTESTGSTATPSSTPGTTWILTEPSTTATVTVPTGSTATASSTQATAGTPHVSTTATTPTVTSSKATPFSSPGTATALPALRSTATTPTATSFTAIPSSSLGTTWTRLSQTTTPTATMSTATPSSTPETAHTSTVLTTTATTTRATGSVATPSSTPGTAHTTKVPTTTTTGFTVTPSSSPGTARTPPVWISTTTTPTTSGSTVTPSSVPGTTHTPTVLTTTTTTVATGSMATPSSSTQTSGTPPSLITTATTITATGSTTNPSSTPGTTPIPPVLTTTATTPAATSSTVTPSSALGTTHTPPVPNTTATTHGRSLSPSSPHTVRTAWTSATSGTLGTTHITEPSTGTSHTPAATTGTTQHSTPALSSPHPSSRTTESPPSPGTTTPGHTTATSRTTATATPSKTRTSTLLPSSPTSAPITTVVTTGCEPQCAWSEWLDYSYPMPGPSGGDFDTYSNIRAAGGAVCEQPLGLECRAQAQPGVPLGELGQVVECSLDFGLVCRNREQVGKFKMCFNYEIRVFCCNYGHCPSTPATSSTAMPSSTPGTTWILTELTTTATTTASTGSTATPSSTPGTAPPPKVLTSPATTPTATSSKATSSSSPRTATTLPVLTSTATKSTATSVTPIPSSTLGTTGTLPEQTTTPVATMSTIHPSSTPETTHTSTVLTTKATTTRATSSTSTPSSTPGTTWILTELTTAATTTAATGPTATPSSTPGTTWILTELTTTATTTASTGSTATPSSTPGTTWILTEPSTTATVTVPTGSTATASSTQATAGTPHVSTTATTPTVTSSKATPSSSPGTATALPALRSTATTPTATSFTAIPSSSLGTTWTRLSQTTTPTATMSTATPSSTPETVHTSTVLTATATTTGATGSVATPSSTPGTAHTTKVPTTTTTGFTATPSSSPGTALTPPVWISTTTTPTTTTPTTSGSTVTPSSIPGTTHTARVLTTTTTTVATGSMATPSSSTQTSGTPPSLTTTATTITATGSTTNPSSTPGTTPITPVLTSTATTPAATSSKATSSSSPRTATTLPVLTSTATKSTATSFTPIPSSTLWTTWTVPAQTTTPMSTMSTIHTSSTPETTHTSTVLTTTATMTRATNSTATPSSTLGTTRILTELTTTATTTAATGSTATLSSTPGTTWILTEPSTIATVMVPTGSTATASSTLGTAHTPKVVTTMATMPTATASTVPSSSTVGTTRTPAVLPSSLPTFSVSTVSSSVLTTLRPTGFPSSHFSTPCFCRAFGQFFSPGEVIYNKTDRAGCHFYAVCNQHCDIDRFQGACPTSPPPVSSAPLSSPSPAPGCDNAIPLRQVNETWTLENCTVARCVGDNRVVLLDPKPVANVTCVNKHLPIKVSDPSQPCDFHYECECICSMWGGSHYSTFDGTSYTFRGNCTYVLMREIHARFGNLSLYLDNHYCTASATAAAARCPRALSIHYKSMDIVLTVTMVHGKEEGLILFDQIPVSSGFSKNGVLVSVLGTTTMRVDIPALGVSVTFNGQVFQARLPYSLFHNNTEGQCGTCTNNQRDDCLQRDGTTAASCKDMAKTWLVPDSRKDGCWAPTGTPPTASPAAPVSSTPTPTPCPPQPLCDLMLSQVFAECHNLVPPGPFFNACISDHCRGRLEVPCQSLEAYAELCRARGVCSDWRGATGGLCDLTCPPTKVYKPCGPIQPATCNSRNQSPQLEGMAEGCFCPEDQILFNAHMGICVQACPCVGPDGFPKFPGERWVSNCQSCVCDEGSVSVQCKPLPCDAQGQPPPCNRPGFVTVTRPRAENPCCPETVCVCNTTTCPQSLPVCPPGQESICTQEEGDCCPTFRCRPQLCSYNGTFYGVGATFPGALPCHMCTCLSGDTQDPTVQCQEDACNNTTCPQGFEYKRVAGQCCGECVQTACLTPDGQPVQLNETWVNSHVDNCTVYLCEAEGGVHLLTPQPASCPDVSSCRGSLRKTGCCYSCEEDSCQVRINTTILWHQGCETEVNITFCEGSCPGASKYSAEAQAMQHQCTCCQERRVHEETVPLHCPNGSAILHTYTHVDECGCTPFCVPAPMAPPHTRGFPAQEATAV

SEQ ID NO: 9107 - protein, 154 aa, Homo Sapiens [sequence omitted]

SEQ ID NO: 9108 - protein, 181 aa, Homo Sapiens
MDTSRTPSVCRETGGAALSRGERRPQGRRGSPTPTAGPVHTGLANTSYTSPGLQRLKDSPQTAPDKGQCSTWGAGHFSTFDHHVYDFSGTCNYIFAATCKDAFPTFSVQLRRGPDGSISRIIVELGASVVTVSEAIISVKDIGVISLPYTSNGLQITPFGQSVRLVAKQLELELEVVWGPD

SEQ ID NO: 9109 - protein, 2439 aa, Homo Sapiens
MVQRWLLLSCCGALLSAGLANTSYTSPGLQRLKDSPQTAPDKGQCSTWGAGHFSTFDHHVYDFSGTCNYIFAATCKDAFPTFSVQLRRGPDGSISRIIVELGASVVTVSEAIISVKDIGVISLPYTSNGLQITPFGQSVRLVAKQLELELEVVWGPDSHLMVLVERKYMGQMCGLCGNFDGKVTNEFVSEEGKFLEPHKFAALQKLDDPGEICTFQDIPSTHVRQAQHARICTQLLTLVAPECSVSKEPFVLSCQADVAAAPQPGPQNSSCATLSEYSRQCSMVGQPVRRWRSPGLCSVGQCPANQVYQECGSACVKTCSNPQHSCSSSCTFGCFCPEGTVLNDLSNNHTCVPVTQCPCVLHGAMYAPGEVTIAACQTCRCTLGRWVCTERPCPGHCSLEGGSFVTTFDARPYRFHGTCTYILLQSPQLPEDGALMAVYDKSGVSHSETSLVAVVYLSRQDKIVISQDEVVTNNGEAKWLPYKTRNITVFRQTSTHLQMATSFGLELVVQLRPIFQAYVTVGPQFRGQTRGLCGNFNGDTTDDFTTSMGIAEGTASLFVDSWRAGNCPAALERETDPCSMSQLNKVCAETHCSMLLRTGTVFERCHATVNPAPFYKRCVYQACNYEETFPHICAALGDYVHACSLRGVLLWGWRSSVDNCTIPCTGNTTFSYNSQACERTCLSLSDRATECHHSAVPVDGCNCPDGTYLNQKGECVRKAQCPCILEGYKFILAEQSTVINGITCHCINGRLSCPQRPQMFLASCQAPKTFKSCSQSSENKFGAACAPTCQMLATGVACVPTKCEPGCVCAEGLYENADGQCVPPEECPCEFSGVSYPGGAELHTDCRTCSCSRGRWACQQGTHCPSTCTLYGEGHVITFDGQRFVFDGNCEYILATDVCGVNDSQPTFKILTENVICGNSGVTCSRAIKIFLGGLSVVLADRNYTVTGEEPHVQLGVTPGALSLVVDISIPGRYNLTLIWNRHMTILIRIARASQDPLCGLCGNFNGNMKDDFETRSRYVASSELELVNSWKESPLCGDVSFVTDPCSLNAFRRSWAERKCSVINSQTFATCHSKVYHLPYYEACVRDACGCDSGGDCECLCDAVAAYAQACLDKGVCVDWRTPAFCPIYCGFYNTHTQDGHGEYQYTQEANCTWHYQPCLCPSQPQSVPGSNIEGCYNCSQDEYFDHEEGVCVPCMPPTTPQPPTTPQLPTTGSRPTQVWPMTGTSTTIGLLSSTGPSPSSNHTPASPTQTPLLPATLTSSKPTASSGEPPRPTTAVTPQATSGLPPTATLRSTATKPTVTQATTRATASTASPATTSTAQSTTRTTMTLPTPATSGTSPTLPKSTNQELPGTTATQTTGPRPTPASTTGPTTPQPGQPTRPTATETTQTRTTTEYTTPQTPHTTHSPPTAGSPVPSTGPVTATSFHATTTYPTPSHPETTLPTHVPPFSTSLVTPSTHTVITPTHAQMATSASNHSAPTGTIPPPTTLKATGSTHTAPPITPTTSGTSQAHSSFSTNKTPTSLHSHTSSTHHPEVTPTSTTTITPNPTSTRTRTPVAHTNSATSSRPPPPFTTHSPPTGSSPFSSTGPMTATSFKTTTTYPTPSHPQTTLPTHVPPFSTSLVTPSTHTVITPTHAQMATSASIHSMPTGTIPPPTTLKATGSTHTAPTMTLTTSGTSQALSSLNTAKTSTSLHSHTSSTHHAEATSTSTTNITPNPTSTGTPPMTVTTSGTSQSRSSFSTAKTSTSLHSHTSSTHHPEVTSTSTTSITPNHTSTGTRTPVAHTTSATSSRLPTPFTTHSPPTGTTPISSTGPVTATSFQTTTTYPTPSHPHTTLPTHVPSFSTSLVTPSTHTVIIPTHTQMATSASIHSMPTGTIPPPTTIKATGSTHTAPPMTPTTSGTSQSPSSFSTAKTSTSLPYHTSSTHHPEVTPTSTTNITPKHTSTGTRTPVAHTTSASSSRLPTPFTTHSPPTGSSPFSSTGPMTATSFQTTTTYPTPSHPQTTLPTHVPPFSTSLVTPSTHTVIITTHTQMATSASIHSTPTGTVPPPTTLKATGSTHTAPPMTVTTSGTSQTHSSFSTATASSSFISSSSWLPQNSSSRPPSSPITTQLPHLSSATTPVSTTNQLSSSFSPSPSAPSTVSSYVPSSHSSPQTSSPSVGTSSSFVSAPVHSTTLSSGSHSSLSTHPTTASVSASPLFPSSPAASTTIRATLPHTISSPFTLSALLPISTVTVSPTPSSHLASSTIAFPSTPRTTASTHTAPAFSSQSTTSRSTSLTTRVPTSGFVSLTSGVTGIPTSPVTNLTTRHPGPTLSPTTRFLTSSLTAHGSTPASAPVSSLGTPTPTSPGVCSVREQQEEITFKGCMANVTVTRCEGACISAASFNIITQQVDARCSCCRPLHSYEQQLELPCPDPSTPGRRLVLTLQVFSHCVCSSVACGD

SEQ ID NO: 9110 - protein, 115 aa, Homo Sapiens
  misc_feature (1)..(1): Xaa can be any naturally occurring amino acid
XPPTTPQPPTTPQLPTTGSRPTQVWPMTGTSTTIGLLSSTGPSPSSNHTPASPTQTPLLPATLTSSKPTASSGGKEPPAEPMERAAAGGPRYTSGVGLGMALLPGSHLPLSRFPA

SEQ ID NO: 9111 - protein, 219 aa, Homo Sapiens
  misc_feature (1)..(1): Xaa can be any naturally occurring amino acid
XSSPFTLSALLPISTVTVSPTPSSHLASSTIAFPSTPRTTASTHTAPAFSSQSTTSRSTSLTTRVPTSGFVSLTSGVTGIPTSPVTNLTTRHPGPTLSPTTRFLTSSLTAHGSTPASAPVSSLGTPTPTSPGESTGGRPAPRPPRCSQPHPREVRAPHPGACCPISFNIITQQVDARCSCCRPLHSYEQQLELPCPDPSTPGRRLVLTLQVFSHCVCSS

SEQ ID NO: 9112 - protein, 136 aa, Homo Sapiens
MKTLPLFVCICALSACFSFSEGRERDHELRHRRHHHQSPKSHFELPHYPGLLAHQKPFIRKSYKCLHKRCRPKLPPSPNNPPKFPNPHQPPKHPDKNSSVVNPTLVATTQIPSVTFPSASTKITTLPNVTFLPQNA

SEQ ID NO: 9113 - protein, 377 aa, Homo Sapiens
MKTLPLFVCICALSACFSFSEGRERDHELRHRRHHHQSPKSHFELPHYPGLLAHQKPFIRKSYKCLHKRCRPKLPPSPNNPPKFPNPHQPPKHPDKNSSVVNPTLVATTQIPSVTFPSASTKITTLPNVTFLPQNATTISSRENVNTSSSVATLAPVNSPAPQDTTAAPPTPSATTPAPPSSSAPPETTAAPPTPSATTQAPPSSSAPPETTAAPPTPPATTPAPPSSSAPPETTAAPPTPSATTPAPLSSSAPPETTAVPPTPSATTLDPSSASAPPETTAAPPTPSATTPAPPSSPAPQETTAAPITTPNSSPTTLAPDTSETSAAPTHQTTTSVTTQTTTTKQPTSAPGQNKISRFLLYMKNLLNRIIDDMVEQ

SEQ ID NO: 9114 - protein, 377 aa, Homo Sapiens; identical to SEQ ID NO: 9113

SEQ ID NO: 9115 - protein, 377 aa, Homo Sapiens; identical to SEQ ID NO: 9113

SEQ ID NO: 9116 - protein, 85 aa, Homo Sapiens
MGGDHGYQLAVTKAENPTTAAPADTYPATGPADDEAPDAETTAAATTATTAAPTTATTAASTTARKDIPVLPKWVGDLPNGRVCP

SEQ ID NO: 9117 - protein, 90 aa, Homo Sapiens
MKFLAVLVLLGVSIFLVSAQNPTTAAPADTYPATGPADDEAPDAETTAAATTATTAAPTTATTAASTTARKDIPVLPKWVGDLPNGRVCP

SEQ ID NO: 9118 - protein, 80 aa, Homo Sapiens
MKFLAVLVLLGVSIFLVSAQNPTTAAPADTYPATGPADDEAPDAETTPTTATTAASTTARKDIPVLPKWVGDLPNGRVCP

SEQ ID NO: 9119 - protein, 2828 aa, Homo Sapiens
MPKRAHWGALSVVLILLWGHPRVALACPHPCACYVPSEVHCTFRSLASVPAGIAKHVERINLGFNSIQALSETSFAGLTKLELLMIHGNEIPSIPDGALRDLSSLQVFKFSYNKLRVITGQTLQGLSNLMRLHIDHNKIEFIHPQAFNGLTSLRLLHLEGNLLHQLHPSTFSTFTFLDYFRLSTIRHLYLAENMVRTLPASMLRNMPLLENLYLQGNPWTCDCEMRWFLEWDAKSRGILKCKKDKAYEGGQLCAMCFSPKKLYKHEIHKLKDMTCLKPSIESPLRQNRSRSIEEEQEQEEDGGSQLILEKFQLPQWSISLNMTDEHGNMVNLVCDIKKPMDVYKIHLNQTDPPDIDINATVALDFECPMTRENYEKLWKLIAYYSEVPVKLHRELMLSKDPRVSYQYRQDADEEALYYTGVRAQILAEPEWVMQPSIDIQLNRRQSTAKKVLLSYYTQYSQTISTKDTRQARGRSWVMIEPSGAVQRDQTVLEGGPCQLSCNVKASESPSIFWVLPDGSILKAPMDDPDSKFSILSSGWLRIKSMEPSDSGLYQCIAQVRDEMDRMVYRVLVQSPSTQPAEKDTVTIGKNPGESVTLPCNALAIPEAHLSWILPNRRIINDLANTSHVYMLPNGTLSIPKVQVSDSGYYRCVAVNQQGADHFTVGITVTKKGSGLPSKRGRRPGAKALSRVREDIVEDEGGSGMGDEENTSRRLLHPKDQEVFLKTKDDAINGDKKAKKGRRKLKLWKHSEKEPETNVAEGRRVFESRRRINMANKQINPERWADILAKVRGKNLPKGTEVPPLIKTTSPPSLSLEVTPPFPAISPPSASPVQTVTSAEESSADVPLLGEEEHVLGTISSASMGLEHNHNGVILVEPEVTSTPLEEVVDDLSEKTEEITSTEGDLKGTAAPTLISEPYEPSPTLHTLDTVYEKPTHEETATEGWSAADVGSSPEPTSSEYEPPLDAVSLAESEPMQYFDPDLETKSQPDEDKMKEDTFAHLTPTPTIWVNDSSTSQLFEDSTIGEPGVPGQSHLQGLTDNIHLVKSSLSTQDTLLIKKGMKEMSQTLQGGNMLEGDPTHSRSSESEGQESKSITLPDSTLGIMSSMSPVKKPAETTVGTLLDKDTTTATTTPRQKVAPSSTMSTHPSRRRPNGRRRLRPNKFRHRHKQTPPTTFAPSETFSTQPTQAPDIKISSQVESSLVPTAWVDNTVNTPKQLEMEKNAEPTSKGTPRRKHGKRPNKHRYTPSTVSSRASGSKPSPSPENKHRNIVTPSSETILLPRTVSLKTEGPYDSLDYMTTTRKIYSSYPKVQETLPVTYKPTSDGKEIKDDVATNVDKHKSDILVTGESITNAIPTSRSLVSTMGEFKEESSPVGFPGTPTWNPSRTAQPGRLQTGIPVTTSGENLTDPPLLKELEDVDFTSEFLSSLTVSTPFHQEEAGSSTTLSSIKVEVASSQAETTTLDQDHLETTVAILLSETRPQNHTPTAARMKEPASSSPSTILMSLGQTTTTKPALPSPRISQASRDSKENVFLNYVGNPETEATPVNNEGTQHMSGPNELSTPSSDQDAFNLSTKLELEKQVFGSRSLPRGPDSQRQDGRVHASHQLTRVPAKPILPTATVRLPEMSTQSASRYFVTSQSPRHWTNKPEITTYPSGALPENKQFTTPRLSSTTIPLPLHMSKPSIPSKFTDRRTDQFNGYSKVFGNNNIPEARNPVGKPPSPRIPHYSNGRLPFFTNKTLSFPQLGVTRRPQIPTSPAPVMRERKVIPGSYNRIHSHSTFHLDFGPPAPPLLHTPQTTGSPSTNLQNIPMVSSTQSSISFITSSVQSSGSFHQSSSKFFAGGPPASKFWSLGEKPQILTKSPQTVSVTAETDTVFPCEATGKPKPFVTWTKVSTGALMTPNTRIQRFEVLKNGTLVIRKVQVQDRGQYMCTASNLHGLDRMVVLLSVTVQQPQILASHYQDVTVYLGDTIAMECLAKGTPAPQISWIFPDRRVWQTVSPVEGRITLHENRTLSIKEASFSDRGVYKCVASNAAGADSLAIRLHVAALPPVIHQEKLENISLPPGLSIHIHCTAKAAPLPSVRWVLGDGTQIRPSQFLHGNLFVFPNGTLYIRNLAPKDSGRYECVAANLVGSARRTVQLNVQRAAANARITGTSPRRTDVRYGGTLKLDCSASGDPWPRILWRLPSKRMIDALFSFDSRIKVFANGTLVVKSVTDKDAGDYLCVARNKVGDDYVVLKVDVVMKPAKIEHKEENDHKVFYGGDLKVDCVATGLPNPEISWSLPDGSLVNSFMQSDDSGGRTKRYVVFNNGTLYFNEVGMREEGDYTCFAENQVGKDEMRVRVKVVTAPATIRNKTYLAVQVPYGDVVTVACEAKGEPMPKVTWLSPTNKVIPTSSEKYQIYQDGTLLIQKAQRSDSGNYTCLVRNSAGEDRKTVWIHVNVQPPKINGNPNPITTVREIAAGGSRKLIDCKAEGIPTPRVLWAFPEGVVLPAPYYGNRITVHGNGSLDIRSLRKSDSVQLVCMARNEGGEARLILQLTVLEPMEKPIFHDPISEKITAMAGHTISLNCSAAGTPTPSLVWVLPNGTDLQSGQQLQRFYHKADGMLHISGLSSVDAGAYRCVARNAAGHTERLVSLKVGLKPEANKQYHNLVSIINGETLKLPCTPPGAGQGRFSWTLPNGMHLEGPQTLGRVSLLDNGTLTVREASVFDRGTYVCRMETEYGPSVTSIPVIVIAYPPRITSEPTPVIYTRPGNTVKLNCMAMGIPKADITWELPDKSHLKAGVQARLYGNRFLHPQGSLTIQHATQRDAGFYKCMAKNILGSDSKTTYIHVF

SEQ ID NO: 9120 - protein, 213 aa, Homo Sapiens
MDTERVGDGKQHRRKQSQRLRWPCCLALVPDRHPSQLSSCTLCLLAAASQWESWAHFSKWHTEASTGTHLGKAKAEGLGCTVKNTPQLSICEPSHFGPSFVHSPHLLVDHDHRAGAATGRGQAGPSRASSVSPTFCPPTTSHHPVCAKGTDPVLVLQEEEQDLDGEKGPSSEGPEEEDGEGFSFKYSPGKLRGNQYKKMMTKEELEEEQRTEE

SEQ ID NO: 9121 - protein, 177 aa, Homo Sapiens
MEAPAELLAALPALATALALLLAWLLVRRGAAASPEPARAPPEPAPPAEATGAPAPSRPCAPEPAASPAGPEEPGEPAGLGELGEPAGPGEPEGPGDPAAAPAEAEEQAVEARQEEEQDLDGEKGPSSEGPEEEDGEGFSFKYSPGKLRGNQYKKMMTKEELEEEQRIELTSDLTSL

SEQ ID NO: 9122 - protein, 170 aa, Homo Sapiens
MEAPAELLAALPALATALALLLAWLLVRRGAAASPEPARAPPEPAPPAEATGAPAPSRPCAPEPAASPAGPEEPGEPAGLGELGEPAGPGEPEGPGDPAAAPAEAEEQAVEARQEEEQDLDGEKGPSSEGPEEEDGEGFSFKYSPGKLRGNQYKKMMTKEELEEEQRTEE

SEQ ID NO: 9123 - protein, 204 aa, Homo Sapiens
MEAPAELLAALPALATALALLLAWLLVRRGAAASPEPARAPPEPAPPAEATGAPAPSRPCAPEPAASPAGPEEPGEPAGLGELGEPAGPGEPEGPGDPAAAPAEAEEQAVEARQEEEQDLDGEKGPSSEGPEEEDGEGFSFKYSPGKLRGNQYKKMMTKEELEEEQRVQKEQLAAIFKLMKDNKETFGEMSDGDVQEQLRLYDM

SEQ ID NO: 9124 - protein, 22 aa, Homo Sapiens
MMTKEELEEEQRIELTSDLTSL

SEQ ID NO: 9125 - protein, 15 aa, Homo Sapiens
MMTKEELEEEQRTEE

SEQ ID NO: 9126 - protein, 15 aa, Homo Sapiens
MMTKEELEEEQRTEE

SEQ ID NO: 9127 - protein, 189 aa, Homo Sapiens
MAAPSGGWNGVGASLWAALLLGAVALRPAEAVSEPTTVAFDVRPGGVVHSFSHNVGPGDKYTCMFTYASQGGTNEQWQMSLGTSEDHQHFTCTIWRPQGKSYLYFTQFKAEVRGAEIEYAMAYSKAAFERESDVPLKTEEFEVTKTAGTERWGWGRGDATPIQGWAIGAVWRGGSAIGVLETVDQASTN

SEQ ID NO: 9128 - protein, 173 aa, Homo Sapiens
MAAPSGGWNGVGASLWAALLLGAVALRPAEAVSEPTTVAFDVRPGGVVHSFSHNVGPGDKYTCMFTYASQGGTNEQWQMSLGTSEDHQHFTCTIWRPQGKSYLYFTQFKAEVRGAEIEYAMAYSKAAFERESDVPLKTEEFEVTKTAVAHRPGAFKAELSKLVIVAKASRTEL

SEQ ID NO: 9129 - protein, 84 aa, Homo Sapiens
  misc_feature (1)..(1): Xaa can be any naturally occurring amino acid
XHQHFTCTIWRPQGKSYLYFTQFKAEVRGAEIEYAMAYSKAAFERESDVPLKTEEFEVTKTAVISAPQEKGDDQPHWTDGETEA

SEQ ID NO: 9130 - protein, 194 aa, Homo Sapiens
MAPKKDVKKPVAAAAAAPAPAPAPAPAPAPAKPKEEKIDLSAIKIEFSKEQQDEFKEAFLLFDRTGDSKITLSQVGDVLRALGTNPTNAEVRKVLGNPSNEELNAKKIEFEQFLPMMQAISNNKDQATYEDFVEGLRVFDKEGNGTVMGAELRHVLATLGEKMKEEEVEALMAGQEDSNGCINYEAFVKHIMSI

SEQ ID NO: 9131 - protein, 150 aa, Homo Sapiens
MSFSADQIAEFKEAFLLFDRTGDSKITLSQVGDVLRALGTNPTNAEVRKVLGNPSNEELNAKKIEFEQFLPMMQAISNNKDQATYEDFVEGLRVFDKEGNGTVMGAELRHVLATLGEKMKEEEVEALMAGQEDSNGCINYEAFVKHIMSI

SEQ ID NO: 9132 - protein, 63 aa, Homo Sapiens
MRFFCARCCSFGPEMPAVQLLLLACLVWDVGARTAQLRKANDQRSFYVEFGHFGLPGTEVRAN

SEQ ID NO: 9133 - protein, 504 aa, Homo Sapiens
MRFFCARCCSFGPEMPAVQLLLLACLVWDVGARTAQLRKANDQSGRCQYTFSVASPNESSCPEQSQAMSVIHNLQRDSSTQRLDLEATKARLSSLESLLHQLTLDQAARPQETQEGLQRELGTLRRERDQLETQTRELETAYSNLLRDKSVLEEEKKRLRQENENLARRLESSSQEVARLRRGQCPQTRDTARAVPPGSREVSTWNLDTLAFQELKSELTEVPASRILKESPSGYLRSGEGDTGCGELVWVGEPLTLRTAETITGKYGVWMRDPKPTYPYTQETTWRIDTVGTDVRQVFEYDLISQFMQGYPSKVHILPRPLESTGAVVYSGSLYFQGAESRTVIRYELNTETVKAEKEIPGAGYHGQFPYSWGGYTDIDLAVDEAGLWVIYSTDEAKGAIVLSKLNPENLELEQTWETNIRKQSVANAFIICGTLYTVSSYTSADATVNFAYDTGTGISKTLTIPFKNRYKYSSMIDYNPLEKKLFAWDNLNMVTYDIKLSKM

SEQ ID NO: 9134 - protein, 250 aa, Homo Sapiens
MAFCALTIVALYILSLKDQDRRVPNLPPSNITSSQEPALLPTASSSAPNTSLVTTPASLQVPEITFCEILPCQETYCCPIRGMKEVSSSPVQRQSEEKEFHQRRWSEDKSKSVLARNALSGPDWESDWIDTTISSIQIMEIQQIIDHQYCIQSLQCGTTEPLIVFQCKFTLGNICFHSKRGTKGLESHREISQEMTQGYQHIWSLPVAPFSDSMFHFRVAAPDLADCSTDPYFAGIFFTDYFFYFYRRCA

SEQ ID NO: 9135 - protein, 898 aa, Homo Sapiens
MDVVGENEALQQFFEAQGANGTLENPALDTSLLEEFLGNDFDLGALQRQLPDTPPYSASDSCSPPQVKGACYPTLRPTAGRTPAPFLHPTAAPAMPPMHPLQSTSGMGDSCQIHGGFHSCHSNASHLATPLDQSVSSHLGIGCSYPQQPLCHSPGASLPPTKKRKCTQALEDSGECRVWACHCRPMTSRSRSSEVQDPDSEGQNRMPTDQCSPALKWQPCHSVPWHSLLNSHYEKLPDVGYRVVTDKGFNFSPADEAFVCQKKNHFQITIHIQVWGSPKFVETEMGLKPIEMFYLKVFGTKVEATNQIIAIEQSQADRSKKIFNPVKIDLLADQVTKVTLGRLHFSETTANNMRKKGKPNPDQRYFMLVVGLYAANQDQFYLLSAHISERIIVRASNPGQFENDSDALWQRGQVPESIVCHGRVGINTDAPDEALVVCGNMKVMGTIMHPSDSRAKQNIQEVDTNEQLKRIAQMRIVEYDYKPEFASAMGINTAHQTGMIAQEVQEILPRAVREVGDVTCGNGETLENFLMVDKDQIFMENVGAVKQLCKLTNNLEERIEELEIWNRKLARLKRLSSWKSSASEASTISKSSRAVSASSPRRAVHKKNNKVYFSGKRQACPNWVFQTLVITLIAVMAFCLKDQDRRVPNLPPSNITSSQEPALLPTASSSAPNTSLVTTPASLQVPEITFCEILPCQETYCCPIRGMKEVSSSPVQRQSEEKEFHQRRWSDKSKSVLARNALSGPDWESDWIDTTISSIQIMEIQQIIDHQYCIQSLQCGSGNYNYNIPVNKHTPTNVKFSLEINTTEPLIVFQCKFTLGNICFHSKRGTKGLESHREISQEMTQGYQHIWSLPVAPFSDSMFHFRVAAPDLADCSTDPYFAGIFFTDYFFYFYRRCA

SEQ ID NO: 9136 - protein, 910 aa, Homo Sapiens
MDVVGENEALQQFFEAQGANGTLENPALDTSLLEEFLGNDFDLGALQRQLPDTPPYSASDSCSPPQVKGACYPTLRPTAGRTPAPFLHPTAAPAMPPMHPLQSTSGMGDSCQIHGGFHSCHSNASHLATPLDQSVSSHLGIGCSYPQQPLCHSPGASLPPTKKRKCTQALEDSGECRVWACHCRPMTSRSRSSEVQDPDSEGQNRMPTDQCSPALKWQPCHSVPWHSLLNSHYEKLPDVGYRVVTDKGFNFSPADEAFVCQKKNHFQITIHIQVWGSPKFVETEMGLKPIEMFYLKVFGTKVEATNQIIAIEQSQADRSKKIFNPVKIDLLADQVTKVTLGRLHFSETTANNMRKKGKPNPDQRYFMLVVGLYAANQDQFYLLSAHISERIIVRASNPGQFENDSDALWQRGQVPESIVCHGRVGINTDAPDEALVVCGNMKVMGTIMHPSDSRAKQNIQEVDTNEQLKRIAQMRIVEYDYKPEFASAMGINTAHQTGMIAQEVQEILPRAVREVGDVTCGNGETLENFLMVDKDQIFMENVGAVKQLCKLTNNLEERIEELEIWNRKLARLKRLSSWKSSASEASTISKSSRAVSASSPRRAVHKKNNKVYFSGKRQACPNWVFQTLVITLIAVMAFCALTIVALYILSLKDQDRRVPNLPPSNITSSQEPALLPTASSSAPNTSLVTTPASLQVPEITFCEILPCQETYCCPIRGMKEVSSSPVQRQSEEKEFHQRRWSEDKSKSVLARNALSGPDWESDWIDTTISSIQIMEIQQIIDHQYCIQSLQCGSGNYNYNIPVNKHTPTNVKFSLEINTTEPLIVFQCKFTLGNICFHSKRGTKGLESHREISQEMTQGYQHIWSLPVAPFSDSMFHFRVAAPDLADCSTDPYFAGIFFTDYFFYFYRRCA

SEQ ID NO: 9137 - protein, 250 aa, Homo Sapiens
MVFLALTIVALYILSLKDQDRRVPNLPPSNITSSQEPALLPTASSSAPNTSLVTTPASLQVPEITFCEILPCQETYCCPIRGMKEVSSSPVQRQSEEKEFHQRRWSEDKSKSVLARNALSGPDWESDWIDTTISSIQIMEIQQIIDHQYCIQSLQCGTTEPLIVFQCKFTLGNICFHSKRGTKGLESHREISQEMTQGYQHIWSLPVAPFSDSMFHFRVAAPDLADCSTDPYFAGIFFTDYFFYFYRRCA

SEQ ID NO: 9138 - protein, 375 aa, Homo Sapiens
  misc_feature (1)..(1): Xaa can be any naturally occurring amino acid
XIFMENVGAVKQLCKLTNNLEERIEELEIWNRKLARLKRLSSWKSSASEASTISKSSRAVSASSPRRAVHKKNNKVYFSGKRQACPNWVFQTLVITLIAVMAFCALTIVALYILSLKDQDRRVPNLPPSNITSSQEPALLPTASSSAPNTSLVTTPASLQVPEITFCEILPCQETYCCPIRGMKEVSSSPVQRQSEEKEFHQRRWSEDKSKSVLARNALSGPDWESDWIDTTISSIQIMEIQQIIDHQYCIQSLQCGSGNYNYNIPVNKHTPTNVKFSLEINTTEPLIVFQCKFTLGNICFHSKRGTKGLESHREISQEMTQGYQHIWSLPVAPFSDSMFHFRVAAPDLADCSTDPYFAGIFFTDYFFYFYRRCA

SEQ ID NO: 9139 - protein, 76 aa, Homo Sapiens
MRLSLPLLLLLLGAWAIPGGLGDRAPLTATAPQLDDEEMYSAHMPAHLRCDACRAVAYQLRSSRSGPSETSHRPRT

SEQ ID NO: 9140 - protein, 189 aa, Homo Sapiens
MRLSLPLLLLLLGAWAIPGGLGDRAPLTATAPQLDDEEMYSAHMPAHLRCDACRAVAYQMWQNLAKAETKLHTSNSGGRRELSELVYTDVLDRSCSRNWQDYGVREVDQVKRLTGPGLSEGPEPSISVMVTGGPWPTRLSRTCLHYLGEFGEDQIYEAHQQGRGALEALLCGGPQGACSEKVSATREEL

SEQ ID NO: 9141 - protein, 75 aa, Homo Sapiens
MRLSLPLLLLLLGAWAIPGGLGDRAPLTATAPQLDDEEMYSAHMPAHLRCDACRAVAYQRLCSYPPHLPLTEQQS

SEQ ID NO: 9142 - protein, 123 aa, Homo Sapiens
MRLSLPLLLLLLGAWAIPGGLGDRAPLTATAPQLDDEEMYSAHMPAHLRCDACRAVAYQSLLVPDVAKSGKGRDQTSYLKLWGAAGAERVGLHGCPGPELLPELAGLRSSRSGPSETSHRPRT

SEQ ID NO: 9143 - protein, 60 aa, Homo Sapiens
  misc_feature (1)..(1): Xaa can be any naturally occurring amino acid
XSLPLLLLLLGAWAIPGGLGDRAPLTATAPQLDDEEMYSAHMPAHLRCDACRAVAYQAHP

SEQ ID NO: 9144 - protein, 737 aa, Homo Sapiens
MALCSALMTIFTIKMGTAKQAIDQGRSPVIIDNTNIQAWEMKPYVEVAIGKGYRVEFHEPETWWKFDPEELEKRNKHGVSRKKIAQMLDRYEYQMSISIVMNSVEPSHKSTQRPPPPQGRQRERVLKKTGHRLSKTKQKRNRKRNKKQNSQNRIMEENSLEFLSDLTPGDQDPSQSEEEDIEKTRRESEYPFIDGLQNEVGDFVTGYKEKRWKNKDPKDSFQNVMSIVELDNTPKNYLSKEGDNLFVSLLLRPNEISVTCPILTQNLSCVTTDDCSGMKVEKHIRNRHTIALDTQDLSAETSCLFMKKREIVDKNLSHEPILCHQHGIRMSDKVLREEQVYTTKINHWAFFTTNLSDEDLQLGSDRQPYFGSWPAGPHKFICEQRPKKDRACKLAGPDSRGQWIQMIFTSVAASEPGNNPEILTDKLLIGNEDFSPPPETMDSFIETNLFRSCLPQPDIPKNALESTKNKKRRKKRIFNLVPNFDLLGQSRIGVKEREKCDLLTKNHGLKITLGEEKDRISERNSEEENKQKLMTFDHHPLWFYLDIIKATPLNIDGQRYSHCLSFNRLRCSASLYKNYIPSFVLHNLSSIWKPSFTNKKLFLTFESQTRVGNKLNDAGFISPEILHSHPDTSCSLGVTSDFHFLNERFDRKLKRWEEPKELPAEDSQDLTSTDYRSLELPLSQGFAFQLVKLFGSPGVPMESLLPDDYVVPLDWKTLKMIYLQWKMSVEKRQKKIG

SEQ ID NO: 9145 - protein, 737 aa, Homo Sapiens; identical to SEQ ID NO: 9144

SEQ ID NO: 9146 - protein, 752 aa, Homo Sapiens
MSYGEIEEFCLVRIVMALCSALMTIFTIKMGTAKQAIDQGRSPVIIDNTNIQAWEMKPYVEVAIGKGYRVEFHEPETWWKFDPEELEKRNKHGVSRKKIAQMLDRYEYQMSISIVMNSVEPSHKSTQRPPPPQGRQRERVLKKTGHRLSKTKQKRNRKRNKKQNSQNRIMEENSLEFLSDLTPGDQDPSQSEEEDIEKTRRESEYPFIDGLQNEVGDFVTGYKEKRWKNKDPKDSFQNVMSIVELDNTPKNYLSKEGDNLFVSLLLRPNEISVTCPILTQNLSCVTTDDCSGMKVEKHIRNRHTIALDTQDLSAETSCLFMKKREIVDKNLSHEPILCHQHGIRMSDKVLREEQVYTTKINHWAFFTTNLSDEDLQLGSDRQPYFGSWPAGPHKFICEQRPKKDRACKLAGPDSRGQWIQMIFTSVAASEPGNNPEILTDKLLIGNEDFSPPPETMDSFIETNLFRSCLPQPDIPKNALESTKNKKRRKKRIFNLVPNFDLLGQSRIGVKEREKCDLLTKNHGLKITLGEEKDRISERNSEEENKQKLMTFDHHPLWFYLDIIKATPLNIDGQRYSHCLSFNRLRCSASLYKNYIPSFVLHNLSSIWKPSFTNKKLFLTFESQTRVGNKLNDAGFISPEILHSHPDTSCSLGVTSDFHFLNERFDRKLKRWEEPKELPAEDSQDLTSTDYRSLELPLSQGFAFQLVKLFGSPGVPMESLLPDDYVVPLDWKTLKMIYLQWKMSVEKRQKKIG

SEQ ID NO: 9147 - protein, 583 aa, Homo Sapiens
MSYGEIEGKFLGPREEVTSEPRCKKLKSTTESYVFHNHSNADFHRIQEKTGNDWVPVTIIDVRGHSYLQENKIKTTDLHRPLHDEMPGNRPDVIESIDSQVLQEARPPLVSADDEIYSTSKAFIGPIYKPPEKKKRNEGRNEAHVLNGINDRGGQKEKQKFNSEKSEIDNELFQFYKEIEELEKEKDGFENSCKESEPSQEQFVPFYEGHNNGLLKPDEEKKDLSNKAMPSHCDYQQNLGNEPDKYPCNGQVIPTFCDTSFTSFRPEWQSVYPFIVPYGPPLPSLNYHLNIQRFSGPPNPPSNIFQAQDDSQIQNGYYVNNCHVNWNCMTFDQNNEYTDCSENRSSVHPSGNGCSMQDRYVSNGFCEVRERCWKDHCMDKHNGTDRFVNQQFQEEKLNKLQKLLILLRGLPGSGKTTLSRILLGQNRDGIVFSTDDYFHHQDGYRYNVNQLGDAHDWNQNRAKQAIDQGRSPVIIDNTNIQAWEMKPYVEVAIGKGYRVEFHEPETWWKFDPEELEKRNKHGVSRKKIAQMLDRYEYQMSISIVMNSVEPSHKSTQRPPPPQGRQRWGGSLGSHNRVCVTNNH

SEQ ID NO: 9148 - protein, 655 aa, Homo Sapiens
MSYGEIEGKFLGPREEVTSEPRCKKLKSTTESYVFHNHSNADFHRIQEKTGNDWVPVTIIDVRGHSYLQENKIKTTDLHRPLHDEMPGNRPDVIESIDSQVLQEARPPLVSADDEIYSTSKAFIGPIYKPPEKKKRNEGRNEAHVLNGINDRGGQKEKQKFNSEKSEIDNELFQFYKEIEELEKEKDGFENSCKESEPSQEQFVPFYEGHNNGLLKPDEEKKDLSNKAMPSHCDYQQNLGNEPDKYPCNGQVIPTFCDTSFTSFRPEWQSVYPFIVPYGPPLPSLNYHLNIQRFSGPPNPPSNIFQAQDDSQIQNGYYVNNCHVNWNCMTFDQNNEYTDCSENRSSVHPSGNGCSMQDRYVSNGFCEVRERCWKDHCMDKHNGTDRFVNQQFQEEKLNKLQKLLILLRGLPGSGKTTLSRILLGQNRDGIVFSTDDYFHHQDGYRYNVNQLGDAHDWNQNRAKQAIDQGRSPVIIDNTNIQAWEMKPYVEVAIGKGYRVEFHEPETWWKFDPEELEKRNKHGVSRKKIAQMLDRYEYQMSISIVMNSVEPSHKSTQRPPPPQGRQRFDRKLKRWEEPKELPAEDSQDLTSTDYRSLELPLSQGFAFQLVKLFGSPGVPMESLLPDDYVVPLDWKTLKMIYLQWKMSVEKRQKKIG

SEQ ID NO: 9149 - protein, 709 aa, Homo Sapiens
MSYGEIEGKFLGPREEVTSEPRCKKLKSTTESYVFHNHSNADFHRIQEKTGNDWVPVTIIDVRGHSYLQENKIKTTDLHRPLHDEMPGNRPDVIESIDSQVLQEARPPLVSADDEIYSTSKAFIGPIYKPPEKKKRNEGRNEAHVLNGINDRGGQKEKQKFNSEKSEIDNELFQFYKEIEELEKEKDGFENSCKESEPSQEQFVPFYEGHNNGLLKPDEEKKDLSNKAMPSHCDYQQNLGNEPDKYPCNGQVIPTFCDTSFTSFRPEWQSVYPFIVPYGPPLPSLNYHLNIQRFSGPPNPPSNIFQAQDDSQIQNGYYVNNCHVNWNCMTFDQNNEYTDCSENRSSVHPSGNGCSMQDRYVSNGFCEVRERCWKDHCMDKHNGTDRFVNQQFQEEKLNKLQKLLILLRGLPGSGKTTLSRILLGQNRDGIVFSTDDYFHHQDGYRYNVNQLGDAHDWNQNRAKQAIDQGRSPVIIDNTNIQAWEMKPYVEVAIGKGYRVEFHEPETWWKFDPEELEKRNKHGVSRKKIAQMLDRYEYQMSISIVMNSVEPSHKSTQRPPPPQGRQRERVLKKTGHRLSKTKQKRNRKRNKKQNSQNRIMEENSLEFLSDLTPGDQDPSQSEEEDIEKTRRESEYPFIDGLQNEVGDFVTGYKEKRWKNKDPKDSFQNVMSIVELDNTPKNYLSKEGDNLFVSLLLRPNEISVTCPILTQ

SEQ ID NO: 9150 - protein, 125 aa, Homo Sapiens
MAGAGPTMLLREENGCCSRRQSSSSAGDSDGEREDSAAERARQQLEALLNKTMRIRMTDGRTLVGCFLCTDRDCNVILGSAQEFLKPSDSFSAGEPRVLGLAMVPGHHIVSIEVQRESLTGPPYL

SEQ ID NO: 9151 - protein, 135 aa, Homo Sapiens
MAGAGPTMLLREENGCCSRRQSSSSAGDSDGEREDSAAERARQQLEALLNKTMRIRMTDGRTLVGCFLCTDRDCNVILGSAQEFLKPSGQCPGNAHPPDSFSAGEPRVLGLAMVPGHHIVSIEVQRESLTGPPYL

SEQ ID NO: 9152 - protein, 173 aa, Homo Sapiens
MAVAVGVRAAPVLGLARALVLGLRGSQAARWRGWGTAAPGSLWALCECPAGCRELWFRGRAAWAARSERLLHPAQDSDGEREDSAAERARQQLEALLNKTMRIRMTDGRTLVGCFLCTDRDCNVILGSAQEFLKPSDSFSAGEPRVLGLAMVPGHHIVSIEVQRESLTGPPYL

SEQ ID NO: 9153 - protein, 99 aa, Homo Sapiens
MDSDGEREDSAAERARQQLEALLNKTMRIRMTDGRTLVGCFLCTDRDCNVILGSAQEFLKPSDSFSAGEPRVLGLAMVPGHHIVSIEVQRESLTGPPYL

SEQ ID NO: 9154 - protein, 73 aa, Homo Sapiens
MRIRMTDGRTLVGCFLCTDRDCNVILGSAQEFLKPSDSFSAGEPRVLGLAMVPGHHIVSIEVQRESLTGPPYL

SEQ ID NO: 9155 - protein, 83 aa, Homo Sapiens
MRIRMTDGRTLVGCFLCTDRDCNVILGSAQEFLKPSGQCPGNAHPPDSFSAGEPRVLGLAMVPGHHIVSIEVQRESLTGPPYL

SEQ ID NO: 9156 - protein, 252 aa, Homo Sapiens
MCDFMNLSLADCLLVNLAYESSVFCTSIVAQDSRGHIYHGRNLDYPFGNVLRKLTVDVQFLKNGQIAFTGTTFIGYVGLWTGQSPHKFTVSGDERDKGWWWENAIAALFRRHIPVSWLIRATLSESENFEAAVGKLAKTPLIADVYYIVGGTSPREGVVITRNRDGPADIWPLDPLNGAWFRVETNYDHWKPAPKEDDRRTSAIKALNATGQANLSLEALFQVTCVTVSCIPRMFGVLLIVNMKNSVKSSGR

SEQ ID NO: 9157 - protein, 359 aa, Homo Sapiens
MRTADREARPGLPSLLLLLLAGAGLSAASPPAAPRFNVSLDSVPELRWLPVLRHYDLDLVRAAMAQVIGDRVPKWVHVLIGKVVLELERFLPQPFTGEIRGMCDFMNLSLADCLLVNLAYESSVFCTSIVAQDSRGHIYHGRNLDYPFGNVLRKLTVDVQFLKNGQIAFTGTTFIGYVGLWTGQSPHKFTVSGDERDKGWWWENAIAALFRRHIPVSWLIRATLSESENFEAAVGKLAKTPLIADVYYIVGGTSPREGVVITRNRDGPADIWPLDPLNGAWFRVETNYDHWKPAPKEDDRRTSAIKALNATGQANLSLEALFQILSVVPVYNNFTIYTTVMSAGSPDKYMTRIRNPSRK

SEQ ID NO: 9158 - protein, 323 aa, Homo Sapiens
MRTADREARPGLPSLLLLLLAGAGLSAASPPAAPRFNVSLDSVPELRWLPVLRHYDLDLVRAAMAQVIGDRVPKWVHVLIGKVVLELERFLPQPFTGEIRGMCDFMNLSLADCLLVNLAYESSVFCTSIVAQDSRGHIYHGRNLDYPFGNVLRKLTVDVQFLKNGQIAFTGTTFIGYVGLWTGQSPHKFTVSGDERDKGWWWENAIAALFRRHIPVSWLIRATLSESENFEAAVGKLAKTPLIADVYYIVGGTSPREGVVITRNRDGPADIWPLDPLNGAWFRVETNYDHWKPAPKEDDRRTSAIKALNATGQANLSLEALFQ

SEQ ID NO: 9159 - protein, 167 aa, Homo Sapiens
MRTADREARPGLPSLLLLLLAGAGLSAASPPAAPRFNVSLDSVPELRWLPVLRHYDLDLVRAAMAQVIGDRVPKWVHVLIGKVVLELERFLPQPFTGEIRGMCDFMNLSLADCLLVNLAYESSVFCTSIVAQDSRGHIYHGRNLDYPFGNVLRKLTVDVQFLKNGQV

SEQ ID NO: 9160 - protein, 139 aa, Homo Sapiens
  misc_feature (1)..(1): Xaa can be any naturally occurring amino acid
XDKGWWWENAIAALFRRHIPVSWLIRATLSESENFEAAVGKLAKTPLIADVYYIVGGTSPREGVVITRNRDGPADIWPLDPLNGAWFRVETNYDHWKPAPKEDDRRTSAIKALNATGQANLSLEALFQLHNLYYGNERR

SEQ ID NO: 9161 - protein, 222 aa, Homo Sapiens
  misc_feature (1)..(1): Xaa can be any naturally occurring amino acid
XTSIVAQDSRGHIYHGRNLDYPFGNVLRKLTVDVQFLKNGQIAFTGTTFIGYVGLWTGQSPHKFTVSGDERDKGWWWENAIAALFRRHIPVSWLIRATLSESENFEAAVGKLAKTPLIADVYYIVGGTSPREGVVITRNRDGPADIWPLDPLNGAWFRVETNYDHWKPAPKEDDRRTSAIKALNATGQANLSLEALFQILSVVPVYNKLFPLAEFPEVGLLS

SEQ ID NO: 9162 - protein, 411 aa, Homo Sapiens
MLLKTVLLLGHVAQVLMLDNGLLQTPPMGWLAWERFRCNINCDEDPKNCISEQLFMEMADRMAQDGWRDMGYTYLNIDDCWIGGRDASGRLMPDPKRFPHGIPFLADYVHSLGLKLGIYADMGNFTCMGYPGTTLDKVVQDAQTFAEWKVDMLKLDGCFSTPEERAQGYPKMAAALNATGRPIAFSCSWPAYEGGLPPRVNYSLLADICNLWRNYDDIQDSWWSVLSILNWFVEHQDILQPVAGPGHWNDPDMLLIGNFGLSLEQSRAQMALWTVLAAPLLMSTDLRTISAQNMDILQNPLMIKINQDPLGIQGRRIHKEKSLIEVYMRPLSNKASALVFFSCRTDMPYRYHSSLGQLNFTGSVIYEAQDVYSGDIISGLRDETNFTVIINPSGVVMWYLYPIKNLEMSQQ

SEQ ID NO: 9163 - protein, 411 aa, Homo Sapiens; identical to SEQ ID NO: 9162

SEQ ID NO: 9164 - protein, 411 aa, Homo Sapiens; identical to SEQ ID NO: 9162

SEQ ID NO: 9165 - protein, 743 aa, Homo Sapiens
MEAVAVAAAVGVLLLAGAGGAAGDEAREAAAVRALVARLLGPGPAADFSVSVERALAAKPGLDTYSLGGGGAARVRVRGSTGVAAAAGLHRYLRDFCGCHVAWSGSQLRLPRPLPAVPGELTEATPNRYRYYQNVCTQSYSFVWWDWARWEREIDWMALNGINLALAWSGQEAIWQRVYLALGLTQAEINEFFTGPAFLAWGRMGNLHTWDGPLPPSWHIKQLYLQHRVLDQMRSFGMTPVLPAFAGHVPEAVTRVFPQVNVTKMGSWGHFNCSYSCSFLLAPEDPIFPIIGSLFLRELIKEFGTDHIYGADTFNEMQPPSSEPSYLAAATTAVYEAMTAVDTEAVWLLQGWLFQHQPQFWGPAQIRAVLGAVPRGRLLVLDLFAESQPVYTRTASFQGQPFIWCMLHNFGGNHGLFGALEAVNGGPEAARLFPNSTMVGTGMAPEGISQNEVVYSLMAELGWRKDPVPDLAAWVTSFAARRYGVSHPDAGAAWRLLLRSVYNCSGEACRGHNRSPLVRRPSLQMNTSIWYNRSDVFEAWRLLLTSAPSLATSPAFRYDLLDLTRQAVQELVSLYYEEARSAYLSKELASLLRAGGVLAYELLPALDEVLASDSRFLLGSWLEQARAAAVSEAEADFYEQNSRYQLTLWGPEGNILDYANKQLAGLVANYYTPRWRLFLEALVDSVAQGIPFQQHQFDKNVFQLEQAFVLSKQRYPSQPRGDTVDLAKKIFLKYYPRWVAGSW

SEQ ID NO: 9166 - protein, 81 aa, Homo Sapiens
MGDLFQGRGPSRVGCAPAHDTARRYRYYQNVCTQSYSFVWWDWARWEREIDWMALNGINLALAWSGQEAIWQRVYLALGLT

SEQ ID NO: 9167 - protein, 122 aa, Homo Sapiens
RGAAPLPARLLWLPRGLVRLSAAPAAATASRAGGADRGHAQQVYLALGLTQAEINEFFTGPAFLAWGRMGNLHTWDGPLPPSWHIKQLYLQHRVLDQMRSFGMTPVLPAFAGHVPEAVTSGY

SEQ ID NO: 9168 - protein, 65 aa, Homo Sapiens
  misc_feature (1)..(1): Xaa can be any naturally occurring amino acid
XFGTDHIYGADTFNEMQPPSSEPSYLAAATTAVYEAMTAVLGARPDQGCAGSCAPWPPPGSGPVC

SEQ ID NO: 9169 - protein, 170 aa, Homo Sapiens
  misc_feature (1)..(1): Xaa can be any naturally occurring amino acid
XGRRGAAPLPARLLWLPRGLVRLSAAPAAATASRAGGADRGHAQQVYLALGLTQAEINEFFTGPAFLAWGRMGNLHTWDGPLPPSWHIKQLYLQHRVLDQMRSFGMTPVLPAFAGHVPEAVTRVFPQVNVTKMGSWGHFNCSYSCSFLLAPEDPIFPIIGSLFLRELIKE

SEQ ID NO: 9170 - protein, 534 aa, Homo Sapiens
MATALMAVVLRAAAVAPRLRGRGGTGGARRLSCGARRRAARGTSPGRRLSTAWSQPQPPPEEYAGADDVSQSPVAEEPSWVPSPRPPVPHESPEPPSGRSLVQRDIQAFLNQCGASPGEARHWLTQFQTCHHSADKPFAVIEVDEEVLKCQQGVSSLAFALAFLQRMDMKPLVVLGLPAPTAPSGCLSFWEAKAQLAKSCKVLVDALRHNAAAAVPFFGGGSVLRAAEPAPHASYGGIVSVETDLLQWCLESGSIPILCPIGETAARRSVLLDSLEVTASLAKALRPTKIIFLNNTGGLRDSSHKVLSNVNLPADLDLVCNAEWVSTKERQQMRLIVDVLSRLPHHSSAVITAASTLLTELFSNKGSGTLFKNAERMLRVRSLDKLDQGRLVDLVNASFGKKLRDDYLASLRPRLHSIYVSEGYNAAAILTMEPVLGGTPYLDKFVVSSSRQGQGSGQMLWECLRRDLQTLFWRSRVTNPINPWYFKHSDGSFSNKQWIFFWFGLADIRDSYELVNHAKGLPDSFHKPASDPGS

SEQ ID NO: 9171 - protein, 511 aa, Homo Sapiens
SCGARRRAARGTSPGRRLSTAWSQPQPPPEEYAGADDVSQSPVAEEPSWVPSPRPPVPHESPEPPSGRSLVQRDIQAFLNQCGASPGEARHWLTQFQTCHHSADKPFAVIEVDEEVLKCQQGVSSLAFALAFLQRMDMKPLVVLGLPAPTAPSGCLSFWEAKAQLAKSCKVLVDALRHNAAAAVPFFGGGSVLRAAEPAPHASYGGIVSVETDLLQWCLESGSIPILCPIGETAARRSVLLDSLEVTASLAKALRPTKIIFLNNTGGLRDSSHKVLSNVNLPADLDLVCNAEWVSTKERQQMRLIVDVLSRLPHHSSAVITAASTLLTELFSNKGSGTLFKNAERMLRVRSLDKLDQGRLVDLVNASFGKKLRDDYLASLRPRLHSIYVSEGLPLSRCARYNAAAILTMEPVLGGTPYLDKFVVSSSRQGQGSGQMLWECLRRDLQTLFWRSRVTNPINPWYFKHSDGSFSNKQWIFFWFGLADIRDSYELVNHAKGLPDSFHKPASDPGS

SEQ ID NO: 9172 - protein, 104 aa, Homo Sapiens
MSPPPLLQPLLLLLPLLNVEPSGATLIRIPLHRVQPGRRILNLLRGWREPAELPKLGAPSPGDKPIFVPLSNYRDGYTTDLIPKPLAPSRPMGPSLPFNMELGG

SEQ ID NO: 9173 - protein, 268 aa, Homo Sapiens
MSPPPLLQPLLLLLPLLNVEPSGATLIRIPLHRVQPGRRILNLLRGWREPAELPKLGAPSPGDKPIFVPLSNYRDVQYFGEIGLGTPPQNFTVAFDTGSSNLWVPSRRCHFFSVPCSSSSFQANGTKFAIQYGTGRVDGILSEDKLTIGGIKGASVIFGEALWEPSLVFAFAHFDGILGLGFPILSVEGVRPPMDVLVEQGLLDKPVFSFYLNRDPEEPDGGELVLGGSDPAHYIPPLTFVPVTVPAYWQIHMERVKVGPGLTLCAKG

SEQ ID NO: 9174 - protein, 420 aa, Homo Sapiens
MSPPPLLQPLLLLLPLLNVEPSGATLIRIPLHRVQPGRRILNLLRGWREPAELPKLGAPSPGDKPIFVPLSNYRDVQYFGEIGLGTPPQNFTVAFDTGSSNLWVPSRRCHFFSVPCWLHHRFDPKASSSFQANGTKFAIQYGTGRVDGILSEDKLTIGGIKGASVIFGEALWEPSLVFAFAHFDGILGLGFPILSVEGVRPPMDVLVEQGLLDKPVFSFYLNRDPEEPDGGELVLGGSDPAHYIPPLTFVPVTVPAYWQIHMERVKVGPGLTLCAKGCAAILDTGTSLITGPTEEIRALHAAIGGIPLLAGEYIILCSEIPKLPAVSFLLGGVWFNLTAHDYVIQTTRNGVRLCLSGFQALDVPPPAGPFWILGDVFLGTYVAVFDRGDMKSSARVGLARARTRGADLGWGETAQAQFPG

SEQ ID NO: 9175 - protein, 237 aa, Homo Sapiens
MLPDGPGSSLWGNPGLQTSDSPNAVHEVEKWLPRLHALVVGPGLGRDDALLRNVQGILEVSKARDIPVVIDADGLWLVAQQPALIHGYRKAVLTPNHVEFSRLYDAVLRGPMDSDDSHGSVLRLSQALGNVTVVQKGERDILSNGQQVLVCSQEGSSRRCGGQGDLLSGSLGVLVHWALLAGPQKTNGSSPLLVAAFGACSLTRQCNHQAFQKHGRSTTTSDMIAEVGAAFSKLFET

SEQ ID NO: 9176 - protein, 390 aa, Homo Sapiens
MVTRAGAGTAVAGAVVVALLSAALALYGPPLDAVLERAFSLRKAHSIKDMENTLQLVRNIIPPLSSTKHKGQDGRIGVVGGCQEYTGAPYFAAISALKVGADLSHVFCASAAAPVIKAYSPELIVHPVLDSPNAVHEVEKWLPRLHALVVGPGLGRDDALLRNVQGILEVSKARDIPVVIDADGLWLVAQQPALIHGYRKAVLTPNHVEFSRLYDAVLRGPMDSDDSHGSVLRLSQALGNVTVVQKGERDILSNGQQVLVCSQEGSSRRCGGQGDLLSGSLGVLVHWALLAGPQKTNGGISDLKLTIWGPEIETGVKTRAQGSCGPRTTTPTSPHLLLSPSPQVQPSPGGRVWRLLSHQAVQPPSLPEARSLHHHLRHDRRGGGRLQQAL

SEQ ID NO: 9177 - protein, 260 aa, Homo Sapiens
MSRLRALLGLGLLVAGSRVPRIKSQTIACRSGPTWWGPQRLNSGGRWDSEVMASTVVKYLSQEEAQAVDQELFNEYQFSVDQLMELAGLSCATAIAKAYPPTSMSRSPPTVLVICGPGNNGGDGLVCARHLKLFGYEPTIYYPKRPNKPLFTALVTQCQKMDIPFLGEMPAELQGRCSGTVPQHPECPEGTHCAHCQHRHSLRMGRGEGKCWRDPARLAHIPHSPQKICNPVYRSLPLPGGSFCATCSGEEVPAEPATLP

SEQ ID NO: 9178 - protein, 245 aa, Homo Sapiens
MSRLRALLGLGLLVAGSRVPRIKSQTIACRSGPTWWGPQRLNSGGRWDSEVMASTVVKYLSQEEAQAVDQELFNEYQFSVDQLMELAGLSCATAIAKAYPPTSMSRSPPTVLVICGPGNNGGDGLVCARHLKLFGYEPTIYYPKRPNKPLFTALVTQCQKMDIPFLGEMPAEPMTIDELYELVVDAIFGFSFKGDVREPFHSILSVLKGLTVPIASIDIPSGAGIQKVGWGRLGPYPPDSCPHQV

SEQ ID NO: 9179 - protein, 288 aa, Homo Sapiens
MSRLRALLGLGLLVAGSRVPRIKSQTIACRSGPTWWGPQRLNSGGRWDSEVMASTVVKYLSQEEAQAVDQELFNEYQFSVDQLMELAGLSCATAIAKAYPPTSMSRSPPTVLVICGPGNNGGDGLVCARHLKLFGYEPTIYYPKRPNKPLFTALVTQCQKMDIPFLGEMPAEPMTIDELYELVVDAIFGFSFKGDVREPFHSILSVLKGLTVPIASIDIPSGWDVEKGNAGGIQPDLLISLTAPKKSATQFTGRYHYLGGRFVPPALEKKYQLNLPPYPDTECVYRLQ

SEQ ID NO: 9180 - protein, 128 aa, Homo Sapiens
MCSLALQQLISMDLFWRLFFVCGQEGLRALEATGMMLRVLVGAVLPAMLLAAPPPINKLALFPDKSAWCEAKNITQIVGHSGCEAKSIQNRACLGQCFSYSVPNTFPQSTESLVHCDSCMPAQSMWEI

SEQ ID NO: 9181 - protein, 215 aa, Homo Sapiens
MCSLALQQLISMDLFWRLFFVCGQEGLRALEATGMMLRVLVGAVLPAMLLAAPPPINKLALFPDKSAWCEAKNITQIVGHSGCEAKSIQNRACLGQCFSYSVPNTFPQSTESLVHCDSCMPAQSMWEIVTLECPGHEEVPRVDKLVEKILHCSCQACGKEPSHEGLSVYVQGEDGPGSQPGTHPHPHPHPHPGGQTPEPEDPPGAPHTEEEGAED

SEQ ID NO: 9182 - protein, 163 aa, Homo Sapiens
MLRVLVGAVLPAMLLAAPPPINKLALFPDKSAWCEAKNITQIVGHSGCEAKSIQNRACLGQCFSYSVPNTFPQSTESLVHCDSCMPAQSMWEIVTLECPGHEEVPRVDKLVEKILHCSCQACGKEPSHEGLSVYVQGEDGPGSQPGTHPHPHPHPHPGGQTPE

SEQ ID NO: 9183 - protein, 109 aa, Homo Sapiens
MMLRVLVGAVLPAMLLAAPPPINKLALFPDKSAWCEAKNITQIVGHSGCEAKSIQNRACLGQCFSYSVPNTFPQSTESLVHCDSCMPAQSMWEIVTLECPGHEEVPRVD

SEQ ID NO: 9184 - protein, 116 aa, Homo Sapiens
MMLRVLVGAVLPAMLLAAPPPINKLALFPDKSAWCEAKNITQIVGHSGCEAKSIQNRACLGQCFSYSVPNTFPQSTESLVHCDSCMPAQSMWEIVTLECPGHEEVPRVDKLVEKIL

SEQ ID NO: 9185 - protein, 117 aa, Homo Sapiens
MMLRVLVGAVLPAMLLAAPPPINKLALFPDKSAWCEAKNITQIVGHSGCEAKSIQNRACLGQCFSYSVPNTFPQSTESLVHCDSCMPAQSMWEIVTLECPGHEEVPRVDKLVEKILH

SEQ ID NO: 9186 - protein, 128 aa, Homo Sapiens
MMLRVLVGAVLPAMLLAAPPPINKLALFPDKSAWCEAKNITQIVGHSGCEAKSIQNRACLGQCFSYSVPNTFPQSTESLVHCDSCMPAQSMWEIVTLECPGHEEVPRVDKLVEKILHCSCQACGKEPS

SEQ ID NO: 9187 - protein, 181 aa, Homo Sapiens
MMLRVLVGAVLPAMLLAAPPPINKLALFPDKSAWCEAKNITQIVGHSGCEAKSIQNRACLGQCFSYSVPNTFPQSTESLVHCDSCMPAQSMWEIVTLECPGHEEVPRVDKLVEKILHCSCQACGKEPSHEGLSVYVQGEDGPGSQPGTHPHPHPHPHPGGQTPEPEDPPGAPHTEEEGAED

SEQ ID NO: 9188 - protein, 181 aa, Homo Sapiens; identical to SEQ ID NO: 9187

SEQ ID NO: 9189 - protein, 181 aa, Homo Sapiens; identical to SEQ ID NO: 9187

SEQ ID NO: 9190 - protein, 181 aa, Homo Sapiens; identical to SEQ ID NO: 9187

SEQ ID NO: 9191 - protein, 181 aa, Homo Sapiens; identical to SEQ ID NO: 9187

SEQ ID NO: 9192 - protein, 181 aa, Homo Sapiens; identical to SEQ ID NO: 9187

SEQ ID NO: 9193 - protein, 216 aa, Homo Sapiens
MPGNLMSQTSRAVSIWKFPAKLGKTHGHRALEATGMMLRVLVGAVLPAMLLAAPPPINKLALFPDKSAWCEAKNITQIVGHSGCEAKSIQNRACLGQCFSYSVPNTFPQSTESLVHCDSCMPAQSMWEIVTLECPGHEEVPRVDKLVEKILHCSCQACGKEPSHEGLSVYVQGEDGPGSQPGTHPHPHPHPHPGGQTPEPEDPPGAPHTEEEGAED

SEQ ID NO: 9194 - protein, 165 aa, Homo Sapiens
EFILVQADTPSSPSIDQVEPYSSTAQVQFDEPEATGGVPILKYKAEWRAVGEEVWHSKWYDAKEASMEGIVTIVGLKPETTYAVRLAALNGKGLGEISAASEFKTQPVHSPPPPASASSSTPVPLSPPDTTWPLPALATTEPAKNIAQNHCCNMFQAGLHNALMK

SEQ ID NO: 9195 - protein, 133 aa, Homo Sapiens
MLQTKDLIWTLFFLGTAAKPKITYVENQTAMELEEQVTLTCEASGDPIPSITWRTSTRNISSEEKTLDGHMVVRSHARVSSLTLKSIQYTDAGEYICTASNTIGQDSQSMYLEVQYAPKLQGPVAVYTWEGNQ

SEQ ID NO: 9196 - protein, 136 aa, Homo Sapiens [sequence omitted]

SEQ ID NO: 9197 - protein, 858 aa, Homo Sapiens
MLQTKDLIWTLFFLGTAVSLQVDIVPSQGEISVGESKFFLCQVAGDAKDKDISWFSPNGEKLTPNQQRISVVWNDDSSSTLTIYNANIDDAGIYKCVVTGEDGSESEATVNVKIFQKLMFKNAPTPQEFREGEDAVIVCDVVSSLPPTIIWKHKGRDVILKKDVRFIVLSNNYLQIRGIKKTDEGTYRCEGRILARGEINFKDIQVIVNVPPTIQARQNIVNATANLGQSVTLVCDAEGFPEPTMSWTKDGEQIEQEEDDEKYIFSDDSSQLTIKKVDKNDEAEYICIAENKAGEQDATIHLKVFAKPKITYVENQTAMELEEQVTLTCEASGDPIPSITWRTSTRNISSEEKASWTRPEKQETLDGHMVVRSHARVSSLTLKSIQYTDAGEYICTASNTIGQDSQSMYLEVQYAPKLQGPVAVYTWEGNQVNITCEVFAYPSATISWFRDGQLLPSSNYSNIKIYNTPSASYLEVTPDSENDFGNYNCTAVNRIGQESLEFILVQADTPSSPSIDQVEPYSSTAQVQFDEPEATGGVPILKYKAEWRAVGEEVWHSKWYDAKEASMEGIVTIVGLKPETTYAVRLAALNGKGLGEISAASEFKTQPVQGEPSAPKLEGQMGEDGNSIKVNLIKQDDGGSPIRHYLVRYRALSSEWKPEIRLPSGSDHVMLKSLDWNAEYEVYVVAENQQGKSKAAHFVFRTSAQPTAIPANGSPTSGLSTGAIVGILIVIFVLLLVVVDITCYFLNKCGLFMCIAVNLCGKAGPGAKGKDMEEGKAAFSKDESKEPIVEVRTEEERTPNHDGGKHTEPNETTPLTEPEKGPVEAKPECQETETKPAPAEVKTVPNDATQTKENESKA

SEQ ID NO: 9198 - protein, 725 aa, Homo Sapiens
MLQTKDLIWTLFFLGTAVSLQVDIVPSQGEISVGESKFFLCQVAGDAKDKDISWFSPNGEKLTPNQQRISVVWNDDSSSTLTIYNANIDDAGIYKCVVTGEDGSESEATVNVKIFQKLMFKNAPTPQEFREGEDAVIVCDVVSSLPPTIIWKHKGRDVILKKDVRFIVLSNNYLQIRGIKKTDEGTYRCEGRILARGEINFKDIQVIVNVPPTIQARQNIVNATANLGQSVTLVCDAEGFPEPTMSWTKDGEQIEQEEDDEKYIFSDDSSQLTIKKVDKNDEAEYICIAENKAGEQDATIHLKVFAKPKITYVENQTAMELEEQVTLTCEASGDPIPSITWRTSTRNISSEEKTLDGHMVVRSHARVSSLTLKSIQYTDAGEYICTASNTIGQDSQSMYLEVQYAPKLQGPVAVYTWEGNQVNITCEVFAYPSATISWFRDGQLLPSSNYSNIKIYNTPSASYLEVTPDSENDFGNYNCTAVNRIGQESLEFILVQADTPSSPSIDQVEPYSSTAQVQFDEPEATGGVPILKYKAEWRAVGEEVWHSKWYDAKEASMEGIVTIVGLKPETTYAVRLAALNGKGLGEISAASEFKTQPVREPSAPKLEGQMGEDGNSIKVNLIKQDDGGSPIRHYLVRYRALSSEWKPEIRLPSGSDHVMLKSLDWNAEYEVYVVAENQQGKSKAAHFVFRTSAQPTAIPATLGGNSASYTFVSLLFSAVTLLLLC

SEQ ID NO: 9199 - protein, 364 aa, Homo Sapiens
MLQTKDLIWTLFFLGTAVSLQVDIVPSQGEISVGESKFFLCQVAGDAKDKDISWFSPNGEKLTPNQQRISVVWNDDSSSTLTIYNANIDDAGIYKCVVTGEDGSESEATVNVKIFQKLMFKNAPTPQEFREGEDAVIVCDVVSSLPPTIIWKHKGRDVILKKDVRFIVLSNNYLQIRGIKKTDEGTYRCEGRILARGEINFKDIQVIVNVPPTIQARQNIVNATANLGQSVTLVCDAEGFPEPTMSWTKDGEQIEQEEDDEKYIFSDDSSQLTIKKVDKNDEAEYICIAENKAGEQDATIHLKVFAKPKITYVENQTAMELEEQVTLTCEASGDPIPSITWRTSTRNISSEEKASWTRPEKQEV

SEQ ID NO: 9200 - protein, 761 aa, Homo Sapiens
MLQTKDLIWTLFFLGTAVSLQVDIVPSQGEISVGESKFFLCQVAGDAKDKDISWFSPNGEKLTPNQQRISVVWNDDSSSTLTIYNANIDDAGIYKCVVTGEDGSESEATVNVKIFQKLMFKNAPTPQEFREGEDAVIVCDVVSSLPPTIIWKHKGRDVILKKDVRFIVLSNNYLQIRGIKKTDEGTYRCEGRILARGEINFKDIQVIVNVPPTIQARQNIVNATANLGQSVTLVCDAEGFPEPTMSWTKDGEQIEQEEDDEKYIFSDDSSQLTIKKVDKNDEAEYICIAENKAGEQDATIHLKVFAKPKITYVENQTAMELEEQVTLTCEASGDPIPSITWRTSTRNISSEEKTLDGHMVVRSHARVSSLTLKSIQYTDAGEYICTASNTIGQDSQSMYLEVQYAPKLQGPVAVYTWEGNQVNITCEVFAYPSATISWFRDGQLLPSSNYSNIKIYNTPSASYLEVTPDSENDFGNYNCTAVNRIGQESLEFILVQADTPSSPSIDQVEPYSSTAQVQFDEPEATGGVPILKYKAEWRAVGEEVWHSKWYDAKEASMEGIVTIVGLKPETTYAVRLAALNGKGLGEISAASEFKTQPVHSPPPPASASSSTPVPLSPPDTTWPLPALATTEPAKGEPSAPKLEGQMGEDGNSIKVNLIKQDDGGSPIRHYLVRYRALSSEWKPEIRLPSGSDHVMLKSLDWNAEYEVYVVAENQQGKSKAAHFVFRTSAQPTAIPATLGGNSASYTFVSLLFSAVTLLLLC

SEQ ID NO: 9201 - protein, 848 aa, Homo Sapiens [sequence omitted]

SEQ ID NO: 9202 - protein, 761 aa, Homo Sapiens [sequence omitted]

SEQ ID NO: 9203 - protein, 726 aa, Homo Sapiens
MLQTKDLIWTLFFLGTAVSLQVDIVPSQGEISVGESKFFLCQVAGDAKDKDISWFSPNGEKLTPNQQRISVVWNDDSSSTLTIYNANIDDAGIYKCVVTGEDGSESEATVNVKIFQKLMFKNAPTPQEFREGEDAVIVCDVVSSLPPTIIWKHKGRDVILKKDVRFIVLSNNYLQIRGIKKTDEGTYRCEGRILARGEINFKDIQVIVNVPPTIQARQNIVNATANLGQSVTLVCDAEGFPEPTMSWTKDGEQIEQEEDDEKYIFSDDSSQLTIKKVDKNDEAEYICIAENKAGEQDATIHLKVFAKPKITYVENQTAMELEEQVTLTCEASGDPIPSITWRTSTRNISSEEKTLDGHMVVRSHARVSSLTLKSIQYTDAGEYICTASNTIGQDSQSMYLEVQYAPKLQGPVAVYTWEGNQVNITCEVFAYPSATISWFRDGQLLPSSNYSNIKIYNTPSASYLEVTPDSENDFGNYNCTAVNRIGQESLEFILVQADTPSSPSIDQVEPYSSTAQVQFDEPEATGGVPILKYKAEWRAVGEEVWHSKWYDAKEASMEGIVTIVGLKPETTYAVRLAALNGKGLGEISAASEFKTQPVQGEPSAPKLEGQMGEDGNSIKVNLIKQDDGGSPIRHYLVRYRALSSEWKPEIRLPSGSDHVMLKSLDWNAEYEVYVVAENQQGKSKAAHFVFRTSAQPTAIPATLGGNSASYTFVSLLFSAVTLLLLC

SEQ ID NO: 9204 - protein, 884 aa, Homo Sapiens [sequence omitted]

SEQ ID NO: 9205 - protein, 884 aa, Homo Sapiens
MLQTKDLIWTLFFLGTAVSLQVDIVPSQGEISVGESKFFLCQVAGDAKDKDISWFSPNGEKLTPNQQRISVVWNDDSSSTLTIYNANIDDAGIYKCVVTGEDGSESEATVNVKIFQKLMFKNAPTPQEFREGEDAVIVCDVVSSLPPTIIWKHKGRDVILKKDVRFIVLSNNYLQIRGIKKTDEGTYRCEGRILARGEINFKDIQVIVNVPPTIQARQNIVNATANLGQSVTLVCDAEGFPEPTMSWTKDGEQIEQEEDDEKYIFSDDSSQLTIKKVDKNDEAEYICIAENKAGEQDATIHLKVFAKPKITYVENQTAMELEEQVTLTCEASGDPIPSITWRTSTRNISSEEKASWTRPEKQEVHAPWNWQVGRQKGQAGSAGFPGSHETLDGHMVVRSHARVSSLTLKSIQYTDAGEYICTASNTIGQDSQSMYLEVQYAPKLQGPVAVYTWEGNQVNITCEVFAYPSATISWFRDGQLLPSSNYSNIKIYNTPSASYLEVTPDSENDFGNYNCTAVNRIGQESLEFILVQADTPSSPSIDQVEPYSSTAQVQFDEPEATGGVPILKYKAEWRAVGEEVWHSKWYDAKEASMEGIVTIVGLKPETTYAVRLAALNGKGLGEISAASEFKTQPVQGEPSAPKLEGQMGEDGNSIKVNLIKQDDGGSPIRHYLVRYRALSSEWKPEIRLPSGSDHVMLKSLDWNAEYEVYVVAENQQGKSKAAHFVFRTSAQPTAIPANGSPTSGLSTGAIVGILIVIFVLLLVVVDITCYFLNKCGLFMCIAVNLCGKAGPGAKGKDMEEGKAAFSKDESKEPIVEVRTEEERTPNHDGGKHTEPNETTPLTEPEKGPVEAKPECQETETKPAPAEVKTVPNDATQTKENESKA

SEQ ID NO: 9206 - protein, 858 aa, Homo Sapiens [sequence omitted]

SEQ ID NO: 9207 - protein, 848 aa, Homo Sapiens
MLQTKDLIWTLFFLGTAVSLQVDIVPSQGEISVGESKFFLCQVAGDAKDKDISWFSPNGEKLTPNQQRISVVWNDDSSSTLTIYNANIDDAGIYKCVVTGEDGSESEATVNVKIFQKLMFKNAPTPQEFREGEDAVIVCDVVSSLPPTIIWKHKGRDVILKKDVRFIVLSNNYLQIRGIKKTDEGTYRCEGRILARGEINFKDIQVIVNVPPTIQARQNIVNATANLGQSVTLVCDAEGFPEPTMSWTKDGEQIEQEEDDEKYIFSDDSSQLTIKKVDKNDEAEYICIAENKAGEQDATIHLKVFAKPKITYVENQTAMELEEQVTLTCEASGDPIPSITWRTSTRNISSEEKTLDGHMVVRSHARVSSLTLKSIQYTDAGEYICTASNTIGQDSQSMYLEVQYAPKLQGPVAVYTWEGNQVNITCEVFAYPSATISWFRDGQLLPSSNYSNIKIYNTPSASYLEVTPDSENDFGNYNCTAVNRIGQESLEFILVQADTPSSPSIDQVEPYSSTAQVQFDEPEATGGVPILKYKAEWRAVGEEVWHSKWYDAKEASMEGIVTIVGLKPETTYAVRLAALNGKGLGEISAASEFKTQPVQGEPSAPKLEGQMGEDGNSIKVNLIKQDDGGSPIRHYLVRYRALSSEWKPEIRLPSGSDHVMLKSLDWNAEYEVYVVAENQQGKSKAAHFVFRTSAQPTAIPANGSPTSGLSTGAIVGILIVIFVLLLVVVDITCYFLNKCGLFMCIAVNLCGKAGPGAKGKDMEEGKAAFSKDESKEPIVEVRTEEERTPNHDGGKHTEPNETTPLTEPEKGPVEAKPECQETETKPAPAEVKTVPNDATQTKENESKA

SEQ ID NO: 9208 - protein, 229 aa, Homo Sapiens
TISWFRDGQLLPSSNYSNIKIYNTPSASYLEVTPDSENDFGNYNCTAVNRIGQESLEFILVQADTPSSPSIDQVEPYSSTAQVQFDEPEATGGVPILKYKAEWRAVGEEVWHSKWYDAKEASMEGIVTIVGLKPETTYAVRLAALNGKGLGEISAASEFKTQPVHSPPPREPSAPKLEGQMGEDGNSIKVNLIKQDDGGSPIRHYLVRYRALSSEWKPEIRLPSGSDHV

SEQ ID NO: 9209 - protein, 357 aa, Homo Sapiens
  misc_feature (1)..(1): Xaa can be any naturally occurring amino acid
XFILVQADTPSSPSIDQVEPYSSTAQVQFDEPEATGGVPILKYKAEWRAVGEEVWHSKWYDAKEASMEGIVTIVGLKPETTYAVRLAALNGKGLGEISAASEFKTQPVREPSAPKLEGQMGEDGNSIKVNLIKQDDGGSPIRHYLVRYRALSSEWKPEIRLPSGSDHVMLKSLDWNAEYEVYVVAENQQGKSKAAHFVFRTSAQPTAIPANGSPTSGLSTGAIVGILIVIFVLLLVVVDITCYFLNKCGLFMCIAVNLCGKAGPGAKGKDMEEGKAAFSKDESKEPIVEVRTEEERTPNHDGGKHTEPNETTPLTEPEKGPVEAKPECQETETKPAPAEVKTVPNDATQTKENESKA

SEQ ID NO: 9210 - protein, 84 aa, Homo Sapiens
  misc_feature (1)..(1): Xaa can be any naturally occurring amino acid
XQDDGGSPIRHYLVRYRALSSEWKPEIRLPSGSDHVMLKSLDWNAEYEVYVVAENQQGKSKAAHFVFRTSAQPTAIPVTLLLLC

SEQ ID NO: 9211 - protein, 468 aa, Homo Sapiens
  misc_feature (1)..(1): Xaa can be any naturally occurring amino acid
XSGSDHVMLKSLDWNAEYEVYVVAENQQGKSKAAHFVFRTSAQPTAIPANGSPTSGLSTGAIVGILIVIFVLLLVVVDITCYFLNKCGLFMCIAVNLCGKAGPGAKGKDMEEGKAAFSKDESKEPIVEVRTEEERTPNHDGGKHTEPNETTPLTEPELPADTTATVEDMLPSVTTVTTNSDTITETFATAQNSPTSETTTLTSSIAPPATATPDSNSVPAGQATPSKGPSASAPSPAPASAPKVAPLVDLSDTPTSTPAASNLSSSVLANQGAVLSPSAPAGVGEASKAPPASKPTPAPVPTPTGAASPLAAAAAPATEAPQAKQEAPSTKGPDPEPTQPGAAKSPAEAATALASPKSEAASVSTTNPSQGEDFKMDEGNFKTPDIDLAKDVFAALGSPAPAAGASGQAPELAPSTADSSVSPAPAKTEKGPVEAKPECQETETKPAPAEVKTVPNDATQTKENESKA

SEQ ID NO: 9212 - protein, 372 aa, Homo Sapiens
  misc_feature (1)..(1): Xaa can be any naturally occurring amino acid
XTPSSPSIDQVEPYSSTAQVQFDEPEATGGVPILKYKAEWRAVGEEVWHSKWYDAKEASMEGIVTIVGLKPETTYAVRLAALNGKGLGEISAASEFKTQPVHSPPPPASASSSTPVPLSPPDKGEPSAPKLEGQMGEDGNSIKVNLIKQDDGGSPIRHYLVRYRALSSEWKPEIRLPSGSDHVMLKSLDWNAEYEVYVVAENQQGKSKAAHFVFRTSAQPTAIPANGSPTSGLSTGAIVGILIVIFVLLLVVVDITCYFLNKCGLFMCIAVNLCGKAGPGAKGKDMEEGKAAFSKDESKEPIVEVRTEEERTPNHDGGKHTEPNETTPLTEPEKGPVEAKPECQETETKPAPAEVKTVPNDATQTKENESKA

SEQ ID NO: 9213 - protein, 305 aa, Homo Sapiens
YNTPSASYLEVTPDSENDFGNYNCTAVNRIGQESLEFILVQADTPSSPSIDQVEPYSSTAQVQFDEPEATGGVPILKYKAEWRAVGEEVWHSKWYDAKEASMEGIVTIVGLKPETTYAVRLAALNGKGLGEISAASEFKTQPVHSPPPPASASSSTPVPLSPPDTTWPLPALATTEPAREPSAPKLEGQMGEDGNSIKVNLIKQDDGGSPIRHYLVRYRALSSEWKPEIRLPSGSDHVMLKSLDWNAEYEVYVVAENQQGKSKAAHFVFRTSAQPTAIPATLGGNSASYTFVSLLFSAVTLLLLC

SEQ ID NO: 9214 - protein, 1321 aa, Homo Sapiens
MGAPFVWALGLLMLQMLLFVAGEQGTQDITDASERGLHMQKLGSGSVQAALAELVALPCLFTLQPRPSAARDAPRIKWTKVRTASGQRQDLPILVAKDNVVRVAKSWQGRVSLPSYPRRRANATLLLGPLRASDSGLYRCQVVRGIEDEQDLVPLEVTGVVFHYRSARDRYALTFAEAQEACRLSSAIIAAPRHLQAAFEDGFDNCDAGWLSDRTVRYPITQSRPGCYGDRSSLPGVRSYGRRNPQELYDVYCFARELGGEVFYVGPARRLTLAGARAQCRRQGAALASVGQLHLAWHEGLDQCDPGWLADGSVRYPIQTPRRRCGGPAPGVRTVYRFANRTGFPSPAERFDAYCFRAHHPTSQHGDLETPSSGDEGEILSAEGPPVRELEPTLEEEEVVTPDFQEPLVSSGEEETLILEEKQESQQTLSPTPGDPMLASWPTGEVWLSTVAPSPSDMGAGTAASSHTEVAPTDPMPRRRGRFKGLNGRYFQQQEPEPGLQGGMEASAQPPTSEAAVNQMEPPLAMAVTEMLGSGQSRSPWADLTNEVDMPGAGSAGGKSSPEPWLWPPTMVPPSISGHSRAPVLELEKAEGPSARPATPDLFWSPLEATVSAPSPAPWEAFPVATSPDLPMMAMLRGPKEWMLPHPTPISTEANRVEAHGEATATAPPSPAAETKVYSLPLSLTPTGQGGEAMPTTPESPRADFRETGETSPAQVNKAEHSSSSPWPSVNRNVAVGFVPTETATEPTGLRGIPGSESGVFDTAESPTSGLQATVDEVQDPWPSVYSKGLDASSPSAPLGSPGVFLVPKVTPNLEPWVATDEGPTVNPMDSTVTPAPSDASGIWEPGSQVFEEAESTTLSPQVALDTSIVTPLTTLEQGDKVGVPAMSTLGSSSSQPHPEPEDQVETQGTSGASVPPHQSSPLGKPAVPPGTPTAASVGESASVSSGEPTVPWDPSSTLLPVTLGIEDFELEVLAGSPGVESFWEEVASGEEPALPGTPMNAGAEEVHSDPCENNPCLHGGTCNANGTMYGCSCDQGFAGENCEIDIDDCLCSPCENGGTCIDEVNGFVCLCLPSYGGSFCEKDTEGCDRGWHKFQGHCYRYFAHRRAWEDAEKDCRRRSGHLTSVHSPEEHSFINSFGHENTWIGLNDRIVERDFQWTDNTGLQFENWRENQPDNFFAGGEDCVVMVAHESGRWNDVPCNYNLPYVCKKGTVLCGPPPAVENASLIGARKAKYNVHATVRYQCNEGFAQHHVATIRCRSNGKWDRPQIVCTKPRRSHRMRRHHHHHQHHHQHHHHKSRKERRKHKKHPTEDWEKDEGNFC

SEQ ID NO: 9215 - protein, 175 aa, Homo Sapiens
  misc_feature (1)..(1): Xaa can be any naturally occurring amino acid
XGCDRGWHKFQGHCYRYFAHRRAWEDAEKDCRRRSGHLTSVHSPEEHSFINSFGHENTWIGLNDRIVERDFQWTDNTGLQFENWRENQPDNFFAGGEDCVVMVAHESGRWNDVPCNYNLPYVCKKGTARRSHRMRRHHHHHQHHHQHHHHKSRKERRKHKKHPTEDWEKDEGNFC

SEQ ID NO: 9216 - protein, 99 aa, Homo Sapiens
MVLRRLLAALLHSPQLVERLSESRPIRRAAQLTAFALLQAQLRGQDAARRLQDLAAGPVGSLCRRAERFRDAFTQELRRGLRGRSGPPPGSQRGPGANI

SEQ ID NO: 9217 - protein, 709 aa, Homo Sapiens
MATAGGGSGADPGSRGLLRLLSFCVLLAGLCRGNSVERKIYIPLNKTAPCVRLLNATHQIGCQSSISGDTGVIHVVEKEEDLQWVLTDGPNPPYMVLLESKHFTRDLMEKLKGRTSRIAGLAVSLTKPSPASGFSPSVQCPNDGFGVYSNSYGPEFAHCREIQWNSLGNGLAYEDFSFPIFLLEDENETKVIKQCYQDHNLSQNGSAPTFPLCAMQLFSHMHAVISTATCMRRSSIQSTFSINPEIVCDPLSDYNVWSMLKPINTTGTLKPDDRVVVAATRLDSRSFFWNVAPGAESAVASFVTQLAAAEALQKAPDVTTLPRNVMFVFFQGETFDYIGSSRMVYDMEKGKFPVQLENVDSFVELGQVALRTSLELWMHTDPVSQKNESVRNQVEDLLATLEKSGAGVPAVILRRPNQSQPLPPSSLQRFLRARNISGVVLADHSGAFHNKYYQSIYDTAENINVSYPEWLSPEEDLNFVTDTAKALADVATVLGRALYELAGGTNFSDTVQADPQTVTRLLYGFLIKANNSWFQSILRQDLRSYLGDGPLQHYIAVSSPTNTTYVVQYALANLTGTVVNLTREQCQDPSKVPSENKDLYEYSWVQGPLHSNETDRLPRCVRSTARLARALSPAFELSQWSSTEYSTWTESRWKDIRARIFLIASKELELITLTVGFGILIFSLIVTYCINAKADVLFIAPREPGAVSY

SEQ ID NO: 9218 - protein, 255 aa, Homo Sapiens
MATAGGGSGADPGSRGLLRLLSFCVLLAGLCRGNSVERKIYIPLNKTAPCVRLLNATHQIGCQSSISGDTGVIHVVEKEEDLQWVLTDGPNPPYMVLLESKHFTRDLMEKLKGRTSRIAGLAVSLTKPSPASGFSPSVQCPNDGFGVYSNSYGPEFAHCREIQWNSLGNGLAYEDFSFPIFLLEDENETKVIKQETFDYIGSSRMVYDMEKGKFPVQLENVDSFVELGQVALRTSLELWMHTDPVSQKNESVRNQ

SEQ ID NO: 9219 - protein, 134 aa, Homo Sapiens
MATAGGGSGADPGSRGLLRLLSFCVLLAGLCRGNSVERKIYIPLNKTAPCVRLLNATHQIGCQSSISGDTGVIHVVEKEEDLQWVLTDGPNPPYMVLLESKHFTRQNVRLSDTFLCSFMEFLSYSRDLMEKLKG

SEQ ID NO: 9220 - protein, 232 aa, Homo Sapiens
MATAGGGSGADPGSRGLLRLLSFCVLLAGLFLDFEPDPLPLCPDVSFFPQPQPPTPQSKGTGLCRGNSVERKIYIPLNKTAPCVRLLNATHQIGCQSSISGDTGVIHVVEKEEDLQWVLTDGPNPPYMVLLESKHFTRDLMEKLKGRTSRIAGLAVSLTKPSPASGFSPSVQCPNDGFGVYSNSYGPEFAHCREIQWNSLGNGLAYEDFSFPIFLLEDENETKVIKQCYQDH

SEQ ID NO: 9221 - protein, 71 aa, Homo Sapiens
MATAGGGSGADPGSRGLLRLLSFCVLLAGLFLDFEPDPLPLCPDVSFFPQPQPPTPQSKGTGVKVSFLPRV

SEQ ID NO: 9222 - protein, 69 aa, Homo Sapiens
MATAGGGSGADPGSRGLLRLLSFCVLLAVSLSMALHGLCNNPLRHIAGCHVEHVSVTISVCPRNQKNGL

SEQ ID NO: 9223 - protein, 219 aa, Homo Sapiens
RSSIQSTFSINPEIVCDPLSDYNVWSMLKPINTTGTLKPDDRVVVAATRLAAAEALQKAPDVTTLPRNVMFVFFQGETFDYIGSSRMVYDMEKGKFPVQLENVDSFVELGQVALRTSLELWMHTDPVSQKNESVRNQVEDLLATLEKSGAGVPAVILRRPNQSQPLPPSSLQRFLRARNISGVVLADHSGAFHNKYYQSIYDTAENINVSYPEWLSPEE

SEQ ID NO: 9224 - protein, 69 aa, Homo Sapiens
  misc_feature (1)..(1): Xaa can be any naturally occurring amino acid
XNDGFGVYSNSYGPEFAHCREIQWNSLGNGLAYEDFSFPIFLLEDENETKVIKQKSSVTPCLITMCGAC

SEQ ID NO: 9225 - protein, 275 aa, Homo Sapiens
  misc_feature (1)..(1): Xaa can be any naturally occurring amino acid
XNVAPGAESAVASFVTQLAAAEALQKAPDVTTLPRNVMFVFFQGVALRTSLELWMHTDPVSQKNESVRNQVEDLLATLEKSGAGVPAVILRRPNQSQPLPPSSLQRFLRARNISGVVLADHSGAFHNKYYQSIYDTAENINVSYPEWLSPEEDLNFVTDTAKALADVATVLGRALYELAGGTNFSDTVQADPQTVTRLLYGFLIKANNSWFQSILRQDLRSYLGDGPLQHYIAVSSPTNTTYVVQYALANLTGTVVNLTREQCQDPSKVPSENKD

SEQ ID NO: 9226 - protein, 317 aa, Homo Sapiens
  misc_feature (1)..(1): Xaa can be any naturally occurring amino acid
XVYSNSYGPEFAHCREIQWNSLGNGLAYEDFSFPIFLLEDENETKVIKQLFSHMHAVISTATCMRRSSIQSTFSINPEIVCDPLSDYNVWSMLKPINTTGTLKPDDRVVVAATRLDSRSFFWNVAPGAESAVASFVTQLAAAEALQKAPDVTTLPRNVMFVFFQGETFDYIGSSRMVYDMEKGKFPVQLENVDSFVELGQVALRTSLELWMHTDPVSQKNESVRNQVEDLLATLEKSGAGVPAVILRRPNQSQPLPPSSLQRFLRARNISGVVLADHSGAFHNKYYQSIYDTAENINVSYPEWLSPEEDLNFVTDTA

SEQ ID NO: 9227 - protein, 116 aa, Homo Sapiens
MVLLHWCLLWLLFPLSSRTQKLPTRDEELFQMQIRDKAFFHDSSVIPDGAEISSYLFRDTPKRYFFVVEEDNTPLSVTVTPCDAPLEWKLSLQELPEDRSGEGSGDLEPLEQQKQQ

SEQ ID NO: 9228 - protein, 145 aa, Homo Sapiens
MVLLHWCLLWLLFPLSSRTQKLPTRDEELFQMQIRDKAFFHDSSVIPDGAEISSYLFRDTPKRYFFVVEEDNTPLSVTVTPCDAPLEWKLSLQELPEDRSGEGSGDLEPLEQQKQQIINEEGTELFSYKGNDVEYFISSSSPSGL

SEQ ID NO: 9229 - protein, 568 aa, Homo Sapiens
MVLLHWCLLWLLFPLSSRTQKLPTRDEELFQMQIRDKAFFHDSSVIPDGAEISSYLFRDTPKRYFFVVEEDNTPLSVTVTPCDAPLEWKLSLQELPEDRSGEGSGDLEPLEQQKQQIINEEGTELFSYKGNDVEYFISSSSPSGLYQLDLLSTEKDTHFKVYATTTPESDQPYPELPYDPRVDVTSLGRTTVTLAWKPSPTASLLKQPIQYCVVINKEHNFKSLCAVEAKLSADDAFMMAPKPGLDFSPFDFAHFGFPSDNSGKERSFQAKPSPKLGRHVYSRPKVDIQKICIGNKNIFTVSDLKPDTQYYFDVFVVNINSNMSTAYVGTFARTKEEAKQKTVELKDGKITDVFVKRKGAKFLRFAPVSSHQKVTFFIHSCLDAVQIQVRRDGKLLLSQNVEGIQQFQLRGKPKAKYLVRLKGNKKGASMLKILATTRPTKQSFPSLPEDTRIKAFDKLRTCSSATVAWLGTQERNKFCIYKKEVDDNYNEDQKKREQNQCLGPDIRKKSEKVLCKYFHSQNLQKAVTTETIKGLQPGKSYLLDVYVIGHGGHSVKYQSKVVKTRKFC

SEQ ID NO: 9230 - protein, 133 aa, Homo Sapiens
MRKHVLAASFSMLSLLVIMGDTDSKTDSSFIMDSDPRRCMRHHYVDSISHPLYKCSSKMVLLARCEGHCSQASRSEPLVSFSTVLKQPFRSSCHCCRPQTSKLKALRLRCSGGMRLTATYRYILSCHCEECNS

SEQ ID NO: 9231 - protein, 133 aa, Homo Sapiens; identical to SEQ ID NO: 9230

SEQ ID NO: 9232 - protein, 133 aa, Homo Sapiens; identical to SEQ ID NO: 9230

SEQ ID NO: 9233 - protein, 129 aa, Homo Sapiens
DIENAYKKTFLPEMSEKCEVLQYSAREAQDSKKVVEDIEYLKFDKGPWLKQDNRTLYHLRLLVQDKFEVLNYTSIPIFLPEVTIGAHQTDRVLHQFREVPADQEHRWVSLLSSPLGSLFSEWSVCGEDS

SEQ ID NO: 9234 - protein, 138 aa, Homo Sapiens
ENAYKKTFLPEMSEKCEVLQYSAREAQDSKKVVEDIEYLKFDKGPWLKQDNRTLYHLRLLVQDKFEVLNYTSIPIFLPEVTIGAHQTDRVLHQFREFSLFNGRKPDAVKILCSLLEADRSLLEADRSLLEADRVQDSC

SEQ ID NO: 9235 - protein, 94 aa, Homo Sapiens
MALRLLKLAATSASARVVAAGAQRVASSTFLKRGFIIQTVPQEMGSPSPPTIMATVVWRNFTMIREAMMATVTACSPGCTAVACCSTQMPWSTC

SEQ ID NO: 9236 - protein, 429 aa, Homo Sapiens
MALRLLKLAATSASARVVAAGAQRVRGIHSSVQCKLRYGMWHFLLGDKASKRLTERSRVITVDGNICTGKGKLAKEIAEKLGFKHFPEAGIHYPDSTTGDGKPLATDYNGNCSLEKFYDDPRSNDGNSYRLQSWLYSSRLLQYSDALEHLLTTGQGVVLERSIFSDFVFLEAMYNQGFIRKQCESALQTHFWTGVAGASGKLESGSSEEVLLINERGGRSKPGVDHYNEVKSVTICDYLPPHLVIYIDVPVPEPHEMKITSAYLQDIENAYKKTFLPEMSEKCEVLQYSAREAQDSKKVVEDIEYLKFDKGPWLKQDNRTLYHLRLLVQDKFEVLNYTSIPIFLPEVTIGAHQTDRVLHQFRERLDWTVCFGEESTEVKHQGHLLSVQPGTVALTVGSWLRSCLLGLHWKLLFLFPESPMHTTAFMFLC

SEQ ID NO: 9237 - protein, 201 aa, Homo Sapiens
MALRLLKLAATSASARVVAAGAQRVRGIHSSVQCKLRYGMWHFLLGDKASKRLTERSRVITVDGNICTGKGKLAKEIAEKLGFKHFPEAGIHYPDSTTGDGKPLATDYNGNCSLEKFYDDPRSNDGNSYRLQSWLYSSRLLQYSDALEHLLTTGQGVVLERSIFSDFVFLEAMYNQGFIRKQCESALQTHFWVCGATLQGL

SEQ ID NO: 9238 - protein, 355 aa, Homo Sapiens
MALRLLKLAATSASARVVAAGAQRVRGIHSSVQCKLRYGMWHFLLGDKASKRLTERSRVITVDGNICTGKGKLAKEIAEKLGFKHFPEAGIHYPDSTTGDGKPLATDYNGNCSLEKFYDDPRSNDGNSYRLQSWLYSSRLLQYSDALEHLLTTGQGVVLERSIFSDFVFLEAMYNQGFIRKQCVDHYNEVKSVTICDYLPPHLVIYIDVPVPEVQRRIQKKGDPHEMKITSAYLQDIENAYKKTFLPEMSEKCEVLQYSAREAQDSKKVVEDIEYLKFDKGPWLKQDNRTLYHLRLLVQDKFEVLNYTSIPIFLPEVTIGAHQTDRVLHQFRELPGRKYSPGYNTEVGDKWIWLK

SEQ ID NO: 9239 - protein, 390 aa, Homo Sapiens
MALRLLKLAATSASARVVAAGAQRVRGIHSSVQCKLRYGMWHFLLGDKASKRLTERSRVITVDGNICTGKGKLAKEIAEKLGFKHFPEAGIHYPDSTTGDGKPLATDYNGNCSLEKFYDDPRSNDGNSYRLQSWLYSSRLLQYSDALEHLLTTGQGVVLERSIFSDFVFLEAMYNQGFIRKQCVDHYNEVKSVTICDYLPPHLVIYIDVPVPEVQRRIQKKGDPHEMKITSAYLQDIENAYKKTFLPEMSEKCEVLQYSAREAQDSKKVVEDIEYLKFDKGPWLKQDNRTLYHLRLLVQDKFEVLNYTSIPIFLPEVTIGAHQTDRVLHQFRELGIPYPQRAVQSTREGPEVLLTGLWRWEDLLIGLQLPGRKYSPGYNTEVGDKWIWLK

SEQ ID NO: 9240 - protein, 245 aa, Homo Sapiens [sequence omitted]

SEQ ID NO: 9241 - protein, 355 aa, Homo Sapiens
MALRLLKLAATSASARVVARAPSAWRGIHSSVQCKLRYGMWHFLLGDKASKRLTERSRVITVDGNICTGKGKLAKEIAEKLGFKHFPEAGIHYPDSTTGDGKPLATDYNGNCSLEKFYDDPRSNDGNSYRLQSWLYSSRLLQYSDALEHLLTTGQGVVLERSIFSDFVFLEAMYNQGFIRKQCVDHYNEVKSVTICDYLPPHLVIYIDVPVPEVQRRIQKKGDPHEMKITSAYLQDIENAYKKTFLPEMSEKCEVLQYSAREAQDSKKVVEDIEYLKFDKGPWLKQDNRTLYHLRLLVQDKFEVLNYTSIPIFLPEVTIGAHQTDRVLHQFRELPGRKYSPGYNTEVGDKWIWLK

SEQ ID NO: 9242 - protein, 133 aa, Homo Sapiens
  misc_feature (1)..(1): Xaa can be any naturally occurring amino acid
XSAYLQDIENAYKKTFLPEMSEKCEVLQYSAREAQDSKKVVEDIEYLKFDKGPWLKQDNRTLYHLRLLVQDKFEVLNYTSIPIFLPEVTIGAHQTDRVLHQFREVFQESEAKRLDVEEVCWKKTPLKDRGEEV

SEQ ID NO: 9243 - protein, 100 aa, Homo Sapiens
GFRLLRWQLCLAGPLALASDLGASSLVAFRRLLGNSIFPAPVRHSGDHGKRLFVIRPSRFYDRRFLKLLRFYIALTGIPVAIFITLVNVFIASHIKMDCP

SEQ ID NO: 9244 - protein, 56 aa, Homo Sapiens
IPVAIFITLVNVFIGQAELAEIPEGYVPEHWEYYKGKGAGSAKIDACERRWTLVLL

SEQ ID NO: 9245 - protein, 177 aa, Homo Sapiens
MAAMSLLRRVSVTAVAALSGRPLGTRLGFGGFLTRGFPKAAAPGNHHSAVFMILTTLFLIFYIALTGIPVAIFITLVNVFIGQAELAEIPEGYVPEHWEYYKHPISRWIARNFYDSPEKIYERTMAVLQIEAEKAELRVKELEVRKLMHVRGDGPWYYYETIDKELIDHSPKATPDN

SEQ ID NO: 9246 - protein, 135 aa, Homo Sapiens
MAAMSLLRRVSVTAVAALSGRPLGTRLGFGGFLTRGFPKAAAPVRHSGDHGKRLFVIRPSRFYDRRFLKLLRFYIALTGIPVAIFITLVNVFIGQAELAEIPEGYVPEHWEYYKGKGAGSAKIDACERRWTLVLL

SEQ ID NO: 9247 - protein, 189 aa, Homo Sapiens
MAAMSLLRRVSVTAVAALSGRPLGTRLGFGGFLTRGFPKAAAPVRHSGDHGKRLFVIRPSRFYDRRFLKLLRFYIALTGIPVAIFITLVNVFIGQAELAEIPEGYVPEHWEYYKHPISRWIARNFYDSPEKIYERTMAVLQIEAEKAELRVKELEVRKLMHVRGDGPWYYYETIDKELIDHSPKATPDN

SEQ ID NO: 9248 - protein, 66 aa, Homo Sapiens
MAAMSLLRRVSVTAVAALSGRPLGTRLGFGGFLTRGFPKAAEILHCIDWDSSSNFHNSGECIHWSS

SEQ ID NO: 9249 - protein, 42 aa, Homo Sapiens
MAAMSLLRRVSVTAVAALSGRPLGTRLGFGGFLTRGFPKAAG

SEQ ID NO: 9250 - protein, 137 aa, Homo Sapiens
MAAMSLLRRVSVTAVAALSGRPLGTRLGFGGFLTRGFPKAAGQAELAEIPEGYVPEHWEYYKHPISRWIARNFYDSPEKIYERTMAVLQIEAEKAELRVKELEVRKLMHVRGDGPWYYYETIDKELIDHSPKATPDN

SEQ ID NO: 9251 - protein, 206 aa, Homo Sapiens
  misc_feature (1)..(1): Xaa can be any naturally occurring amino acid
XSLLRRVSVTAVAALSGRPLGTRLGFGGFLTRGFPKAAAPVRHSGDHGKRLFVIRPSRFYDRRFLKLLALYEQSRGLENGRLSGPSATRFYIALTGIPVAIFITLVNVFIGQAELAEIPEGYVPEHWEYYKHPISRWIARNFYDSPEKIYERTMAVLQIEAEKAELRVKELEVRKLMHVRGDGPWYYYETIDKELIDHSPKATPDN

SEQ ID NO: 9252 - protein, 40 aa, Homo Sapiens
LTTPMLLRALAQAARAGPPGGRSLHSSAVAATYSEYLGGL

SEQ ID NO: 9253 - protein, 110 aa, Homo Sapiens
MRCLTTPMLLRALAQAARAGPPGGRSLHSSAVAATYKYVNMQDPEMDMKSVTDRAARTLLWTELFRGLGMTLSYLFREPATINYPFEKGPLSPRFRGEHALRRYPSGEER

SEQ ID NO: 9254 - protein, 124 aa, Homo Sapiens
MRCLTTPMLLRALAQAARAGPPGGRSLHSSAVAATYKYVNMQDPEMDMKSVTDRAARTLLWTELFRGLGMTLSYLFREPATINYPFEKGPLSPRFRGEHALRRYPSGEERCIACKLCEAICPAQ

SEQ ID NO: 9255 - protein, 184 aa, Homo Sapiens
MRCLTTPMLLRALAQAARAGPPGGRSLHSSAVAATYKYVNMQDPEMDMKSVTDRAARTLLWTELFRGLGMTLSYLFREPATINYPFEKGPLSPRFRGEHALRRYPSGEERCIACKLCEAICPAQAITIEAEPRADGSRRTTRYDIDMTKCIYCGFCQEACPVDAIVEGPNFEFSTETHEELLYN

SEQ ID NO: 9256 - protein, 210 aa, Homo Sapiens
MRCLTTPMLLRALAQAARAGPPGGRSLHSSAVAATYKYVNMQDPEMDMKSVTDRAARTLLWTELFRGLGMTLSYLFREPATINYPFEKGPLSPRFRGEHALRRYPSGEERCIACKLCEAICPAQAITIEAEPRADGSRRTTRYDIDMTKCIYCGFCQEACPVDAIVEGPNFEFSTETHEELLYNKEKLLNNGDKWEAEIAANIQADYLYR

SEQ ID NO: 9257 - protein, 43 aa, Homo Sapiens
MRCLTTPMLLRALAQAARAGPPGGRSLHSSAVAATYSEYLGGL

SEQ ID NO: 9258 - protein, 70 aa, Homo Sapiens
MRRPLCATGLVRVGDHWEDALPDHAYAAAGPGPGCTCRTSWWPEPPQQCSGSHLQVCEHAGSRDGHEVSD

SEQ ID NO: 9259 - protein, 138 aa, Homo Sapiens
MRRPLCATGLVRVGDHWEEYVNMQDPEMDMKSVTDRAARTLLWTELFRGLGMTLSYLFREPATINYPFEKGPLSPRFRGEHALRRYPSGEERCIACKLCEAICPAQAITIEAEPRADGSRRTTRYDIDMTKCIYCGFC

SEQ ID NO: 9260 - protein, 64 aa, Homo Sapiens
MTKCIYCGFCQEACPVDAIVEGPNFEFSTETHEELLYNKEKLLNNGDKWEAEIAANIQADYLYR

SEQ ID NO: 9261 - protein, 93 aa, Homo Sapiens
  misc_feature (1)..(1): Xaa can be any naturally occurring amino acid
XEPATINYPFEKGPLSPRFRGEHALRRYPSGEERCIACKLCEAICPAQGETLRAAGATLNKAVNSPLVRGGSWQMTPAADKQARQAGHGGSRL

SEQ ID NO: 9262 - protein, 127 aa, Homo Sapiens
CPTTVANVETVAVSPTICRRGGTWFAGFGRERNSGTKLFNISGHVNHPCTVEEEMSVPLKELIEKHAGGVTGGWDNLLAVIPGGSSTPLIPKSVCETVLMDFDALVQAQTGLGTAAVIVMDRSVWTG

SEQ ID NO: 9263 - protein, 133 aa, Homo Sapiens
EAYEAGLIGKNACGSGYDFDVFVVRGAGAYICGEETALIESIEGKQGKPRLKPPFPADVGVFGCPTTVANVETVAVSPTICRRGGTWFAGFGRERNSGTKLFNISGHVNHPCTVEEEMSVPLKELIEKHAVCV

SEQ ID NO: 9264 - protein, 75 aa, Homo Sapiens
MGIPSPSAAPKKTSFGSLKDEDRIFTNLYGRHDWRLKGSLSRGDWYKTKEILLKGPDWILGEIKTSGLRGRGGAG

SEQ ID NO: 9265 - protein, 144 aa, Homo Sapiens
MKTGFSPTCTAAMTGGSLSRGDWYKTKEILLKGPDWILGEIKTSGLRGRGGAGFPTGLKWSFMNKPSDGRPKYLVVNADEGEPGTCKDREILRHDPHKLLEGCLVGGRAMGARAAYIYIRGEFYNEASNLQVAIREAYEAGLIG

SEQ ID NO: 9266 - protein, 455 aa, Homo Sapiens
MLATRRLLGWSLPARTAPKKTSFGSLKDEDRIFTNLYGRHDWRLKGSLSRGDWYKTKEILLKGPDWILGEIKTSGLRGRGGAGFPTGLKWSFMNKPSDGRPKYLVVNADEGEPGTCKDREILRHDPHKLLEGCLVGGRAMGARAAYIYIRGEFYNEASNLQVAIREAYEAGLIGKNACGSGYDFDVFVVRGAGAYICGEETALIESIEGKQGKPRLKPPFPADVGVFGCPTTVANVETVAVSPTICRRGGTWFAGFGRERNSGTKLFNISGHVNHPCTVEEEMSVPLKELIEKHAGGVTGGWDNLLAVIPGGSSTPLIPKSVCETVLMDFDALVQAQTGLGTAAVIVMDRSTDIVKAIARLIEFYKHESCGQCTPCREGVDWMNKVMARFVRGDARPAEIDSLWEISKQIEGHTICALGDGAAWPVQGLIRHFRPELEERMQRFAQQHQARQAAS

SEQ ID NO: 9267 - protein, 457 aa, Homo Sapiens
MLATRRLLGWSLPARVSTAPKKTSFGSLKDEDRIFTNLYGRHDWRLKGSLSRGDWYKTKEILLKGPDWILGEIKTSGLRGRGGAGFPTGLKWSFMNKPSDGRPKYLVVNADEGEPGTCKDREILRHDPHKLLEGCLVGGRAMGARAAYIYIRGEFYNEASNLQVAIREAYEAGLIGKNACGSGYDFDVFVVRGAGAYICGEETALIESIEGKQGKPRLKPPFPADVGVFGCPTTVANVETVAVSPTICRRGGTWFAGFGRERNSGTKLFNISGHVNHPCTVEEEMSVPLKELIEKHAGGVTGGWDNLLAVIPGGSSTPLIPKSVCETVLMDFDALVQAQTGLGTAAVIVMDRSTDIVKAIARLIEFYKHESCGQCTPCREGVDWMNKVMARFVRGDARPAEIDSLWEISKQIEGHTICALGDGAAWPVQGLIRHFRPELEERMQRFAQQHQARQAAS

SEQ ID NO: 9268 - protein, 178 aa, Homo Sapiens
MLATRRLLGWSLPARVSVRFSGDTDEDRIFTNLYGRHDWRLKGSLSRGDWYKTKEILLKGPDWILGEIKTSGLRGRGGAGFPTGLKWSFMNKPSDGRPKYLVVNADEGEPGTCKDREILRHDPHKLLEGCLVGGRAMGARAAYIYIRGEFYNEASNLQVAIREAYEAGLIGKNACGSG

SEQ ID NO: 9269 - protein, 43 aa, Homo Sapiens
MLATRRLLGWSLPARVSVRFSGDTSSAWRKFCRQHPRKPHLAR

SEQ ID NO: 9270 - protein, 178 aa, Homo Sapiens
MLATRRLLGWSLPARVSVRFSGDTTAPKKTSFGSLKDEDRIFTNLLKGSLSRGDWYKTKEILLKGPDWILGEIKTSGLRGRGGAGFPTGLKWSFMNKPSDGRPKYLVVNADEGEPGTCKDREILRHDPHKLLEGCLVGGRAMGARAAYIYIRGEFYNEASNLQVAIREAYEAGLIGKN

SEQ ID NO: 9271 - protein, 464 aa, Homo Sapiens
MLATRRLLGWSLPARVSVRFSGDTTAPKKTSFGSLKDEDRIFTNLYGRHDWRLKGSLSRGDWYKTKEILLKGPDWILGEIKTSGLRGRGGAGFPTGLKWSFMNKPSDGRPKYLVVNADEGEPGTCKDREILRHDPHKLLEGCLVGGRAMGARAAYIYIRGEFYNEASNLQVAIREAYEAGLIGKNACGSGYDFDVFVVRGAGAYICGEETALIESIEGKQGKPRLKPPFPADVGVFGCPTTVANVETVAVSPTICRRGGTWFAGFGRERNSGTKLFNISGHVNHPCTVEEEMSVPLKELIEKHAGGVTGGWDNLLAVIPGGSSTPLIPKSVCETVLMDFDALVQAQTGLGTAAVIVMDRSTDIVKAIARLIEFYKHESCGQCTPCREGVDWMNKVMARFVRGDARPAEIDSLWEISKQIEGHTICALGDGAAWPVQGLIRHFRPELEERMQRFAQQHQARQAAS

SEQ ID NO: 9272 - protein, 53 aa, Homo Sapiens
MNKPSDGRPKYLVVNADEGEPGTCKDREILRHDPHKLLEGCLVGGRAMGARAA

SEQ ID NO: 9273 - protein, 96 aa, Homo Sapiens
MNKPSDGRPKYLVVNADEGEPGTCKDREILRHDPHKLLEGCLVGGRAMGARAAYIYIRGEFYNEASNLQVAIREAYEAGLIGKNACGSGYDFDVFV

SEQ ID NO: 9274 - protein, 136 aa, Homo Sapiens
MNKPSDGRPKYLVVNADEGEPGTCKDREILRHDPHKLLEGCLVGGRAMGARAAYIYIRGEFYNEASNLQVAIREAYEAGLIGKNACGSGYDFDVFVVRGAGAYICGEETALIESIEGKQGKPRLKPPFPADVGKAW

SEQ ID NO: 9275 - protein, 363 aa, Homo Sapiens
MNKPSDGRPKYLVVNADEGEPGTCKDREILRHDPHKLLEGCLVGGRAMGARAAYIYIRGEFYNEASNLQVAIREAYEAGLIGKNACGSGYDFDVFVVRGAGAYICGEETALIESIEGKQGKPRLKPPFPADVGVFGCPTTVANVETVAVSPTICRRGGTWFAGFGRERNSGTKLFNISGHVNHPCTVEEEMSVPLKELIEKHAGGVTGGWDNLLAVIPGGSSTPLIPKSVCETVLMDFDALVQAQTGLGTAAVIVMDRSTDIVKAIARLIEFYKHESCGQCTPCREGVDWMNKVMARFVRGDARPAEIDSLWEISKQIEGHTICALGDGAAWPVQGLIRHFRPELEERMQRFAQQHQARQAAS

SEQ ID NO: 9276 - protein, 54 aa, Homo Sapiens
MACAGLLTVCLLRPPAPQPQPQTPRHPQLAPDPGPAGHTLFQDVFRRADKNALI

SEQ ID NO: 9277 - protein, 210 aa, Homo Sapiens
MACAGLLTVCLLRPPAPQPQPQTPRHPQLAPDPGPAGHTLFQDVFRRADKNDDGKLSFEEFQNYFADGVLSLGELQELFSGIDGHLTDNLETEKLCDYFSEHLGVYRPVLAALESLNRAVLAAMDATKLEYERASKVDQFVTRFLLRETVSQLQALQSSLEGASDTLEAQAHGWRCRERGGAEQALRQPAGRTPSPEECQPVIHLVPRLF

SEQ ID NO: 9278 - protein, 192 aa, Homo Sapiens
MACAGLLTVCLLRPPAPQPQPQTPRHPQLAPDPGPAGHTLFQDVFRRADKNDDGKLSFEEFQNYFADGVLSLGELQELFSGIDGHLTDNLETEKLCDYFSEHLGVYRPVLAALESLNRAVLAAMDATKLEYERASKVDQFVTRFLLRETVSQLQALQSSLEGASDTLEAQAHGWRLIPSWGPSPRPCEPHFL

SEQ ID NO: 9279 - protein, 362 aa, Homo Sapiens
MACAGLLTVCLLRPPAPQPQPQTPRHPQLAPDPGPAGHTLFQDVFRRADKNDDGKLSFEEFQNYFADGVLSLGELQELFSGIDGHLTDNLETEKLCDYFSEHLGVYRPVLAALESLNRAVLAAMDATKLEYERASKVDQFVTRFLLRETVSQLQALQSSLEGASDTLEAQAHGWRSDAESVEAQSRLCGSRRAGRRALRSVSRSSTWSPGSSDTGRSSEAEMQWRLQVNRLQELIDQLECKAPRLEPLREEDLAKGPDLHILMAQRQVQVAEEGLQDFHRALRCYVDFTGAQSHCLHVSAQKMLDGASFTLYEFWQDEASWRRHQQSPGSKAFQRILIDHLRAPDTLTTVFFPASWWIMNNN

SEQ ID NO: 9280 - protein, 289 aa, Homo Sapiens
MACAGLLTVCLLRPPAPQPQPQTPRHPQLAPDPGPAGHTLFQDVFRRADKNDDGKLSFEEFQNYFADGVLSLGELQELFSGIDGHLTDNLETEKLCDYFSEHLGVYRPVLAALESLNRAVLAAMDATKLEYERASKVDQFVTRFLLRETVSQLQALQSSLEGASDTLEAQAHGWRSDAESVEAQSRLCGSRRAGRRALRSVSRSSTWSPGSSDTGRSSEAEMQWRLQVNRLQELIDQLECKHILMAQRQVQVAEEGLQDFHRALRCYVDFTGAQSHCLHVSAQKMLDGA

SEQ ID NO: 9281 - protein, 297 aa, Homo Sapiens
MACAGLLTVCLLRPPAPQPQPQTPRHPQLAPDPGPAGHTLFQDVFRRADKNDDGKLSFEEFQNYFADGVLSLGELQELFSGIDGHLTDNLETEKLCDYFSEHLGVYRPVLAALESLNRAVLAAMDATKLEYERASKVDQFVTRFLLRETVSQLQALQSSLEGASDTLEAQAHGWRSDAESVEAQSRLCGSRRAGRRALRSVSRSSTWSPGSSDTGRSSEAEMQWRLQVNRLQELIDQLECKRQVQVAEEGLQDFHRALRCYVDFTGAQSHCLHVSAQKMLDGASFTLYEFWQDEASW

SEQ ID NO: 9282 - protein, 396 aa, Homo Sapiens
MACAGLLTVCLLRPPAPQPQPQTPRHPQLAPDPGPAGHTLFQDVFRRADKNDDGKLSFEEFQNYFADGVLSLGELQELFSGIDGHLTDNLETEKLCDYFSEHLGVYRPVLAALESLNRAVLAAMDATKLEYERASKVDQFVTRFLLRETVSQLQALQSSLEGASDTLEAQAHGWRSDAESVEAQSRLCGSRRAGRRALRSVSRSSTWSPGSSDTGRSSEAEMQWRLQVNRLQELIDQLECKVRAVGPGPHKGGPSWYPPEPGPCWRPGPHSVPSQAPRLEPLREEDLAKGPDLHILMAQRQVQVAEEGLQDFHRALRCYVDFTGAQSHCLHVSAQKMLDGASFTLYEFWQDEASWRRHQQSPGSKAFQRILIDHLRAPDTLTTVFFPASWWIMNNN

SEQ ID NO: 9283 - protein, 71 aa, Homo Sapiens
MACAGLLTVCLLRPPAPQPQPQTPRHPQLAPDPGPAGHTLFQDVFRRADKNELLCRWGSQPGGAAGTVQRH

SEQ ID NO: 9284 - protein, 126 aa, Homo Sapiens
MQWRLQVNRLQELIDQLECKAPRLEPLREEDLAKGPDLHILMAQRQVQVAEEGLQDFHRALRCYVDFTGAQSHCLHVSAQKMLDGASFTLYEFWQDEASWRRHQQSPGSKAFQRILIDHLRAPDTL

SEQ ID NO: 9285 - protein, 95 aa, Homo Sapiens
  misc_feature (1)..(1): Xaa can be any naturally occurring amino acid
XQNYFADGVLSLGELQELFSGIDGHLTDNLETEKLCDYFSEHLGVYRPVLAALESLNRAVLAAMDATKLVSGVADGGGSTVRQWASAVLWDPPQS

SEQ ID NO: 9286 - protein, 517 aa, Homo Sapiens
MARMGLAGAAGRWWGLALGLTAFFLPGVHSQVVQVNDSMYGFIGTDVVLHCSFANPLPSVKITQVTWQKSTNGSKQNVAIYNPSMGVSVLAPYRERVEFLRPSFTDGTIRLSRLELEDEGVYICEFATFPTGNRESQLNLTVMAKPTNWIEGTQAVLRAKKGQDDKVLVATCTSANGKPPSVVSWETRLKGEAEYQEIRNPNGTVTVISRYRLVPSREAHQQSLACIVNYHMDRFKESLTLNVQYEPEVTIEGFDGNWYLQRMDVKLTCKADANPPATEYHWTTLNGSLPKGVEAQNRTLFFKGPINYSLAGTYICEATNPIGTRSGQVEVNITEFPYTPSPPEHGRRAGPVPTAIIGGVAGSILLVLIVVGGIVVALRRRRHTFKGDYSTKKHVYGNGYSKAGIPQHHPPMAQNLQYPDDSDDEKKAGPLGGSSYEEEEEEEEGGGGGERKVGGPHPKYDEDAKRPYFTVDEAEARQDGYGDRTLGYQYDPEQLDLAENMVSQNDGSFISKKEWYV

SEQ ID NO: 9287 - protein, 458 aa, Homo Sapiens
MARMGLAGAAGRWWGLALGLTAFFLPGVHSQVVQVNDSMYGFIGTDVVLHCSFANPLPSVKITQVTWQKSTNGSKQNVAIYNPSMGVSVLAPYRERVEFLRPSFTDGTIRLSRLELEDEGVYICEFATFPTGNRESQLNLTVMAKPTNWIEGTQAVLRAKKGQDDKVLVATCTSANGKPPSVVSWETRLKGEAEYQEIRNPNGTVTVISRYRLVPSREAHQQSLACIVNYHMDRFKESLTLNVQYEPEVTIEGFDGNWYLQRMDVKLTCKADANPPATEYHWTTLNGSLPKGVEAQNRTLFFKGPINYSLAGTYICEATNPIGTRSGQVEVNITEKPRPQRGLGSAARLLAGTVAVFLILVAVLTVFFLYNRQQKSPPETDGAGTDQPLSQKPEPSPSRQSSLVPEDIQVVHLDPGRQQQQEEEDLQKLSLQPPYYDLGVSPSYHPSVRTTEPRGECP

SEQ ID NO: 9288 - protein, 352 aa, Homo Sapiens
MARMGLAGAAGRWWGLALGLTAFFLPGVHSQVVQVNDSMYGFIGTDVVLHCSFANPLPSVKITQVTWQKSTNGSKQNVAIYNPSMGVSVLAPYRERVEFLRPSFTDGTIRLSRLELEDEGVYICEFATFPTGNRESQLNLTVMAKPTNWIEGTQAVLRAKKGQDDKVLVATCTSANGKPPSVVSWETRLKGEAEYQEIRNPNGTVTVISRYRLVPSREAHQQSLACIVNYHMDRFKESLTLNVQYEPEVTIEGFDGNWYLQRMDVKLTCKADANPPATEYHWTTLNGSLPKGVEAQNRTLFFKGPINYSLAGTYICEATNPIGTRSGQVEVNITAFCQLIYPGKGRTRARMF

SEQ ID NO: 9289 - protein, 838 aa, Homo Sapiens
MPMDLILVVWFCVCTARTAEDMKPPVLSLIWRTRVLKSLLQQSLQGVVGFGMDPDLQMDIVTELDLVNTTLGVAQVSGMHNASKAFLFQDIEREIHAAPHVSEKLIQLFRNKSEFTILATVQQKPSTSGVILSIRELEHSYFELESSGLRDEIRYHYIHNGKPRTEALPYRMADGQWHKVALSVSASHLLLHVDCNRIYERVIDPPDTNLPPGINLWLGQRNQKHGLFKGIIQDGKIIFMPNGYITQCPNLNHTCPTCSDFLSLVQGIMDLQELLAKMTAKLNYAETRLSQLENCHCEKTCQVSGLLYRDQDSWVDGDHCRNCTCKSGAVECRRMSCPPLNCSPDSLPVHIAGQCCKVCRPKCIYGGKVLAEGQRILTKSCRECRGGVLVKITEMCPPLNCSEKDHILPENQCCRVCRGHNFCAEGPKCGENSECKNWNTKATCECKSGYISVQGDSAYCEDIDECAAKMHYCHANTVCVNLPGLYRCDCVPGYIRVDDFSCTEHDECGSGQHNCDENAICTNTVQGHSCTCKPGYVGNGTICRAFCEEGCRYGGTCVAPNKCVCPSGFTGSHCEKDIDECSEGIIECHNHSRCVNLPGWYHCECRSGFHDDGTYSLSGESCIDIDECALRTHTCWNDSACINLAGGFDCLCPSGPSCSGDCPHEGGLKHNGQVWTLKEDRCSVCSCKDGKIFCRRTACDCQNPSADLFCCPECDTRVTSQCLDQNGHKLYRSGDNWTHSCQQCRCLEGEVDCWPLTCPNLSCEYTAILEGECCPRCVSDPCLADNITYDIRKTCLDSYGVSRLSGSVWTMAGSPCTTCKCKNGRVCCSVDFECLQNN

SEQ ID NO: 9290 - protein, 753 aa, Homo Sapiens
MPMDLILVVWFCVCTARTVVGFGMDPDLQMDIVTELDLVNTTLGVAQVSGMHNASKAFLFQDIEREIHAAPHVSEKLIQLFRNKSEFTILATVQQKPSTSGVILSIRELEHRIYERVIDPPDTNLPPGINLWLGQRNQKHGLFKGIIQDGKIIFMPNGYITQCPNLNHTCPTCSDFLSLVQGIMDLQELLAKMTAKLNYAETRLSQLENCHCEKTCQVSGLLYRDQDSWVDGDHCRNCTCKSGAVECRRMSCPPLNCSPDSLPVHIAGQCCKVCRPKCIYGGKVLAEGQRILTKSCRECRGGVLVKITEMCPPLNCSEKDHILPENQCCRVCRGHNFCAEGPKCGENSECKNWNTKATCECKSGYISVQGDSAYCEDIDECAAKMHYCHANTVCVNLPGLYRCDCVPGYIRVDDFSCTEHDECGSGQHNCDENAICTNTVQGHSCTCKPGYVGNGTICRAFCEEGCRYGGTCVAPNKCVCPSGFTGSHCEKDIDECSEGIIECHNHSRCVNLPGWYHCECRSGFHDDGTYSLSGESCIDIDECALRTHTCWNDSACINLAGGFDCLCPSGPSCSGDCPHEGGLKHNGQVWTLKEDRCSVCSCKDGKIFCRRTACDCQNPSADLFCCPECDTRVTSQCLDQNGHKLYRSGDNWTHSCQQCRCLEGEVDCWPLTCPNLSCEYTAILEGECCPRCVSDPCLADNITYDIRKTCLDSYGVSRLSGSVWTMAGSPCTTCKCKNGRVCCSVDFECLQNN

SEQ ID NO: 9291 - protein, 810 aa, Homo Sapiens
MPMDLILVVWFCVCTARTVVGFGMDPDLQMDIVTELDLVNTTLGVAQVSGMHNASKAFLFQDIEREIHAAPHVSEKLIQLFRNKSEFTILATVQQKPSTSGVILSIRELEHSYFELESSGLRDEIRYHYIHNGKPRTEALPYRMADGQWHKVALSVSASHLLLHVDCNRIYERVIDPPDTNLPPGINLWLGQRNQKHGLFKGIIQDGKIIFMPNGYITQCPNLNHTCPTCSDFLSLVQGIMDLQELLAKMTAKLNYAETRLSQLENCHCEKTCQVSGLLYRDQDSWVDGDHCRNCTCKSGAVECRRMSCPPLNCSPDSLPVHIAGQCCKVCRPKCIYGGKVLAEGQRILTKSCRECRGGVLVKITEMCPPLNCSEKDHILPENQCCRVCRGHNFCAEGPKCGENSECKNWNTKATCECKSGYISVQGDSAYCEDIDECAAKMHYCHANTVCVNLPGLYRCDCVPGYIRVDDFSCTEHDECGSGQHNCDENAICTNTVQGHSCTCKPGYVGNGTICRAFCEEGCRYGGTCVAPNKCVCPSGFTGSHCEKDIDECSEGIIECHNHSRCVNLPGWYHCECRSGFHDDGTYSLSGESCIDIDECALRTHTCWNDSACINLAGGFDCLCPSGPSCSGDCPHEGGLKHNGQVWTLKEDRCSVCSCKDGKIFCRRTACDCQNPSADLFCCPECDTRVTSQCLDQNGHKLYRSGDNWTHSCQQCRCLEGEVDCWPLTCPNLSCEYTAILEGECCPRCVSDPCLADNITYDIRKTCLDSYGVSRLSGSVWTMAGSPCTTCKCKNGRVCCSVDFECLQNN

SEQ ID NO: 9292 - protein, 763 aa, Homo Sapiens
MPMDLILVVWFCVCTARTVVGFGMDPDLQMDIVTELDLVNTTLGVAQVSGMHNASKAFLFQDIEREIHAAPHVSEKLIQLFRNKSEFTILATVQQKPSTSGVILSIRELEHSYFELESSGLRDEIRYHYIHNGKPRTEALPYRMADGQWHKVALSVSASHLLLHVDCNRIYERVIDPPDTNLPPGINLWLGQRNQKHGLFKGIIQDGKIIFMPNGYITQCPNLNHTCPTCSDFLSLVQGIMDLQELLAKMTAKLNYAETRLSQLENCHCEKTCQVSGLLYRDQDSWVDGDHCRNCTCKSGAVECRRMSCPPLNCSPDSLPVHIAGQCCKVCRPKCIYGGKVLAEGQRILTKSCRECRGGVLVKITEMCPPLNCSEKDHILPENQCCRVCRGHNFCAEGPKCGENSECKNWNTKATCECKSGYISVQGDSAYCEDIDECAAKMHYCHANTVCVNLPGLYRCDCVPGYIRVDDFSCTEHDECGSGQHNCDENAICTNTVQGHSCTCKPGYVGNGTICRAFCEEGCRYGGTCVAPNKCVCPSGFTGSHCEKDIDECALRTHTCWNDSACINLAGGFDCLCPSGPSCSGDCPHEGGLKHNGQVWTLKEDRCSVCSCKDGKIFCRRTACDCQNPSADLFCCPECDTRVTSQCLDQNGHKLYRSGDNWTHSCQQCRCLEGEVDCWPLTCPNLSCEYTAILEGECCPRCVSDPCLADNITYDIRKTCLDSYGVSRLSGSVWTMAGSPCTTCKCKNGRVCCSVDFECLQNN

SEQ ID NO: 9293 - protein, 122 aa, Homo Sapiens
CPTCNDFHGLVQKIMELQDILAKTSAKLSRAEQRMNRLDQCYCERTCTMKGTTYREFESWIDGCKNCTCLNGTIQCETLICPNPDCPLKSALAYVDGKCCKECKCEHNFYDEYFLWKNKALY

SEQ ID NO: 9294 - protein, 166 aa, Homo Sapiens
MELFLFLSPTSYPSPVWGLGVDPSLQIDVLTELELGESTTGVRQVPGLHNGTKAFLFQDTPRSIKASTATAEQFFQKLRNKHEFTILVTLKQTHLNSGVILSIHHLDHRYLELESSGHRNEVRLHYRSGSHRPHTEVFPYILADDKWHKLSLAISASHLILHIDCN

SEQ ID NO: 9295 - protein, 22 aa, Homo Sapiens
MESRVLLRTFCLIFGLGAVWGL

SEQ ID NO: 9296 - protein, 112 aa, Homo Sapiens
MESRVLLRTFCLIFGLGAVWGLGVDPSLQIDVLTELELGESTTGVRQVPGLHNGTKAFLFQDTPRSIKASTATAEQFFQKLRNKHEFTILVTLKQTHLNSGVILSIHHLDHR

SEQ ID NO: 9297 - protein, 816 aa, Homo Sapiens
MESRVLLRTFCLIFGLGAVWGLGVDPSLQIDVLTELELGESTTGVRQVPGLHNGTKAFLFQDTPRSIKASTATAEQFFQKLRNKHEFTILVTLKQTHLNSGVILSIHHLDHRYLELESSGHRNEVRLHYRSGSHRPHTEVFPYILADDKWHKLSLAISASHLILHIDCNKIYERVVEKPSTDLPLGTTFWLGQRNNAHGYFKGIMQDVQLLVMPQGFIAQCPDLNRTCPTCNDFHGLVQKIMELQDILAKTSAKLSRAEQRMNRLDQCYCERTCTMKGTTYREFESWIDGCKNCTCLNGTIQCETLICPNPDCPLKSALAYVDGKCCKECKSICQFQGRTYFEGERNTVYSSSGVCVLYECKDQTMKLVESSGCPALDCPESHQITLSHSCCKVCKGYDFCSERHNCMENSICRNLNDRAVCSCRDGFRALREDNAYCEDIDECAEGRHYCRENTMCVNTPGSFMCICKTGYIRIDDYSCTEHDECITNQHNCDENALCFNTVGGHNCVCKPGYTGNGTTCKAFCKDGCRNGGACIAANVCACPQGFTGPSCETDIDECSDGFVQCDSRANCINLPGWYHCECRDGYHDNGMFSPSGESCEDIDECGTGRHSCANDTICFNLDGGYDCRCPHGKNCTGDCIHDGKVKHNGQIWVLENDRCSVCSCQNGFVMCRRMVCDCENPTVDLFCCPECDPRLSSQCLHQNGETLYNSGDTWVQNCQQCRCLQGEVDCWPLPCPDVECEFSILPENECCPRCVTDPCQADTIRNDITKTCLDEMNVVRFTGSSWIKHGTECTLCQCKNGHICCSVDPQCLQEL

SEQ ID NO: 9298 - protein, 816 aa, Homo Sapiens; identical to SEQ ID NO: 9297

SEQ ID NO: 9299 - protein, 321 aa, Homo Sapiens
MESRVLLRTFCLIFGLGAVWGLGVDPSLQIDVLTELELGESTTGVRQVPGLHNGTKAFLFQDTPRSIKASTATAEQFFQKLRNKHEFTILVTLKQTHLNSGVILSIHHLDHRYLELESSGHRNEVRLHYRSGSHRPHTEVFPYILADDKWHKLSLAISASHLILHIDCNKIYERVVEKPSTDLPLGTTFWLGQRNNAHGYFKGIMQDVQLLVMPQGFIAQCPDLNRTCPTCNDFHGLVQKIMELQDILAKTSAKLSRAEQRMNRLDQCYCERTCTMKGTTYREFESWIDGCKNCTCLNGTIQCETLICPNPDCPLKSALAY

SEQ ID NO: 9300 - protein, 110 aa, Homo Sapiens
METGLGAPLFKAWLLISVWGLGVDPSLQIDVLTELELGESTTGVRQVPGLHNGTKAFLFQDTPRSIKASTATAEQFFQKLRNKHEFTILVTLKQTHLNSGVILSIHHLDH

SEQ ID NO: 9301 - protein, 815 aa, Homo Sapiens
METGLGAPLFKAWLLISVWGLGVDPSLQIDVLTELELGESTTGVRQVPGLHNGTKAFLFQDTPRSIKASTATAEQFFQKLRNKHEFTILVTLKQTHLNSGVILSIHHLDHRYLELESSGHRNEVRLHYRSGSHRPHTEVFPYILADDKWHKLSLAISASHLILHIDCNKIYERVVEKPSTDLPLGTTFWLGQRNNAHGYFKGIMQDVQLLVMPQGFIAQCPDLNRTCPTCNDFHGLVQKIMELQDILAKTSAKLSRAEQRMNRLDQCYCERTCTMKGTTYREFESWIDGCKNCTCLNGTIQCETLICPNPDCPLKSALAYVDGKCCKECKSICQFQGRTYFEGERNTVYSSSGVCVLYECKDQTMKLVESSGCPALDCPESHQITLSHSCCKVCKGYDFCSERHNCMENSICRNLNDRAVCSCRDGFRALREDNAYCEDIDECAEGRHYCRENTMCVNTPGSFMCICKTGYIRIDDYSCTEHDECITNQHNCDENALCFNTVGGHNCVCKPGYTGNGTTCKAFCKDGCRNGGACIAANVCACPQGFTGPSCETDIDECSDGFVQCDSRANCINLPGWYHCECRDGYHDNGMFSPSGESCEDIDECGTGRHSCANDTICFNLDGGYDCRCPHGKNCTGDCIHDGKVKHNGQIWVLENDRCSVCSCQNGFVMCRRMVCDCENPTVDLFCCPECDPRLSSQCLHQNGETLYNSGDTWVQNCQQCRCLQGEVDCWPLPCPDVECEFSILPENECCPRCVTDPCQADTIRNDITKTCLDEMNVVRFTGSSWIKHGTECTLCQCKNGHICCSVDPQCLQEL

SEQ ID NO: 9302 - protein, 768 aa, Homo Sapiens
METGLGAPLFKAWLLISVWGLGVDPSLQIDVLTELELGESTTGVRQVPGLHNGTKAFLFQDTPRSIKASTATAEQFFQKLRNKHEFTILVTLKQTHLNSGVILSIHHLDHRYLELESSGHRNEVRLHYRSGSHRPHTEVFPYILADDKWHKLSLAISASHLILHIDCNKIYERVVEKPSTDLPLGTTFWLGQRNNAHGYFKGIMQDVQLLVMPQGFIAQCPDLNRTCPTCNDFHGLVQKIMELQDILAKTSAKLSRAEQRMNRLDQCYCERTCTMKGTTYREFESWIDGCKNCTCLNGTIQCETLICPNPDCPLKSALAYVDGKCCKECKSICQFQGRTYFEGERNTVYSSSGVCVLYECKDQTMKLVESSGCPALDCPESHQITLSHSCCKVCKGYDFCSERHNCMENSICRNLNDRAVCSCRDGFRALREDNAYCEDIDECAEGRHYCRENTMCVNTPGSFMCICKTGYIRIDDYSCTEHDECITNQHNCDENALCFNTVGGHNCVCKPGYTGNGTTCKAFCKDGCRNGGACIAANVCACPQGFTGPSCETDIDECGTGRHSCANDTICFNLDGGYDCRCPHGKNCTGDCIHDGKVKHNGQIWVLENDRCSVCSCQNGFVMCRRMVCDCENPTVDLFCCPECDPRLSSQCLHQNGETLYNSGDTWVQNCQQCRCLQGEVDCWPLPCPDVECEFSILPENECCPRCVTDPCQADTIRNDITKTCLDEMNVVRFTGSSWIKHGTECTLCQCKNGHICCSVDPQCLQEL

SEQ ID NO: 9303 - protein, 815 aa, Homo Sapiens; identical to SEQ ID NO: 9301

SEQ ID NO: 9304 - protein, 866 aa, Homo Sapiens
MGFPPLLKGQASATRSSLASCSWVVFFLSCLSRHAPEIEGGRRWTELIRTMESRVLLRTFCLIFGLGAVWGLGVDPSLQIDVLTELELGESTTGVRQVPGLHNGTKAFLFQDTPRSIKASTATAEQFFQKLRNKHEFTILVTLKQTHLNSGVILSIHHLDHRYLELESSGHRNEVRLHYRSGSHRPHTEVFPYILADDKWHKLSLAISASHLILHIDCNKIYERVVEKPSTDLPLGTTFWLGQRNNAHGYFKGIMQDVQLLVMPQGFIAQCPDLNRTCPTCNDFHGLVQKIMELQDILAKTSAKLSRAEQRMNRLDQCYCERTCTMKGTTYREFESWIDGCKNCTCLNGTIQCETLICPNPDCPLKSALAYVDGKCCKECKSICQFQGRTYFEGERNTVYSSSGVCVLYECKDQTMKLVESSGCPALDCPESHQITLSHSCCKVCKGYDFCSERHNCMENSICRNLNDRAVCSCRDGFRALREDNAYCEDIDECAEGRHYCRENTMCVNTPGSFMCICKTGYIRIDDYSCTEHDECITNQHNCDENALCFNTVGGHNCVCKPGYTGNGTTCKAFCKDGCRNGGACIAANVCACPQGFTGPSCETDIDECSDGFVQCDSRANCINLPGWYHCECRDGYHDNGMFSPSGESCEDIDECGTGRHSCANDTICFNLDGGYDCRCPHGKNCTGDCIHDGKVKHNGQIWVLENDRCSVCSCQNGFVMCRRMVCDCENPTVDLFCCPECDPRLSSQCLHQNGETLYNSGDTWVQNCQQCRCLQGEVDCWPLPCPDVECEFSILPENECCPRCVTDPCQADTIRNDITKTCLDEMNVVRFTGSSWIKHGTECTLCQCKNGHICCSVDPQCLQEL

SEQ ID NO: 9305 - protein, 839 aa, Homo Sapiens
MSIRRLLILILKIGRRWTELIRTMESRVLLRTFCLIFGLGAVWGLGVDPSLQIDVLTELELGESTTGVRQVPGLHNGTKAFLFQDTPRSIKASTATAEQFFQKLRNKHEFTILVTLKQTHLNSGVILSIHHLDHRYLELESSGHRNEVRLHYRSGSHRPHTEVFPYILADDKWHKLSLAISASHLILHIDCNKIYERVVEKPSTDLPLGTTFWLGQRNNAHGYFKGIMQDVQLLVMPQGFIAQCPDLNRTCPTCNDFHGLVQKIMELQDILAKTSAKLSRAEQRMNRLDQCYCERTCTMKGTTYREFESWIDGCKNCTCLNGTIQCETLICPNPDCPLKSALAYVDGKCCKECKSICQFQGRTYFEGERNTVYSSSGVCVLYECKDQTMKLVESSGCPALDCPESHQITLSHSCCKVCKGYDFCSERHNCMENSICRNLNDRAVCSCRDGFRALREDNAYCEDIDECAEGRHYCRENTMCVNTPGSFMCICKTGYIRIDDYSCTEHDECITNQHNCDENALCFNTVGGHNCVCKPGYTGNGTTCKAFCKDGCRNGGACIAANVCACPQGFTGPSCETDIDECSDGFVQCDSRANCINLPGWYHCECRDGYHDNGMFSPSGESCEDIDECGTGRHSCANDTICFNLDGGYDCRCPHGKNCTGDCIHDGKVKHNGQIWVLENDRCSVCSCQNGFVMCRRMVCDCENPTVDLFCCPECDPRLSSQCLHQNGETLYNSGDTWVQNCQQCRCLQGEVDCWPLPCPDVECEFSILPENECCPRCVTDPCQADTIRNDITKTCLDEMNVVRFTGSSWIKHGTECTLCQCKNGHICCSVDPQCLQEL

SEQ ID NO: 9306 - protein, 246 aa, Homo Sapiens
  misc_feature (1)..(1): Xaa can be any naturally occurring amino acid
XAKLSRAEQRMNRLDQCYCERTCTMKGTTYREFESWIDGCKNCTCLNGTIQCETLICPNPDCPLKSALAYVDGKCSICQFQGRTYFEGERNTVYSSSGVCVLYECKDQTMKLVESSGCPALDCPESHQITLSHSCCKVCKGYDFCSERHNCMENSICRNLNDRAVCSCRDGFRALREDNAYCEDIDECAEGRHYCRENTMCVNTPGSFMCICKTGYIRIDDYSCTEHDECITNQHNCDENALCFNT

SEQ ID NO: 9307 - protein, 86 aa, Homo Sapiens
  misc_feature (1)..(1): Xaa can be any naturally occurring amino acid
XDNGMFSPSGESCEDIDECGTGRHSCANDTICFNLDGGYDCRCPHGKNCTGDCIHDGKVKHNGQIWVLENDRCSVCSCQVGINEKL

SEQ ID NO: 9308 - protein, 172 aa, Homo Sapiens
MVGPAPRRRLRPLAALALVLALAPGLPTARAGQTPRPAERGPPVRLFTEEELARYGGEEEDQPIYLAVKGVVFDVTSGKEFYGRGAPYNALTGKDSTRGVAKMSLDPADLTHDTTGLTAKELEALDEVFTKVYKAKYPIVGYTARRILNEDGSPNLDFKPEDQPHFDIKDEF

SEQ ID NO: 9309 - protein, 533 aa, Homo Sapiens
MIHGRSVLHIVASLIILHLSGATKKGTEKQTTSETQKSVQCGTWTKHAEGGIFTSPNYPSKYPPDRECIYIIEAAPRQCIELYFDEKYSIEPSWECKFDHIEVRDGPFGFSPIIGRFCGQQNPPVIKSSGRFLWIKFFADGELESMGFSARYNFTPDPDFKDLGALKPLPACEFEMGGSEGIVESIQIMKEGKATASEAVDCKWYIRAPPRSKIYLRFLDYEMQNSNECKRNFVAVYDGSSSVEDLKAKFCSTVANDVMLRTGLGVIRMWADEGSRNSRFQMLFTSFQEPPCEGNTFFCHSNMCINNTLVCNGLQNCVYPWDENHCKEKRKTSLLDQLTNTSGTVIGVTSCIVIILIIISVIVQIKQPRKKYVQRKSDFDQTVFQEVFEPPHYELCTLRGTGATADFADVADDFENYHKLRRSSSKCIHDHHCGSQLSSTKGSRSNLSTRDASILTEMPTQPGKPLIPPMNRRNILVMKHSYSQDAADACDIDEIEEVPTTSHRLSRHDKAVQRFCLIGSLSKHESEYNTTRV

SEQ ID NO: 9310 - protein, 533 aa, Homo Sapiens; identical to SEQ ID NO: 9309

SEQ ID NO: 9311 - protein, 156 aa, Homo Sapiens
MLAEPFPKVVASLIILHLSGATKKGTEKQTTSETQKSVQCGTWTKHAEGGIFTSPNYPSKYPPDRECIYIIEAAPRQCIELYFDEKYSIEPSWECKFDHIEVRDGPFGFSPIIGRFCGQQNPPVIKSSGRFLWIKFFADGELESMGFSARYNFTPE

SEQ ID NO: 9312 - protein, 101 aa, Homo Sapiens
MSLYGFVASLIILHLSGATKKGTEKQTTSETQKSVQCGTWTKHAEGGIFTSPNYPSKYPPDRECIYIIEAAPRQCIELYFDEKYSIEPSWECKFDHIEVRD

SEQ ID NO: 9313 - protein, 1165 aa, Homo Sapiens
IEIPMDLTQPPTITKQSAKDHIVDPRDNILIECEAKGNPAPSFHWTRNSRFFNIAKDPRVSMRRRSGTLVIDFRSGGRPEEYEGEYQCFARNKFGTALSNRIRLQVSKSPLWPKENLDPVVVQEGAPLTLQCNPPPGLPSPVIFWMSSSMEPITQDKRVSQGHNGDLYFSNVMLQDMQTDYSCNARFHFTHTIQQKNPFTLKVLTNHPYNDSSLRNHPDMYSARGVAERTPSFMYPQGTASSQMVLRGMDLLLECIASGVPTPDIAWYKKGGDLPSDKAKFENFNKALRITNVSEEDSGEYFCLASNKMGSIRHTISVRVKAAPYWLDEPKNLILAPGEDGRLVCRANGNPKPTVQWMVNGEPLQSAPPNPNREVAGDTIIFRDTQISSRAVYQCNTSNEHGYLLANAFVSVLDVPPRMLSPRNQLIRVILYNRTRLDCPFFGSPIPTLRWFKNGQGSNLDGGNYHVYENGSLEIKMIRKEDQGIYTCVATNILGKAENQVRLEVKDPTRIYRMPEDQVARRGTTVQLECRVKHDPSLKLTVSWLKDDEPLYIGNRMKKEDDSLTIFGVAERDQGSYTCVASTELDQDLAKAYLTVLADQATPTNRLAALPKGRPDRPRDLELTDLAERSVRLTWIPGDANNSPITDYVVQFEEDQFQPGVWHDHSKYPGSVNSAVLRLSPYVNYQFRVIAINEVGSSHPSLPSERYRTSGAPPESNPGDVKGEGTRKNNMEITWTPMNATSAFGPNLRYIVKWRRRETREAWNNVTVWGSRYVVGQTPVYVPYEIRVQAENDFGKGPEPESVIGYSGEDYPRAAPTEVKVRVMNSTAISLQWNRVYSDTVQGQLREYRAYYWRESSLLKNLWVSQKRQQASFPGDRLRGVVSRLFPYSNYKLEMVVVNGRGDGPRSETKEFTTPEGVPSAPRRFRVRQPNLETINLEWDHPEHPNGIMIGYTLKYVAFNGTKVGKQIVENFSPNQTKFTVQRTDPVSRYRFTLSARTQVGSGEAVTEESPAPPNEATPTAAYTNNQADIATQGWFIGLMCAIALLVLILLIVCFIKRSRGGKYPVREKKDVPLGPEDPKEEDGSFDYSDEDNKPLQGSQTSLDGTIKQQESDDSLVDYGEGGEGQFNEDGSFIGQYTVKKDKEETEGNESSEATSPVNAIYSLA

SEQ ID NO: 9314 - protein, 1169 aa, Homo Sapiens
MARQPPPPWVHAAFLLCLLSLGGAIEIPMDLTQPPTITKQSAKDHIVDPRDNILIECEAKGNPAPSFHWTRNSRFFNIAKDPRVSMRRRSGTLVIDFRSGGRPEEYEGEYQCFARNKFGTALSNRIRLQVSKSPLWPKENLDPVVVQEGAPLTLQCNPPPGLPSPVIFWMSSSMEPITQDKRVSQGHNGDLYFSNVMLQDMQTDYSCNARFHFTHTIQQKNPFTLKVLTNHPYNDSSLRNHPDMYSARGVAERTPSFMYPQGTASSQMVLRGMDLLLECIASGVPTPDIAWYKKGGDLPSDKAKFENFNKALRITNVSEEDSGEYFCLASNKMGSIRHTISVRVKAAPYWLDEPKNLILAPGEDGRLVCRANGNPKPTVQWMVNGEPLQSAPPNPNREVAGDTIIFRDTQISSRAVYQCNTSNEHGYLLANAFVSVLDVPPRMLSPRNQLIRVILYNRTRLDCPFFGSPIPTLRWFKNGQGSNLDGGNYHVYENGSLEIKMIRKEDQGIYTCVATNILGKAENQVRLEVKDPTRIYRMPEDQVARRGTTVQLECRVKHDPSLKLTVSWLKDDEPLYIGNRMKKEDDSLTIFGVAERDQGSYTCVASTELDQDLAKAYLTVLGRPDRPRDLELTDLAERSVRLTWIPGDANNSPITDYVVQFEEDQFQPGVWHDHSKYPGSVNSAVLRLSPYVNYQFRVIAINEVGSSHPSLPSERYRTSGAPPESNPGDVKGEGTRKNNMEITWTPMNATSAFGPNLRYIVKWRRRETREAWNNVTVWGSRYVVGQTPVYVPYEIRVQAENDFGKGPEPESVIGYSGEDYPRAAPTEVKVRVMNSTAISLQWNRVYSDTVQGQLREYRAYYWRESSLLKNLWVSQKRQQASFPGDRLRGVVSRLFPYSNYKLEMVVVNGRGDGPRSETKEFTTPEGVPSAPRRFRVRQPNLETINLEWDHPEHPNGIMIGYTLKYVAFNGTKVGKQIVENFSPNQTKFTVQRTDPVSRYRFTLSARTQVGSGEAVTEESPAPPNEAYTNNQADIATQGWFIGLMCAIALLVLILLIVCFIKRSRGGKYPVREKKDVPLGPEDPKEEDGSFDYSDEDNKPLQGSQTSLDGTIKQQESDDSLVDYGEGGEGQFNEDGSFIGQYTVKKDKEETEGNESSEATSPVNAIYSLA

SEQ ID NO: 9315 - protein, 1174 aa, Homo Sapiens
MARQPPPPWVHAAFLLCLLSLGGAIEIPMDLTQPPTITKQSAKDHIVDPRDNILIECEAKGNPAPSFHWTRNSRFFNIAKDPRVSMRRRSGTLVIDFRSGGRPEEYEGEYQCFARNKFGTALSNRIRLQVSKSPLWPKENLDPVVVQEGAPLTLQCNPPPGLPSPVIFWMSSSMEPITQDKRVSQGHNGDLYFSNVMLQDMQTDYSCNARFHFTHTIQQKNPFTLKVLTNHPYNDSSLRNHPDMYSARGVAERTPSFMYPQGTASSQMVLRGMDLLLECIASGVPTPDIAWYKKGGDLPSDKAKFENFNKALRITNVSEEDSGEYFCLASNKMGSIRHTISVRVKAAPYWLDEPKNLILAPGEDGRLVCRANGNPKPTVQWMVNGEPLQSAPPNPNREVAGDTIIFRDTQISSRAVYQCNTSNEHGYLLANAFVSVLDVPPRMLSPRNQLIRVILYNRTRLDCPFFGSPIPTLRWFKNGQGSNLDGGNYHVYENGSLEIKMIRKEDQGIYTCVATNILGKAENQVRLEVKDPTRIYRMPEDQVARRGTTVQLECRVKHDPSLKLTVSWLKDDEPLYIGNRMKKEDDSLTIFGVAERDQGSYTCVASTELDQDLAKAYLTVLGRPDRPRDLELTDLAERSVRLTWIPGDANNSPITDYVVQFEEDQFQPGVWHDHSKYPGSVNSAVLRLSPYVNYQFRVIAINEVGSSHPSLPSERYRTSGAPPESNPGDVKGEGTRKNNMEITWTPMNATSAFGPNLRYIVKWRRRETREAWNNVTVWGSRYVVGQTPVYVPYEIRVQAENDFGKGPEPESVIGYSGEDYPRAAPTEVKVRVMNSTAISLQWNRVYSDTVQGQLREYRAYYWRESSLLKNLWVSQKRQQASFPGDRLRGVVSRLFPYSNYKLEMVVVNGRGDGPRSETKEFTTPEGVPSAPRRFRVRQPNLETINLEWDHPEHPNGIMIGYTLKYVAFNGTKVGKQIVENFSPNQTKFTVQRTDPVSRYRFTLSARTQVGSGEAVTEESPAPPNEATPTAAYTNNQADIATQGWFIGLMCAIALLVLILLIVCFIKRSRGGKYPVREKKDVPLGPEDPKEEDGSFDYSDEDNKPLQGSQTSLDGTIKQQESDDSLVDYGEGGEGQFNEDGSFIGQYTVKKDKEETEGNESSEATSPVNAIYSLA

SEQ ID NO: 9316 - protein, 1174 aa, Homo Sapiens; identical to SEQ ID NO: 9315

SEQ ID NO: 9317 - protein, 1169 aa, Homo Sapiens; identical to SEQ ID NO: 9314

SEQ ID NO: 9318 - protein, 1157 aa, Homo Sapiens
MARQPPPPWVHAAFLLCLLSLGGAIEIPMDLTQPPTITKQSAKDHIVDPRDNILIECEAKGNPAPSFHWTRNSRFFNIAKDPRVSMRRRSGTLVIDFRSGGRPEEYEGEYQCFARNKFGTALSNRIRLQVSKSPLWPKENLDPVVVQEGAPLTLQCNPPPGLPSPVIFWMSSSMEPITQDKRVSQGHNGDLYFSNVMLQDMQTDYSCNARFHFTHTIQQKNPFTLKVLTTRGVAERTPSFMYPQGTASSQMVLRGMDLLLECIASGVPTPDIAWYKKGGDLPSDKAKFENFNKALRITNVSEEDSGEYFCLASNKMGSIRHTISVRVKAAPYWLDEPKNLILAPGEDGRLVCRANGNPKPTVQWMVNGEPLQSAPPNPNREVAGDTIIFRDTQISSRAVYQCNTSNEHGYLLANAFVSVLDVPPRMLSPRNQLIRVILYNRTRLDCPFFGSPIPTLRWFKNGQGSNLDGGNYHVYENGSLEIKMIRKEDQGIYTCVATNILGKAENQVRLEVKDPTRIYRMPEDQVARRGTTVQLECRVKHDPSLKLTVSWLKDDEPLYIGNRMKKEDDSLTIFGVAERDQGSYTCVASTELDQDLAKAYLTVLGRPDRPRDLELTDLAERSVRLTWIPGDANNSPITDYVVQFEEDQFQPGVWHDHSKYPGSVNSAVLRLSPYVNYQFRVIAINEVGSSHPSLPSERYRTSGAPPESNPGDVKGEGTRKNNMEITWTPMNATSAFGPNLRYIVKWRRRETREAWNNVTVWGSRYVVGQTPVYVPYEIRVQAENDFGKGPEPESVIGYSGEDYPRAAPTEVKVRVMNSTAISLQWNRVYSDTVQGQLREYRAYYWRESSLLKNLWVSQKRQQASFPGDRLRGVVSRLFPYSNYKLEMVVVNGRGDGPRSETKEFTTPEGVPSAPRRFRVRQPNLETINLEWDHPEHPNGIMIGYTLKYVAFNGTKVGKQIVENFSPNQTKFTVQRTDPVSRYRFTLSARTQVGSGEAVTEESPAPPNEATPTAAYTNNQADIATQGWFIGLMCAIALLVLILLIVCFIKRSRGGKYPVREKKDVPLGPEDPKEEDGSFDYSDEDNKPLQGSQTSLDGTIKQQESDDSLVDYGEGGEGQFNEDGSFIGQYTVKKDKEETEGNESSEATSPVNAIYSLA

SEQ ID NO: 9319 - protein, 129 aa, Homo Sapiens
MARQPPPPWVHAAFLLCLLSLGGAIEIPMDPSIQNELTQPPTITKQSAKDHIVDPRDNILIECEAKGNPAPSFHWTRNSRFFNIAKDPRVSMRRRSGTLVIDFRSGGRPEEYEGEYQCFARNKFGTALS

SEQ ID NO: 9320 - protein, 486 aa, Homo Sapiens
MARQPPPPWVHAAFLLCLLSLGGAIEIPMDPSIQNELTQPPTITKQSAKDHIVDPRDNILIECEAKGNPAPSFHWTRNSRFFNIAKDPRVSMRRRSGTLVIDFRSGGRPEEYEGEYQCFARNKFGTALSNRIRLQVSKSPLWPKENLDPVVVQEGAPLTLQCNPPPGLPSPVIFWMSSSMEPITQDKRVSQGHNGDLYFSNVMLQDMQTDYSCNARFHFTHTIQQKNPFTLKVLTNHPYNDSSLRNHPDMYSARGVAERTPSFMYPQGTASSQMVLRGMDLLLECIASGVPTPDIAWYKKGGDLPSDKAKFENFNKALRITNVSEEDSGEYFCLASNKMGSIRHTISVRVKAAPYWLDEPKNLILAPGEDGRLVCRANGNPKPTVQWMVNGEPLQSAPPNPNREVAGDTIIFRDTQISSRAVYQCNTSNEHGYLLANAFVSVLDVPPRMLSPRNQLIRVILYNRTRLDCPFFGSPIPTLRCPHGLS

SEQ ID NO: 9321 - protein, 1240 aa, Homo Sapiens
MARQPPPPWVHAAFLLCLLSLGGAIEIPMDPSIQNELTQPPTITKQSAKDHIVDPRDNILIECEAKGNPAPSFHWTRNSRFFNIAKDPRVSMRRRSGTLVIDFRSGGRPEEYEGEYQCFARNKFGTALSNRIRLQVSKSPLWPKENLDPVVVQEGAPLTLQCNPPPGLPSPVIFWMSSSMEPITQDKRVSQGHNGDLYFSNVMLQDMQTDYSCNARFHFTHTIQQKNPFTLKVLTTRGVAERTPSFMYPQGTASSQMVLRGMDLLLECIASGVPTPDIAWYKKGGDLPSDKAKFENFNKALRITNVSEEDSGEYFCLASNKMGSIRHTISVRVKAAPYWLDEPKNLILAPGEDGRLVCRANGNPKPTVQWMVNGEPLQSAPPNPNREVAGDTIIFRDTQISSRAVYQCNTSNEHGYLLANAFVSVLDVPPRMLSPRNQLIRVILYNRTRLDCPFFGSPIPTLRWFKNGQGSNLDGGNYHVYENGSLEIKMIRKEDQGIYTCVATNILGKAENQVRLEVKDPTRIYRMPEDQVARRGTTVQLECRVKHDPSLKLTVSWLKDDEPLYIGNRMKKEDDSLTIFGVAERDQGSYTCVASTELDQDLAKAYLTVLADQATPTNRLAALPKGRPDRPRDLELTDLAERSVRLTWIPGDANNSPITDYVVQFEEDQFQPGVWHDHSKYPGSVNSAVLRLSPYVNYQFRVIAINEVGSSHPSLPSERYRTSGAPPESNPGDVKGEGTRKNNMEITWTPMNATSAFGPNLRYIVKWRRRETREAWNNVTVWGSRYVVGQTPVYVPYEIRVQAENDFGKGPEPESVIGYSGEDLPSAPRRFRVRQPNLETINLEWDHPEHPNGIMIGYTLKYVAFNGTKVGKQIVENFSPNQTKFTVQRTDPVSRYRFTLSARTQVGSGEAVTEESPAPPNEATPTAAPPTLPPTTVGATGAVSSTDATAIAATTEATTVPIIPTVAPTTIATTTTVATTTTTTAAATTTTESPPTTTSGTKIHESAPDEQSIWNVTVLPNSKWANITWKHNFGPGTDFVVEYIDSNHTKKTVPVKAQAQPIQLTDLYPGMTYTLRVYSRDNEGISSTVITFMTSTAYTNNQADIATQGWFIGLMCAIALLVLILLIVCFIKRSRGGKYPVREKKDVPLGPEDPKEEDGSFDYSDEDNKPLQGSQTSLDGTIKQQESDDSLVDYGEGGEGQFNEDGSFIGQYTVKKDKEETEGNESSEATSPVNAIYSLA

SEQ ID NO: 9322 - protein, 1240 aa, Homo Sapiens; identical to SEQ ID NO: 9321

SEQ ID NO: 9323 - protein, 619 aa, Homo Sapiens
MARQPPPPWVHAAFLLCLLSLGGAIEIPMDPSIQNELTQPPTITKQSAKDHIVDPRDNILIECEAKGNPAPSFHWTRNSRFFNIAKDPRVSMRRRSGTLVIDFRSGGRPEEYEGEYQCFARNKFGTALSNRIRLQVSKSPLWPKENLDPVVVQEGAPLTLQCNPPPGLPSPVIFWMSSSMEPITQDKRVSQGHNGDLYFSNVMLQDMQTDYSCNARFHFTHTIQQKNPFTLKVLTTRGVAERTPSFMYPQGTASSQMVLRGMDLLLECIASGVPTPDIAWYKKGGDLPSDKAKFENFNKALRITNVSEEDSGEYFCLASNKMGSIRHTISVRVKAAPYWLDEPKNLILAPGEDGRLVCRANGNPKPTVQWMVNGEPLQSAPPNPNREVAGDTIIFRDTQISSRAVYQCNTSNEHGYLLANAFVSVLDVPPRMLSPRNQLIRVILYNRTRLDCPFFGSPIPTLRWFKNGQGSNLDGGNYHVYENGSLEIKMIRKEDQGIYTCVATNILGKAENQVRLEVKDPTRIYRMPEDQVARRGTTVQLECRVKHDPSLKLTVSWLKDDEPLYIGNRMKKEDDSLTIFGVAERDQGSYTCVASTELDQDLAKAYLTVLGNCPCSPWH

SEQ ID NO: 9324 - protein, 218 aa, Homo Sapiens
PPTTVGATGAVSSTDATAIAATTEATTVPIIPTVAPTTIATTTTVATTTTTTAAATTTTESPPTTTSGTKIHESAYTNNQADIATQGWFIGLMCAIALLVLILLIVCFIKRSRGGKYPVREKKDVPLGPEDPKEEDGSFDYSDEDNKPLQGSQTSLDGTIKQQESDDSLVDYGEGGEGQFNEDGSFIGQYTVKKDKEETEGNESSEATSPVNAIYSLA

SEQ ID NO: 9325 - protein, 237 aa, Homo Sapiens
  misc_feature (1)..(1): Xaa can be any naturally occurring amino acid
XENFSPNQTKFTVQRTDPVSRYRFTLSARTQVGSGEAVTEESPAPPNEATPTAAPDEQSIWNVTVLPNSKWANITWKHNFGPGTDFVVEYIDSNHTKKTVPVKAQAQPIQLTDLYPGMTYTLRVYSRDNEGISSTVITFMTSTAYTNNQADIATQGWFIGLMCAIALLVLILLIVCFIKRSRGGKYPVREKKDVPLGPEDPKEEDGSFDYSDEDNKPLQGSQTSLDGTIKQQESDDS

SEQ ID NO: 9326 - protein, 298 aa, Homo Sapiens
  misc_feature (1)..(1): Xaa can be any naturally occurring amino acid
XRETREAWNNVTVWGSRYVVGQTPVYVPYEIRVQAENDFGKGPEPESVIGYSGEDLPSAPRRFRVRQPNLETINLEWDHPEHPNGIMIGYTLKYVAFNGTKVGKQIVENFSPNQTKFTVQRTDPVSRYRFTLSARTQVGSGEAVTEESPAPPNEAYTNNQADIATQGWFIGLMCAIALLVLILLIVCFIKRSRGGKYPVREKKDVPLGPEDPKEEDGSFDYSDEDNKPLQGSQTSLDGTIKQQESDDSLVDYGEGGEGQFNEDGSFIGQYTVKKDKEETEGNESSEATSPVNAIYSLA

SEQ ID NO: 9327 - protein, 1041 aa, Homo Sapiens
  misc_feature (1)..(1): Xaa can be any naturally occurring amino acid
XSIQNELTQPPTITKQSAKDHIVDPRDNILIECEAKGNPAPSFHWTRNSRFFNIAKDPRVSMRRRSGTLVIDFRSGGRPEEYEGEYQCFARNKFGTALSNRIRLQVSKSPLWPKENLDPVVVQEGAPLTLQCNPPPGLPSPVIFWMSSSMEPITQDKRVSQGHNGDLYFSNVMLQDMQTDYSCNARFHFTHTIQQKNPFTLKVLTTRGVAERTPSFMYPQGTASSQMVLRGMDLLLECIASGVPTPDIAWYKKGGDLPSDKAKFENFNKALRITNVSEEDSGEYFCLASNKMGSIRHTISVRVKAAPYWLDEPKNLILAPGEDGRLVCRANGNPKPTVQWMVNGEPLQSAPPNPNREVAGDTIIFRDTQISSRAVYQCNTSNEHGYLLANAFVSVLDVPPRMLSPRNQLIRVILYNRTRLDCPFFGSPIPTLRWFKNGQGSNLDGGNYHVYENGSLEIKMIRKEDQGIYTCVATNILGKAENQVRLEVKDPTRIYRMPEDQVARRGTTVQLECRVKHDPSLKLTVSWLKDDEPLYIGNRMKKEDDSLTIFGVAERDQGSYTCVASTELDQDLAKAYLTVLADQATPTNRLAALPKGRPDRPRDLELTDLAERSVRLTWIPGDANNSPITDYVVQFEEDQFQPGVWHDHSKYPGSVNSAVLRLSPYVNYQFRVIAINEVGSSHPSLPSERYRTSGAPPESNPGDVKGEGTRKNNMEITWTPMNATSAFGPNLRYIVKWRRRETREAWNNVTVWGSRYVVGQTPVYVPYEIRVQAENDFGKGPEPESVIGYSGEDLPSAPRRFRVRQPNLETINLEWDHPEHPNGIMIGYTLKYVAFNGTKVGKQIVENFSPNQTKFTVQRTDPVSRYRFTLSARTQVGSGEAVTEESPAPPNEATPTAAYTNNQADIATQGWFIGLMCAIALLVLILLIVCFIKRSRGGKYPVREKKDVPLGPEDPKEEDGSFDYSDEDNKPLQGSQTSLDGTIKQQESDDSLVDYGEGGEGQFNEDGSFIGQYTVKKDKEETEGNESSEATSPVNAIYSLA

SEQ ID NO: 9328 - protein, 573 aa, Homo Sapiens
MGWESHLTAASADIDLGAGREVFDYSHRQKEQDVEKELRDGGEQDTWAGEGAEALARNLLVDGETGESFPAQFPADISSITEAVPSESEPPALQNNLLSPLLTGTESPFDLEQQWQDLMSIMEMQAMEVNTSASEILYSAPPGDPLSTNYSLAPNTPINQNVSLHQASLGGCSQDFLLFSPEVESLPVASSSTLLPLAPSNSTSLNSTFGSTNLTGLFFPPQLNGTANDTAGPELPDPLGGLLDEAMLDEISLMDLAIEEGFNPVQASQLEEEFDSDSGLSLDSSHSPSSLSSSEGSSSSSSSSSSSSSSASSSASSSFSEEGAVGYSSDSETLDLEEAEGAVGYQPEYSKFCRMSYQDPAQLSCLPYLEHVGHNHTYNMAPSALDSADLPPPSALKKGSKEKQADFLDKQMSRDEHRARAMKIPFTNDKIINLPVEEFNELLSKYQLSEAQLSLIRDIRRRGKNKMAAQNCRKRKLDTILNLERDVEDLQRDKARLLREKVEFLRSLRQMKQKVQSLYQEVFGRLRDENGRPYSPSQYALQYAGDGSVLLIPRTMADQQARRQERKPKDRRK

SEQ ID NO: 9329 - protein, 584 aa, Homo Sapiens
MGWESHLTAASADIDLIDILWRQDIDLGAGREVFDYSHRQKEQDVEKELRDGGEQDTWAGEGAEALARNLLVDGETGESFPAQFPADISSITEAVPSESEPPALQNNLLSPLLTGTESPFDLEQQWQDLMSIMEMQAMEVNTSASEILYSAPPGDPLSTNYSLAPNTPINQNVSLHQASLGGCSQDFLLFSPEVESLPVASSSTLLPLAPSNSTSLNSTFGSTNLTGLFFPPQLNGTANDTAGPELPDPLGGLLDEAMLDEISLMDLAIEEGFNPVQASQLEEEFDSDSGLSLDSSHSPSSLSSSEGSSSSSSSSSSSSSSASSSASSSFSEEGAVGYSSDSETLDLEEAEGAVGYQPEYSKFCRMSYQDPAQLSCLPYLEHVGHNHTYNMAPSALDSADLPPPSALKKGSKEKQADFLDKQMSRDEHRARAMKIPFTNDKIINLPVEEFNELLSKYQLSEAQLSLIRDIRRRGKNKMAAQNCRKRKLDTILNLERDVEDLQRDKARLLREKVEFLRSLRQMKQKVQSLYQEVFGRLRDENGRPYSPSQYALQYAGDGSVLLIPRTMADQQARRQERKPKDRRK

SEQ ID NO: 9330 - protein, 4 aa, Homo Sapiens
MLSL

SEQ ID NO: 9331 - protein, 9 aa, Homo Sapiens
MLSLKKYLT

SEQ ID NO: 9332 - protein, 83 aa, Homo Sapiens
MLSLKKYLTEGLLQFTILLSLIGVRVDVDTYLTSQLPPLREIILGPSSAYTQTQFHNLRNTLDGYGIHPKSIDLDNYFTARRL

SEQ ID NO: 9333 - protein, 99 aa, Homo Sapiens
MLSLKKYLTEGLLQFTILLSLIGVRVDVDTYLTSQLPPLREIILGPSSAYTQTQFHNLRNTLDGYGIHPKSIDLDNYFTARRLLSQVRALDRFQVPTTE

SEQ ID NO: 9334 - protein, 761 aa, Homo Sapiens
MLSLKKYLTEGLLQFTILLSLIGVRVDVDTYLTSQLPPLREIILGPSSAYTQTQFHNLRNTLDGYGIHPKSIDLDNYFTARRLLSQVRALDRFQVPTTEVNAWLVHRDPEGSVSGSQPNSGLALESSSGLQDVTGPDNGVRESETEQGFGEDLEDLGAVAPPVSGDLTKEDIDLGAGREVFDYSHRQKEQDVEKELRDGGEQDTWAGEGAEALARNLLVDGETGESFPAQVPSGEDQTALSLEECLRLLEATCPFGENAEFPADISSITEAVPSESEPPALQNNLLSPLLTGTESPFDLEQQWQDLMSIMEMQAMEVNTSASEILYSAPPGDPLSTNYSLAPNTPINQNVSLHQASLGGCSQDFLLFSPEVESLPVASSSTLLPLAPSNSTSLNSTFGSTNLTGLFFPPQLNGTANDTAGPELPDPLGGLLDEAMLDEISLMDLAIEEGFNPVQASQLEEEFDSDSGLSLDSSHSPSSLSSSEGSSSSSSSSSSSSSSASSSASSSFSEEGAVGYSSDSETLDLEEAEGAVGYQPEYSKFCRMSYQDPAQLSCLPYLEHVGHNHTYNMAPSALDSADLPPPSALKKGSKEKQADFLDKQMSRDEHRARAMKIPFTNDKIINLPVEEFNELLSKYQLSEAQLSLIRDIRRRGKNKMAAQNCRKRKLDTILNLERDVEDLQRDKARLLREKVEFLRSLRQMKQKVQSLYQEVFGRLRDENGRPYSPSQYALQYAGDGSVLLIPRTMADQQARRQERKPKDRRK

SEQ ID NO: 9335 - protein, 742 aa, Homo Sapiens
MLSLKKYLTEGLLQFTILLSLIGVRVDVDTYLTSQLPPLREIILGPSSAYTQTQFHNLRNTLDGYGIHPKSIDLDNYFTARRLLSQVRALDRFQVPTTEVNAWLVHRDPEGSVSGSQPNSGLALESSSGLQDVTGPDNGVRESETEQGFGEDLEDLGAVAPPVSGDLTKEDIDLIDILWRQDIDLGAGREVFDYSHRQKEQDVEKELRDGGEQDTWAGEGAEALARNLLVDGETGESFPAQFPADISSITEAVPSESEPPALQNNLLSPLLTGTESPFDLEQQWQDLMSIMEMQAMEVNTSASEILYSAPPGDPLSTNYSLAPNTPINQNVSLHQASLGGCSQDFLLFSPEVESLPVASSSTLLPLAPSNSTSLNSTFGSTNLTGLFFPPQLNGTANDTAGPELPDPLGGLLDEAMLDEISLMDLAIEEGFNPVQASQLEEEFDSDSGLSLDSSHSPSSLSSSEGSSSSSSSSSSSSSSASSSASSSFSEEGAVGYSSDSETLDLEEAEGAVGYQPEYSKFCRMSYQDPAQLSCLPYLEHVGHNHTYNMAPSALDSADLPPPSALKKGSKEKQADFLDKQMSRDEHRARAMKIPFTNDKIINLPVEEFNELLSKYQLSEAQLSLIRDIRRRGKNKMAAQNCRKRKLDTILNLERDVEDLQRDKARLLREKVEFLRSLRQMKQKVQSLYQEVFGRLRDENGRPYSPSQYALQYAGDGSVLLIPRTMADQQARRQERKPKDRRK

SEQ ID NO: 9336 - protein, 742 aa, Homo Sapiens; identical to SEQ ID NO: 9335

SEQ ID NO: 9337 - protein, 772 aa, Homo Sapiens
MLSLKKYLTEGLLQFTILLSLIGVRVDVDTYLTSQLPPLREIILGPSSAYTQTQFHNLRNTLDGYGIHPKSIDLDNYFTARRLLSQVRALDRFQVPTTEVNAWLVHRDPEGSVSGSQPNSGLALESSSGLQDVTGPDNGVRESETEQGFGEDLEDLGAVAPPVSGDLTKEDIDLIDILWRQDIDLGAGREVFDYSHRQKEQDVEKELRDGGEQDTWAGEGAEALARNLLVDGETGESFPAQVPSGEDQTALSLEECLRLLEATCPFGENAEFPADISSITEAVPSESEPPALQNNLLSPLLTGTESPFDLEQQWQDLMSIMEMQAMEVNTSASEILYSAPPGDPLSTNYSLAPNTPINQNVSLHQASLGGCSQDFLLFSPEVESLPVASSSTLLPLAPSNSTSLNSTFGSTNLTGLFFPPQLNGTANDTAGPELPDPLGGLLDEAMLDEISLMDLAIEEGFNPVQASQLEEEFDSDSGLSLDSSHSPSSLSSSEGSSSSSSSSSSSSSSASSSASSSFSEEGAVGYSSDSETLDLEEAEGAVGYQPEYSKFCRMSYQDPAQLSCLPYLEHVGHNHTYNMAPSALDSADLPPPSALKKGSKEKQADFLDKQMSRDEHRARAMKIPFTNDKIINLPVEEFNELLSKYQLSEAQLSLIRDIRRRGKNKMAAQNCRKRKLDTILNLERDVEDLQRDKARLLREKVEFLRSLRQMKQKVQSLYQEVFGRLRDENGRPYSPSQYALQYAGDGSVLLIPRTMADQQARRQERKPKDRRK

SEQ ID NO: 9338 - protein, 19 aa, Homo Sapiens
MSIMEMQAMEVNTSASEIL

SEQ ID NO: 9339 - protein, 23 aa, Homo Sapiens
MSIMEMQAMEVNTSASEILYSAP

SEQ ID NO: 9340 - protein, 47 aa, Homo Sapiens
MSIMEMQAMEVNTSASEILYSAPPGDPLSTNYSLAPNTPINQNVSLH

SEQ ID NO: 9341 - protein, 63 aa, Homo Sapiens
MSIMEMQAMEVNTSASEILYSAPPGDPLSTNYSLAPNTPINQNVSLHQASLGGCSQDFLLFSP

SEQ ID NO: 9342 - protein, 161 aa, Homo Sapiens
MTRLDRSSHSGGGHAKGSRPLNSLLAGHRVAQPASAPGSRASVQDIDLGAGREVFDYSHRQKEQDVEKELRDGGEQDTWAGEGAEALARNLLVDGETGESFPAQFPADISSITEAVPSESEPPALQNNLLSPLLTGTESPFDLEQQWQDLMSIMEMQAMEV

SEQ ID NO: 9343 - protein, 63 aa, Homo Sapiens
MTRLDRSSHSGGGHAKGSRPLNSLLAGHRVAQPASAPGSRASVQDIDLIDILWRQDIDLGAGR

SEQ ID NO: 9344 - protein, 111 aa, Homo Sapiens
MTRLDRSSHSGGGHAKGSRPLNSLLAGHRVAQPASAPGSRASVQDIDLIDILWRQDIDLGAGREVFDYSHRQKEQDVEKELRDGGEQDTWAGEGAEALARNLLVDGETGES

SEQ ID NO: 9345 - protein, 616 aa, Homo Sapiens
MTRLDRSSHSGGGHAKGSRPLNSLLAGHRVAQPASAPGSRASVQDIDLIDILWRQDIDLGAGREVFDYSHRQKEQDVEKELRDGGEQDTWAGEGAEALARNLLVDGETGESFPAQFPADISSITEAVPSESEPPALQNNLLSPLLTGTESPFDLEQQWQDLMSIMEMQAMEVNTSASEILYSAPPGDPLSTNYSLAPNTPINQNVSLHQASLGGCSQDFLLFSPEVESLPVASSSTLLPLAPSNSTSLNSTFGSTNLTGLFFPPQLNGTANDTAGPELPDPLGGLLDEAMLDEISLMDLAIEEGFNPVQASQLEEEFDSDSGLSLDSSHSPSSLSSSEGSSSSSSSSSSSSSSASSSASSSFSEEGAVGYSSDSETLDLEEAEGAVGYQPEYSKFCRMSYQDPAQLSCLPYLEHVGHNHTYNMAPSALDSADLPPPSALKKGSKEKQADFLDKQMSRDEHRARAMKIPFTNDKIINLPVEEFNELLSKYQLSEAQLSLIRDIRRRGKNKMAAQNCRKRKLDTILNLERDVEDLQRDKARLLREKVEFLRSLRQMKQKVQSLYQEVFGRLRDENGRPYSPSQYALQYAGDGSVLLIPRTMADQQARRQERKPKDRRK

SEQ ID NO: 9346 - protein, 133 aa, Homo Sapiens
SEEGAVGYSSDSETLDLEEAEGAVGYQPEYSKFCRMSYQDPAQLSCLPYLEHVGHNHTYNMAPSALDSADLPPPSALKKGSKEKQADFLDKQMSRDEHRARAMKIPFTNDKIINLPVEELCGAKADRGEGMDL

SEQ ID NO: 9347 - protein, 694 aa, Homo Sapiens
MKHLKRWWSAGGGLLHLTLLLSLAGLRVDLDLYLLLPPPTLLQDELLFLGGPASSAYALSPFSASGGWGRAGHLHPKGRELDPAAPPEGQLLREVRALGVPFVPRTSVDAWLVHSVAAGSADEAHGLLGAAAASSTGGAGASVDGGSQAVQGGGGDPRAARSGPLDAGEEEKAPAEPTAQVPDAGGCASEENGVLREKHEAVDHSSQHEENEERVSAQKENSLQQNDDDENKIAEKPDWEAEKTTESRNERHLNGTDTSFSLEDLFQLLSSQPENSLEGISLGDIPLPGSISDGMNSSAHYHVNFSQAISQDVNLHEAILLCPNNTFRRDPTARTSQSQEPFLQLNSHTTNPEQTLPGTNLTGFLSPVDNHMRNLTSQDLLYDLDINIFDEINLMSLATEDNFDPIDVSQLFDEPDSDSGLSLDSSHNNTSVIKSNSSHSVCDEGAIGYCTDHESSSHHDLEGAVGGYYPEPSKLCHLDQSDSDFHGDLTFQHVFHNHTYHLQPTAPESTSEPFPWPGKSQKIRSRYLEDTDRNLSRDEQRAKALHIPFSVDEIVGMPVDSFNSMLSRYYLTDLQVSLIRDIRRRGKNKVAAQNCRKRKLDIILNLEDDVCNLQAKKETLKREQAQCNKAINIMKQKLHDLYHDIFSRLRDDQGRPVNPNHYALQCTHDGSILIVPKELVASGHKKETQKGKRK

SEQ ID NO: 9348 - protein, 83 aa, Homo Sapiens
NEERVSAQKENSLQQNDDDENKIAEKPDWEAEKTTESRNERHLNGTDTSFSLEDLFQLLSSQPENSLEVIGTLAFILAGTYLH

SEQ ID NO: 9349 - protein, 238 aa, Homo Sapiens
MELLAAAFSAACAVDHDSSTSESDARDSAAGHLPGSESSSTPGNGATPEEWPALADSPTTLTEALRMIHPIPADSWRNLIEQIGLLYQEYRDKSTLQEIETRRQQDAEIEDNTNGSPASEDTPEEEEEEEEEEEPASPPERKTLPQICLLSNPHSRFNLWQDLPEIRSSGVLEILQPEEIKLQEAMFELVTSEASYYKSLNLLVSHFMENERIRKILHPSEAHILFSNVLDVLAVSER

SEQ ID NO: 9350 - protein, 618 aa, Homo Sapiens
MELLAAAFSAACAVDHDSSTSESDARDSAAGHLPGSESSSTPGNGATPEEWPALADSPTTLTEALRMIHPIPADSWRNLIEQIGLLYQEYRDKSTLQEIETRRQQDAEIEDNTNGSPASEDTPEEEEEEEEEEEPASPPERKTLPQICLLSNPHSRFNLWQDLPEIRSSGVLEILQPEEIKLQEAMFELVTSEASYYKSLNLLVSHFMENERIRKILHPSEAHILFSNVLDVLAVSERFLLELEHRMEENIVISDVCDIVYRYAADHFSVYITYVSNQTYQERTYKQLLQEKAAFRELIAQLELDPKCRGLPFSSFLILPFQRITRLKLLVQNILKRVEERSERECTALDAHKELEMVVKACNEGVRKMSRTEQMISIQKKMEFKIKSVPIISHSRWLLKQGELQQMSGPKTSRTLRTKKLFHEIYLFLFNDLLVICRQIPGDKYQVFDSAPRGLLRVEELEDQGQTLANVFILRLLENADDREATYMLKASSQSEMKRWMTSLAPNRRTKFVSFTSRLLDCPQVQCVHPYVAQQPDELTLELADILNILDKTDDGWIFGERLHDQERGWFPSSMTEEILNPKIRSQNLKECFRVHKMDDPQRSQNKDRRKLGSRNRQ

SEQ ID NO: 9351 - protein, 710 aa, Homo Sapiens
METRESEDLEKTRRKSASDQWNTDNEPAKVKPELLPEKEETSQADQDIQDKEPHCHIPIKRNSIFNRSIRRKSKAKARDNPERNASCLADSQDNGKSVNEPLTLNIPWSRMPPCRTAMQTDPGAQEMSESSSTPGNGATPEEWPALADSPTTLTEALRMIHPIPADSWRNLIEQIGLLYQEYRDKSTLQEIETRRQQDAEIEDNTNGSPASEDTPEEEEEEEEEEEPASPPERKTLPQICLLSNPHSRFNLWQDLPEIRSSGVLEILQPEEIKLQEAMFELVTSEASYYKSLNLLVSHFMENERIRKILHPSEAHILFSNVLDVLAVSERFLLELEHRMEENIVISDVCDIVYRYAADHFSVYITYVSNQTYQERTYKQLLQEKAAFRELIAQLELDPKCRGLPFSSFLILPFQRITRLKLLVQNILKRVEERSERECTALDAHKELEMVVKACNEGVRKMSRTEQMISIQKKMEFKIKSVPIISHSRWLLKQGELQQMSGPKTSRTLRTKKLFHEIYLFLFNDLLVICRQIPGDKYQVFDSAPRGLLRVEELEDQGQTLANVFILRLLENADDREATYMLKASSQSEMKRWMTSLAPNRRTKFVSFTSRLLDCPQVQCVHPYVAQQPDELTLELADILNILDKTDDGWIFGERLHDQERGWFPSSMTEEILNPKIRSQNLKECFRVHKMDDPQRSQNKDRRKLGSRNRQ

SEQ ID NO: 9352 - protein, 187 aa, Homo Sapiens
MFELVTSEASYYKSLNLLVSHFMENERIRKILHPSEAHILFSNVLDVLAVSERFLLELEHRMEENIVISDVCDIVYRYAADHFSVYITYVSNQTYQERTYKQLLQEKAAFRELIAQLELDPKCRGLPFSSFLILPFQRITRLKLLVQNILKRVEERSERECTALDAHKELEMVVKACNEGVRKMSRT

SEQ ID NO: 9353 - protein, 150 aa, Homo Sapiens
MVVKACNEGVRKMSRTEQMISIQKKMEFKIKSVPIISHSRWLLKQGELQQMSGPKTSRTLRTKKLFHEIYLFLFNDLLVICRQIPGDKYQVFDSAPRGLLRVEELEDQGQTLANVFILRLLENADDREATYMLKASSQSEMKRWMTSLAP

SEQ ID NO: 9354 - protein, 97 aa, Homo Sapiens
  misc_feature (1)..(1): Xaa can be any naturally occurring amino acid
XELLPEKEETSQADQDIQDKEPHCHIPIKRNSIFNRSIRRKSKAKARDNPERNASCLADSQDNGKSVNEPLTLNIPWSRMPPCRTAMQTDPGAQEMR

SEQ ID NO: 9355 - protein, 241 aa, Homo Sapiens
MSMLFYTLITAFLIGIQAEPHSESNVPAGHTIPQAHWTKLQHSLDTALRRARSAPAAAIAARVAGQTRNITVDPRLFKKRRLRSPRVLFSTQPPREAADTQDLDFEVGGAAPFNRTHRSKRSSSHPIFHRGEFSVCDSVSVWVGDKTTATDIKGKEVMVLGEVNINNSVFKQYFFETKCRDPNPVDSGCRGIDSKHWNSYCTTTHTFVKALTMDGKQAAWRFIRIDTACVCVLSRKAVRRA

SEQ ID NO: 9356 - protein, 633 aa, Homo Sapiens
AALGSSSGSASPAVAELCQNTPETFLEASKLLLTYADNILRNPNDEKYRSIRIGNTAFSTRLLPVRGAVECLFEMGFEEGETHLIFPKKASVEQLQKIRDLIAIERSSRLDGSNKSHKVKSSQQPAASTQLPTTPSSNPSGLNQHTRNRQGQSSDPPSASTVAADSAILEVLQSNIQHVLVYENPALQEKALACIPVQELKRKSQEKLSRARKLDKGINISDEDFLLLELLHWFKEEFFHWVNNVLCSKCGGQTRSRDRSLLPSDDELKWGAKEVEDHYCDACQFSNRFPRYNNPEKLLETRCGRCGEWANCFTLCCRAVGFEARYVWDYTELQRTLSLKLTTLKEIGKTFLRISKRQKLIQVVDVTWRYSCKHEEVIARRTKVKEALLRDTINGLNKQRQLFLSENRRKELLQRIIVELVEFISPKTPKPGELGGRISGSVAWRVARGEMGLQRKETLFIPCENEKISKQLHLCYNIVKDRYVRVSNNNQTISGWENGVWKMESIFRKVETDWHMVYLARKEGSSFAYISWKFECGSVGLKVDSISIRTSSQTFQTGTVEWKLRSDTAQVELTGDNSLHSYADFSGATEVILEAELSRGDGDVAWQHTQLFRQSLNDHEENCLEIIIKFSDL

SEQ ID NO: 9357 - protein, 654 aa, Homo Sapiens [sequence omitted]

SEQ ID NO: 9358 - protein, 558 aa, Homo Sapiens
MAAAALGSSSGSASPAVAELCQNTPETFLEASKLLLTYADNILRNPNDEKYRSIRIGNTAFSTRLLPVRGAVECLFEMGFEEGETHLIFPKKASVEQLQKIRDLIAIERSSRLDGSNKSHKVKSSQQPAASTQLPTTPSSNPSGLNQHTRNRQGQSSDPPSASTVAADSAILEVLQSNIQHVLVYENPALQEKALACIPVQELKRKSQEKLSRARKLDKGINISDEDFLLLELLHWFKEEFFHWVNNVLCSKCGGQTRSRDRSLLPSDDELKWGAKEVEDHYCDACQFSNRFPRYNNPEKLLETRCGRCGEWANCFTLCCRAVGFEARYVWDYTDHVWTEVYSPSQQRWLHCDACEDVCDKPLLYEIGWGKKLSYVIAFSKDEVVDVTWRYSCKHEEVIARRTKVKEALLRDTINGLNKQRQLFLSENRRKELLQRIIVELVEFISPKTPKPGELGGRISGSVAWRVARGEMGLQRKETLFIPCENEKISKQLHLCYNIVKDRYVRVSNNNQTISGWENGVWKMESIFRKVETDWHMITVFTPMLIFLVPLKLFWKQN

SEQ ID NO: 9359 - protein, 636 aa, Homo Sapiens
MAAAALGSSSGSASPAVAELCQNTPETFLEASKLLLTYADNILRNPNDEKYRSIRIGNTAFSTRLLPVRGAVECLFEMGFEEGETHLIFPKKASVEQLQKIRDLIAIERSSRLDGSNKSHKVKSSQQPAASTQLPTTPSSNPSGLNQHTRNRQGQSSDPPSASTVAADSAILEVLQSNIQHVLVYENPALQEKALACIPVQELKRKSQEKLSRARKLDKGINISDEDFLLLELLHWFKEEFFHWVNNVLCSKCGGQTRSRDRSLLPSDDELKWGAKEVEDHYCDACQFSNRFPRYNNPEKLLETRCGRCGEWANCFTLCCRAVGFEARYVWDYTELQRTLSLKLTTLKEIGKTFLRISKRQKLIQVVDVTWRYSCKHEEVIARRTKVKEALLRDTINGLNKQRQLFLSENRRKELLQRIIVELVEFISPKTPKPGELGGRISGSVAWRVARGEMGLQRKETLFIPCENEKISKQLHLCYNIVKDRYVRVSNNNQTISGWENGVWKMESIFRKVETDWHMVYLARKEGSSFAYISWKFECGSVGLKVDSISIRTSSQTFQTGTVEWKLRSDTAQVELTGDNSLHSYADFSGATEVILEAELSRGDGDVAWQHTQLFRQSLNDHEENCLEIIIKFSDL

SEQ ID NO: 9360 - protein, 114 aa, Homo Sapiens
MGFEEGETHLIFPKKASVEQLQKIRDLIAIERSSRLDGSNKSHKVKSSQQPAASTQLPTTPSSNPSGLNQHTRNRQGQSSDPPSASTVAADSAILEVLQSNIQHVLVYENPALQ

SEQ ID NO: 9361 - protein, 612 aa, Homo Sapiens
MRNPNDEKYRSIRIGNTAFSTRLLPVRGAVECLFEMGFEEGETHLIFPKKASVEQLQKIRDLIAIERSSRLDGSNKSHKVKSSQQPAASTQLPTTPSSNPSGLNQHTRNRQGQSSDPPSASTVAADSAILEVLQSNIQHVLVYENPALQEKALACIPVQELKRKSQEKLSRARKLDKGINISDEDFLLLELLHWFKEEFFHWVNNVLCSKCGGQTRSRDRSLLPSDDELKWGAKEVEDHYCDACQFSNRFPRYNNPEKLLETRCGRCGEWANCFTLCCRAVGFEARYVWDYTDHVWTEVYSPSQQRWLHCDACEDVCDKPLLYEIGWGKKLSYVIAFSKDEVVDVTWRYSCKHEEVIARRTKVKEALLRDTINGLNKQRQLFLSENRRKELLQRIIVELVEFISPKTPKPGELGGRISGSVAWRVARGEMGLQRKETLFIPCENEKISKQLHLCYNIVKDRYVRVSNNNQTISGWENGVWKMESIFRKVETDWHMVYLARKEGSSFAYISWKFECGSVGLKVDSISIRTSSQTFQTGTVEWKLRSDTAQVELTGDNSLHSYADFSGATEVILEAELSRGDGDVAWQHTQLFRQSLNDHEENCLEIIIKFSDL

SEQ ID NO: 9362 - protein, 240 aa, Homo Sapiens
  misc_feature (1)..(1): Xaa can be any naturally occurring amino acid
XSGSASPAVAELCQNTPETFLEASKLLLTYADNILRNPNDEKYRSIRIGNTAFSTRLLPVRGAVECLFEMGFEEGETHLIFPKKASVEQLQKIRDLIAIERSSRLDGSNKSHKVKSSQQPAASTQLPTTPSSNPSGLNQHTRNRQGQSSDPPSASTVAADSAILEVLQSNIQHVLVYENPALQEKALACIPVQELKRKSQEKLSRARKLDKDIITLRNFWKQDVDGVASGPIVLHCAAEL

SEQ ID NO: 9363 - protein, 23 aa, Homo Sapiens
EAPGAPPRTLTWEAMEQIRYLSS

SEQ ID NO: 9364 - protein, 291 aa, Homo Sapiens
MAVTLSLLLGGRVCAAVTRCGFATRGVAGPGPIGREPDPDSDWEPEERELQEVESTLKRQKQAIRFQKIRRQMEAPGAPPRTLTWEAMEQIRYLHEEFPESWSVPRLAEGFDVSTDVIRRVLKSKFLPTLEQKLKQDQKVLKKAGLAHSLQHLRGSGNTSKLLPAGHSVSGSLLMPGHEASSKDPNHSTALKVIESDTHRTNTPRRRKGRNKEIQDLEESFVPVAAPLGHPRELQKYSSDSESPRGTGSGALPSGQKLEELKAEEPDNFSSKVVQRGREFFDSNGNFLYRI

SEQ ID NO: 9365 - protein, 280 aa, Homo Sapiens
MARFWVCVAGAGFFLAFLVLHSRFCGSPVLRNFTFAVSWRTEKILYRLDVGWPKHPEYFTGTTFCVAVDSLNGLVYIGQRGDNIPKILVFTEDGYFLRAWNYTVDTPHGIFAASTLYEQSVWITDVGSDFMILWLHGENGTGPAKFNIPHSVTLDSAGRVWVADRGNKRIQVFDKDTGEWLGAWNNCFTEEGPSSVRFTPDGKYLIVAQLNLSRLSVVAAPPVGSIGECSVISTIQLADQVLPHLLEVDRKTGAVYVAEIGAKQVQKYVPLNSYVPSFGS

SEQ ID NO: 9366 - protein, 347 aa, Homo Sapiens
MARFWVCVAGAGFFLAFLVLHSRFCGSPVLRNFTFAVSWRTEKILYRLDVGWPKHPEYFTGTTFCVAVDSLNGLVYIGQRGDNIPKILVFTEDGYFLRAWNYTVDTPHGIFAASTLYEQSVWITDVGSGFFGHTVKKYSSFGDLVQVLGTPGKKGTSLNPLQFDNPAELYVEDTGDIYIVDGDGGLNNRLIKLSQDFMILWLHGENGTGPAKFNIPHSVTLDSAGRVWVADRGNKRIQVFDKDTGEWLGAWNNCFTEEGPSSVRFTPDGKYLIVAQLNLSRLSVVAAPPVGSIGECSVISTIQLADQVLPHLLEVDRKTGAVYVAEIGAKQVQKYVPLNSYVPSFGS

SEQ ID NO: 9367 - protein, 150 aa, Homo Sapiens
MILWLHGENGTGPAKFNIPHSVTLDSAGRVWVADRGNKRIQVFDKDTGEWLGAWNNCFTEEGPSSVRFTPDGKYLIVAQLNLSRLSVVAAPPVGSIGECSVISTIQLADQVLPHLLEVDRKTGAVYVAEIGAKQVQKYVPLNSYVPSFGS

SEQ ID NO: 9368 - protein, 1247 aa, Homo Sapiens
MLASSSRIRAAWTRALLLPLLLAGPVGCLSRQELFPFGPGQGDLELEDGDDFVSPALELSGALRFYDRSDIDAVYVTTNGIIATSEPPAKESHPGLFPPTFGAVAPFLADLDTTDGLGKVYYREDLSPSITQRAAECVHRGFPEISFQPSSAVVVTWESVAPYQGPSRDPDQKGKRNTFQAVLASSDSSSYAIFLYPEDGLQFHTTFSKKENNQVPAVVAFSQGSVGFLWKSNGAYNIFANDRESVENLAKSSNSGQQGVWVFEIGSPATTNGVVPADVILGTEDGAEYDDEDEDYDLATTRLGLEDVGTTPFSYKALRRGGADTYSVPSVLSPRRAATERPLGPPTERTRSFQLAVETFHQQHPQVIDVDEVEETGVVFSYNTDSRQTCANNRHQCSVHAECRDYATGFCCSCVAGYTGNGRQCVAEGSPQRVNGKVKGRIFVGSSQVPIVFENTDLHSYVVMNHGRSYTAISTIPETVGYSLLPLAPVGGIIGWMFAVEQDGFKNGFSITGGEFTRQAEVTFVGHPGNLVIKQRFSGIDEHGHLTIDTELEGRVPQIPFGSSVHIEPYTELYHYSTSVITSSSTREYTVTEPERDGASPSRIYTYQWRQTITFQECVHDDSRPALPSTQQLSVDSVFVLYNQEEKILRYALSNSIGPVREGSPDALQNPCYIGTHGCDTNAACRPGPRTQFTCECSIGFRGDGRTCYDIDECSEQPSVCGSHTICNNHPGTFRCECVEGYQFSDEGTCVAVVDQRPINYCETGLHNCDIPQRAQCIYTGGSSYTCSCLPGFSGDGQACQDVDECQPSRCHPDAFCYNTPGSFTCQCKPGYQGDGFRCVPGEVEKTRCQHEREHILGAAGATDPQRPIPPGLFVPECDAHGHYAPTQCHGSTGYCWCVDRDGREVEGTRTRPGMTPPCLSTVAPPIHQGPAVPTAVIPLPPGTHLLFAQTGKIERLPLEGNTMRKTEAKAFLHVPAKVIIGLAFDCVDKMVYWTDITEPSIGRASLHGGEPTTIIRQDLGSPEGIAVDHLGRNIFWTDSNLDRIEVAKLDGTQRRVLFETDLVNPRGIVTDSVRGNLYWTDWNRDNPKIETSYMDGTNRRILVQDDLGLPNGLTFDAFSSQLCWVDAGTNRAECLNPSQPSRRKALEGLQYPFAVTSYGKNLYFTDWKMNSVVALDLAISKETDAFQPHKQTRLYGITTALSQCPQGHNYCSVNNGGCTHLCLATPGSRTCRCPDNTLGVDCIEQK

SEQ ID NO: 9369 - protein, 1114 aa, Homo Sapiens
MLASSSRIRAAWTRALLLPLLLAGPVGCLSRQELFPFGPGQGDLELEDGDDFVSPALELSGALRFYDRSDIDAVYVTTNGIIATSEPPAKESHPGLFPPTFGAVAPFLADLDTTDGLGKVYYREDLSPSITQRAAECVHRGFPEISFQPSSAVVVTWESVAPYQGPSRDPDQKGKRNTFQAVLASSDSSSYAIFLYPEDGLQFHTTFSKKENNQVPAVVAFSQGSVGFLWKSNGAYNIFANDRESVENLAKSSNSGQQGVWVFEIGSPATTNGVVPADVILGTEDGAEYDDEDEDYDLATTRLGLEDVGTTPFSYKALRRGGADTYSVPSVLSPRRAATERPLGPPTERTRSFQLAVETFHQQHPQVIDVDEVEETGVVFSYNTDSRQTCANNRHQCSVHAECRDYATGFCCSCVAGYTGNGRQCVAEGSPQRVNGKVKGRIFVGSSQVPIVFENTDLHSYVVMNHGRSYTAISTIPETVGYSLLPLAPVGGIIGWMFAVEQDGFKNGFSITGGEFTRQAEVTFVGHPGNLVIKQRFSGIDEHGHLTIDTELEGRVPQIPFGSSVHIEPYTELYHYSTSVITSSSTREYTVTEPERDGASPSRIYTYQWRQTITFQECVHDDSRPALPSTQQLSVDSVFVLYNQEEKILRYALSNSIGPVREGSPDALQNPCYIGTHGCDTNAACRPGPRTQFTCECSIGFRGDGRTCYEVEKTRCQHEREHILGAAGATDPQRPIPPGLFVPECDAHGHYAPTQCHGSTGYCWCVDRDGREVEGTRTRPGMTPPCLSTVAPPIHQGPAVPTAVIPLPPGTHLLFAQTGKIERLPLEGNTMRKTEAKAFLHVPAKVIIGLAFDCVDKMVYWTDITEPSIGRASLHGGEPTTIIRQDLGSPEGIAVDHLGRNIFWTDSNLDRIEVAKLDGTQRRVLFETDLVNPRGIVTDSVRGNLYWTDWNRDNPKIETSYMDGTNRRILVQDDLGLPNGLTFDAFSSQLCWVDAGTNRAECLNPSQPSRRKALEGLQYPFAVTSYGKNLYFTDWKMNSVVALDLAISKETDAFQPHKQTRLYGITTALSQCPQGHNYCSVNNGGCTHLCLATPGSRTCRCPDNTLGVDCIEQK

SEQ ID NO: 9370 - protein, 1375 aa, Homo Sapiens
MEGDRVAGRPVLSSLPVLLLLPLLMLRAAALHPDELFPHGESWGDQLLQEGDDESSAVVKLANPLHFYEARFSNLYVGTNGIISTQDFPRETQYVDYDFPTDFPAIAPFLADIDTSHGRGRVLYREDTSPAVLGLAARYVRAGFPRSARFTPTHAFLATWEQVGAYEEVKRGALPSGELNTFQAVLASDGSDSYALFLYPANGLQFLGTRPKESYNVQLQLPARVGFCRGEADDLKSEGPYFSLTSTEQSVKNLYQLSNLGIPGVWAFHIGSTSPLDNVRPAAVGDLSAAHSSVPLGRSFSHATALESDYNEDNLDYYDVNEEEAEYLPGEPEEALNGHSSIDVSFQSKVDTKPLEESSTLDPHTKEGTSLGEVGGPDLKGQVEPWDERETRSPAPPEVDRDSLAPSWETPPPYPENGSIQPYPDGGPVPSEMDVPPAHPEEEIVLRSYPASGHTTPLSRGTYEVGLEDNIGSNTEVFTYNAANKETCEHNHRQCSRHAFCTDYATGFCCHCQSKFYGNGKHCLPEGAPHRVNGKVSGHLHVGHTPVHFTDVDLHAYIVGNDGRAYTAISHIPQPAAQALLPLTPIGGLFGWLFALEKPGSENGFSLAGAAFTHDMEVTFYPGEETVRITQTAEGLDPENYLSIKTNIQGQVPYVSANFTAHISPYKELYHYSDSTVTSTSSRDYSLTFGAINQTWSYRIHQNITYQVCRHAPRHPSFPTTQQLNVDRVFALYNDEERVLRFAVTNQIGPVKEDSDPTPGNPCYDGSHMCDTTARCHPGTGVDYTCECASGYQGDGRNCVDENECATGFHRCGPNSVCINLPGSYRCECRSGYEFADDRHTCILITPPANPCEDGSHTCAPAGQARCVHHGGSTFSCACLPGYAGDGHQCTDVDECSENRCHPAATCYNTPGSFSCRCQPGYYGDGFQCIPDSTSSLTPCEQQQRHAQAQYAYPGARFHIPQCDEQGNFLPLQCHGSTGFCWCVDPDGHEVPGTQTPPGSTPPHCGPSPEPTQRPPTICERWRENLLEHYGGTPRDDQYVPQCDDLGHFIPLQCHGKSDFCWCVDKDGREVQGTRSQPGTTPACIPTVAPPMVRPTPRPDVTPPSVGTFLLYTQGQQIGYLPLNGTRLQKDAAKTLLSLHGSIIVGIDYDCRERMVYWTDVAGRTISRAGLELGAEPETIVNSGLISPEGLAIDHIRRTMYWTDSVLDKIESALLDGSERKVLFYTDLVNPRAIAVDPIRGNLYWTDWNREAPKIETSSLDGENRRILINTDIGLPNGLTFDPFSKLLCWADAGTKKLECTLPDGTGRRVIQNNLKYPFSIVSYADHFYHTDWRRDGVVSVNKHSGQFTDEYLPEQRSHLYGITAVYPYCPTGRK

SEQ ID NO: 9371 - protein, 969 aa, Homo Sapiens
MEGDRVAGRPVLSSLPVLLLLPLLMLRAAALHPDELFPHGESWGDQLLQEGDDESSAVVKLANPLHFYEARFSNLYVGTNGIISTQDFPRETQYVDYDFPTDFPAIAPFLADIDTSHGRGRVLYRVNGKVSGHLHVGHTPVHFTDVDLHAYIVGNDGRAYTAISHIPQPAAQALLPLTPIGGLFGWLFALEKPGSENGFSLAGAAFTHDMEVTFYPGEETVRITQTAEGLDPENYLSIKTNIQGQVPYVSANFTAHISPYKELYHYSDSTVTSTSSRDYSLTFGAINQTWSYRIHQNITYQVCRHAPRHPSFPTTQQLNVDRVFALYNDEERVLRFAVTNQIGPVKEDSDPTPGNPCYDGSHMCDTTARCHPGTGVDYTCECASGYQGDGRNCVDENECATGFHRCGPNSVCINLPGSYRCECRSGYEFADDRHTCILITPPANPCEDGSHTCAPAGQARCVHHGGSTFSCACLPGYAGDGHQCTDVDECSENRCHPAATCYNTPGSFSCRCQPGYYGDGFQCIPDSTSSLTPCEQQQRHAQAQYAYPGARFHIPQCDEQGNFLPLQCHGSTGFCWCVDPDGHEVPGTQTPPGSTPPHCGPSPEPTQRPPTICERWRENLLEHYGGTPRDDQYVPQCDDLGHFIPLQCHGKSDFCWCVDKDGREVQGTRSQPGTTPACIPTVAPPMVRPTPRPDVTPPSVGTFLLYTQGQQIGYLPLNGTRLQKDAAKTLLSLHGSIIVGIDYDCRERMVYWTDVAGRTISRAGLELGAEPETIVNSGLISPEGLAIDHIRRTMYWTDSVLDKIESALLDGSERKVLFYTDLVNPRAIAVDPIRGNLYWTDWNREAPKIETSSLDGENRRILINTDIGLPNGLTFDPFSKLLCWADAGTKKLECTLPDGTGRRVIQNNLKYPFSIVSYADHFYHTDWRRDGVVSVNKHSGQFTDEYLPEQRSHLYGITAVYPYCPTGRK

SEQ ID NO: 9372 - protein, 644 aa, Homo Sapiens
  misc_feature (1)..(1): Xaa can be any naturally occurring amino acid
XYSLTFGAINQTWSYRIHQNITYQVCRHAPRHPSFPTTQQLNVDRVFALYNDEERVLRFAVTNQIGPVKEDSDPTPGNPCYDGSHMCDTTARCHPGTGVDYTCECASGYQGDGRNCVDENECATGFHRCGPNSVCINLPGSYRCECRSGYEFADDRHTCIYVDECSENRCHPAATCYNTPGSFSCRCQPGYYGDGFQCIPDSTSSLTPCEQQQRHAQAQYAYPGARFHIPQCDEQGNFLPLQCHGSTGFCWCVDPDGHEVPGTQTPPGSTPPHCGPSPEPTQRPPTICERWRENLLEHYGGTPRDDQYVPQCDDLGHFIPLQCHGKSDFCWCVDKDGREVQGTRSQPGTTPACIPTVAPPMVRPTPRPDVTPPSVGTFLLYTQGQQIGYLPLNGTRLQKDAAKTLLSLHGSIIVGIDYDCRERMVYWTDVAGRTISRAGLELGAEPETIVNSGLISPEGLAIDHIRRTMYWTDSVLDKIESALLDGSERKVLFYTDLVNPRAIAVDPIRGNLYWTDWNREAPKIETSSLDGENRRILINTDIGLPNGLTFDPFSKLLCWADAGTKKLECTLPDGTGRRVIQNNLKYPFSIVSYADHFYHTDWRRDGVVSVNKHSGQFTDEYLPEQRSHLYGITAVYPYCPTGRK

SEQ ID NO: 9373 - protein, 85 aa, Homo Sapiens
MELCRSLALLGGSLGLMFCLIALSTDFWFEAVGPTHSAHSGLWPTGHGDIISGHGPLVSTTAAFAAGALSLGAHCGGPRPGYETL

SEQ ID NO: 9374 - protein, 142 aa, Homo Sapiens
MELCRSLALLGGSLGLMFCLIALSTDFWFEAVGPTHSAHSGLWPTGHGDIISGHGPLVSTTAAFAAGKDSGLDWGIASQRIPAEELSHLSCPCPQPSPWWWPWRCTPASGGTSLHTPRSRPSSPGPSTWAGSQLSSCSVQVP

SEQ ID NO: 9375 - protein, 165 aa, Homo Sapiens
MELCRSLALLGGSLGLMFCLIALSTDFWFEAVGPTHSAHSGLWPTGHGDIISGYIHVTQTFSIMAVLWALVSVSFLVLSCFPSLFPPGHGPLVSTTAAFAAAISMVVAMAVYTSERWDQPPHPQIQTFFSWSFYLGWVSAILLLCTGALSLGAHCGGPRPGYETL

SEQ ID NO: 9376 - protein, 72 aa, Homo Sapiens
TGHGDIISAISMVVAMAVYTSERWDQPPHPQIQTFFSWSFYLGWVSAILLLCTGALSLGAHCGGPRPGYETL

SEQ ID NO: 9377 - protein, 89 aa, Homo Sapiens
  misc_feature (1)..(1): Xaa can be any naturally occurring amino acid
XWPTGHGDIISGHGPLVSTTAAFAAAISMVVAMAVYTSERWDQPPHPQIQTFFSWSFYLGWVSAILLLCTGALSLGAHCGGPRPGYETL

SEQ ID NO: 9378 - protein, 351 aa, Homo Sapiens
MLPVWFTANLDIVATYIQEPNEDCLYLNVYVPTEDGSGAKKQGEDLADNDGDEDEDIRDSGAKPVMVYIHGGSYMEGTGNMIDGSILASYGNVIVITLNYRVGVLGFLSTGDQAAKGNYGLLDQIQALRWVSENIAFFGGDPRRITVFGSGIGASCVSLLTLSHHSEGLFQRAIIQSGSALSSWAVNYQPVKYTSLLADKVGCNVLDTVDMVDCLRQKSAKELVEQDIQPARYHVAFGPVIDGDVIPDDPEILMEQGEFLNYDIMLGVNQGEGLKFVEGVVDPEDGVSGTDFDYSVSILWTICMAILRVRTPCERPSSSCIQTGQTVTTLRPAVKHWWHSSLTTSGWSPQW

SEQ ID NO: 9379 - protein, 513 aa, Homo Sapiens
MWLRLGPPSLSLSPKPTVGRSLCLTLWFLSLALRASTQAPAPTVNTHFGKLRGARVPLPSEILGPVDQYLGVPYAAPPIGEKRFLPPEPPPSWSGIRNATHFPPVCPQNIHTAVPEVMLPVWFTANLDIVATYIQEPNEDCLYLNVYVPTEDDIRDSGAKPVMVYIHGGSYMEGTGNMIDGSILASYGNVIVITLNYRVGVLGFLSTGDQAAKGNYGLLDQIQALRWVSENIAFFGGDPRRITVFGSGIGASCVSLLTLSHHSEGLFQRAIIQSGSALSSWAVNYQPVKYTSLLADKVGCNVLDTVDMVDCLRQKSAKELVEQDIQPARYHVAFGPVIDGDVIPDDPEILMEQGEFLNYDIMLGVNQGEGLKFVEGVVDPEDGVSGTDFDYSVSNFVDNLYGYPEGKDTLRETIKFMYTDWADRDNPETRRKTLVALFTDHQWVEPSVVTADLHARYGSPTYFYAFYHHCQSLMKPAWSDAAHGDEVPYVFGVPMVGPTDLFPCNFSKNDVML

SEQ ID NO: 9380 - protein, 808 aa, Homo Sapiens
MWLRLGPPSLSLSPKPTVGRSLCLTLWFLSLALRASTQAPAPTVNTHFGKLRGARVPLPSEILGPVDQYLGVPYAAPPIGEKRFLPPEPPPSWSGIRNATHFPPVCPQNIHTAVPEVMLPVWFTANLDIVATYIQEPNEDCLYLNVYVPTEDDIRDSGAKPVMVYIHGGSYMEGTGNMIDGSILASYGNVIVITLNYRVGVLGFLSTGDQAAKGNYGLLDQIQALRWVSENIAFFGGDPRRITVFGSGIGASCVSLLTLSHHSEGLFQRAIIQSGSALSSWAVNYQPVKYTSLLADKVGCNVLDTVDMVDCLRQKSAKELVEQDIQPARYHVAFGPVIDGDVIPDDPEILMEQGEFLNYDIMLGVNQGEGLKFVEGVVDPEDGVSGTDFDYSVSNFVDNLYGYPEGKDTLRETIKFMYTDWADRDNPETRRKTLVALFTDHQWVEPSVVTADLHARYGSPTYFYAFYHHCQSLMKPAWSDAAHGDEVPYVFGVPMVGPTDLFPCNFSKNDVMLSAVVMTYWTNFAKTGDPNKPVPQDTKFIHTKANRFEEVAWSKYNPRDQLYLHIGLKPRVRDHYRATKVAFWKHLVPHLYNLHDMFHYTSTTTKVPPPDTTHSSHITRRPNGKTWSTKRPAISPAYSNENAQGSWNGDQDAGPLLVENPRDYSTELSVTIAVGASLLFLNVLAFAALYYRKDKRRQEPLRQPSPQRGAGAPELGAAPEEELAALQLGPTHHECEAGPPHDTLRLTALPDYTLTLRRSPDDIPLMTPNTITMIPNSLVGLQTLHPYNTFAAGFNSTGLPHSHSTTRV

SEQ ID NO: 9381 - protein, 828 aa, Homo Sapiens
MWLRLGPPSLSLSPKPTVGRSLCLTLWFLSLALRASTQAPAPTVNTHFGKLRGARVPLPSEILGPVDQYLGVPYAAPPIGEKRFLPPEPPPSWSGIRNATHFPPVCPQNIHTAVPEVMLPVWFTANLDIVATYIQEPNEDCLYLNVYVPTEDGSGAKKQGEDLADNDGDEDEDIRDSGAKPVMVYIHGGSYMEGTGNMIDGSILASYGNVIVITLNYRVGVLGFLSTGDQAAKGNYGLLDQIQALRWVSENIAFFGGDPRRITVFGSGIGASCVSLLTLSHHSEGLFQRAIIQSGSALSSWAVNYQPVKYTSLLADKVGCNVLDTVDMVDCLRQKSAKELVEQDIQPARYHVAFGPVIDGDVIPDDPEILMEQGEFLNYDIMLGVNQGEGLKFVEGVVDPEDGVSGTDFDYSVSNFVDNLYGYPEGKDTLRETIKFMYTDWADRDNPETRRKTLVALFTDHQWVEPSVVTADLHARYGSPTYFYAFYHHCQSLMKPAWSDAAHGDEVPYVFGVPMVGPTDLFPCNFSKNDVMLSAVVMTYWTNFAKTGDPNKPVPQDTKFIHTKANRFEEVAWSKYNPRDQLYLHIGLKPRVRDHYRATKVAFWKHLVPHLYNLHDMFHYTSTTTKVPPPDTTHSSHITRRPNGKTWSTKRPAISPAYSNENAQGSWNGDQDAGPLLVENPRDYSTELSVTIAVGASLLFLNVLAFAALYYRKDKRRQEPLRQPSPQRGAGAPELGAAPEEELAALQLGPTHHECEAGPPHDTLRLTALPDYTLTLRRSPDDIPLMTPNTITMIPNSLVGLQTLHPYNTFAAGFNSTGLPHSHSTTRV

SEQ ID NO: 9382 - protein, 848 aa, Homo Sapiens
MWLRLGPPSLSLSPKPTVGRSLCLTLWFLSLALRASTQAPAPTVNTHFGKLRGARVPLPSEILGPVDQYLGVPYAAPPIGEKRFLPPEPPPSWSGIRNATHFPPVCPQNIHTAVPEVMLPVWFTANLDIVATYIQEPNEDCLYLNVYVPTEDVKRISKECARKPNKKICRKGGSGAKKQGEDLADNDGDEDEDIRDSGAKPVMVYIHGGSYMEGTGNMIDGSILASYGNVIVITLNYRVGVLGFLSTGDQAAKGNYGLLDQIQALRWVSENIAFFGGDPRRITVFGSGIGASCVSLLTLSHHSEGLFQRAIIQSGSALSSWAVNYQPVKYTSLLADKVGCNVLDTVDMVDCLRQKSAKELVEQDIQPARYHVAFGPVIDGDVIPDDPEILMEQGEFLNYDIMLGVNQGEGLKFVEGVVDPEDGVSGTDFDYSVSNFVDNLYGYPEGKDTLRETIKFMYTDWADRDNPETRRKTLVALFTDHQWVEPSVVTADLHARYGSPTYFYAFYHHCQSLMKPAWSDAAHGDEVPYVFGVPMVGPTDLFPCNFSKNDVMLSAVVMTYWTNFAKTGDPNKPVPQDTKFIHTKANRFEEVAWSKYNPRDQLYLHIGLKPRVRDHYRATKVAFWKHLVPHLYNLHDMFHYTSTTTKVPPPDTTHSSHITRRPNGKTWSTKRPAISPAYSNENAQGSWNGDQDAGPLLVENPRDYSTELSVTIAVGASLLFLNVLAFAALYYRKDKRRQEPLRQPSPQRGAGAPELGAAPEEELAALQLGPTHHECEAGPPHDTLRLTALPDYTLTLRRSPDDIPLMTPNTITMIPNSLVGLQTLHPYNTFAAGFNSTGLPHSHSTTRV

SEQ ID NO: 9383 - protein, 33 aa, Homo Sapiens
MLRPQGLLWLPLLFTSVCVMLNSNVLLWITALA

SEQ ID NO: 9384 - protein, 816 aa, Homo Sapiens
MLRPQGLLWLPLLFTSVCVMLNSNVLLWITALAIKFTLIDSQAQYPVVNTNYGKIQGLRTPLPSEILGPVEQYLGVPYASPPTGERRFQPPESPSSWTGIRNATQFSAVCPQHLDERFLLHDMLPIWFTTSLDTLMTYVQDQNEDCLYLNIYVPMEDDIHEQNSKKPVMVYIHGGSYMEGTGNMIDGSILASYGNVIVITINYRLGILGFLSTGDQAAKGNYGLLDQIQALRWIEENVGAFGGDPKRVTIFGSGAGASCVSLLTLSHYSEGLFQKAIIQSGTALSSWAVNYQPAKYTRILADKVGCNMLDTTDMVECLKNKNYKELIQQTITPATYHIAFGPVIDGDVIPDDPQILMEQGEFLNYDIMLGVNQGEGLKFVDGIVDNEDGVTPNDFDFSVSNFVDNLYGYPEGKDTLRETIKFMYTDWADKENPETRRKTLVALFTDHQWVAPAVATADLHAQYGSPTYFYAFYHHCQSEMKPSWADSAHGDEVPYVFGIPMIGPTELFSCNFSKNDVMLSAVVMTYWTNFAKTGDPNQPVPQDTKFIHTKPNRFEEVAWSKYNPKDQLYLHIGLKPRVRDHYRATKVAFWLELVPHLHNLNEIFQYVSTTTKVPPPDMTSFPYGTRRSPAKIWPTTKRPAITPANNPKHSKDPHKTGPEDTTVLIETKRDYSTELSVTIAVGASLLFLNILAFAALYYKKDKRRHETHRHPSPQRNTTNDITHIQNEEIMSLQMKQLEHDHECESLQAHDTLRLTCPPDYTLTLRRSPDDIPFMTPNTITMIPNTLMGMQPLHTFKTFSGGQNSTNLPHGHSTTRV

SEQ ID NO: 9385 - protein, 816 aa, Homo Sapiens; identical to SEQ ID NO: 9384

SEQ ID NO: 9386 - protein, 873 aa, Homo Sapiens
MLRPQGLLWLPLLFTSVCVMLNSNVLLWITALAIKFTLIDSQAQYPVVNTNYGKIQGLRTPLPSEILGPVEQYLGVPYASPPTGERRFQPPESPSSWTGIRNATQFSAVCPQHLDERFLLHDMLPIWFTTSLDTLMTYVQDQNEDCLYLNIYVPMEDGTNIKRNADDITSNDHGEDKDIHEQNSKKPVMVYIHGGSYMEGTGNMIDGSILASYGNVIVITINYRLGILAQNTLAHGNCKHRCQLHLQAPRDCKSAYPFRNEDEIRGFLSTGDQAAKGNYGLLDQIQALRWIEENVGAFGGDPKRVTIFGSGAGASCVSLLTLSHYSEGLFQKAIIQSGTALSSWAVNYQPAKYTRILADKVGCNMLDTTDMVECLKNKNYKELIQQTITPATYHIAFGPVIDGDVIPDDPQILMEQGEFLNYDIMLGVNQGEGLKFVDGIVDNEDGVTPNDFDFSVSNFVDNLYGYPEGKDTLRETIKFMYTDWADKENPETRRKTLVALFTDHQWVAPAVATADLHAQYGSPTYFYAFYHHCQSEMKPSWADSAHGDEVPYVFGIPMIGPTELFSCNFSKNDVMLSAVVMTYWTNFAKTGDPNQPVPQDTKFIHTKPNRFEEVAWSKYNPKDQLYLHIGLKPRVRDHYRATKVAFWLELVPHLHNLNEIFQYVSTTTKVPPPDMTSFPYGTRRSPAKIWPTTKRPAITPANNPKHSKDPHKTGPEDTTVLIETKRDYSTELSVTIAVGASLLFLNILAFAALYYKKDKRRHETHRHPSPQRNTTNDITHIQNEEIMSLQMKQLEHDHECESLQAHDTLRLTCPPDYTLTLRRSPDDIPFMTPNTITMIPNTLMGMQPLHTFKTFSGGQNSTNLPHGHSTTRV

SEQ ID NO: 9387 - protein, 836 aa, Homo Sapiens
MLRPQGLLWLPLLFTSVCVMLNSNVLLWITALAIKFTLIDSQAQYPVVNTNYGKIQGLRTPLPSEILGPVEQYLGVPYASPPTGERRFQPPESPSSWTGIRNATQFSAVCPQHLDERFLLHDMLPIWFTTSLDTLMTYVQDQNEDCLYLNIYVPMEDGTNIKRNADDITSNDHGEDKDIHEQNSKKPVMVYIHGGSYMEGTGNMIDGSILASYGNVIVITINYRLGILGFLSTGDQAAKGNYGLLDQIQALRWIEENVGAFGGDPKRVTIFGSGAGASCVSLLTLSHYSEGLFQKAIIQSGTALSSWAVNYQPAKYTRILADKVGCNMLDTTDMVECLKNKNYKELIQQTITPATYHIAFGPVIDGDVIPDDPQILMEQGEFLNYDIMLGVNQGEGLKFVDGIVDNEDGVTPNDFDFSVSNFVDNLYGYPEGKDTLRETIKFMYTDWADKENPETRRKTLVALFTDHQWVAPAVATADLHAQYGSPTYFYAFYHHCQSEMKPSWADSAHGDEVPYVFGIPMIGPTELFSCNFSKNDVMLSAVVMTYWTNFAKTGDPNQPVPQDTKFIHTKPNRFEEVAWSKYNPKDQLYLHIGLKPRVRDHYRATKVAFWLELVPHLHNLNEIFQYVSTTTKVPPPDMTSFPYGTRRSPAKIWPTTKRPAITPANNPKHSKDPHKTGPEDTTVLIETKRDYSTELSVTIAVGASLLFLNILAFAALYYKKDKRRHETHRHPSPQRNTTNDITHIQNEEIMSLQMKQLEHDHECESLQAHDTLRLTCPPDYTLTLRRSPDDIPFMTPNTITMIPNTLMGMQPLHTFKTFSGGQNSTNLPHGHSTTRV

SEQ ID NO: 9388 - protein, 648 aa, Homo Sapiens
MVYIHGGSYMEGTGNMIDGSILASYGNVIVITINYRLGILGFLSTGDQAAKGNYGLLDQIQALRWIEENVGAFGGDPKRVTIFGSGAGASCVSLLTLSHYSEGLFQKAIIQSGTALSSWAVNYQPAKYTRILADKVGCNMLDTTDMVECLKNKNYKELIQQTITPATYHIAFGPVIDGDVIPDDPQILMEQGEFLNYDIMLGVNQGEGLKFVDGIVDNEDGVTPNDFDFSVSNFVDNLYGYPEGKDTLRETIKFMYTDWADKENPETRRKTLVALFTDHQWVAPAVATADLHAQYGSPTYFYAFYHHCQSEMKPSWADSAHGDEVPYVFGIPMIGPTELFSCNFSKNDVMLSAVVMTYWTNFAKTGDPNQPVPQDTKFIHTKPNRFEEVAWSKYNPKDQLYLHIGLKPRVRDHYRATKVAFWLELVPHLHNLNEIFQYVSTTTKVPPPDMTSFPYGTRRSPAKIWPTTKRPAITPANNPKHSKDPHKTGPEDTTVLIETKRDYSTELSVTIAVGASLLFLNILAFAALYYKKDKRRHETHRHPSPQRNTTNDITHIQNEEIMSLQMKQLEHDHECESLQAHDTLRLTCPPDYTLTLRRSPDDIPFMTPNTITMIPNTLMGMQPLHTFKTFSGGQNSTNLPHGHSTTRV

SEQ ID NO: 9389 - protein, 236 aa, Homo Sapiens
  misc_feature (1)..(1): Xaa can be any naturally occurring amino acid
XNSNVLLWITALAIKFTLIDSQAQYPVVNTNYGKIQGLRTPLPSEILGPVEQYLGVPYASPPTGERRFQPPESPSSWTGIRNATQFSAVCPQHLDERFLLHDMLPIWFTTSLDTLMTYVQDQNEDCLYLNIYVPMEDGTNIKRNADDITSNDHGEDKDIHEQNSKKPVMVYIHGGSYMEGTGNMIDGSILASYGNVIVITINYRLGILGMQEARLCGSSKMFNYFKSPFTNLINFF

SEQ ID NO: 9390 - protein, 178 aa, Homo Sapiens
GPTCSILPKNPLFPQNLSSQPCIKMEGDKSLTFSSYGLQWCLYELDKEEFQTFKELLKKKSSESTTCSIPQFEIENANVECLALLLHEYYGASLAWATSISIFENMNLRTLSEKARDDMKRHSPEDPEATMTDQGPSKEKVPGISQAVQQDSATAAETKEQESFAVLLRLQCSGYPQA

SEQ ID NO: 9391 - protein, 1200 aa, Homo Sapiens
MKVAGGLELGAAALLSASPRALVTLSTGPTCSILPKNPLFPQNLSSQPCIKMEGDKSLTFSSYGLQWCLYELDKEEFQTFKELLKKKSSESTTCSIPQFEIENANVECLALLLHEYYGASLAWATSISIFENMNLRTLSEKARDDMKRHSPEDPEATMTDQGPSKEKVPDISDSNNKHKYVGIHSSFAEISQAMEQEGATAAETEEQEISQAMEQEGATAAETEEQGHGGDTWDYKSHVMTKFAEEEDVRRSFENTAADWPEMQTLAGAFDSDRWGFRPRTVVLHGKSGIGKSALARRIVLCWAQGGLYQGMFSYVFFLPVREMQRKKESSVTEFISREWPDSQAPVTEIMSRPERLLFIIDGFDDLGSVLNNDTKLCKDWAEKQPPFTLIRSLLRKVLLPESFLIVTVRDVGTEKLKSEVVSPRYLLVRGISGEQRIHLLLERGIGEHQKTQGLRAIMNNRELLDQCQVPAVGSLICVALQLQDVVGESVAPFNQTLTGLHAAFVFHQLTPRGVVRRCLNLEERVVLKRFCRMAVEGVWNRKSVFDGDDLMVQGLGESELRALFHMNILLPDSHCEEYYTFFHLSLQDFCAALYYVLEGLEIEPALCPLYVEKTKRSMELKQAGFHIHSLWMKRFLFGLVSEDVRRPLEVLLGCPVPLGVKQKLLHWVSLLGQQPNATTPGDTLDAFHCLFETQDKEFVRLALNSFQEVWLPINQNLDLIASSFCLQHCPYLRKIRVDVKGIFPRDESAEACPVVPLWMRDKTLIEEQWEDFCSMLGTHPHLRQLDLGSSILTERAMKTLCAKLRHPTCKIQTLMFRNAQITPGVQHLWRIVMANRNLRSLNLGGTHLKEEDVRMACEALKHPKCLLESLRLDCCGLTHACYLKISQILTTSPSLKSLSLAGNKVTDQGVMPLSDALRVSQCALQKLILEDCGITATGCQSLASALVSNRSLTHLCLSNNSLGNEGVNLLCRSMRLPHCSLQRLMLNQCHLDTAGCGFLALALMGNSWLTHLSLSMNPVEDNGVKLLCEVMREPSCHLQDLELVKCHLTAACCESLSCVISRSRHLKSLDLTDNALGDGGVAALCEGLKQKNSVLARLGLKACGLTSDCCEALSLALSCNRHLTSLNLVQNNFSPKGMMKLCSAFACPTSNLQIIGLWKWQYPVQIRKLLEEVQLLKPRVVIDGSWHSFDEDDRYWWKN

SEQ ID NO: 9392 - protein, 1200 aa, Homo Sapiens
MKVAGGLELGAAALLSASPRALVTLSTGPTCSILPKNPLFPQNLSSQPCIKMEGDKSLTFSSYGLQWCLYELDKEEFQTFKELLKKKSSESTTCSIPQFEIENANVECLALLLHEYYGASLAWATSISIFENMNLRTLSEKARDDMKRHSPEDPEATMTDQGPSKEKVPGISQAVQQDSATAAETKEQEISQAMEQEGATAAETEEQEISQAMEQEGATAAETEEQGHGGDTWDYKSHVMTKFAEEEDVRRSFENTAADWPEMQTLAGAFDSDRWGFRPRTVVLHGKSGIGKSALARRIVLCWAQGGLYQGMFSYVFFLPVREMQRKKESSVTEFISREWPDSQAPVTEIMSRPERLLFIIDGFDDLGSVLNNDTKLCKDWAEKQPPFTLIRSLLRKVLLPESFLIVTVRDVGTEKLKSEVVSPRYLLVRGISGEQRIHLLLERGIGEHQKTQGLRAIMNNRELLDQCQVPAVGSLICVALQLQDVVGESVAPFNQTLTGLHAAFVFHQLTPRGVVRRCLNLEERVVLKRFCRMAVEGVWNRKSVFDGDDLMVQGLGESELRALFHMNILLPDSHCEEYYTFFHLSLQDFCAALYYVLEGLEIEPALCPLYVEKTKRSMELKQAGFHIHSLWMKRFLFGLVSEDVRRPLEVLLGCPVPLGVKQKLLHWVSLLGQQPNATTPGDTLDAFHCLFETQDKEFVRLALNSFQEVWLPINQNLDLIASSFCLQHCPYLRKIRVDVKGIFPRDESAEACPVVPLWMRDKTLIEEQWEDFCSMLGTHPHLRQLDLGSSILTERAMKTLCAKLRHPTCKIQTLMFRNAQITPGVQHLWRIVMANRNLRSLNLGGTHLKEEDVRMACEALKHPKCLLESLRLDCCGLTHACYLKISQILTTSPSLKSLSLAGNKVTDQGVMPLSDALRVSQCALQKLILEDCGITATGCQSLASALVSNRSLTHLCLSNNSLGNEGVNLLCRSMRLPHCSLQRLMLNQCHLDTAGCGFLALALMGNSWLTHLSLSMNPVEDNGVKLLCEVMREPSCHLQDLELVKCHLTAACCESLSCVISRSRHLKSLDLTDNALGDGGVAALCEGLKQKNSVLARLGLKACGLTSDCCEALSLALSCNRHLTSLNLVQNNFSPKGMMKLCSAFACPTSNLQIIGLWKWQYPVQIRKLLEEVQLLKPRVVIDGSWHSFDEDDRYWWKN

SEQ ID NO: 9393 - protein, 154 aa, Homo Sapiens
MARRAGGARMFGSLLLFALLAAGVAPLSWDLPEPRSRASKIRVHSRGNLWATGHFMGKKSLEPSSPSPLGTAPHTSLRDQRLQLSHDLLGILLLKKALGVSLSRPAPQIQEAAGTNTAEMTPIMGQTQQRGLDCAHPGKVLNGTLLMAPSGCKS

SEQ ID NO: 9394 - protein, 121 aa, Homo Sapiens
MARRAGGARMFGSLLLFALLAAGVAPLSWDLPEPRSRASKIRVHSRGNLWATGHFMGKKSLEPSSPSPLGTAPHTSLRDQRLQLSHDLLGILLLKKALGVSLSRPAPQIQYRRLLVQILQK

SEQ ID NO: 9395 - protein, 82 aa, Homo Sapiens
MANCERTFIAIKPDGVQRGLVGEIIKRFEQKGFRLVGLKFMQASEDLLKEHYVDLKDRPFFAGLVKYMHSGPVVAMLPDFLL

SEQ ID NO: 9396 - protein, 82 aa, Homo Sapiens; identical to SEQ ID NO: 9395

SEQ ID NO: 9397 - protein, 152 aa, Homo Sapiens
MANCERTFIAIKPDGVQRGLVGEIIKRFEQKGFRLVGLKFMQASEDLLKEHYVDLKDRPFFAGLVKYMHSGPVVAMVWEGLNVVKTGRVMLGETNPADSKPGTIRGDFCIQVGRNIIHGSDSVESAEKEIGLWFHPEELVDYTSCAQNWIYE

SEQ ID NO: 9398 - protein, 60 aa, Homo Sapiens
MVLLSTLGIVFQGEGPPISSCDTGTMANCERTFIAIKPDGVQRGLVGEIIKRFEQKGFRL

SEQ ID NO: 9399 - protein, 139 aa, Homo Sapiens
MVLLSTLGIVFQGEGPPISSCDTGTMANCERTFIAIKPDGVQRGLVGEIIKRFEQKGFRLVGLKFMQASEDLLKEHYVDLKDRPFFAGLVKYMHSGPVVAMVWEGLNVVKTGRVMLGETNPADSKPGTIRGDFCIQVGR

SEQ ID NO: 9400 - protein, 177 aa, Homo Sapiens
MVLLSTLGIVFQGEGPPISSCDTGTMANCERTFIAIKPDGVQRGLVGEIIKRFEQKGFRLVGLKFMQASEDLLKEHYVDLKDRPFFAGLVKYMHSGPVVAMVWEGLNVVKTGRVMLGETNPADSKPGTIRGDFCIQVGRNIIHGSDSVESAEKEIGLWFHPEELVDYTSCAQNWIYE

SEQ ID NO: 9401 - protein, 177 aa, Homo Sapiens; identical to SEQ ID NO: 9400

SEQ ID NO: 9402 - protein, 197 aa, Homo Sapiens
MANCERTFIAIKPDGVQRGLVGEIIKRFEQKGFRLVGLKFMQASEDLLKEHYVDLKDRPFFAGLVKYMHSGPVVAMVWEGLNVVKTGRVMLGETNPADSKPGTIRGDFCIQVGRTMANLERTFIAIKPDGVQRGLVGEIIKRFEQKGFRLVAMKFLRASEEHLKQHYIDLKDRPFFPGLVKYMNSGPVVAMEHHSWQ

SEQ ID NO: 9403 - protein, 267 aa, Homo Sapiens
MANCERTFIAIKPDGVQRGLVGEIIKRFEQKGFRLVGLKFMQASEDLLKEHYVDLKDRPFFAGLVKYMHSGPVVAMVWEGLNVVKTGRVMLGETNPADSKPGTIRGDFCIQVGRTMANLERTFIAIKPDGVQRGLVGEIIKRFEQKGFRLVAMKFLRASEEHLKQHYIDLKDRPFFPGLVKYMNSGPVVAMVWEGLNVVKTGRVMLGETNPADSKPGTIRGDFCIQVGRNIIHGSDSVKSAEKEISLWFKPEELVDYKSCAHDWVYE

SEQ ID NO: 9404 - protein, 292 aa, Homo Sapiens
MVLLSTLGIVFQGEGPPISSCDTGTMANCERTFIAIKPDGVQRGLVGEIIKRFEQKGFRLVGLKFMQASEDLLKEHYVDLKDRPFFAGLVKYMHSGPVVAMVWEGLNVVKTGRVMLGETNPADSKPGTIRGDFCIQVGRTMANLERTFIAIKPDGVQRGLVGEIIKRFEQKGFRLVAMKFLRASEEHLKQHYIDLKDRPFFPGLVKYMNSGPVVAMVWEGLNVVKTGRVMLGETNPADSKPGTIRGDFCIQVGRNIIHGSDSVKSAEKEISLWFKPEELVDYKSCAHDWVYE

SEQ ID NO: 9405 - protein, 53 aa, Homo Sapiens
FANLFPAACTGAHERTFLAVKPDGVQRRLVGEIVRRFERKGFKLVALKLVQAA

SEQ ID NO: 9406 - protein, 57 aa, Homo Sapiens
IFANLFPAACTGAHERTFLAVKPDGVQRRLVGEIVRRFERKGFKRPDPSAGLRGAAA

SEQ ID NO: 9407 - protein, 85 aa, Homo Sapiens
MASGPVVAMVWQGLDVVRTSRALIGATNPADAPPGTIRGDFCIEVGKNLIHGSDSVESARREIALWFRADELLCWEDSAGHWLYE

SEQ ID NO: 9408 - protein, 169 aa, Homo Sapiens
MICLVLTIFANLFPAACTGAHERTFLAVKPDGVQRRLVGEIVRRFERKGFKLVALKLVQASEELLREHYAELRERPFYGRLVKYMASGPVVAMVWQGLDVVRTSRALIGATNPADAPPGTIRGDFCIEVGKNLIHGSDSVESARREIALWFRADELLCWEDSAGHWLYE

SEQ ID NO: 9409 - protein, 123 aa, Homo Sapiens
PAACTGAHERTFLAVKPDGVQRRLVGEIVRRFERKGFKLVALKLVQVGARPPRSCCVSTTPSCVNARSTAALSSIWPPGRWWPWYGRGWTWCAPRGRSSEPRTRPTPRPAPSAGISASRLART

SEQ ID NO: 9410 - protein, 153 aa, Homo Sapiens
MKHLRPQFPLILAIYCFCMLQIPSSGFPQPLADPSDGLDIVQLEQLAYCLSQWAPLSRQPKDNQDIYKRFLFHYSRTQEATHPVKTGFPPVHPLMHLAAKLANRRMKRILQRGSGTAAVDFTKKDHTATWGRPFFLFRPRNGRNIEDEAQIQW

SEQ ID NO: 9411 - protein, 158 aa, Homo Sapiens
MLRTESCRPRSPAGQVAAASPLLLLLLLLAWCAGACRGAPILPQGLQPEQQLQLWNEASNALEELCFMIMGMLPKPQEQDEKDNTKRFLFHYSKTQKLGKSNVVSSVVHPLLQLVPHLHERRMKRFRVDEEFQSPFASQSRGYFLFRPRNGRRSAGFI

SEQ ID NO: 9412 - protein, 149 aa, Homo Sapiens
MLRTESCRPRSPAGQVAAASPLLLLLLLLAWCAGACRGAPILPQGLQPEQQLQLWNEIDDTCSSFLSIDSQPQASNALEELCFMIMGMLPKPQEQDEKDNTKRFLFHYSKTQKLGKSNVVEEFQSPFASQSRGYFLFRPRNGRRSAGFI

SEQ ID NO: 9413 - protein, 174 aa, Homo Sapiens
MLRTESCRPRSPAGQVAAASPLLLLLLLLAWCAGACRGAPILPQGLQPEQQLQLWNEIDDTCSSFLSIDSQPQASNALEELCFMIMGMLPKPQEQDEKDNTKRFLFHYSKTQKLGKSNVVSSVVHPLLQLVPHLHERRMKRFRVDEEFQSPFASQSRGYFLFRPRNGRRSAGFI

SEQ ID NO: 9414 - protein, 147 aa, Homo Sapiens
MLRTESCRPRSPAGQVAAASPLLLLLLLLAWCAGACRGAPILPQGLQPEQQLQLWNEIDDTCSSFLSIDSQPQASNALEELCFMIMGMLPKPQSSVVHPLLQLVPHLHERRMKRFRVDEEFQSPFASQSRGYFLFRPRNGRRSAGFI

SEQ ID NO: 9415 - protein, 698 aa, Homo Sapiens
MLPARLPFRLLSLFLRGSAPTAARHGLREPLLERRCAAASSFQHSSSLGRELPYDPVDTEGFGEGGDMQERFLFPEYILDPEPQPTREKQLQELQQQQEEEERQRQQRREERRQQNLRARSREHPVVGHPDPALPPSGVNCSGCGAELHCQDAGVPGYLPREKFLRTAEADGGLARTVCQRCWLLSHHRRALRLQVSREQYLELVSAALRRPGPSLVLYMVDLLDLPDALLPDLPALVGPKQLIVLGNKVDLLPQDAPGYRQRLRERLWEDCARAGLLLAPGHQGPQRPVKDEPQDGENPNPPNWSRTVVRDVRLISAKTGYGVEELISALQRSWRYRGDVYLVGATNAGKSTLFNTLLESDYCTAKGSEAIDRATISPWPGTTLNLLKFPICNPTPYRMFKRHQRLKKDSTQAEEDLSEQEQNQLNVLKKHGYVVGRVGRTFLYSEEQKDNIPFEFDADSLAFDMENDPVMGTHKSTKQVELTAQDVKDAHWFYDTPGITKENCILNLLTEKEVNIVLPTQSIVPRTFVLKPGMVLFLGAIGRIDFLQGNQSAWFTVVASNILPVHITSLDRADALYQKHAGHTLLQIPMGGKERMAGFPPLVAEDIMLKEGLGASEAVADIKFSSAGWVSVTPNFKDRLHLRGYTPEGTVLTVRPPLLPYIVNIKGQRIKKSVAYKTKKPPSLMYNVRKKKGKINV

SEQ ID NO: 9416 - protein, 292 aa, Homo Sapiens
DQQLGIQTKDVAVDGQNWTFAFDFSFLSQQEDLAWAELRLQLSSPVDLPTEGSLAIEIFHQPKPDTEQASDSCLERFQMDLFTVTLSQVTFSLGSMVLEVTRPLSKWLKHPGALEKQMSRVAGECWPRPPTPPATNVLLMLYSNLSQEQRQLGGSTLLWEAESSWRAQEGQLSWEWGKRHRRHHLPDRSQLCRKVKFQVDFNLIGWGSWIIYPKQYNAYRCEGECPNPVGEEFHPTNHAYIQSLLKRYQPHRVPSTCCAPVKTKPLSMLYVDNGRVLLDHHKDMIVEECGCL

SEQ ID NO: 9417 - protein, 347 aa, Homo Sapiens
MHAHCLPFLLHAWWALLQAGAATVATALLRTRGQPSSPSPLAYMLSLYRDPLPRADIIRSLQAEDVAVDGQNWTFAFDFSFLSQQEDLAWAELRLQLSSPVDLPTEGSLAIEIFHQPKPDTEQASDSCLERFQMDLFTVTLSQVTFSLGSMVLEVTRPLSKWLKHPGALEKQMSRVAGECWPRPPTPPATNVLLMLYSNLSQEQRQLGGSTLLWEAESSWRAQEGQLSWEWGKRHRRHHLPDRSQLCRKVKFQVDFNLIGWGSWIIYPKQYNAYRCEGECPNPVGEEFHPTNHAYIQSLLKRYQPHRVPSTCCAPVKTKPLSMLYVDNGRVLLDHHKDMIVEECGCL

SEQ ID NO: 9418 - protein, 232 aa, Homo Sapiens
MERCPSLGVTLYALVVVLGLRATPAGGQHYLHIRPAPSDNLPLVDLIEHPDPIFDPKEKDLNETLLRSLLGGHYDPGFMATSPPEDRPGGGGGAAGGAEDLAELDQLLRQRPSGAMPSEIKGLEFSEGLAQGKKQRLSKKLRRKLQMWLWSQTFCPVLYAWNDLGSRFWPRYVKVGSCFSKRSCSVPEGMVCKPSKSVHLTVLRWRCQRRGGQRCGWIPIQYPIISECKCSC

SEQ ID NO: 9419 - protein, 138 aa, Homo Sapiens
MLVGQGAGPLGPAVVTAAVVLLLSGVGPAHGSEDIVVGCGGFVKSDVEINYSLIEIKLYTKHGTLKYQTDCAPNNGYFMIPLYDKGDFILKIEPPLGWSFEPTTVELHVDGVSDICTKGGDINFVFTGFSVNGKVCIF

SEQ ID NO: 9420 - protein, 1267 aa, Homo Sapiens
MLVGQGAGPLGPAVVTAAVVLLLSGVGPAHGSEDIVVGCGGFVKSDVEINYSLIEIKLYTKHGTLKYQTDCAPNNGYFMIPLYDKGDFILKIEPPLGWSFEPTTVELHVDGVSDICTKGGDINFVFTGFSVNGKVLSKGQPLGPAGVQVSLRNTGTEAKIQSTVTQPGGKFAFFKVLPGDYEILATHPTWALKEASTTVRVTNSNANAASPLIVAGYNVSGSVRSDGEPMKGVKFLLFSSLVTKEDVLGCNVSPVPGFQPQDESLVYLCYTVSREDGSFSFYSLPSGGYTVIPFYRGERITFDVAPSRLDFTVEHDSLKIEPVFHVMGFSVTGRVLNGPEGDGVPEAVVTLNNQIKVKTKADGSFRLENITTGTYTIHAQKEHLYFETVTIKIAPNTPQLADIVATGFSVCGQISIIRFPDTVKQMNKYKVVLSSQDKDKSLVTVETDAHGSFCFKANPGTYKVQVMVPEAETRAGLTLKPQTFPLTVTDRPVMDVAFVQFLASVSGKVSCLDTCGDLLVTLQSLSRQGEKRSLQLSGKVNAMTFTFDNVLPGKYKISIMHEDWCWKNKSLEVEVLEDDVSAVEFRQTGYMLRCSLSHAITLEFYQDGNGRENVGIYNLSKGVNRFCLSKPGVYKVTPRSCHRFEQAFYTYDTSSPSILTLTAIRHHVLGTITTDKMMDVTVTIKSSIDSEPALVLGPLKSVQELRREQQLAEIEARRQEREKNGNEEGEERMTKPPVQEMVDELQGPFSYDFSYWARSGEKITVTPSSKELLFYPPSMEAVVSGESCPGKLIEIHGKAGLFLEGQIHPELEGVEIVISEKGASSPLITVFTDDKGAYSVGPLHSDLEYTVTSQKEGYVLTAVEGTIGDFKAYALAGVSFEIKAEDDQPLPGVLLSLSGGLFRSNLLTQDNGILTFSNLSPGQYYFKPMMKEFRFEPSSQMIEVQEGQNLKITITGYRTAYSCYGTVSSLNGEPEQGVAMEAVGQNDCSIYGEDTVTDEEGKFRLRGLLPGCVYHVQLKAEGNDHIERALPHHRVIEVGNNDIDDVNIIVFRQINQFDLSGNVITSSEYLPTLWVKLYKSENLDNPIQTVSLGQSLFFHFPPLLRDGENYVVLLDSTLPRSQYDYILPQVSFTAVGYHKHITLIFNPTRKLPEQDIAQGSYIALPLTLLVLLAGYNHDKLIPLLLQLTSRLQGVGALGQAASDNSGPEDAKRQAKKQKTRRTLRLQEEFQLMWCLVPWRGTLGIHLFSSLPFASEILLETTATCIHY

SEQ ID NO: 9421 - protein, 1222 aa, Homo Sapiens
MLVGQGAGPLGPAVVTAAVVLLLSGVGPAHGSEDIVVGCGGFVKSDVEINYSLIEIKLYTKHGTLKYQTDCAPNNGYFMIPLYDKGDFILKIEPPLGWSFEPTTVELHVDGVSDICTKGGDINFVFTGFSVNGKVLSKGQPLGPAGVQVSLRNTGTEAKIQSTVTQPGGKFAFFKVLPGDYEILATHPTWALKEASTTVRVTNSNANAASPLIVAGYNVSGSVRSDGEPMKGVKFLLFSSLVTKEDVLGCNVSPVPGFQPQDESLVYLCYTVSREDGSFSFYSLPSGGYTVIPFYRGERITFDVAPSRLDFTVEHDSLKIEPVFHVMGFSVTGRVLNGPEGDGVPEAVVTLNNQIKVKTKADGSFRLENITTGTYTIHAQKEHLYFETVTIKIAPNTPQLADIVATGFSVCGQISIIRFPDTVKQMNKYKVVLSSQDKDKSLVTVETDAHGSFCFKANPGTYKVQVMVPEAETRAGLTLKPQTFPLTVTDRPVMDVAFVQFLASVSGKVSCLDTCGDLLVTLQSLSRQGEKRSLQLSGKVNAMTFTFDNVLPGKYKISIMHEDWCWKNKSLEVEVLEDDVSAVEFRQTGYMLRCSLSHAITLEFYQDGNGRENVGIYNLSKGVNRFCLSKPGVYKVTPRSCHRFEQAFYTYDTSSPSILTLTAIRHHVLGTITTDKMMDVTVTIKSSIDSEPALVLGPLKSVQELRREQQLAEIEARRQEREKNGNEEGEERMTKPPVQEMVDELQGPFSYDFSYWARSGEKITVTPSSKELLFYPPSMEAVVSGESCPGKLIEIHGKAGLFLEGQIHPELEGVEIVISEKGASSPLITVFTDDKGAYSVGPLHSDLEYTVTSQKEGYVLTAVEGTIGDFKAYALAGVSFEIKAEDDQPLPGVLLSLSGGLFRSNLLTQDNGILTFSNLSPGQYYFKPMMKEFRFEPSSQMIEVQEGQNLKITITGYRTAYSCYGTVSSLNGEPEQGVAMEAVGQNDCSIYGEDTVTDEEGKFRLRGLLPGCVYHVQLKAEGNDHIERALPHHRVIEVGNNDIDDVNIIVFRQINQFDLSGNVITSSEYLPTLWVKLYKSENLDNPIQTVSLGQSLFFHFPPLLRDGENYVVLLDSTLPRSQYDYILPQVSFTAVGYHKHITLIFNPTRKLPEQDIAQGSYIALPLTLLVLLAGYNHDKLIPLLLQLTSRLQGVGALGQAASDNSGPEDAKRQAKKQKTRRT

SEQ ID NO: 9422 - protein, 61 aa, Homo Sapiens
MLVGQGAGPLGPAVVTAAVVLLLSGVGPAHGSEDIVVGCGGFVKSDVEINYSLIEQVLNMH

SEQ ID NO: 9423 - protein, 95 aa, Homo Sapiens
  misc_feature (1)..(1): Xaa can be any naturally occurring amino acid
XEDWCWKNKSLEVEVLEDDVSAVEFRQTGYMLRCSLSHAITLVQPYCSGEMCPGTSELKTPRNFIRMEMGVRMWGFITSPKESTDSACPSLVCTK

SEQ ID NO: 9424 - protein, 50 aa, Homo Sapiens
  misc_feature (1)..(1): Xaa can be any naturally occurring amino acid
XSYIALPLTLLVLLAGYNHDKGHIRPGERPAHPWGLISKRPASFELKPTH

SEQ ID NO: 9425 - protein, 80 aa, Homo Sapiens
  misc_feature (1)..(1): Xaa can be any naturally occurring amino acid
XTGYMLRCSLSHAITLVCTAYGVSYLEKRLPCGCQERLTSQEYCKRRNFIRMEMGVRMWGFITSPKESTDSACPSLVCTK

SEQ ID NO: 9426 - protein, 81 aa, Homo Sapiens
MLQHISLLVKQVQELELKLSGQNAMGSQDSLLEITFRSGALPVLCDPTTPKPEDLHSPPLGAGLADFAHPAGSPLGRRDCL

SEQ ID NO: 9427 - protein, 349 aa, Homo Sapiens
MPSKTKYNLVDDGHDLRIPLHNEDAFQHGICFEAKYVGSLDVPRPNSRVEIVAAMRRIRYEFKAKNIKKKKVSIMVSVDGVKVILKKKKKKKEWTWDESKMLVMQDPIYRIFYVSHDSQDLKIFSYIARDGASNIFRCNVFKSKKKSQAMRIVRTVGQAFEVCHKLSLQHTQQNADGQEDGESERNSNSSGDPGRQLTGAERASTATAEETDIDAVEVPLPGNDVLEFSRGVTDLDAVGKEGGSHTGSKVSHPQEPMLTASPRMLLPSSSSKPPGLGTETPLSTHHQMQLLQQLLQQQQQQTQVAVAQCVVGQIALVLSTAISMCLLLPNFSLALPSLLMEELESRYTC

SEQ ID NO: 9428 - protein, 501 aa, Homo Sapiens
MPSKTKYNLVDDGHDLRIPLHNEDAFQHGICFEAKYVGSLDVPRPNSRVEIVAAMRRIRYEFKAKNIKKKKVSIMVSVDGVKVILKKKKKKKEWTWDESKMLVMQDPIYRIFYVSHDSQDLKIFSYIARDGASNIFRCNVFKSKKKSQAMRIVRTVGQAFEVCHKLSLQHTQQNADGQEDGESERNSNSSGDPGRQLTGAERASTATAEETDIDAVEVPLPGNDVLEFSRGVTDLDAVGKEGGSHTGSKVSHPQEPMLTASPRMLLPSSSSKPPGLGTETPLSTHHQMQLLQQLLQQQQQQTQVAVAQVHLLKDQLAAEAAARLEAQARVHQLLLQNKDMLQHISLLVKQVQELELKLSGQNAMGSQDSLLEITFRSGALPVLCDPTTPKPEDLHSPPLGAGLADFAHPAGSPLGRRDCLVKLECFRFLPPEDTPPPAQGEALLGGLELIKFRESGIASEYESNTDESEERDSWSQEELPRLLNVLQRQELGDGLDDEIAV

SEQ ID NO: 9429 - protein, 506 aa, Homo Sapiens
MPSKTKYNLVDDGHDLRIPLHNEDAFQHGICFEAKYVGSLDVPRPNSRVEIVAAMRRIRYEFKAKNIKKKKVSIMVSVDGVKVILKKKKKLLLLQKKEWTWDESKMLVMQDPIYRIFYVSHDSQDLKIFSYIARDGASNIFRCNVFKSKKKSQAMRIVRTVGQAFEVCHKLSLQHTQQNADGQEDGESERNSNSSGDPGRQLTGAERASTATAEETDIDAVEVPLPGNDVLEFSRGVTDLDAVGKEGGSHTGSKVSHPQEPMLTASPRMLLPSSSSKPPGLGTETPLSTHHQMQLLQQLLQQQQQQTQVAVAQVHLLKDQLAAEAAARLEAQARVHQLLLQNKDMLQHISLLVKQVQELELKLSGQNAMGSQDSLLEITFRSGALPVLCDPTTPKPEDLHSPPLGAGLADFAHPAGSPLGRRDCLVKLECFRFLPPEDTPPPAQGEALLGGLELIKFRESGIASEYESNTDESEERDSWSQEELPRLLNVLQRQELGDGLDDEIAV

SEQ ID NO: 9430 - protein, 211 aa, Homo Sapiens
MSLSSLCPVFSAAASSLQVHLLKDQLAAEAAARLEAQARVHQLLLQNKDMLQHISLLVKQVQELELKLSGQNAMGSQDSLLEITFRSGALPVLCDPTTPKPEDLHSPPLGAGLADFAHPAGSPLGRRDCLVKLECFRFLPPEDTPPPAQGEALLGGLELIKFRESGIASEYESNTDESEERDSWSQEELPRLLNVLQRQELGDGLDDEIAV

SEQ ID NO: 9431 - protein, 1286 aa, Homo Sapiens
GPGARGRRRRRRPMSPPPPPPPVRALPLLLLLAGPGAAAPPCLDGSPCANGGRCTQLPSREAACLCPPGWVGERCQLEDPCHSGPCAGRGVCQSSVVAGTARFSCRCPRGFRGPDCSLPDPCLSSPCAHGARCSVGPDGRFLCSCPPGYQGRSCRSDVDECRVGEPCRHGGTCLNTPGSFRCQCPAGYTGPLCENPAVPCAPSPCRNGGTCRQSGDLTYDCACLPGFEGQNCEVNVDDCPGHRCLNGGTCVDGVNTYNCQCPPEWTGQFCTEDVDECQLQPNACHNGGTCFNTLGGHSCVCVNGWTGESCSQNIDDCATAVCFHGATCHDRVASFYCACPMGKTGLLCHLDDACVSNPCHEDAICDTNPVNGRAICTCPPGFTGGACDQDVDECSIGANPCEHLGRCVNTQGSFLCQCGRGYTGPRCETDVNECLSGPCRNQATCLDRIGQFTCICMAGFTGTYCEVDIDECQSSPCVNGGVCKDRVNGFSCTCPSGFSGSTCQLDVDECASTPCRNGAKCVDQPDGYECRCAEGFEGTLCDRNVDDCSPDPCHHGRCVDGIASFSCACAPGYTGTRCESQVDECRSQPCRHGGKCLDLVDKYLCRCPSGTTGVNCEVNIDDCASNPCTFGVCRDGINRYDCVCQPGFTGPLCNVEINECASSPCGEGGSCVDGENGFRCLCPPGSLPPLCLPPSHPCAHEPCSHGICYDAPGGFRCVCEPGWSGPRCSQSLARDACESQPCRAGGTCSSDGMGFHCTCPPGVQGRQCELLSPCTPNPCEHGGRCESAPGQLPVCSCPQGWQDPCLNGGSCQDGVGSFSCSCLPGFAGPRCARDVDECLSNPCGPGTCTDHVASFTCTCPPGYGGFHCEQDLPDCSPSSCFNGGTCVDGVNSFSCLCRPGYTGAHCQHEADPCLSRPCLHGGVCSAAHPGFRCTCLESFTGPQCQTLVDWCSRQPCQNGGRCVQTGAYCLCPPGWSGRLCDIRSLPCREAAAQIGVRLEQLCQAGGQCVDEDSSHYCVCPEGRTGSHCEQEVDPCLAQPCQHGGTCRGYMGGYMCECLPGYNGDNCEDDVDECASQPCQHGGSCIDLVARYLCSCPPGTLGVLCEINEDDCGPGPPLDSGPRCLHNGTCVDLVGGFRCTCPPGYTGLRCEADINECRSGACHAAHTRDCLQDPGGGFRCLCHAGFSGPRCQTVLSPCESQPCQHGGQCRPSPGPGGGLTFTCHCAQPFWGPRCERVARSCRELQCPVGVPCQQTPRGPRCACPPGLSGPSCRSFPGSPPGASNASC

SEQ ID NO: 9432 - protein, 2321 aa, Homo Sapiens
MGPGARGRRRRRRPMSPPPPPPPVRALPLLLLLAGPGAAAPPCLDGSPCANGGRCTQLPSREAACLCPPGWVGERCQLEDPCHSGPCAGRGVCQSSVVAGTARFSCRCPRGFRGPDCSLPDPCLSSPCAHGARCSVGPDGRFLCSCPPGYQGRSCRSDVDECRVGEPCRHGGTCLNTPGSFRCQCPAGYTGPLCENPAVPCAPSPCRNGGTCRQSGDLTYDCACLPGFEGQNCEVNVDDCPGHRCLNGGTCVDGVNTYNCQCPPEWTGQFCTEDVDECQLQPNACHNGGTCFNTLGGHSCVCVNGWTGESCSQNIDDCATAVCFHGATCHDRVASFYCACPMGKTGLLCHLDDACVSNPCHEDAICDTNPVNGRAICTCPPGFTGGACDQDVDECSIGANPCEHLGRCVNTQGSFLCQCGRGYTGPRCETDVNECLSGPCRNQATCLDRIGQFTCICMAGFTGTYCEVDIDECQSSPCVNGGVCKDRVNGFSCTCPSGFSGSTCQLDVDECASTPCRNGAKCVDQPDGYECRCAEGFEGTLCDRNVDDCSPDPCHHGRCVDGIASFSCACAPGYTGTRCESQVDECRSQPCRHGGKCLDLVDKYLCRCPSGTTGVNCEVNIDDCASNPCTFGVCRDGINRYDCVCQPGFTGPLCNVEINECASSPCGEGGSCVDGENGFRCLCPPGSLPPLCLPPSHPCAHEPCSHGICYDAPGGFRCVCEPGWSGPRCSQSLARDACESQPCRAGGTCSSDGMGFHCTCPPGVQGRQCELLSPCTPNPCEHGGRCESAPGQLPVCSCPQGWQGPRCQQDVDECAGPAPCGPHGICTNLAGSFSCTCHGGYTGPSCDQDINDCDPNPCLNGGSCQDGVGSFSCSCLPGFAGPRCARDVDECLSNPCGPGTCTDHVASFTCTCPPGYGGFHCEQDLPDCSPSSCFNGGTCVDGVNSFSCLCRPGYTGAHCQHEADPCLSRPCLHGGVCSAAHPGFRCTCLESFTGPQCQTLVDWCSRQPCQNGGRCVQTGAYCLCPPGWSGRLCDIRSLPCREAAAQIGVRLEQLCQAGGQCVDEDSSHYCVCPEGRTGSHCEQEVDPCLAQPCQHGGTCRGYMGGYMCECLPGYNGDNCEDDVDECASQPCQHGGSCIDLVARYLCSCPPGTLGVLCEINEDDCGPGPPLDSGPRCLHNGTCVDLVGGFRCTCPPGYTGLRCEADINECRSGACHAAHTRDCLQDPGGGFRCLCHAGFSGPRCQTVLSPCESQPCQHGGQCRPSPGPGGGLTFTCHCAQPFWGPRCERVARSCRELQCPVGVPCQQTPRGPRCACPPGLSGPSCRSFPGSPPGASNASCAAAPCLHGGSCRPAPLAPFFRCACAQGWTGPRCEAPAAAPEVSEEPRCPRAACQAKRGDQRCDRECNSPGCGWDGGDCSLSVGDPWRQCEALQCWRLFNNSRCDPACSSPACLYDNFDCHAGGRERTCNPVYEKYCADHFADGRCDQGCNTEECGWDGLDCASEVPALLARGVLVLTVLLPPEELLRSSADFLQRLSAILRTSLRFRLDAHGQAMVFPYHRPSPGSEPRARRELAPEVIGSVVMLEIDNRLCLQSPENDHCFPDAQSAADYLGALSAVERLDFPYPLRDVRGEPLEPPEPSVPLLPLLVAGAVLLLVILVLGVMVARRKREHSTLWFPEGFSLHKDVASGHKGRREPVGQDALGMKNMAKGESLMGEVATDWMDTECPEAKRLKVEEPGMGAEEAVDCRQWTQHHLVAADIRVAPAMALTPPQGDADADGMDVNVRGPDGFTPLMLASFCGGALEPMPTEEDEADDTSASIISDLICQGAQLGARTDRTGETALHLAARYARADAAKRLLDAGADTNAQDHSGRTPLHTAVTADAQGVFQILIRNRSTDLDARMADGSTALILAARLAVEGMVEELIASHADVNAVDELGKSALHWAAAVNNVEATLALLKNGANKDMQDSKEETPLFLAAREGSYEAAKLLLDHFANREITDHLDRLPRDVAQERLHQDIVRLLDQPSGPRSPPGPHGLGPLLCPPGAFLPGLKAAQSGSKKSRRPPGKAGLGPQGPRGRGKKLTLACPGPLADSSVTLSPVDSLDSPRPFGGPPASPGGFPLEGPYAAATATAVSLAQLGGPGRAGLGRQPPGGCVLSLGLLNPVAVPLDWARLPPPAPPGPSFLLPLAPGPQLLNPGTPVSPQERPPPYLAVPGHGEEYPAAGAHSSPPKARFLRVPSEHPYLTPSPESPEHWASPSPPSLSDWSESTPSPATATGAMATTTGALPAQPLPLSVPSSLAQAQTQLGPQPEVTPKRQVLA

SEQ ID NO: 9433 - protein, 117 aa, Homo Sapiens
  misc_feature (1)..(1): Xaa can be any naturally occurring amino acid
XLMGEVATDWMDTECPEAKRLKVEEPGMGAEEAVDCRQWTQHHLVAADIRVAPAMALTPPQGDADADGMDVNVRGPDSHPKPLYRLGCPHGRWLNGTDPGGPPGSRGHGGRAHRQPC

SEQ ID NO: 9434 - protein, 177 aa, Homo Sapiens
  misc_feature (1)..(1): Xaa can be any naturally occurring amino acid
XQLGARTDRTGETALHLAARYARADAAKRLLDAGADTNAQDHSGRTPLHTAVTADAQGVFQILIRNRSTDLDARMADGSTALILAARLAVEGMVEELIASHADVNAVDELGKSALHWAAAVNNVEATLALLKNGANKDMQDSKVSPSPWSTGCQQWHSAIAIQPGQQSETLSKNKTK

SEQ ID NO: 9435 - protein, 295 aa, Homo Sapiens
MGRGVRVLLLLSLLHCAGGSEGRKTWRRRGQQPPPPPRTEAAPAAGQPVESFPLDFTAVEGNMDSFMAQVKSLAQSLYPCSAQQLNEDLRLHLLLNTSVTCNDGSPAGYYLKESRGSRRWLLFLEGGWYCFNRENCDSRYDTMRRLMSSRDWPRTRTGTGILSSQPEENPYWWNANMVFIPYCSSDVWSGASSKSEKNEYAFMGALIIQEVVRELLGRGLSGAKVLLLAGSSAGGTGVLLNVDRVAEQLEKLGYPAIQVRGLADSGWFLDNKQYRHTDCVDTITCAPTEAIRRGI

SEQ ID NO: 9436 - protein, 496 aa, Homo Sapiens
MGRGVRVLLLLSLLHCAGGSEGRKTWRRRGQQPPPPPRTEAAPAAGQPVESFPLDFTAVEGNMDSFMAQVKSLAQSLYPCSAQQLNEDLRLHLLLNTSVTCNDGSPAGYYLKESRGSRRWLLFLEGGWYCFNRENCDSRYDTMRRLMSSRDWPRTRTGTGILSSQPEENPYWWNANMVFIPYCSSDVWSGASSKSEKNEYAFMGALIIQEVVRELLGRGLSGAKVLLLAGSSAGGTGVLLNVDRVAEQLEKLGYPAIQVRGLADSGWFLDNKQYRHTDCVDTITCAPTEAIRRGIRYWNGVVPERCRRQFQEGEEWNCFFGYKVYPTLRCPVFVVQWLFDEAQLTVDNVHLTGQPVQEGLRLYIQNLGRELRHTLKDVPASFAPACLSHEIIIRSHWTDVQVKGTSLPRALHCWDRSLHDSHKASKTPLKGCPVHLVDSCPWPHCNPSCPTVRDQFTGQEMNVAQFLMHMGFDMQTVAQPQGLEPSELLGMLSNGS

SEQ ID NO: 9437 - protein, 197 aa, Homo Sapiens
MRRLMSSRDWPRTRTGTGILSSQPEENPYWWNANMVFIPYCSSDVWSGASSKSEKNEYAFMGALIIQEVVRELLGRGLSGAKVLLLAGSSAGGTGVLLNVDRVAEQLEKLGYPAIQVRGLADSGWFLDNKQYRHTDCVDTITCAPTEAIRRGIRYWNGVVPERCRRQFQEGEEWNCFFGYKVYPTLRCPVFVVQWLF

SEQ ID NO: 9438 - protein, 357 aa, Homo Sapiens
MQSVQSTSFCLRKQCLCLTFLLLHLLGQVAATQRCPPQCPGRCPATPPTCAPGVRAVLDGCSCCLVCARQRGESCSDLEPCDESSGLYCDRSADPSNQTGICTAVEGDNCVFDGVIYRSGEKFQPSCKFQCTCRDGQIGCVPRCQLDVLLPEPNCPAPRKVEVPGECCEKWICGPDEEDSLGGLTLAAYRPEATLGVEVSDSSVNCIEQTTEWTACSKSCGMGFSTRVTNRNRQCEMLKQTRLCMVRPCEQEPEQPTDKKGKKCLRTKKSLKAIHLQFKNCTSLHTYKPRFCGVCSDGRCCTPHNTKTIQAEFQCSPGQIVKKPVMVIGTCTCHTNCPKNNEAFLQELELKTTRGKM

SEQ ID NO: 9439 - protein, 125 aa, Homo Sapiens
MARSATLAAAALALCLLLAPPGLAWYKPAAGHSSYSVGRAAGLLSGLRRSPYARRSQPYRGAEPPGGAGASPELQLHPRLRSLAVCVQDVAPNLQRCERLPDGRGTYQCKANVFLSLRAADCLAA

SEQ ID NO: 9440 - protein, 156 aa, Homo Sapiens
MARSATLAAAALALCLLLAPPGLAWYKPAAGHSSYSVGRAAGLLSGLRRSPYARRSQPYRGAEPPGGAGASPELQLHPRLRSLVSPACRGLMGGGGRTWVGVRRPLSLCLPAPQAVCVQDVAPNLQRCERLPDGRGTYQCKANVFLSLRAADCLAA

SEQ ID NO: 9441 - protein, 53 aa, Homo Sapiens
GAQHRCPGRTGAVQGLRFCGWSYKGSECEPMPHPTLPAEQRTVLQRQCHLHQQ

SEQ ID NO: 9442 - protein, 201 aa, Homo Sapiens
MRFLAATFLLLALSTAAQAEPVQFKDCGSVDGVIKEVNVSPCPTQPCQLSKGQSYSVNVTFTSNIQSKSSKAVVHGILMGVPVPFPIPEPDGCKSGINCPIQKDKTYSYLNKLPVKSEYPSIKLVVEWQLQDDKNQSLFCWEIPVQIMFPCLFSAHCPMLATEHRCLQLQMETKSLRFWSRRGMSVWLPSPAGAWRRTAPF

SEQ ID NO: 9443 - protein, 151 aa, Homo Sapiens
MRFLAATFLLLALSTAAQAEPVQFKDCGSVDGVIKEVNVSPCPTQPCQLSKGQSYSVNVTFTSNIQSKSSKAVVHGILMGVPVPFPIPEPDGCKSGINCPIQKDKTYSYLNKLPVKSEYPSIKLVVEWQLQDDKNQSLFCWEIPVQIVSHL

SEQ ID NO: 9444 - protein, 174 aa, Homo Sapiens
MRFLAATFLLLALSTAAQAEPVQFKDCGSVDGVIKEVNVSPCPTQPCQLSKGQSYSVNVTFTSNIQSKSSKAVVHGILMGVPVPFPIPEPDGCKSGINCPIQKDKTYSYLNKLPVKSEYPSIKLVVEWQLQDDKNQSLFCWEIPVQIVSLSGGERAWVEGRKWRRNQTETKSVP

SEQ ID NO: 9445 - protein, 221 aa, Homo Sapiens
MRFLAATFLLLALSTAAQAEPVQFKDCGSVDGVIKEVNVSPCPTQPCQLSKGQSYSVNVTFTSNIQSKSSKAVVHGILMGVPVPFPIPEPDGCKSGINCPIQKDKTYSYLNKLPVKSEYPSIKLVVEWQLQDDKNQSLFCWEIPVQIVSLSGGFSSLSASLSSVHLANESAETLDSTSSSAASTTVTCSPMVSSDSLKRRCSVAETELRVAGSQWLSHVSF

SEQ ID NO: 9446 - protein, 148 aa, Homo Sapiens
MRFLAATFLLLALSTAAQAEPVQFKDCGSVDGVIKEVNVSPCPTQPCQLSKGQSYSVNVTFTSNIQSKSSKAVVHGILMGVPVPFPIPEPDGCKSGINCPIQKDKTYSYLNKLPVKSEYPSIKLVVEWQLQDDKNQSLFCWEIPVSHL

SEQ ID NO: 9447 - protein, 122 aa, Homo Sapiens
MRFLAATFLLLALSTAAQAEPVQFKDCGSVDGVIKEVNVSPCPTQPCQLSKGQSYSVNVTFTSNIQSKSSKAVVHGILMGVPVPFPIPEPDGCKSGINCPIQKDKTYSYLNKLPVKSEYPSV

SEQ ID NO: 9448 - protein, 125 aa, Homo Sapiens
MRFLAATFLLLALSTAAQAEPVQFKDCGSVDGVIKEVNVSPCPTQPCQLSKGQSYSVNVTFTSNIQSKSSKAVVHGILMGVPVPFPIPEPDGCKSGINCPIQKDKTYSYLNKLPVKSEYPSVSHL

SEQ ID NO: 9449 - protein, 173 aa, Homo Sapiens
  misc_feature (1)..(1): Xaa can be any naturally occurring amino acid
XPLRVRPPTWTQLSVRRICPSPASGLEDDASRRAWGPREAVRSLRAREEGSVDGVIKEVNVSPCPTQPCQLSKGQSYSVNVTFTSNIQSKSSKAVVHGILMGVPVPFPIPEPDGCKSGINCPIQKDKTYSYLNKLPVKSEYPSIKLVVEWQLQDDKNQSLFCWEIPVQIVSHL

SEQ ID NO: 9450 - protein, 113 aa, Homo Sapiens
MDSRQAAALLVLLLLIDGGCAEGPGGQQEDQLSAEEDSEPLPPQDAQTSGSLLHYLLQAMERPGRSQAFLFQPQRFGRNTQGSWRNEWLSPRAGEGLNSQFWSLAAPQRFGKK

SEQ ID NO: 9451 - protein, 423 aa, Homo Sapiens
MFIMNEKWDTNSSENWHPIWNVNDTKHHLYSDINITYVNYYLHQPQVAAIFIISYFLIFFLCMMGNTVVCFIVMRNKHMHTVTNLFILNLAISDLLVGIFCMPITLLDNIIAGWPFGNTMCKISGLVQGISVAASVFTLVAIAVDRFQCVVYPFKPKLTIKTAFVIIMIIWVLAITIMSPSAVMLHVQEEKYYRVRLNSQNKTSPVYWCREDWPNQEMRKIYTTVLFANIYLAPLSLIVIMYGRIGISLFRAAVPHTGRKNQEQWHVVSRKKQKIIKMLLIVALLFILSWLPLWTLMMLSDYADLSPNELQIINIYIYPFAHWLAFGNSSVNPIIYGFFNENFRRGFQEAFQLQLCQKRAKPMEAYALKAKSHVLINTSNQLVQESTFQNPHGETLLYRKSAEKPQQELVMEELKETTNSSEI

SEQ ID NO: 9452 - protein, 420 aa, Homo Sapiens
MNEKWDTNSSENWHPIWNVNDTKHHLYSDINITYVNYYLHQPQVAAIFIISYFLIFFLCMMGNTVVCFIVMRNKHMHTVTNLFILNLAISDLLVGIFCMPITLLDNIIAGWPFGNTMCKISGLVQGISVAASVFTLVAIAVDRFQCVVYPFKPKLTIKTAFVIIMIIWVLAITIMSPSAVMLHVQEEKYYRVRLNSQNKTSPVYWCREDWPNQEMRKIYTTVLFANIYLAPLSLIVIMYGRIGISLFRAAVPHTGRKNQEQWHVVSRKKQKIIKMLLIVALLFILSWLPLWTLMMLSDYADLSPNELQIINIYIYPFAHWLAFGNSSVNPIIYGFFNENFRRGFQEAFQLQLCQKRAKPMEAYALKAKSHVLINTSNQLVQESTFQNPHGETLLYRKSAEKPQQELVMEELKETTNSSEI

SEQ ID NO: 9453 - protein, 522 aa, Homo Sapiens
MNSFFGTPAASWCLLESDVSSAPDKEAGRERRALSVQQRGGPAWSGSLEWSRQSAGDRRRLGLSRQTAKSSWSRSRDRTCCCRRAWWILVPAADRARRERFIMNEKWDTNSSENWHPIWNVNDTKHHLYSDINITYVNYYLHQPQVAAIFIISYFLIFFLCMMGNTVVCFIVMRNKHMHTVTNLFILNLAISDLLVGIFCMPITLLDNIIAGWPFGNTMCKISGLVQGISVAASVFTLVAIAVDRFQCVVYPFKPKLTIKTAFVIIMIIWVLAITIMSPSAVMLHVQEEKYYRVRLNSQNKTSPVYWCREDWPNQEMRKIYTTVLFANIYLAPLSLIVIMYGRIGISLFRAAVPHTGRKNQEQWHVVSRKKQKIIKMLLIVALLFILSWLPLWTLMMLSDYADLSPNELQIINIYIYPFAHWLAFGNSSVNPIIYGFFNENFRRGFQEAFQLQLCQKRAKPMEAYALKAKSHVLINTSNQLVQESTFQNPHGETLLYRKSAEKPQQELVMEELKETTNSSEI

SEQ ID NO: 9454 - protein, 132 aa, Homo Sapiens
MNSFFGTPAASWCLLESDVSSAPDKEAGRERRALSVQQRGGPAWSGSLEWSRQSAGDRRRLGLSRQTAKSSWSRSRDRTCCCRRAWWILVPAADRARRERMAIWKHDVQDQWIGPGNICRSFSLYVSCNCCR

SEQ ID NO: 9455 - protein, 1201 aa, Homo Sapiens
MALGTTLRASLLLLGLLTEGLAQLAIPASVPRGFWALPENLTVVEGASVELRCGVSTPGSAVQWAKDGLLLGPDPRIPGFPRYRLEGDPARGEFHLHIEACDLSDDAEYECQVGRSEMGPELVSPRVILSILVPPKLLLLTPEAGTMVTWVAGQEYVVNCVSGDAKPAPDITILLSGQTISDISANVNEGSQQKLFTVEATARVTPRSSDNRQLLVCEASSPALEAPIKASFTVNVLFPPGPPVIEWPGLDEGHVRAGQSLELPCVARGGNPLATLQWLKNGQPVSTAWGTEHTQAVARSVLVMTVRPEDHGAQLSCEAHNSVSAGTQEHGITLQVTFPPSAIIILGSASQTENKNVTLSCVSKSSRPRVLLRWWLGWRQLLPMEETVMDGLHGGHISMSNLTFLARREDNGLTLTCEAFSEAFTKETFKKSLILNVKYPAQKLWIEGPPEGQKLRAGTRVRLVCLAIGGNPEPSLMWYKDSRTVTESRLPQESRRVHLGSVEKSGSTFSRELVLVTGPSDNQAKFTCKAGQLSASTQLAVQFPPTNVTILANASALRPGDALNLTCVSVSSNPPVNLSWDKEGERLEGVAAPPRRAPFKGSAAARSVLLQVSSRDHGQRVTCRAHSAELRETVSSFYRLNVLYRPEFLGEQVLVVTAVEQGEALLPVSVSANPAPEAFNWTFRGYRLSPAGGPRHRILSSGALHLWNVTRADDGLYQLHCQNSEGTAEARLRLDVHYAPTIRALQDPTEVNVGGSVDIVCTVDANPILPGMFNWERLGEDEEDQSLDDMEKISRGPTGRLRIHHAKLAQAGAYQCIVDNGVAPPARRLLRLVVRFAPQVEHPTPLTKVAAAGDSTSSATLHCRARGVPNIVFTWTKNGVPLDLQDPRYTEHTYHQGGVHSSLLTIANVSAAQDYALFTCTATNALGSDQTNIQLVSISRPDPPSGLKVVSLTPHSVGLEWKPGFDGGLPQRFCIRYEALGTPGFHYVDVVPPQATTFTLTGLQPSTRYRVWLLASNALGDSGLADKGTQLPITTPGLHQPSGEPEDQLPTEPPSGISEKTEAGSEEDRVRNEYEESQWTGERDTQSSTVSTTEAEPYYRSLRDFSPQLPPTQEEVSYSRGFTGEDEDMAFPGHLYDEVERTYPPSGAWGPLYDEVQMGPWDLHWPEDTYQDPRGIYDQVAGDLDTLEPDSLPFELRGHLV

SEQ ID NO: 9456 - protein, 1241 aa, Homo Sapiens
MALGTTLRASLLLLGLLTEGLAQLAIPASVPRGFWALPENLTVVEGASVELRCGVSTPGSAVQWAKDGLLLGPDPRIPGFPRYRLEGDPARGEFHLHIEACDLSDDAEYECQVGRSEMGPELVSPRVILSILVPPKLLLLTPEAGTMVTWVAGQEYVVNCVSGDAKPAPDITILLSGQTISDISANVNEGSQQKLFTVEATARVTPRSSDNRQLLVCEASSPALEAPIKASFTVNVLFPPGPPVIEWPGLDEGHVRAGQSLELPCVARGGNPLATLQWLKNGQPVSTAWGTEHTQAVARSVLVMTVRPEDHGAQLSCEAHNSVSAGTQEHGITLQVTFPPSAIIILGSASQTENKNVTLSCVSKSSRPRVLLRWWLGWRQLLPMEETVMDGLHGGHISMSNLTFLARREDNGLTLTCEAFSEAFTKETFKKSLILNVKYPAQKLWIEGPPEGQKLRAGTRVRLVCLAIGGNPEPSLMWYKDSRTVTESRLPQESRRVHLGSVEKSGSTFSRELVLVTGPSDNQAKFTCKAGQLSASTQLAVQFPPTNVTILANASALRPGDALNLTCVSVSSNPPVNLSWDKEGERLEGVAAPPRRAPFKGSAAARSVLLQVSSRDHGQRVTCRAHSAELRETVSSFYRLNVLYRPEFLGEQVLVVTAVEQGEALLPVSVSANPAPEAFNWTFRGYRLSPAGGPRHRILSSGALHLWNVTRADDGLYQLHCQNSEGTAEARLRLDVHYAPTIRALQDPTEVNVGGSVDIVCTVDANPILPGMFNWERLGEDEEDQSLDDMEKISRGPTGRLRIHHAKLAQAGAYQCIVDNGVAPPARRLLRLVVRFAPQVEHPTPLTKVAAAGDSTSSATLHCRARGVPNIVFTWTKNGVPLDLQDPRYTEHTYHQGGVHSSLLTIANVSAAQDYALFTCTATNALGSDQTNIQLVSISRPDPPSGLKVVSLTPHSVGLEWKPGFDGGLPQRFCIRYEALGTPGFHYVDVVPPQATTFTLTGLQPSTRYRVWLLASNALGDSGLADKGTQLPITTPGLHQPSGEPEDQLPTEPPSGPSGLPLLPVLFALGGLLLLSNASCVGGVLWQRRLRRLAEGISEKTEAGSEEDRVRNEYEESQWTGERDTQSSTVSTTEAEPYYRSLRDFSPQLPPTQEEVSYSRGFTGEDEDMAFPGHLYDEVERTYPPSGAWGPLYDEVQMGPWDLHWPEDTYQDPRGIYDQVAGDLDTLEPDSLPFELRGHLV

SEQ ID NO: 9457 - protein, 609 aa, Homo Sapiens
MDFLLALVLVSSLYLQAAAEFDGRWPRQIVSSIGLCRYGGRIDCCWGWARQSWGQCQPFYVLRQRIARIRCQLKAVCQPRCKHGECIGPNKCKCHPGYAGKTCNQDEHIPAPLDQGSEQPLFQPLDHQATSLPSRDLNECGLKPRPCKHRCMNTYGSYKCYCLNGYMLMPDGSCSSALTCSMANCQYGCDVVKGQIRCQCPSPGLQLAPDGRTCVDVDECATGRASCPRFRQCVNTFGSYICKCHKGFDLMYIGGKYQCHDIDECSLGQYQCSSFARCYNIRGSYKCKCKEGYQGDGLTCVYIPKVMIEPSGPIHVPKGNGTILKGDTGNNNWIPDVGSTWWPPKTPYIPPIITNRPTSKPTTRPTPKPTPIPTPPPPPPLPTELRTPLPPTTPERPTTGLTTIAPAASTPPGGITVDNRVQTDPQKPRGDVFIPRQPSNDLFEIFEIERGVSADDEAKDDPGVLVHSCNFDHGLCGWIREKDNDLHWEPIRDPAGGQYLTVSAAKAPGGKAARLVLPLGRLMHSGDLCLSFRHKVTGLHSGTLQVFVRKHGAHGAALWGRNGGHGWRQTQITLRGADIKSVVFKGEKRRGHTGEIGLDDVSLKKGHCS

SEQ ID NO: 9458 - protein, 582 aa, Homo Sapiens
MDFLLALVLVSSLYLQAAAEFDGRWPRQIVSSIGLCRYGGRIDCCWGWARQSWGQCQPFYVLRQRIARIRCQLKAVCQPRCKHGECIGPNKCKCHPGYAGKTCNQDLNECGLKPRPCKHRCMNTYGSYKCYCLNGYMLMPDGSCSSALTCSMANCQYGCDVVKGQIRCQCPSPGLQLAPDGRTCVDVDECATGRASCPRFRQCVNTFGSYICKCHKGFDLMYIGGKYQCHDIDECSLGQYQCSSFARCYNIRGSYKCKCKEGYQGDGLTCVYIPKVMIEPSGPIHVPKGNGTILKGDTGNNNWIPDVGSTWWPPKTPYIPPIITNRPTSKPTTRPTPKPTPIPTPPPPPPLPTELRTPLPPTTPERPTTGLTTIAPAASTPPGGITVDNRVQTDPQKPRGDVFIPRQPSNDLFEIFEIERGVSADDEAKDDPGVLVHSCNFDHGLCGWIREKDNDLHWEPIRDPAGGQYLTVSAAKAPGGKAARLVLPLGRLMHSGDLCLSFRHKVTGLHSGTLQVFVRKHGAHGAALWGRNGGHGWRQTQITLRGADIKSVVFKGEKRRGHTGEIGLDDVSLKKGHCSEER

SEQ ID NO: 9459 - protein, 595 aa, Homo Sapiens
MDFLLALVLVSSLYLQAAAEFDGRWPRQIVSSIGLCRYGGRIDCCWGWARQSWGQCQPVCQPRCKHGECIGPNKCKCHPGYAGKTCNQDEHIPAPLDQGSEQPLFQPLDHQATSLPSRDLNECGLKPRPCKHRCMNTYGSYKCYCLNGYMLMPDGSCSSALTCSMANCQYGCDVVKGQIRCQCPSPGLQLAPDGRTCVDVDECATGRASCPRFRQCVNTFGSYICKCHKGFDLMYIGGKYQCHDIDECSLGQYQCSSFARCYNIRGSYKCKCKEGYQGDGLTCVYIPKVMIEPSGPIHVPKGNGTILKGDTGNNNWIPDVGSTWWPPKTPYIPPIITNRPTSKPTTRPTPKPTPIPTPPPPPPLPTELRTPLPPTTPERPTTGLTTIAPAASTPPGGITVDNRVQTDPQKPRGDVFIPRQPSNDLFEIFEIERGVSADDEAKDDPGVLVHSCNFDHGLCGWIREKDNDLHWEPIRDPAGGQYLTVSAAKAPGGKAARLVLPLGRLMHSGDLCLSFRHKVTGLHSGTLQVFVRKHGAHGAALWGRNGGHGWRQTQITLRGADIKSVVFKGEKRRGHTGEIGLDDVSLKKGHCSEER

SEQ ID NO: 9460 - protein, 566 aa, Homo Sapiens
MDFLLALVLVSSLYLQAAAEFDGRWPRQIVSSIGLCRYGGRIDCCWGWARQSWGQCQPVCQPRCKHGECIGPNKCKCHPGYAGKTCNQDEHIPAPLDQGSEQPLFQPLDHQATSLPSRDLNECGLKPRPCKHRCMNTYGSYKCYCLNGYMLMPDGSCSSALTCSMANCQYGCDVVKGQIRCQCPSPGLQLAPDGRTCVDVDECATGRASCPRFRQCVNTFGSYICKCHKGFDLMYIGGKYQCHDIDECSLGQYQCSSFARCYNIRGSYKCKCKEGYQGDGLTCVYIPKVMIEPSGPIHVPKGNGTILKGDTGNNNWIPDVGSTWWPPKTPYIPPIITNRPTSKPTTRPTPKPTPIPTPPPPPPLPTELRTPLPPTTPERPTTGLTTIAPAASTPPGGITVDNRVQTDPQKPRGDVFSVLVHSCNFDHGLCGWIREKDNDLHWEPIRDPAGGQYLTVSAAKAPGGKAARLVLPLGRLMHSGDLCLSFRHKVTGLHSGTLQVFVRKHGAHGAALWGRNGGHGWRQTQITLRGADIKSVVFKGEKRRGHTGEIGLDDVSLKKGHCSEER

SEQ ID NO: 9461 - protein, 509 aa, Homo Sapiens
MDFLLALVLVSSLYLQAAAEFDGRWPRQIVSSIGLCRYGGRIDCCWGWARQSWGQCQPVCQPRCKHGECIGPNKCKCHPGYAGKTCNQDLNECGLKPRPCKHRCMNTYGSYKCYCLNGYMLMPDGSCSSALTCSMANCQYGCDVVKGQIRCQCPSPGLQLAPDGRTCVDVDECATGRASCPRFRQCVNTFGSYICKCHKGFDLMYIGGKYQCHDIDECSLGQYQCSSFARCYNIRGSYKCKCKEGYQGDGLTCVYIPKVMIEPSGPIHVPKGNGTILKGDTGNNNWIPDVGSTWWPPKTPYIPPIITNRPTSKPTTRPTPKPTPIPTPPPPPPLPTELRTPLPPTTPERPTTGLTTIAPAASTPPGGITVDNRVQTDPQKPRGDVFSVLVHSCNFDHGLCGWIREKDNDLHWEPIRDPAGGQYLTVSAAKAPGGKAARLVLPLGRLMHSGDLCLSFRHKVTGLHSGTLQVFVRKHGAHGAALWGRNGGHGWRQTQITLRGADIKSESQR

SEQ ID NO: 9462 - protein, 565 aa, Homo Sapiens
MDFLLALVLVSSLYLQAAAEFDGRWPRQIVSSIGLCRYGGRIDCCWGWARQSWGQCQPVCQPRCKHGECIGPNKCKCHPGYAGKTCNQDLNECGLKPRPCKHRCMNTYGSYKCYCLNGYMLMPDGSCSSALTCSMANCQYGCDVVKGQIRCQCPSPGLQLAPDGRTCVDVDECATGRASCPRFRQCVNTFGSYICKCHKGFDLMYIGGKYQCHDIDECSLGQYQCSSFARCYNIRGSYKCKCKEGYQGDGLTCVYIPKVMIEPSGPIHVPKGNGTILKGDTGNNNWIPDVGSTWWPPKTPYIPPIITNRPTSKPTTRPTPKPTPIPTPPPPPPLPTELRTPLPPTTPERPTTGLTTIAPAASTPPGGITVDNRVQTDPQKPRGDVFIPRQPSNDLFEIFEIERGVSADDEAKDDPGVLVHSCNFDHGLCGWIREKDNDLHWEPIRDPAGGQYLTVSAAKAPGGKAARLVLPLGRLMHSGDLCLSFRHKVTGLHSGTLQVFVRKHGAHGAALWGRNGGHGWRQTQITLRGADIKSVVFKGEKRRGHTGEIGLDDVSLKKGHCSEER

SEQ ID NO: 9463 - protein, 536 aa, Homo Sapiens
MDFLLALVLVSSLYLQAAAEFDGRWPRQIVSSIGLCRYGGRIDCCWGWARQSWGQCQPVCQPRCKHGECIGPNKCKCHPGYAGKTCNQDLNECGLKPRPCKHRCMNTYGSYKCYCLNGYMLMPDGSCSSALTCSMANCQYGCDVVKGQIRCQCPSPGLQLAPDGRTCVDVDECATGRASCPRFRQCVNTFGSYICKCHKGFDLMYIGGKYQCHDIDECSLGQYQCSSFARCYNIRGSYKCKCKEGYQGDGLTCVYIPKVMIEPSGPIHVPKGNGTILKGDTGNNNWIPDVGSTWWPPKTPYIPPIITNRPTSKPTTRPTPKPTPIPTPPPPPPLPTELRTPLPPTTPERPTTGLTTIAPAASTPPGGITVDNRVQTDPQKPRGDVFSVLVHSCNFDHGLCGWIREKDNDLHWEPIRDPAGGQYLTVSAAKAPGGKAARLVLPLGRLMHSGDLCLSFRHKVTGLHSGTLQVFVRKHGAHGAALWGRNGGHGWRQTQITLRGADIKSVVFKGEKRRGHTGEIGLDDVSLKKGHCSEER

SEQ ID NO: 9464 - protein, 61 aa, Homo Sapiens
MNTYGSYKCYCLNGYMLMPDGSCSSALTCSMANCQYGCDVVKGQIRCQCPSPGLQLAPDGR

SEQ ID NO: 9465 - protein, 104 aa, Homo Sapiens
  misc_feature (1)..(1): Xaa can be any naturally occurring amino acid
XGLCGWIREKDNDLHWEPIRDPAGITKMIKGLEKKIYDGKLKELGLLSLEKRRLRGKPLMVFKYMKGWHREGGDQLFSICTKNRTRGNWLRLEYKGAFLGRGHC

SEQ ID NO: 9466 - protein, 26 aa, Homo Sapiens
  misc_feature (1)..(1): Xaa can be any naturally occurring amino acid
XNDLHWEPIRDPADNCSCLHAGGLDL

SEQ ID NO: 9467 - protein, 453 aa, Homo Sapiens
  misc_feature (1)..(1): Xaa can be any naturally occurring amino acid
XWPRQIVSSIGLCRYGGRIDCCWGWARQSWGQCQPVCQPRCKHGECIGPNKCKCHPGYAGKTCNQDLNECGLKPRPCKHRCMNTYGSYKCYCLNGYMLMPDGSCSSALTCSMANCQYGCDVVKGQIRCQCPSPGLQLAPDGRTCVDVDECATGRASCPRFRQCVNTFGSYICKCHKGFDLMYIGGKYQCHDIDECSLGQYQCSSFARCYNIRGSYKCKCKEGYQGDGLTCVYIPKVMIEPSGPIHVPKGNGTILKGDTGNNNWIPDVGSTWWPPKTPYIPPIITNRPTSKPTTRPTPKPTPIPTPPPPPPLPTELRTPLPPTTPERPTTGLTTIAPAASTPPGGITVDNRVQTDPQKPRGDVFIPRQPSNDLFEIFEIERGVSADDEAKDDPGVLVHSCNFDHGLCGWIREKDNDLHWEPIRDPAEILQGTQFREIFIGCILSASCVTSYLGC

SEQ ID NO: 9468 - protein, 101 aa, Homo Sapiens
MPLEDEVVPPQVLSEPNEEAGAALSPLPEVPPWTGEVSPAQRDGGALGRGPWDSSDRSALLKSKLRALLTAPRSLRRSSCFGGRMDRIGAQSGLGCNSFRY

SEQ ID NO: 9469 - protein, 151 aa, Homo Sapiens
MSSFSTTTVSFLLLLAFQLLGQTRANPMYNAVSNADLMDFKNLLDHLEEKMPLEDEVVPPQVLSEPNEEAGAALSPLPEVPPWTGEVSPAQRDGGALGRGPWDSSDRSALLKSKLRALLTAPRSLRRSSCFGGRMDRIGAQSGLGCNSFRY

SEQ ID NO: 9470 - protein, 152 aa, Homo Sapiens [sequence omitted]

SEQ ID NO: 9471 - protein, 134 aa, Homo Sapiens
MDPQTAPSRALLLLLFLHLAFLGGRSHPLGSPGSASDLETSGLQEQRNHLQGKLSELQVEQTSLEPLQESPRPTGVWKSREVATEGIRGHRKMVLYTLRAPRSPKMVQGSGCFGRKMDRISSSSGLGCKVLRRH

SEQ ID NO: 9472 - protein, 126 aa, Homo Sapiens
MHLSQLLACALLLTLLSLRPSEAKPGAPPKVPRTPPAEELAEPQAAGGGQKKGDKAPGGGGANLKGDRSRLLRDLRVDTKSRAAWARLLQEHPNARKYKGANKKGLSKGCFGLKLDRIGSMSGLGC

SEQ ID NO: 9473 - protein, 126 aa, Homo Sapiens; identical to SEQ ID NO: 9472

SEQ ID NO: 9474 - protein, 89 aa, Homo Sapiens
MISSVKLNLILVLSLSTMHVFWCYPVPSSKVSGKSDYFLILLNSCPTRLDRSKELAFLKPILEKMFVKRSFRNGVGTGMKKTSFQRAKS

SEQ ID NO: 9475 - protein, 432 aa, Homo Sapiens
MPAGRAARTCALLALCLLGAGAQDFGPTRFICTSVPVDADMCAASVAAGGAEELRSSVLQLRETVLQQKETILSQKETIRELTAKLGRCESQSTLDPGAGEARAGGGRKQPGSGKNTMGDLSRTPAAETLSQLGQTLQSLKTRLENLEQYSRLNSSSQTNSLKDLLQSKIDELERQVLSRVNTLEEGKGGPRNDTEERVKIETALTSLHQRISELEKGQKDNRPGDKFQLTFPLRTNYMYAKVKKSLPEMYAFTVCMWLKSSATPGVGTPFSYAVPGQANELVLIEWGNNPMEILINDKVAKLPFVINDGKWHHICVTWTTRDGVWEAYQDGTQGGSGENLAPYHPIKPQGVLVLGQEQDTLGGGFDATQAFVGELAHFNIWDRKLTPGEVYNLATCSTKALSGNVIAWAESHIEIYGGATKWTFEACRQIN

SEQ ID NO: 9476 - protein, 431 aa, Homo Sapiens
MLALLAASVALAVAAGAQDSPAPGSRFVCTALPPEAVHAGCPLPAMPMQGGAQSPEEELRAAVLQLRETVVQQKETLGAQREAIRELTGKLARCEGLAGGKARGAGATGKDTMGDLPRDPGHVVEQLSRSLQTLKDRLESLEHQLRANVSNAGLPGDFREVLQQRLGELERQLLRKVAELEDEKSLLHNETSAHRQKTESTLNALLQRVTELERGNSAFKSPDAFKVSLPLRTNYLYGKIKKTLPELYAFTICLWLRSSASPGIGTPFSYAVPGQANEIVLIEWGNNPIELLINDKVAQLPLFVSDGKWHHICVTWTTRDGMWEAFQDGEKLGTGENLAPWHPIKPGGVLILGQEQDTVGGRFDATQAFVGELSQFNIWDRVLRAQEIVNIANCSTNMPGNIIPWVDNNVDVFGGASKWPVETCEERLLDL

SEQ ID NO: 9477 - protein, 500 aa, Homo Sapiens
LKFLAVLLAAGMLAFLGAVICIIASVPLAASPARALPGGADNASVASGAAASPGPQRSLSALHGAGGSAGPPALPGAPAASAHPLPPGPLFSRFLCTPLAAACPSGAQQGDAAGAAPGEREELLLLQSTAEQLRQTALQQEARIRADQDTIRELTGKLGRCESGLPRGLQGAGPRRDTMADGPWDSPALILELEDAVRALRDRIDRLEQELPARVNLSAAPAPVSAVPTGLHSKMDQLEGQLLAQVLALEKERVALSHSSRRQRQEVEKELDVLQGRVAELEHGSSAYSPPDAFKISIPIRNNYMYARVRKALPELYAFTACMWLRSRSSGTGQGTPFSYSVPGQANEIVLLEAGHEPMELLINDKVAQLPLSLKDNGWHHICIAWTTRDGLWSAYQDGELQGSGENLAAWHPIKPHGILILGQEQDTLGGRFDATQAFVGDIAQFNLWDHALTPAQVLGIANCTAPLLGNVLPWEDKLVEAFGGATKAAFDVCKGRAKA

SEQ ID NO: 9478 - protein, 500 aa, Homo Sapiens; identical to SEQ ID NO: 9477

SEQ ID NO: 9479 - protein, 196 aa, Homo Sapiens
MEIISSKLFILLTLATSSLLTSNIFCADELVMSNLHSKENYDKYSEPRGYPKGERSLNFEELKDWGPKNVIKMSTPAVNKMPHSFANLPLRFGRNVQEERSAGATANLPLRSGRNMEVSLVRRVPNLPQRFGRTTTAKSVCRMLSDLCQGSMHSPCANDLFYSMTCQHQEIQNPDQKQSRRLLFKKIDDAELKQEK

SEQ ID NO: 9480 - protein, 165 aa, Homo Sapiens
LAWRPGERGAPASRPRLALLLLLLLLPLPSGAWYKHVASPRYHTVGRAAGLLMGLRRSPYLWRRALRAAAGPLARDTLSPEPAAREAPLLLPSWVQELWETRRRSSQAGIPVRAPRSPRAPEPALEPESLDFSGAGQRLRRDVSRPAVDPAANRLGLPCLAPGPF

SEQ ID NO: 9481 - protein, 113 aa, Homo Sapiens
MGLRRSPYLWRRALRAAAGPLARDTLSPEPAAREAPLLLPSWVQELWETRRRSSQAGIPVRAPRSPRAPEPALEPESLDFSGAGQRLRRDVSRPAVDPAANRLGLPCLAPGPF

SEQ ID NO: 9482 - protein, 128 aa, Homo Sapiens
MSRPLEGPRGHAASPGLLWATRVTSTLAGLHELALSDETRHNWFASQMNKGSCLSPARLLSCCPRGFRSCGRRDAGAPRQGSPSVRPGARAPQSLRWNRSPWTSAELARDFGETSPAQRWTPQQTALA

SEQ ID NO: 9483 - protein, 97 aa, Homo Sapiens
MLGNKRLGLSGLTLALSLLVCLGALAEAYPSKPDNPGEDAPAEDMARYYSALRHYINLITRQRYGKRSSPETLISDLLMRESTENVPRTRLEDPAMW

SEQ ID NO: 9484 - protein, 97 aa, Homo Sapiens; identical to SEQ ID NO: 9483

SEQ ID NO: 9485 - protein, 97 aa, Homo Sapiens; identical to SEQ ID NO: 9483

SEQ ID NO: 9486 - protein, 35 aa, Homo Sapiens
MAEFRFLKSGALPILSLLCLQALKFSLGCSRGSSE

SEQ ID NO: 9487 - protein, 63 aa, Homo Sapiens
MAGKKVLIVYAHQEPKSFNGSLKNVAVDELSRQGCTVTVSDLYAMNLEPRATDKDITGTLSNP

SEQ ID NO: 9488 - protein, 139 aa, Homo Sapiens
MAGKKVLIVYAHQEPKSFNGSLKNVAVDELSRQGCTVTVSDLYAMNLEPRATDKDITGTLSNPEVFNYGVETHEAYKQRSLASDITDEQKKVREADLVIFQFPLYWFSVPAILKGWMDRVLCQGFAFDIPGFYDSGLLQ

SEQ ID NO: 9489 - protein, 139 aa, Homo Sapiens; identical to SEQ ID NO: 9488

SEQ ID NO: 9490 - protein, 231 aa, Homo Sapiens
MAGKKVLIVYAHQEPKSFNGSLKNVAVDELSRQGCTVTVSDLYAMNLEPRATDKDITGTLSNPEVFNYGVETHEAYKQRSLASDITDEQKKVREADLVIFQFPLYWFSVPAILKGWMDRVLCQGFAFDIPGFYDSGLLQGKLALLSVTTGGTAEMYTKTGVNGDSRYFLWPLQHGTLHFCGFKVLAPQISFAPEIASEEERKGMVAAWSQRLQTIWKEEPIPCTAHWHFGQ

SEQ ID NO: 9491 - protein, 231 aa, Homo Sapiens; identical to SEQ ID NO: 9490

SEQ ID NO: 9492 - protein, 231 aa, Homo Sapiens; identical to SEQ ID NO: 9490

SEQ ID NO: 9493 - protein, 193 aa, Homo Sapiens
MAGKKVLIVYAHQEPKSFNGSLKNVAVDELSRQGCTVTVSDLYAMNLEPRATDKDITGTLSNPEVFNYGVETHEAYKQRSLASDITDEQKKVREADLVIFQGKLALLSVTTGGTAEMYTKTGVNGDSRYFLWPLQHGTLHFCGFKVLAPQISFAPEIASEEERKGMVAAWSQRLQTIWKEEPIPCTAHWHFGQ

SEQ ID NO: 9494 - protein, 193 aa, Homo Sapiens; identical to SEQ ID NO: 9493

SEQ ID NO: 9495 - protein, 1299 aa, Homo Sapiens
MPKKKRLSAGRVPLILFLCQMISALEVPLDPKLLEDLVQPPTITQQSPKDYIIDPRENIVIQCEAKGKPPPSFSWTRNGTHFDIDKDPLVTMKPGTGTLIINIMSEGKAETYEGVYQCTARNERGAAVSNNIVVRPSRSPLWTKEKLEPITLQSGQSLVLPCRPPIGLPPPIIFWMDNSFQRLPQSERVSQGLNGDLYFSNVLPEDTREDYICYARFNHTQTIQQKQPISVKVISVDELNDTIAANLSDTEFYGAKSSRERPPTFLTPEGNASNKEELRGNVLSLECIAEGLPTPIIYWAKEDGMLPKNRTVYKNFEKTLQIIHVSEADSGNYQCIAKNALGAIHHTISVRVKAAPYWITAPQNLVLSPGEDGTLICRANGNPKPRISWLTNGVPIEIAPDDPSRKIDGDTIIFSNVQERSSAVYQCNASNEYGYLLANAFVNVLAEPPRILTPANTLYQVIANRPALLDCAFFGSPLPTIEWFKGAKGSALHEDIYVLHENGTLEIPVAQKDSTGTYTCVARNKLGMAKNEVHLEIKDPTWIVKQPEYAVVQRGSMVSFECKVKHDHTLSLTVLWLKDNRELPSDERFTVDKDHLVVADVSDDDSGTYTCVANTTLDSVSASAVLSVVAPTPTPAPVYDVPNPPFDLELTDQLDKSVQLSWTPGDDNNSPITRIHHEYEDAMHKPGLWHHQTEVSGTQTTAQLKLSPYVNYSFRVMAVNSIGKSLPSEASEQYLTKASEPDKNPTAVEGLGSEPDNLVITWKPLNGFESNGPGLQYKVSWRQKDGDDEWTSVVVANVSKYIVSGTPTFVPYLIKVQALNDMGFAPEPAVVMGHSGEDLPMVAPGNVRVNVVNSTLAEVHWDPVPLKSIRGHLQGYRIYYWKTQSSSKRNRRHIEKKILTFQGSKTHGMLPGLEPFSHYTLNVRVVNGKGEGPASPDRVFNTPEGVPSAPSSLKIVNPTLDSLTLEWDPPSHPNGILTEYTLKYQPINSTHELGPLVDLKIPANKTRWTLKNLNFSTRYKFYFYAQTSAGSGSQITEEAVTTVDEAGILPPDVGAGKVQAVNPRISNLTAAAAETYANISWEYEGPEHVNFYVEYGVAGSKEEWRKEIVNGSRSFFGLKGLMPGTAYKVRVGAVGDSGFVSSEDVFETGPAMASRQVDIATQGWFIGLMCAVALLILILLIVCFIRRNKGGKYPVKEKEDAHADPEIQPMKEDDGTFGEYSDAEDHKPLKKGSRTPSDRTVKKEDSDDSLVDYGEGVNGQFNEDGSFIGQYSGKKEKEPAEGNESSEAPSPVNAMNSFV

SEQ ID NO: 9496 - protein, 106 aa, Homo Sapiens
MQLKIMPKKKRLSAGRVPLILFLCQMISALEVPLDLVQPPTITQQSPKDYIIDPRENIVIQCEAKGKPPPSFSWTRNGTHFDIDKDPLVTMKPGTGTLIINIMSEG

SEQ ID NO: 9497 - protein, 106 aa, Homo Sapiens; identical to SEQ ID NO: 9496

SEQ ID NO: 9498 - protein, 1183 aa, Homo Sapiens
MQLKIMPKKKRLSAGRVPLILFLCQMISALEVPLDLVQPPTITQQSPKDYIIDPRENIVIQCEAKGKPPPSFSWTRNGTHFDIDKDPLVTMKPGTGTLIINIMSEGKAETYEGVYQCTARNERGAAVSNNIVVRPSRSPLWTKEKLEPITLQSGQSLVLPCRPPIGLPPPIIFWMDNSFQRLPQSERVSQGLNGDLYFSNVLPEDTREDYICYARFNHTQTIQQKQPISVKVISVDELNDTIAANLSDTEFYGAKSSRERPPTFLTPEGNASNKEELRGNVLSLECIAEGLPTPIIYWAKEDGMLPKNRTVYKNFEKTLQIIHVSEADSGNYQCIAKNALGAIHHTISVRVKAAPYWITAPQNLVLSPGEDGTLICRANGNPKPRISWLTNGVPIEIAPDDPSRKIDGDTIIFSNVQERSSAVYQCNASNEYGYLLANAFVNVLAEPPRILTPANTLYQVIANRPALLDCAFFGSPLPTIEWFKGAKGSALHEDIYVLHENGTLEIPVAQKDSTGTYTCVARNKLGMAKNEVHLEIKDPTWIVKQPEYAVVQRGSMVSFECKVKHDHTLSLTVLWLKDNRELPSDERFTVDKDHLVVADVSDDDSGTYTCVANTTLDSVSASAVLSVVDVPNPPFDLELTDQLDKSVQLSWTPGDDNNSPITKFIIEYEDAMHKPGLWHHQTEVSGTQTTAQLKLSPYVNYSFRVMAVNSIGKSLPSEASEQYLTKASEPDKNPTAVEGLGSEPDNLVITWKPLNGFESNGPGLQYKVSWRQKDGDDEWTSVVVANVSKYIVSGTPTFVPYLIKVQALNDMGFAPEPAVVMGHSGEDLPMVAPGNVRVNVVNSTLAEVHWDPVPLKSIRGHLQGYRIYYWKTQSSSKRNRRHIEKKILTFQGSKTHGMLPGLEPFSHYTLNVRVVNGKGEGPASPDRVFNTPEGVPSAPSSLKIVNPTLDSLTLEWDPPSHPNGILTEYTLKYQPINSTHELGPLVDLKIPANKTRWTLKNLNFSTRYKFYFYAQTSAGSGSQITEEAVTTVDEAMASRQVDIATQGWFIGLMCAVALLILILLIVCFIRRNKGGKYPVKEKEDAHADPEIQPMKEDDGTFGEYSDAEDHKPLKKGSRTPSDRTVKKEDSDDSLVDYGEGVNGQFNEDGSFIGQYSGKKEKEPAEGNESSEAPSPVNAMNSFV

SEQ ID NO: 9499 - protein, 431 aa, Homo Sapiens
MQLKIMPKKKRLSAGRVPLILFLCQMISALEVPLDLVQPPTITQQSPKDYIIDPRENIVIQCEAKGKPPPSFSWTRNGTHFDIDKDPLVTMKPGTGTLIINIMSEGKAETYEGVYQCTARNERGAAVSNNIVVRPSRSPLWTKEKLEPITLQSGQSLVLPCRPPIGLPPPIIFWMDNSFQRLPQSERVSQGLNGDLYFSNVLPEDTREDYICYARFNHTQTIQQKQPISVKVISVDELNDTIAANLSDTEFYGAKSSRERPPTFLTPEGNASNKEELRGNVLSLECIAEGLPTPIIYWAKEDGMLPKNRTVYKNFEKTLQIIHVSEADSGNYQCIAKNALGAIHHTISVRVKAAPYWITAPQNLVLSPGEDGTLICRANGNPKPRISWLTNGVPIEIAPDDPSRKIDGDTIIFSNVQERSSAVYQCNASNE

SEQ ID NO: 9500 - protein, 771 aa, Homo Sapiens [sequence omitted]

SEQ ID NO: 9501 - protein, 61 aa, Homo Sapiens
MQLKIMPKKKRLSAGRVPLILFLCQMISALEVPLDPKLLEDLVQPPTITQQSPKDYIIDPR

SEQ ID NO: 9502 - protein, 118 aa, Homo Sapiens
MQLKIMPKKKRLSAGRVPLILFLCQMISALEVPLDPKLLEDLVQPPTITQQSPKDYIIDPRENIVIQCEAKGKPPPSFSWTRNGTHFDIDKDPLVTMKPGTGTLIINIMSEGKAETYE

SEQ ID NO: 9503 - protein, 1192 aa, Homo Sapiens
MQLKIMPKKKRLSAGRVPLILFLCQMISALEVPLDPKLLEDLVQPPTITQQSPKDYIIDPRENIVIQCEAKGKPPPSFSWTRNGTHFDIDKDPLVTMKPGTGTLIINIMSEGKAETYEGVYQCTARNERGAAVSNNIVVRPSRSPLWTKEKLEPITLQSGQSLVLPCRPPIGLPPPIIFWMDNSFQRLPQSERVSQGLNGDLYFSNVLPEDTREDYICYARFNHTQTIQQKQPISVKVISAKSSRERPPTFLTPEGNASNKEELRGNVLSLECIAEGLPTPIIYWAKEDGMLPKNRTVYKNFEKTLQIIHVSEADSGNYQCIAKNALGAIHHTISVRVKAAPYWITAPQNLVLSPGEDGTLICRANGNPKPRISWLTNGVPIEIAPDDPSRKIDGDTIIFSNVQERSSAVYQCNASNEYGYLLANAFVNVLAEPPRILTPANTLYQVIANRPALLDCAFFGSPLPTIEWFKGAKGSALHEDIYVLHENGTLEIPVAQKDSTGTYTCVARNKLGMAKNEVHLEIKDPTWIVKQPEYAVVQRGSMVSFECKVKHDHTLSLTVLWLKDNRELPSDERFTVDKDHLVVADVSDDDSGTYTCVANTTLDSVSASAVLSVVAPTPTPAPVYDVPNPPFDLELTDQLDKSVQLSWTPGDDNNSPITKFIIEYEDAMHKPGLWHHQTEVSGTQTTAQLKLSPYVNYSFRVMAVNSIGKSLPSEASEQYLTKASEPDKNPTAVEGLGSEPDNLVITWKPLNGFESNGPGLQYKVSWRQKDGDDEWTSVVVANVSKYIVSGTPTFVPYLIKVQALNDMGFAPEPAVVMGHSGEDLPMVAPGNVRVNVVNSTLAEVHWDPVPLKSIRGHLQGYRIYYWKTQSSSKRNRRHIEKKILTFQGSKTHGMLPGLEPFSHYTLNVRVVNGKGEGPASPDRVFNTPEGVPSAPSSLKIVNPTLDSLTLEWDPPSHPNGILTEYTLKYQPINSTHELGPLVDLKIPANKTRWTLKNLNFSTRYKFYFYAQTSAGSGSQITEEAVTTVDEAGILPPDVGAGKAMASRQVDIATQGWFIGLMCAVALLILILLIVCFIRRNKGGKYPVKEKEDAHADPEIQPMKEDDGTFGEYSDAEDHKPLKKGSRTPSDRTVKKEDSDDSLVDYGEGVNGQFNEDGSFIGQYSGKKEKEPAEGNESSEAPSPVNAMNSFV

SEQ ID NO: 9504 - protein, 1304 aa, Homo Sapiens
MQLKIMPKKKRLSAGRVPLILFLCQMISALEVPLDPKLLEDLVQPPTITQQSPKDYIIDPRENIVIQCEAKGKPPPSFSWTRNGTHFDIDKDPLVTMKPGTGTLIINIMSEGKAETYEGVYQCTARNERGAAVSNNIVVRPSRSPLWTKEKLEPITLQSGQSLVLPCRPPIGLPPPIIFWMDNSFQRLPQSERVSQGLNGDLYFSNVLPEDTREDYICYARFNHTQTIQQKQPISVKVISVDELNDTIAANLSDTEFYGAKSSRERPPTFLTPEGNASNKEELRGNVLSLECIAEGLPTPIIYWAKEDGMLPKNRTVYKNFEKTLQIIHVSEADSGNYQCIAKNALGAIHHTISVRVKAAPYWITAPQNLVLSPGEDGTLICRANGNPKPRISWLTNGVPIEIAPDDPSRKIDGDTIIFSNVQERSSAVYQCNASNEYGYLLANAFVNVLAEPPRILTPANTLYQVIANRPALLDCAFFGSPLPTIEWFKGAKGSALHEDIYVLHENGTLEIPVAQKDSTGTYTCVARNKLGMAKNEVHLEIKDPTWIVKQPEYAVVQRGSMVSFECKVKHDHTLSLTVLWLKDNRELPSDERFTVDKDHLVVADVSDDDSGTYTCVANTTLDSVSASAVLSVVAPTPTPAPVYDVPNPPFDLELTDQLDKSVQLSWTPGDDNNSPITKFIIEYEDAMHKPGLWHHQTEVSGTQTTAQLKLSPYVNYSFRVMAVNSIGKSLPSEASEQYLTKASEPDKNPTAVEGLGSEPDNLVITWKPLNGFESNGPGLQYKVSWRQKDGDDEWTSVVVANVSKYIVSGTPTFVPYLIKVQALNDMGFAPEPAVVMGHSGEDLPMVAPGNVRVNVVNSTLAEVHWDPVPLKSIRGHLQGYRIYYWKTQSSSKRNRRHIEKKILTFQGSKTHGMLPGLEPFSHYTLNVRVVNGKGEGPASPDRVFNTPEGVPSAPSSLKIVNPTLDSLTLEWDPPSHPNGILTEYTLKYQPINSTHELGPLVDLKIPANKTRWTLKNLNFSTRYKFYFYAQTSAGSGSQITEEAVTTVDEAGILPPDVGAGKVQAVNPRISNLTAAAAETYANISWEYEGPEHVNFYVEYGVAGSKEEWRKEIVNGSRSFFGLKGLMPGTAYKVRVGAVGDSGFVSSEDVFETGPAMASRQVDIATQGWFIGLMCAVALLILILLIVCFIRRNKGGKYPVKEKEDAHADPEIQPMKEDDGTFGEYSDAEDHKPLKKGSRTPSDRTVKKEDSDDSLVDYGEGVNGQFNEDGSFIGQYSGKKEKEPAEGNESSEAPSPVNAMNSFV

SEQ ID NO: 9505 - protein, 1211 aa, Homo Sapiens
MQLKIMPKKKRLSAGRVPLILFLCQMISALEVPLDPKLLEDLVQPPTITQQSPKDYIIDPRENIVIQCEAKGKPPPSFSWTRNGTHFDIDKDPLVTMKPGTGTLIINIMSEGKAETYEGVYQCTARNERGAAVSNNIVVRPSRSPLWTKEKLEPITLQSGQSLVLPCRPPIGLPPPIIFWMDNSFQRLPQSERVSQGLNGDLYFSNVLPEDTREDYICYARFNHTQTIQQKQPISVKVISVDELNDTIAANLSDTEFYGAKSSRERPPTFLTPEGNASNKEELRGNVLSLECIAEGLPTPIIYWAKEDGMLPKNRTVYKNFEKTLQIIHVSEADSGNYQCIAKNALGAIHHTISVRVKAAPYWITAPQNLVLSPGEDGTLICRANGNPKPRISWLTNGVPIEIAPDDPSRKIDGDTIIFSNVQERSSAVYQCNASNEYGYLLANAFVNVLAEPPRILTPANTLYQVIANRPALLDCAFFGSPLPTIEWFKGAKGSALHEDIYVLHENGTLEIPVAQKDSTGTYTCVARNKLGMAKNEVHLEIKDPTWIVKQPEYAVVQRGSMVSFECKVKHDHTLSLTVLWLKDNRELPSDERFTVDKDHLVVADVSDDDSGTYTCVANTTLDSVSASAVLSVVAPTPTPAPVYDVPNPPFDLELTDQLDKSVQLSWTPGDDNNSPITKFIIEYEDAMHKPGLWHHQTEVSGTQTTAQLKLSPYVNYSFRVMAVNSIGKSLPSEASEQYLTKASEPDKNPTAVEGLGSEPDNLVITWKPLNGFESNGPGLQYKVSWRQKDGDDEWTSVVVANVSKYIVSGTPTFVPYLIKVQALNDMGFAPEPAVVMGHSGEDLPMVAPGNVRVNVVNSTLAEVHWDPVPLKSIRGHLQGYRIYYWKTQSSSKRNRRHIEKKILTFQGSKTHGMLPGLEPFSHYTLNVRVVNGKGEGPASPDRVFNTPEGVPSAPSSLKIVNPTLDSLTLEWDPPSHPNGILTEYTLKYQPINSTHELGPLVDLKIPANKTRWTLKNLNFSTRYKFYFYAQTSAGSGSQITEEAVTTVDEAGILPPDVGAGKAMASRQVDIATQGWFIGLMCAVALLILILLIVCFIRRNKGGKYPVKEKEDAHADPEIQPMKEDDGTFGEYSDAEDHKPLKKGSRTPSDRTVKKEDSDDSLVDYGEGVNGQFNEDGSFIGQYSGKKEKEPAEGNESSEAPSPVNAMNSFV

SEQ ID NO: 9506 - protein, 1304 aa, Homo Sapiens; identical to SEQ ID NO: 9504

SEQ ID NO: 9507 - protein, 190 aa, Homo Sapiens
  misc_feature (1)..(1): Xaa can be any naturally occurring amino acid
XGILPPDVGAGKVQAVNPRISNLTAAAAETYANISWEYEGPEHVNFYVEYGVAGTMASRQVDIATQGWFIGLMCAVALLILILLIVCFIRRNKGGKYPVKEKEDAHADPEIQPMKEDDGTFGEYSDAEDHKPLKKGSRTPSDRTVKKEDSDDSLVDYGEGVNGQFNEDGSFIGQYSGKKEKEPAEGNESS

SEQ ID NO: 9508 - protein, 296 aa, Homo Sapiens
MEIYSPDMSEVAAERSSSPSTQLSADPSLDGLPAAEDMPEPQTEDGRTPGLVGLAVPCCACLEAERLRGCLNSEKICIVPILACLVSLCLCIAGLKWVFVDKIFEYDSPTHLDPGGLGQDPIISLDATAASAVWVSSEAYTSPVSRAQSESEVQVTVQGDKAVVSFEPSAAPTPKNRIFAFSFLPSTAPSFPSPTRNPEVRTPKSATQPQTTETNLQTAPKLSTSTSTTGTSHLVKCAEKEKTFCVNGGECFMVKDLSNPSRYLCKCPNEFTGDRCQNYVMASFYSTSTPFLSLPE

SEQ ID NO: 9509 - protein, 590 aa, Homo Sapiens
MGKGRAGRVGTTALPPRLKEMKSQESAAGSKLVLRCETSSEYSSLRFKWFKNGNELNRKNKPQNIKIQKKPGKSELRINKASLADSGEYMCKVISKLGNDSASANITIVESNATSTSTTGTSHLVKCAEKEKTFCVNGGECFMVKDLSNPSRYLCKCPNEFTGDRCQNYVMASFYKHLGIEFMEAEELYQKRVLTITGICIALLVVGIMCVVAYCKTKKQRKKLHDRLRQSLRSERNNMMNIANGPHHPNPPPENVQLVNQYVSKNVISSEHIVEREAETSFSTSHYTSTAHHSTTVTQTPSHSWSNGHTESILSESHSVIVMSSVENSRHSSPTGGPRGRLNGTGGPRECNSFLRHARETPDSYRDSPHSERYVSAMTTPARMSPVDFHTPSSPKSPPSEMSPPVSSMTVSMPSMAVSPFMEEERPLLLVTPPRLREKKFDHHPQQFSSFHHNPAHDSNSLPASPLRIVEDEEYETTQEYEPAQEPVKKLANSRRAKRTKPNGHIANRLEVDSNTSSQSSNSESETEDERVGEDTPFLGIQNPLAASLEATPAFRLADSRTNPAGRFSTQEEIQARLSSVIANQDPIAV

SEQ ID NO: 9510 - protein, 481 aa, Homo Sapiens
MGKGRAGRVGTTALPPRLKEMKSQESAAGSKLVLRCETSSEYSSLRFKWFKNGNELNRKNKPQNIKIQKKPGKSELRINKASLADSGEYMCKVISKLGNDSASANITIVESNEIITGMPASTEGAYVSSATSTSTTGTSHLVKCAEKEKTFCVNGGECFMVKDLSNPSRYLCKCPNEFTGDRCQNYVMASFYKHLGIEFMEAEELYQKRVLTITGICIALLVVGIMCVVAYCKTKKQRKKLHDRLRQSLRSERNNMMNIANGPHHPNPPPENVQLVNQYVSKNVISSEHIVEREAETSFSTSHYTSTAHHSTTVTQTPSHSWSNGHTESILSESHSVIVMSSVENSRHSSPTGGPRGRLNGTGGPRECNSFLRHARETPDSYRDSPHSERYVSAMTTPARMSPVDFHTPSSPKSPPSEMSPPVSSMTVSMPSMAVSPFMEEERPLLLVTPPRLREKKFDHHPQQFSSFHHNPAHDSNSLPA

SEQ ID NO: 9511 - protein, 193 aa, Homo Sapiens
MKKRNEMIFLATLKNKALPPRLKEMKSQESAAGSKLVLRCETSSEYSSLRFKWFKNGNELNRKNKPQNIKIQKKPGKSELRINKASLADSGEYMCKVISKLGNDSASANITIVESNEIITGMPASTEGAYVSSESPIRISVSTEGANTSSSTSTSTTGTSHLVKCAEKEKTFCVNGGECFMVKDLSNPSRYLC

SEQ ID NO: 9512 - protein, 135 aa, Homo Sapiens
MQIPKHISIEDITATSTSTTGTSHLVKCAEKEKTFCVNGGECFMVKDLSNPSRYLCKCPNEFTGDRCQNYVMASFYKAEELYQKRVLTITGICIALLVVGIMCVVAYCKTKKQRKKLHDRLRQSLRSERNNMMNI

SEQ ID NO: 9513 - protein, 101 aa, Homo Sapiens
MQIPKHISIEDITATSTSTTGTSHLVKCAEKEKTFCVNGGECFMVKDLSNPSRYLCKCPNEFTGDRCQNYVMASFYKHLGIEFMEAEELYQKRVLTITGIC

SEQ ID NO: 9514 - protein, 129 aa, Homo Sapiens
MQIPKHISIEDITATSTSTTGTSHLVKCAEKEKTFCVNGGECFMVKDLSNPSRYLCKCQPGFTGARCTENVPMKVQNQEKAEELYQKRVLTITGICIALLVVGIMCVVAYCKTKKQRKKLHDRLRQSLR

SEQ ID NO: 9515 - protein, 308 aa, Homo Sapiens
MQIPKHISIEDITATSTSTTGTSHLVKCAEKEKTFCVNGGECFMVKDLSNPSRYLCKCQPGFTGARCTENVPMKVQNQEKAEELYQKRVLTITGICIALLVVGIMCVVAYCKTKKQRKKLHDRLRQSLRSERNNMMNIANGPHHPNPPPENVQLVNQYVSKNVISSEHIVEREAETSFSTSHYTSTAHHSTTVTQTPSHSWSNGHTESILSESHSVIVMSSVENSRHSSPTGGPRGRLNGTGGPRECNSFLRHARETPDSYRDSPHSERHNLIAELRRNKAHRSKCMQIQLSATHLRSSSIPHLGFIL

SEQ ID NO: 9516 - protein, 254 aa, Homo Sapiens [sequence omitted]

SEQ ID NO: 9517 - protein, 422 aa, Homo Sapiens
MRWRRAPRRSGRPGPRAQRPGSAARSSPPLPLLPLLLLLGTAALAPGAAAGNEAAPAGASVCYSSPPSVGSVQELAQRAAVVIEGKVHPQRRQQGALDRKAAAAAGEAGAWGGDREPPAAGPRALGPPAEEPLLAANGTVPSWPTAPVPSAGEPGEEAPYLVKVHQVWAVKAGGLKKDSLLTVRLGTWGHPAFPSCGRLKEDSRYIFFMEPDANSTSRAPAAFRASFPPLETGRNLKKEVSRVLCKRCALPPRLKEMKSQESAAGSKLVLRCETSSEYSSLRFKWFKNGNELNRKNKPQNIKIQKKPGKSELRINKASLADSGEYMCKVISKLGNDSASANITIVESNATSTSTTGTSHLVKCAEKEKTFCVNGGECFMVKDLSNPSRYLCKCPNEFTGDRCQNYVMASFYSTSTPFLSLPE

SEQ ID NO: 9518 - protein, 637 aa, Homo Sapiens
MSERKEGRGKGKGKKKERGSGKKPESAAGSQSPALPPRLKEMKSQESAAGSKLVLRCETSSEYSSLRFKWFKNGNELNRKNKPQNIKIQKKPGKSELRINKASLADSGEYMCKVISKLGNDSASANITIVESNEIITGMPASTEGAYVSSESPIRISVSTEGANTSSSTSTSTTGTSHLVKCAEKEKTFCVNGGECFMVKDLSNPSRYLCKCPNEFTGDRCQNYVMASFYKAEELYQKRVLTITGICIALLVVGIMCVVAYCKTKKQRKKLHDRLRQSLRSERNNMMNIANGPHHPNPPPENVQLVNQYVSKNVISSEHIVEREAETSFSTSHYTSTAHHSTTVTQTPSHSWSNGHTESILSESHSVIVMSSVENSRHSSPTGGPRGRLNGTGGPRECNSFLRHARETPDSYRDSPHSERYVSAMTTPARMSPVDFHTPSSPKSPPSEMSPPVSSMTVSMPSMAVSPFMEEERPLLLVTPPRLREKKFDHHPQQFSSFHHNPAHDSNSLPASPLRIVEDEEYETTQEYEPAQEPVKKLANSRRAKRTKPNGHIANRLEVDSNTSSQSSNSESETEDERVGEDTPFLGIQNPLAASLEATPAFRLADSRTNPAGRFSTQEEIQARLSSVIANQDPIAV

SEQ ID NO: 9519 - protein, 420 aa, Homo Sapiens
MSERKEGRGKGKGKKKERGSGKKPESAAGSQSPALPPRLKEMKSQESAAGSKLVLRCETSSEYSSLRFKWFKNGNELNRKNKPQNIKIQKKPGKSELRINKASLADSGEYMCKVISKLGNDSASANITIVESNEIITGMPASTEGAYVSSESPIRISVSTEGANTSSSTSTSTTGTSHLVKCAEKEKTFCVNGGECFMVKDLSNPSRYLCKCPNEFTGDRCQNYVMASFYKAEELYQKRVLTITGICIALLVVGIMCVVAYCKTKKQRKKLHDRLRQSLRSERNNMMNIANGPHHPNPPPENVQLVNQYVSKNVISSEHIVEREAETSFSTSHYTSTAHHSTTVTQTPSHSWSNGHTESILSESHSVIVMSSVENSRHSSPTGGPRGRLNGTGGPRECNSFLRHARETPDSYRDSPHSER

SEQ ID NO: 9520 - protein, 645 aa, Homo Sapiens
MSERKEGRGKGKGKKKERGSGKKPESAAGSQSPALPPRLKEMKSQESAAGSKLVLRCETSSEYSSLRFKWFKNGNELNRKNKPQNIKIQKKPGKSELRINKASLADSGEYMCKVISKLGNDSASANITIVESNEIITGMPASTEGAYVSSESPIRISVSTEGANTSSSTSTSTTGTSHLVKCAEKEKTFCVNGGECFMVKDLSNPSRYLCKCPNEFTGDRCQNYVMASFYKHLGIEFMEAEELYQKRVLTITGICIALLVVGIMCVVAYCKTKKQRKKLHDRLRQSLRSERNNMMNIANGPHHPNPPPENVQLVNQYVSKNVISSEHIVEREAETSFSTSHYTSTAHHSTTVTQTPSHSWSNGHTESILSESHSVIVMSSVENSRHSSPTGGPRGRLNGTGGPRECNSFLRHARETPDSYRDSPHSERYVSAMTTPARMSPVDFHTPSSPKSPPSEMSPPVSSMTVSMPSMAVSPFMEEERPLLLVTPPRLREKKFDHHPQQFSSFHHNPAHDSNSLPASPLRIVEDEEYETTQEYEPAQEPVKKLANSRRAKRTKPNGHIANRLEVDSNTSSQSSNSESETEDERVGEDTPFLGIQNPLAASLEATPAFRLADSRTNPAGRFSTQEEIQARLSSVIANQDPIAV

SEQ ID NO: 9521 - protein, 640 aa, Homo Sapiens
MSERKEGRGKGKGKKKERGSGKKPESAAGSQSPALPPRLKEMKSQESAAGSKLVLRCETSSEYSSLRFKWFKNGNELNRKNKPQNIKIQKKPGKSELRINKASLADSGEYMCKVISKLGNDSASANITIVESNEIITGMPASTEGAYVSSESPIRISVSTEGANTSSSTSTSTTGTSHLVKCAEKEKTFCVNGGECFMVKDLSNPSRYLCKCQPGFTGARCTENVPMKVQNQEKAEELYQKRVLTITGICIALLVVGIMCVVAYCKTKKQRKKLHDRLRQSLRSERNNMMNIANGPHHPNPPPENVQLVNQYVSKNVISSEHIVEREAETSFSTSHYTSTAHHSTTVTQTPSHSWSNGHTESILSESHSVIVMSSVENSRHSSPTGGPRGRLNGTGGPRECNSFLRHARETPDSYRDSPHSERYVSAMTTPARMSPVDFHTPSSPKSPPSEMSPPVSSMTVSMPSMAVSPFMEEERPLLLVTPPRLREKKFDHHPQQFSSFHHNPAHDSNSLPASPLRIVEDEEYETTQEYEPAQEPVKKLANSRRAKRTKPNGHIANRLEVDSNTSSQSSNSESETEDERVGEDTPFLGIQNPLAASLEATPAFRLADSRTNPAGRFSTQEEIQARLSSVIANQDPIAV

SEQ ID NO: 9522 - protein, 462 aa, Homo Sapiens
MSERKEGRGKGKGKKKERGSGKKPESAAGSQSPALPPRLKEMKSQESAAGSKLVLRCETSSEYSSLRFKWFKNGNELNRKNKPQNIKIQKKPGKSELRINKASLADSGEYMCKVISKLGNDSASANITIVESNEIITGMPASTEGAYVSSESPIRISVSTEGANTSSSTSTSTTGTSHLVKCAEKEKTFCVNGGECFMVKDLSNPSRYLCKCQPGFTGARCTENVPMKVQNQEKAEELYQKRVLTITGICIALLVVGIMCVVAYCKTKKQRKKLHDRLRQSLRSERNNMMNIANGPHHPNPPPENVQLVNQYVSKNVISSEHIVEREAETSFSTSHYTSTAHHSTTVTQTPSHSWSNGHTESILSESHSVIVMSSVENSRHSSPTGGPRGRLNGTGGPRECNSFLRHARETPDSYRDSPHSERHNLIAELRRNKAHRSKCMQIQLSATHLRSSSIPHLGFIL

SEQ ID NO: 9523 - protein, 196 aa, Homo Sapiens
PQTEDGRTPGLVGLAVPCCACLEAERLRGCLNSEKICIVPILACLVSLCLCIAGLKWVFVDKIFEYDSPTHLDPGGLGQDPIISLDATAASAVWVSSEAYTSPVSRAQSESEVQVTVQGDKAVVSFEPSAAPTPKNRIFAFSFLPSTAPSFPSPTRNPEVRTPKSATQPQTTETNLQTAPKLCAQMSLLVIAAKTT

SEQ ID NO: 9524 - protein, 713 aa, Homo Sapiens
VPSAGEPGEEAPYLVKVHQVWAVKAGGLKKDSLLTVRLGTWGHPAFPSCGRLKEDSRYIFFMEPDANSTSRAPAAFRASFPPLETGRNLKKEVSRVLCKRCALPPRLKEMKSQESAAGSKLVLRCETSSEYSSLRFKWFKNGNELNRKNKPQNIKIQKKPGKSELRINKASLADSGEYMCKVISKLGNDSASANITIVESNEIITGMPASTEGAYVSSESPIRISVSTEGANTSSSTSTSTTGTSHLVKCAEKEKTFCVNGGECFMVKDLSNPSRYLCKCPNEFTGDRCQNYVMASFYKHLGIEFMEAEELYQKRVLTITGICIALLVVGIMCVVAYCKTKKQRKKLHDRLRQSLRSERNNMMNIANGPHHPNPPPENVQLVNQYVSKNVISSEHIVEREAETSFSTSHYTSTAHHSTTVTQTPSHSWSNGHTESILSESHSVIVMSSVENSRHSSPTGGPRGRLNGTGGPRECNSFLRHARETPDSYRDSPHSERYVSAMTTPARMSPVDFHTPSSPKSPPSEMSPPVSSMTVSMPSMAVSPFMEEERPLLLVTPPRLREKKFDHHPQQFSSFHHNPAHDSNSLPASPLRIVEDEEYETTQEYEPAQEPVKKLANSRRAKRTKPNGHIANRLEVDSNTSSQSSNSESETEDERVGEDTPFLGIQNPLAASLEATPAFRLADSRTNPAGRFSTQEEIQARLSSVIANQDPIAV

SEQ ID NO: 9525 - protein, 126 aa, Homo Sapiens
  misc_feature (1)..(1): Xaa can be any naturally occurring amino acid
XASANITIVESNEIITGMPASTEGAYVSSESPIRISVSTEGANTSSSTSTSTTGTSHLVKCAEKEKTFCVNGGECFMVKDLSNPSRYLCKCQPGFTGARCTENVPMKVQNQESAQMSLLVIAAKTT

SEQ ID NO: 9526 - protein, 165 aa, Homo Sapiens
MMRCCRRRCCCRQPPHALRPLLLLPLVLLPPLAAAAAGPNRCDTIYQGFAECLIRLGDSMGRGGELETICRSWNDFHACASQVLSGCPEEAAAVWESLQQEARQAPRPNNLHTLCGAPVHVRERGTGSETNQETLRATAPALPMAPAPPLLAAALALAYLLRPLA

SEQ ID NO: 9527 - protein, 87 aa, Homo Sapiens
MTSMPVPLRSCQAVRRRQLQCGNHYSKKLARPPVRITCTLCAVPRCMFGSAAQAPKPTRRRCGLQRLHSPWPLRPHCWRLLWLWPTS

SEQ ID NO: 9528 - protein, 88 aa, Homo Sapiens
  misc_feature (1)..(1): Xaa can be any naturally occurring amino acid
XRCCRRRCCCRQPPHALRPLLLLPLVLLPPLAAAAAGPNRCDTIYQGFAECLIRLGDSMGRGGELETICSTVDKEYLIVLREPGGWMS

SEQ ID NO: 9529 - protein, 923 aa, Homo Sapiens
MERGLPLLCAVLALVLAPAGAFRNDKCGDTIKIESPGYLTSPGYPHSYHPSEKCEWLIQAPDPYQRIMINFNPHFDLEDRDCKYDYVEVFDGENENGHFRGKFCGKIAPPPVVSSGPFLFIKFVSDYETHGAGFSIRYEIFKRGPECSQNYTTPSGVIKSPGFPEKYPNSLECTYIVFVPKMSEIILEFESFDLEPDSNPPGGMFCRYDRLEIWDGFPDVGPHIGRYCGQKTPGRIRSSSGILSMVFYTDSAIAKEGFSANYSVLQSSVSEDFKCMEALGMESGEIHSDQITASSQYSTNWSAERSRLNYPENGWTPGEDSYREWIQVDLGLLRFVTAVGTQGAISKETKKKYYVKTYKIDVSSNGEDWITIKEGNKPVLFQGNTNPTDVVVAVFPKPLITRFVRIKPATWETGISMRFEVYGCKITDYPCSGMLGMVSGLISDSQITSSNQGDRNWMPENIRLVTSRSGWALPPAPHSYINEWLQIDLGEEKIVRGIIIQGGKHRENKVFMRKFKIGYSNNGSDWKMIMDDSKRKAKSFEGNNNYDTPELRTFPALSTRFIRIYPERATHGGLGLRMELLGCEVEAPTAGPTTPNGNLVDECDDDQANCHSGTGDDFQLTGGTTVLATEKPTVIDSTIQSEFPTYGFNCEFGWGSHKTFCHWEHDNHVQLKWSVLTSKTGPIQDHTGDGNFIYSQADENQKGKVARLVSPVVYSQNSAHCMTFWYHMSGSHVGTLRVKLRYQKPEEYDQLVWMAIGHQGDHWKEGRVLLHKSLKLYQVIFEGEIGKGNLGGIAVDDISINNHISQEDCAKPADLDKKNPEIKIDETGSTPGYEGEGEGDKNISRKPGNVLKTLDPILITIIAMSALGVLLGAVCGVVLYCACWHNGMSERNLSALENYNFELVDGVKLKKDKLNTQSTYSEA

SEQ ID NO: 9530 - protein, 641 aa, Homo Sapiens
MERGLPLLCAVLALVLAPAGAFRNDKCGDTIKIESPGYLTSPGYPHSYHPSEKCEWLIQAPDPYQRIMINFNPHFDLEDRDCKYDYVEVFDGENENGHFRGKFCGKIAPPPVVSSGPFLFIKFVSDYETHGAGFSIRYEIFKRGPECSQNYTTPSGVIKSPGFPEKYPNSLECTYIVFVPKMSEIILEFESFDLEPDSNPPGGMFCRYDRLEIWDGFPDVGPHIGRYCGQKTPGRIRSSSGILSMVFYTDSAIAKEGFSANYSVLQSSVSEDFKCMEALGMESGEIHSDQITASSQYSTNWSAERSRLNYPENGWTPGEDSYREWIQVDLGLLRFVTAVGTQGAISKETKKKYYVKTYKIDVSSNGEDWITIKEGNKPVLFQGNTNPTDVVVAVFPKPLITRFVRIKPATWETGISMRFEVYGCKITDYPCSGMLGMVSGLISDSQITSSNQGDRNWMPENIRLVTSRSGWALPPAPHSYINEWLQIDLGEEKIVRGIIIQGGKHRENKVFMRKFKIGYSNNGSDWKMIMDDSKRKAKSFEGNNNYDTPELRTFPALSTRFIRIYPERATHGGLGLRMELLGCEVEGTINTDQECPCARALAKDAKKKKRWADSTHCRCVRSIHGEMWSSGKGVCSLDANL

SEQ ID NO: 9531 - protein, 704 aa, Homo Sapiens
MERGLPLLCAVLALVLAPAGAFRNDKCGDTIKIESPGYLTSPGYPHSYHPSEKCEWLIQAPDPYQRIMINFNPHFDLEDRDCKYDYVEVFDGENENGHFRGKFCGKIAPPPVVSSGPFLFIKFVSDYETHGAGFSIRYEIFKRGPECSQNYTTPSGVIKSPGFPEKYPNSLECTYIVFVPKMSEIILEFESFDLEPDSNPPGGMFCRYDRLEIWDGFPDVGPHIGRYCGQKTPGRIRSSSGILSMVFYTDSAIAKEGFSANYSVLQSSVSEDFKCMEALGMESGEIHSDQITASSQYSTNWSAERSRLNYPENGWTPGEDSYREWIQVDLGLLRFVTAVGTQGAISKETKKKYYVKTYKIDVSSNGEDWITIKEGNKPVLFQGNTNPTDVVVAVFPKPLITRFVRIKPATWETGISMRFEVYGCKITDYPCSGMLGMVSGLISDSQITSSNQGDRNWMPENIRLVTSRSGWALPPAPHSYINEWLQIDLGEEKIVRGIIIQGGKHRENKVFMRKFKIGYSNNGSDWKMIMDDSKRKAKSFEGNNNYDTPELRTFPALSTRFIRIYPERATHGGLGLRMELLGCEVEAPTAGPTTPNGNLVDECDDDQANCHSGTGDDFQLTGAETIFIPLLYHFSSCLSWDQLTPVCVLVTPHGRELPRNRSCLARTRASSFPHVIWIDELFLIATTICNNNLSHFESQRLGLS

SEQ ID NO: 9532 - protein, 644 aa, Homo Sapiens
MERGLPLLCAVLALVLAPAGAFRNDKCGDTIKIESPGYLTSPGYPHSYHPSEKCEWLIQAPDPYQRIMINFNPHFDLEDRDCKYDYVEVFDGENENGHFRGKFCGKIAPPPVVSSGPFLFIKFVSDYETHGAGFSIRYEIFKRGPECSQNYTTPSGVIKSPGFPEKYPNSLECTYIVFVPKMSEIILEFESFDLEPDSNPPGGMFCRYDRLEIWDGFPDVGPHIGRYCGQKTPGRIRSSSGILSMVFYTDSAIAKEGFSANYSVLQSSVSEDFKCMEALGMESGEIHSDQITASSQYSTNWSAERSRLNYPENGWTPGEDSYREWIQVDLGLLRFVTAVGTQGAISKETKKKYYVKTYKIDVSSNGEDWITIKEGNKPVLFQGNTNPTDVVVAVFPKPLITRFVRIKPATWETGISMRFEVYGCKITDYPCSGMLGMVSGLISDSQITSSNQGDRNWMPENIRLVTSRSGWALPPAPHSYINEWLQIDLGEEKIVRGIIIQGGKHRENKVFMRKFKIGYSNNGSDWKMIMDDSKRKAKSFEGNNNYDTPELRTFPALSTRFIRIYPERATHGGLGLRMELLGCEVEAPTAGPTTPNGNLVDECDDDQANCHSGTGDDFQLTGGTTVLATEKPTVIDSTIQSGIK

SEQ ID NO: 9533 - protein, 923 aa, Homo Sapiens; identical to SEQ ID NO: 9529

SEQ ID NO: 9534 - protein, 609 aa, Homo Sapiens
MERGLPLLCAVLALVLAPAGAFRNDKCGDTIKIESPGYLTSPGYPHSYHPSEKCEWLIQAPDPYQRIMINFNPHFDLEDRDCKYDYVEVFDGENENGHFRGKFCGKIAPPPVVSSGPFLFIKFVSDYETHGAGFSIRYEIFKRGPECSQNYTTPSGVIKSPGFPEKYPNSLECTYIVFVPKMSEIILEFESFDLEPDSNPPGGMFCRYDRLEIWDGFPDVGPHIGRYCGQKTPGRIRSSSGILSMVFYTDSAIAKEGFSANYSVLQSSVSEDFKCMEALGMESGEIHSDQITASSQYSTNWSAERSRLNYPENGWTPGEDSYREWIQVDLGLLRFVTAVGTQGAISKETKKKYYVKTYKIDVSSNGEDWITIKEGNKPVLFQGNTNPTDVVVAVFPKPLITRFVRIKPATWETGISMRFEVYGCKITDYPCSGMLGMVSGLISDSQITSSNQGDRNWMPENIRLVTSRSGWALPPAPHSYINEWLQIDLGEEKIVRGIIIQGGKHRENKVFMRKFKIGYSNNGSDWKMIMDDSKRKAKSFEGNNNYDTPELRTFPALSTRFIRIYPERATHGGLGLRMELLGCEVEGGTTVLATEKPTVIDSTIQSGIK

SEQ ID NO: 9535 - protein, 597 aa, Homo Sapiens
MERGLPLLCAVLALVLAPAGAFRNDKCGDTIKIESPGYLTSPGYPHSYHPSEKCEWLIQAPDPYQRIMINFNPHFDLEDRDCKYDYVEVFDGENENGHFRGKFCGKIAPPPVVSSGPFLFIKFVSDYETHGAGFSIRYEIFKRGPECSQNYTTPSGVIKSPGFPEKYPNSLECTYIVFVPKMSEIILEFESFDLEPDSNPPGGMFCRYDRLEIWDGFPDVGPHIGRYCGQKTPGRIRSSSGILSMVFYTDSAIAKEGFSANYSVLQSSVSEDFKCMEALGMESGEIHSDQITASSQYSTNWSAERSRLNYPENGWTPGEDSYREWIQVDLGLLRFVTAVGTQGAISKETKKKYYVKTYKIDVSSNGEDWITIKEGNKPVLFQGNTNPTDVVVAVFPKPLITRFVRIKPATWETGISMRFEVYGCKITDYPCSGMLGMVSGLISDSQITSSNQGDRNWMPENIRLVTSRSGWALPPAPHSYINEWLQIDLGEEKIVRGIIIQGGKHRENKVFMRKFKIGYSNNGSDWKMIMDDSKRKAKVRAGDWEEVIPYVLDFNQGPLAFSRGRASYFLPAMTLEEVCDGVSKTLDSRKTGIWHEK

SEQ ID NO: 9536 - protein, 906 aa, Homo Sapiens
MERGLPLLCAVLALVLAPAGAFRNDKCGDTIKIESPGYLTSPGYPHSYHPSEKCEWLIQAPDPYQRIMINFNPHFDLEDRDCKYDYVEVFDGENENGHFRGKFCGKIAPPPVVSSGPFLFIKFVSDYETHGAGFSIRYEIFKRGPECSQNYTTPSGVIKSPGFPEKYPNSLECTYIVFVPKMSEIILEFESFDLEPDSNPPGGMFCRYDRLEIWDGFPDVGPHIGRYCGQKTPGRIRSSSGILSMVFYTDSAIAKEGFSANYSVLQSSVSEDFKCMEALGMESGEIHSDQITASSQYSTNWSAERSRLNYPENGWTPGEDSYREWIQVDLGLLRFVTAVGTQGAISKETKKKYYVKTYKIDVSSNGEDWITIKEGNKPVLFQGNTNPTDVVVAVFPKPLITRFVRIKPATWETGISMRFEVYGCKITDYPCSGMLGMVSGLISDSQITSSNQGDRNWMPENIRLVTSRSGWALPPAPHSYINEWLQIDLGEEKIVRGIIIQGGKHRENKVFMRKFKIGYSNNGSDWKMIMDDSKRKAKSFEGNNNYDTPELRTFPALSTRFIRIYPERATHGGLGLRMELLGCEVEAPTAGPTTPNGNLVDECDDDQANCHSGTGDDFQLTGGTTVLATEKPTVIDSTIQSEFPTYGFNCEFGWGSHKTFCHWEHDNHVQLKWSVLTSKTGPIQDHTGDGNFIYSQADENQKGKVARLVSPVVYSQNSAHCMTFWYHMSGSHVGTLRVKLRYQKPEEYDQLVWMAIGHQGDHWKEGRVLLHKSLKLYQVIFEGEIGKGNLGGIAVDDISINNHISQEDCARSTPGYEGEGEGDKNISRKPGNVLKTLDPILITIIAMSALGVLLGAVCGVVLYCACWHNGMSERNLSALENYNFELVDGVKLKKDKLNTQSTYSEA

SEQ ID NO: 9537 - protein, 735 aa, Homo Sapiens
MSEIILEFESFDLEPDSNPPGGMFCRYDRLEIWDGFPDVGPHIGRYCGQKTPGRIRSSSGILSMVFYTDSAIAKEGFSANYSVLQSSVSEDFKCMEALGMESGEIHSDQITASSQYSTNWSAERSRLNYPENGWTPGEDSYREWIQVDLGLLRFVTAVGTQGAISKETKKKYYVKTYKIDVSSNGEDWITIKEGNKPVLFQGNTNPTDVVVAVFPKPLITRFVRIKPATWETGISMRFEVYGCKITDYPCSGMLGMVSGLISDSQITSSNQGDRNWMPENIRLVTSRSGWALPPAPHSYINEWLQIDLGEEKIVRGIIIQGGKHRENKVFMRKFKIGYSNNGSDWKMIMDDSKRKAKSFEGNNNYDTPELRTFPALSTRFIRIYPERATHGGLGLRMELLGCEVEAPTAGPTTPNGNLVDECDDDQANCHSGTGGTTVLATEKPTVIDSTIQSEFPTYGFNCEFGWGSHKTFCHWEHDNHVQLKWSVLTSKTGPIQDHTGDGNFIYSQADENQKGKVARLVSPVVYSQNSAHCMTFWYHMSGSHVGTLRVKLRYQKPEEYDQLVWMAIGHQGDHWKEGRVLLHKSLKLYQVIFEGEIGKGNLGGIAVDDISINNHISQEDCAKPADLDKKNPEIKIDETGSTPGYEGEGEGDKNISRKPGNVLKTLDPILITIIAMSALGVLLGAVCGVVLYCACWHNGMSERNLSALENYNFELVDGVKLKKDKLNTQSTYSEA

SEQ ID NO: 9538 - protein, 105 aa, Homo Sapiens
NHISQEDCARSTPGYEGEGEGDKNISRKPGNVLKTLDPILITIIAMSALGVLLGAVCGVVLYCACWHNGMSERNLSALENYNFELVDGVKLKKDKLNTQSTYSEA

SEQ ID NO: 9539 - protein, 60 aa, Homo Sapiens
  misc_feature (1)..(1): Xaa can be any naturally occurring amino acid
XINEWLQIDLGEEKIVRGIIIQGGKHRENKVFMRKFKIGYSNNGSDWKMIMDDSKRKALI

SEQ ID NO: 9540 - protein, 170 aa, Homo Sapiens
  misc_feature (1)..(1): Xaa can be any naturally occurring amino acid
XPGGMFCRYDRLEIWDGFPDVGPHIGRYCGQKTPGRIRSSSGILSMVFYTDSAIAKEGFSANYSVLQSSVSEDFKCMEALGMESGEIHSDQITASSQYSTNWSAERSRLNYPENGWTPGEDSYREWIQDAKYRLRVSVVRSKSSSSSTSLEPRPLSSLKLSFFSYKIKIT

SEQ ID NO: 9541 - protein, 77 aa, Homo Sapiens
  misc_feature (1)..(1): Xaa can be any naturally occurring amino acid
XPTAGPTTPNGNLVDECDDDQANCHSGTGDDFQLTGGTTVLATEKPTVIDSTIQSARLEVSTLNLSLHNPPQQKALI

SEQ ID NO: 9542 - protein, 100 aa, Homo Sapiens
  misc_feature (1)..(1): Xaa can be any naturally occurring amino acid
XTHGGLGLRMELLGCEVEAPTAGPTTPNGNLVDECDDDQANCHSGTGDDFQLTGGTTVLATEKPTVIDSTIQSGSRFFKHHHKQQSMRPQNLHHNSILLL

SEQ ID NO: 9543 - protein, 102 aa, Homo Sapiens
MDMFPLTWVFLALYFSRHQVRGQPDPPCGGRLNSKDAGYITSPGYPQDYPSHQNCEWIVYAPEPNQKIVLNFNPHFEIEKHDCKYDFIEIRDGDSESADLLG

SEQ ID NO: 9544 - protein, 906 aa, Homo Sapiens
MDMFPLTWVFLALYFSRHQVRGQPDPPCGGRLNSKDAGYITSPGYPQDYPSHQNCEWIVYAPEPNQKIVLNFNPHFEIEKHDCKYDFIEIRDGDSESADLLGKHCGNIAPPTIISSGSMLYIKFTSDYARQGAGFSLRYEIFKTGSEDCSKNFTSPNGTIESPGFPEKYPHNLDCTFTILAKPKMEIILQFLIFDLEHDPLQVGEGDCKYDWLDIWDGIPHVGPLIGKYCGTKTPSELRSSTGILSLTFHTDMAVAKDGFSARYYLVHQEPLENFQCNVPLGMESGRIANEQISASSTYSDGRWTPQQSRLHGDDNGWTPNLDSNKEYLQVDLRFLTMLTAIATQGAISRETQNGYYVKSYKLEVSTNGEDWMVYRHGKNHKVFQANNDATEVVLNKLHAPLLTRFVRIRPQTWHSGIALRLELFGCRVTDAPCSNMLGMLSGLIADSQISASSTQEYLWSPSAARLVSSRSGWFPRIPQAQPGEEWLQVDLGTPKTVKGVIIQGARGGDSITAVEARAFVRKFKVSYSLNGKDWEYIQDPRTQQPKLFEGNMHYDTPDIRRFDPIPAQYVRVYPERWSPAGIGMRLEVLGCDWTDSKPTVETLGPTVKSEETTTPYPTEEEATECGENCSFEDDKDLQLPSGFNCNFDFLEEPCGWMYDHAKWLRTTWASSSSPNDRTFPDDRNFLRLQSDSQREGQYARLISPPVHLPRSPVCMEFQYQATGGRGVALQVVREASQESKLLWVIREDQGGEWKHGRIILPSYDMEYQIVFEGVIGKGRSGEIAIDDIRISTDVPLENCMEPISAFAGENFKGGTLLPGTEPTVDTVPMQPIPAYWYYVMAAGGAVLVLVSVALALVLHYHRFRYAAKKTDHSITYKTSHYTNGAPLAVEPTLTIKLEQDRGSHC

SEQ ID NO: 9545 - protein, 926 aa, Homo Sapiens
MDMFPLTWVFLALYFSRHQVRGQPDPPCGGRLNSKDAGYITSPGYPQDYPSHQNCEWIVYAPEPNQKIVLNFNPHFEIEKHDCKYDFIEIRDGDSESADLLGKHCGNIAPPTIISSGSMLYIKFTSDYARQGAGFSLRYEIFKTGSEDCSKNFTSPNGTIESPGFPEKYPHNLDCTFTILAKPKMEIILQFLIFDLEHDPLQVGEGDCKYDWLDIWDGIPHVGPLIGKYCGTKTPSELRSSTGILSLTFHTDMAVAKDGFSARYYLVHQEPLENFQCNVPLGMESGRIANEQISASSTYSDGRWTPQQSRLHGDDNGWTPNLDSNKEYLQVDLRFLTMLTAIATQGAISRETQNGYYVKSYKLEVSTNGEDWMVYRHGKNHKVFQANNDATEVVLNKLHAPLLTRFVRIRPQTWHSGIALRLELFGCRVTDAPCSNMLGMLSGLIADSQISASSTQEYLWSPSAARLVSSRSGWFPRIPQAQPGEEWLQVDLGTPKTVKGVIIQGARGGDSITAVEARAFVRKFKVSYSLNGKDWEYIQDPRTQQPKLFEGNMHYDTPDIRRFDPIPAQYVRVYPERWSPAGIGMRLEVLGCDWTDSKPTVETLGPTVKSEETTTPYPTEEEATECGENCSFEDDKDLQLPSGFNCNFDFLEEPCGWMYDHAKWLRTTWASSSSPNDRTFPDDRNFLRLQSDSQREGQYARLISPPVHLPRSPVCMEFQYQATGGRGVALQVVREASQESKLLWVIREDQGGEWKHGRIILPSYDMEYQIVFEGVIGKGRSGEIAIDDIRISTDVPLENCMEPISAFAVDIPEIHEREGYEDEIDDEYEVDWSNSSSATSGSGAPSTDKEKSWLYTLDPILITIIAMSSLGVLLGATCAGLLLYCTCSYSGLSSRSCTTLENYNFELYDGLKHKVKMNHQKCCSEA

SEQ ID NO: 9546 - protein, 931 aa, Homo Sapiens
MDMFPLTWVFLALYFSRHQVRGQPDPPCGGRLNSKDAGYITSPGYPQDYPSHQNCEWIVYAPEPNQKIVLNFNPHFEIEKHDCKYDFIEIRDGDSESADLLGKHCGNIAPPTIISSGSMLYIKFTSDYARQGAGFSLRYEIFKTGSEDCSKNFTSPNGTIESPGFPEKYPHNLDCTFTILAKPKMEIILQFLIFDLEHDPLQVGEGDCKYDWLDIWDGIPHVGPLIGKYCGTKTPSELRSSTGILSLTFHTDMAVAKDGFSARYYLVHQEPLENFQCNVPLGMESGRIANEQISASSTYSDGRWTPQQSRLHGDDNGWTPNLDSNKEYLQVDLRFLTMLTAIATQGAISRETQNGYYVKSYKLEVSTNGEDWMVYRHGKNHKVFQANNDATEVVLNKLHAPLLTRFVRIRPQTWHSGIALRLELFGCRVTDAPCSNMLGMLSGLIADSQISASSTQEYLWSPSAARLVSSRSGWFPRIPQAQPGEEWLQVDLGTPKTVKGVIIQGARGGDSITAVEARAFVRKFKVSYSLNGKDWEYIQDPRTQQPKLFEGNMHYDTPDIRRFDPIPAQYVRVYPERWSPAGIGMRLEVLGCDWTDSKPTVETLGPTVKSEETTTPYPTEEEATECGENCSFEDDKDLQLPSGFNCNFDFLEEPCGWMYDHAKWLRTTWASSSSPNDRTFPDDRNFLRLQSDSQREGQYARLISPPVHLPRSPVCMEFQYQATGGRGVALQVVREASQESKLLWVIREDQGGEWKHGRIILPSYDMEYQIVFEGVIGKGRSGEIAIDDIRISTDVPLENCMEPISAFAGENFKVDIPEIHEREGYEDEIDDEYEVDWSNSSSATSGSGAPSTDKEKSWLYTLDPILITIIAMSSLGVLLGATCAGLLLYCTCSYSGLSSRSCTTLENYNFELYDGLKHKVKMNHQKCCSEA

SEQ ID NO: 9547 - protein, 901 aa, Homo Sapiens
MDMFPLTWVFLALYFSRHQVRGQPDPPCGGRLNSKDAGYITSPGYPQDYPSHQNCEWIVYAPEPNQKIVLNFNPHFEIEKHDCKYDFIEIRDGDSESADLLGKHCGNIAPPTIISSGSMLYIKFTSDYARQGAGFSLRYEIFKTGSEDCSKNFTSPNGTIESPGFPEKYPHNLDCTFTILAKPKMEIILQFLIFDLEHDPLQVGEGDCKYDWLDIWDGIPHVGPLIGKYCGTKTPSELRSSTGILSLTFHTDMAVAKDGFSARYYLVHQEPLENFQCNVPLGMESGRIANEQISASSTYSDGRWTPQQSRLHGDDNGWTPNLDSNKEYLQVDLRFLTMLTAIATQGAISRETQNGYYVKSYKLEVSTNGEDWMVYRHGKNHKVFQANNDATEVVLNKLHAPLLTRFVRIRPQTWHSGIALRLELFGCRVTDAPCSNMLGMLSGLIADSQISASSTQEYLWSPSAARLVSSRSGWFPRIPQAQPGEEWLQVDLGTPKTVKGVIIQGARGGDSITAVEARAFVRKFKVSYSLNGKDWEYIQDPRTQQPKLFEGNMHYDTPDIRRFDPIPAQYVRVYPERWSPAGIGMRLEVLGCDWTDSKPTVETLGPTVKSEETTTPYPTEEEATECGENCSFEDDKDLQLPSGFNCNFDFLEEPCGWMYDHAKWLRTTWASSSSPNDRTFPDDRNFLRLQSDSQREGQYARLISPPVHLPRSPVCMEFQYQATGGRGVALQVVREASQESKLLWVIREDQGGEWKHGRIILPSYDMEYQIVFEGVIGKGRSGEIAIDDIRISTDVPLENCMEPISAFAGGTLLPGTEPTVDTVPMQPIPAYWYYVMAAGGAVLVLVSVALALVLHYHRFRYAAKKTDHSITYKTSHYTNGAPLAVEPTLTIKLEQDRGSHC

SEQ ID NO: 9548 - protein, 555 aa, Homo Sapiens
MDMFPLTWVFLALYFSRHQVRGQPDPPCGGRLNSKDAGYITSPGYPQDYPSHQNCEWIVYAPEPNQKIVLNFNPHFEIEKHDCKYDFIEIRDGDSESADLLGKHCGNIAPPTIISSGSMLYIKFTSDYARQGAGFSLRYEIFKTGSEDCSKNFTSPNGTIESPGFPEKYPHNLDCTFTILAKPKMEIILQFLIFDLEHDPLQVGEGDCKYDWLDIWDGIPHVGPLIGKYCGTKTPSELRSSTGILSLTFHTDMAVAKDGFSARYYLVHQEPLENFQCNVPLGMESGRIANEQISASSTYSDGRWTPQQSRLHGDDNGWTPNLDSNKEYLQVDLRFLTMLTAIATQGAISRETQNGYYVKSYKLEVSTNGEDWMVYRHGKNHKVFQANNDATEVVLNKLHAPLLTRFVRIRPQTWHSGIALRLELFGCRVTDAPCSNMLGMLSGLIADSQISASSTQEYLWSPSAARLVSSRSGWFPRIPQAQPGEEWLQVDLGTPKTVKGVIIQGARGGDSITAVEARAFVRKFKVSYSLNGKDWEYIQDPRTQQPKVGCSWRPL

SEQ ID NO: 9549 - protein, 909 aa, Homo Sapiens
MDMFPLTWVFLALYFSRHQVRGQPDPPCGGRLNSKDAGYITSPGYPQDYPSHQNCEWIVYAPEPNQKIVLNFNPHFEIEKHDCKYDFIEIRDGDSESADLLGKHCGNIAPPTIISSGSMLYIKFTSDYARQGAGFSLRYEIFKTGSEDCSKNFTSPNGTIESPGFPEKYPHNLDCTFTILAKPKMEIILQFLIFDLEHDPLQVGEGDCKYDWLDIWDGIPHVGPLIGKYCGTKTPSELRSSTGILSLTFHTDMAVAKDGFSARYYLVHQEPLENFQCNVPLGMESGRIANEQISASSTYSDGRWTPQQSRLHGDDNGWTPNLDSNKEYLQVDLRFLTMLTAIATQGAISRETQNGYYVKSYKLEVSTNGEDWMVYRHGKNHKVFQANNDATEVVLNKLHAPLLTRFVRIRPQTWHSGIALRLELFGCRVTDAPCSNMLGMLSGLIADSQISASSTQEYLWSPSAARLVSSRSGWFPRIPQAQPGEEWLQVDLGTPKTVKGVIIQGARGGDSITAVEARAFVRKFKVSYSLNGKDWEYIQDPRTQQPKLFEGNMHYDTPDIRRFDPIPAQYVRVYPERWSPAGIGMRLEVLGCDWTDSKPTVETLGPTVKSEETTTPYPTEEEATECGENCSFEDDKDLQLPSGFNCNFDFLEEPCGWMYDHAKWLRTTWASSSSPNDRTFPDDRNFLRLQSDSQREGQYARLISPPVHLPRSPVCMEFQYQATGGRGVALQVVREASQESKLLWVIREDQGGEWKHGRIILPSYDMEYQIVFEGVIGKGRSGEIAIDDIRISTDVPLENCMEPISAFADEYEVDWSNSSSATSGSGAPSTDKEKSWLYTLDPILITIIAMSSLGVLLGATCAGLLLYCTCSYSGLSSRSCTTLENYNFELYDGLKHKVKMNHQKCCSEA

SEQ ID NO: 9550 - protein, 197 aa, Homo Sapiens
MQRWKAAALASVLCSSVLSIWMCREGLLLSHRLGPALVPLHRLPRTLDARIARLAQYRALLQGAPDAMELRELTPWAGRPPGPRRRAGPRRRRARARLGARPCGLRELEVRVSELGLGYASDETVLFRYCAGACEAAARVYDLGLRRLRQRRRLRRERVRAQPCCRPTAYEDEVSFLDAHSRYHTVHELSARECACV

SEQ ID NO: 9551 - protein, 214 aa, Homo Sapiens [sequence omitted]

SEQ ID NO: 9552 - protein, 851 aa, Homo Sapiens
GKEEYIATFKGSEYFCYDLSQNPIQSSSDEITLSFKTLQRNGLMLHTGKSADYVNLALKNGAVSLVINLGSGAFEALVEPVNGKFNDNAWHDVKVTRNLRQHSGIGHAMVNKLHCSVTISVDGILTTTGYTQEDYTMLGSDDFFYVGGSPSTADLPGSPVSNNFMGCLKEVVYKNNDVRLELSRLAKQGDPKMKIHGVVAFKCENVATLDPITFETPESFISLPKWNAKKTGSISFDFRTTEPNGLILFSHGKPRHQKDAKHPQMIKVDFFAIEMLDGHLYLLLDMGSGTIKIKALLKKVNDGEWYHVDFQRDGRSGTISVNTLRTPYTAPGESEILDLDDELYLGGLPENKAGLVFPTEVWTALLNYGYVGCIRDLFIDGQSKDIRQMAEVQSTAGVKPSCSKETAKPCLSNPCKNNGMCRDGWNRYVCDCSGTGYLGRSCEREATVLSYDGSMFMKIQLPVVMHTEAEDVSLRFRSQRAYGILMATTSRDSADTLRLELDAGRVKLTVNLDCIRINCNSSKGPETLFAGYNLNDNEWHTVRVVRRGKSLKLTVDDQQAMTGQMAGDHTRLEFHNIETGIITERRYLSSVPSNFIGHLQSLTFNGMAYIDLCKNGDIDYCELNARFGFRNIIADPVTFKTKSSYVALATLQAYTSMHLFFQFKTTSLDGLILYNSGDGNDFIVVELVKGYLHYVFDLGNGANLIKGSSNKPLNDNQWHNVMISRDTSNLHTVKIDTKITTQITAGARNLDLKSDLYIGGVAKETYKSLPKLVHAKEGFQGCLASVDLNGRLPDLISDALFCNGQIERGCEGPSTTCQEDSCSNQGVCLQQWDGFSCDCSMTSFSGPLCND

SEQ ID NO: 9553 - protein, 836 aa, Homo Sapiens
GKEEYIATFKGSEYFCYDLSQNPIQSSSDEITLSFKTLQRNGLMLHTGKSADYVNLALKNGAVSLVINLGSGAFEALVEPVNGKFNDNAWHDVKVTRNLRQVTISVDGILTTTGYTQEDYTMLGSDDFFYVGGSPSTADLPGSPVSNNFMGCLKEVVYKNNDVRLELSRLAKQGDPKMKIHGVVAFKCENVATLDPITFETPESFISLPKWNAKKTGSISFDFRTTEPNGLILFSHGKPRHQKDAKHPQMIKVDFFAIEMLDGHLYLLLDMGSGTIKIKALLKKVNDGEWYHVDFQRDGRSGTISVNTLRTPYTAPGESEILDLDDELYLGGLPENKAGLVFPTEVWTALLNYGYVGCIRDLFIDGQSKDIRQMAEVQSTAGVKPSCSKETAKPCLSNPCKNNGMCRDGWNRYVCDCSGTGYLGRSCEREATVLSYDGSMFMKIQLPVVMHTEAEDVSLRFRSQRAYGILMATTSRDSADTLRLELDAGRVKLTVNLDCIRINCNSSKGPETLFAGYNLNDNEWHTVRVVRRGKSLKLTVDDQQAMTGQMAGDHTRLEFHNIETGIITERRYLSSVPSNFIGHLQSLTFNGMAYIDLCKNGDIDYCELNARFGFRNIIADPVTFKTKSSYVALATLQAYTSMHLFFQFKTTSLDGLILYNSGDGNDFIVVELVKGYLHYVFDLGNGANLIKGSSNKPLNDNQWHNVMISRDTSNLHTVKIDTKITTQITAGARNLDLKSDLYIGGVAKETYKSLPKLVHAKEGFQGCLASVDLNGRLPDLISDALFCNGQIERGCEGPSTTCQEDSCSNQGVCLQQWDGFSCDCSMTSFSGPLCND

SEQ ID NO: 9554 - protein, 198 aa, Homo Sapiens
MAAENDANIAIVGNVRLVGEVPSSMTTESTATAMQSEMSTSIMETTTTLATSTARRGKPPTKEPISQTTDDILVASAECPSDDEDIDPCEPSSGGLANPTRAGGREPYPGSAEVIRESSSTTGMVVGIVAAAALCILILLYAMYKYRNRDEGSYHVDESRNYISNSAQSNGAVVKEKQPSSAKSSNKNKKNKDKEYYV

SEQ ID NO: 9555 - protein, 139 aa, Homo Sapiens
MDMRWHCENLQTTDDILVASAECPSDDEDIDPCEPSSANPTRAGGREPYPGSAEVIRESSSTTGMVVGIVAAAALCILILLYAMYKYRNRDEGSYHVDESRNYISNSAQSNGAVVKEKQPSSAKSSNKNKKNKDKEYYV

SEQ ID NO: 9556 - protein, 142 aa, Homo Sapiens
MDMRWHCENLQTTDDILVASAECPSDDEDIDPCEPSSGGLANPTRAGGREPYPGSAEVIRESSSTTGMVVGIVAAAALCILILLYAMYKYRNRDEGSYHVDESRNYISNSAQSNGAVVKEKQPSSAKSSNKNKKNKDKEYYV

SEQ ID NO: 9557 - protein, 62 aa, Homo Sapiens
MDMRWHCENLQTTDDILVASAECPSDDEDIDPCEPSSGTKQTMWKTSRDHRILPNARRERKD

SEQ ID NO: 9558 - protein, 143 aa, Homo Sapiens
MDMRWHCENLQVTTDDILVASAECPSDDEDIDPCEPSSGGLANPTRAGGREPYPGSAEVIRESSSTTGMVVGIVAAAALCILILLYAMYKYRNRDEGSYHVDESRNYISNSAQSNGAVVKEKQPSSAKSSNKNKKNKDKEYYV

SEQ ID NO: 9559 - protein, 1477 aa, Homo Sapiens
MGTALLQRGGCFLLCLSLLLLGCWAELGSGLEFPGAEGQWTRFPKWNACCESEMSFQLKTRSARGLVLYFDDEGFCDFLELILTRGGRLQLSFSIFCAEPATLLADTPVNDGAWHSVRIRRQFRNTTLFIDQVEAKWVEVKSKRRDMTVFSGLFVGGLPPELRAAALKLTLASVREREPFKGWIRDVRVNSSQVLPVDSGEVKLDDEPPNSGGGSPCEAGEEGEGGVCLNGGVCSVVDDQAVCDCSRTGFRGKDCSQEDNNVEGLAHLMMGDQGKSKGKEEYIATFKGSEYFCYDLSQNPIQSSSDEITLSFKTLQRNGLMLHTGKSADYVNLALKNGAVSLVINLGSGAFEALVEPVNGKFNDNAWHDVKVTRNLRQHSGIGHAMVTISVDGILTTTGYTQEDYTMLGSDDFFYVGGSPSTADLPGSPVSNNFMGCLKEVVYKNNDVRLELSRLAKQGDPKMKIHGVVAFKCENVATLDPITFETPESFISLPKWNAKKTGSISFDFRTTEPNGLILFSHGKPRHQKDAKHPQMIKVDFFAIEMLDGHLYLLLDMGSGTIKIKALLKKVNDGEWYHVDFQRDGRSGTISVNTLRTPYTAPGESEILDLDDELYLGGLPENKAGLVFPTEVWTALLNYGYVGCIRDLFIDGQSKDIRQMAEVQSTAGVKPSCSKETAKPCLSNPCKNNGMCRDGWNRYVCDCSGTGYLGRSCEREATVLSYDGSMFMKIQLPVVMHTEAEDVSLRFRSQRAYGILMATTSRDSADTLRLELDAGRVKLTVNLDCIRINCNSSKGPETLFAGYNLNDNEWHTVRVVRRGKSLKLTVDDQQAMTGQMAGDHTRLEFHNIETGIITERRYLSSVPSNFIGHLQSLTFNGMAYIDLCKNGDIDYCELNARFGFRNIIADPVTFKTKSSYVALATLQAYTSMHLFFQFKTTSLDGLILYNSGDGNDFIVVELVKGYLHYVFDLGNGANLIKGSSNKPLNDNQWHNVMISRDTSNLHTVKIDTKITTQITAGARNLDLKSDLYIGGVAKETYKSLPKLVHAKEGFQGCLASVDLNGRLPDLISDALFCNGQIERGCEGPSTTCQEDSCSNQGVCLQQWDGFSCDCSMTSFSGPLCNDPGTTYIFSKGGGQITYKWPPNDRPSTRADRLAIGFSTVQKEAVLVRVDSSSGLGDYLELHIHQGKIGVKFNVGTDDIAIEESNAIINDGKYHVVRFTRSGGNATLQVDSWPVIERYPAGRQLTIFNSQATIIIGGKEQGQPFQGQLSGLYYNGLKVLNMAAENDANIAIVGNVRLVGEVPSSMTTESTATAMQSEMSTSIMETTTTLATSTARRGKPPTKEPISQTTDDILVASAECPSDDEDIDPCEPSSGGLANPTRAGGREPYPGSAEVIRESSSTTGMVVGIVAAAALCILILLYAMYKYRNRDEGSYHVDESRNYISNSAQSNGAVVKEKQPSSAKSSNKNKKNKDKEYYV

SEQ ID NO: 9560 - protein, 278 aa, Homo Sapiens
MGTALLQRGGCFLLCLSLLLLGCWAELGSGLEFPGAEGQWTRFPKWNACCESEMSFQLKTRSARGLVLYFDDEGFCDFLELILTRGGRLQLSFSIFCAEPATLLADTPVNDGAWHSVRIRRQFRNTTLFIDQVEAKWVEVKSKRRDMTVFSGLFVGGLPPELRAAALKLTLASVREREPFKGWIRDVRVNSSQVLPVDSGEVKLDDEPPNSGGGSPCEAGEEGEGGVCLNGGVCSVVDDQAVCDCSRTGFRGKDCSQEDNNVEGLAHLMMGDQGKSKD

SEQ ID NO: 9561 - protein, 1547 aa, Homo Sapiens
MGTALLQRGGCFLLCLSLLLLGCWAELGSGLEFPGAEGQWTRFPKWNACCESEMSFQLKTRSARGLVLYFDDEGFCDFLELILTRGGRLQLSFSIFCAEPATLLADTPVNDGAWHSVRIRRQFRNTTLFIDQVEAKWVEVKSKRRDMTVFSGLFVGGLPPELRAAALKLTLASVREREPFKGWIRDVRVNSSQVLPVDSGEVKLDDEPPNSGGGSPCEAGEEGEGGVCLNGGVCSVVDDQAVCDCSRTGFRGKDCSQEIKFGLQCVLPVLLHDNDQGKYCCINTAKPLTEKDNNVEGLAHLMMGDQGKSKGKEEYIATFKGSEYFCYDLSQNPIQSSSDEITLSFKTLQRNGLMLHTGKSADYVNLALKNGAVSLVINLGSGAFEALVEPVNGKFNDNAWHDVKVTRNLRQHSGIGHAMVNKLHCSVTISVDGILTTTGYTQEDYTMLGSDDFFYVGGSPSTADLPGSPVSNNFMGCLKEVVYKNNDVRLELSRLAKQGDPKMKIHGVVAFKCENVATLDPITFETPESFISLPKWNAKKTGSISFDFRTTEPNGLILFSHGKPRHQKDAKHPQMIKVDFFAIEMLDGHLYLLLDMGSGTIKIKALLKKVNDGEWYHVDFQRDGRSGTISVNTLRTPYTAPGESEILDLDDELYLGGLPENKAGLVFPTEVWTALLNYGYVGCIRDLFIDGQSKDIRQMAEVQSTAGVKPSCSKETAKPCLSNPCKNNGMCRDGWNRYVCDCSGTGYLGRSCEREATVLSYDGSMFMKIQLPVVMHTEAEDVSLRFRSQRAYGILMATTSRDSADTLRLELDAGRVKLTVNLDCIRINCNSSKGPETLFAGYNLNDNEWHTVRVVRRGKSLKLTVDDQQAMTGQMAGDHTRLEFHNIETGIITERRYLSSVPSNFIGHLQSLTFNGMAYIDLCKNGDIDYCELNARFGFRNIIADPVTFKTKSSYVALATLQAYTSMHLFFQFKTTSLDGLILYNSGDGNDFIVVELVKGYLHYVFDLGNGANLIKGSSNKPLNDNQWHNVMISRDTSNLHTVKIDTKITTQITAGARNLDLKSDLYIGGVAKETYKSLPKLVHAKEGFQGCLASVDLNGRLPDLISDALFCNGQIERGCEGPSTTCQEDSCSNQGVCLQQWDGFSCDCSMTSFSGPLCNDPGTTYIFSKGGGQITYKWPPNDRPSTRADRLAIGFSTVQKEAVLVRVDSSSGLGDYLELHIHQGKIGVKFNVGTDDIAIEESNAIINDGKYHVVRFTRSGGNATLQVDSWPVIERYPAGNNDNERLAIARQRIPYRLGRVVDEWLLDKGRQLTIFNSQATIIIGGKEQGQPFQGQLSGLYYNGLKVLNMAAENDANIAIVGNVRLVGEVPSSMTTESTATAMQSEMSTSIMETTTTLATSTARRGKPPTKEPISQTTDDILVASAECPSDDEDIDPCEPSSGGLANPTRAGGREPYPGSAEVIRESSSTTGMVVGIVAAAALCILILLYAMYKYRNRDEGSYHVDESRNYISNSAQSNGAVVKEKQPSSAKSSNKNKKNKDKEYYV

SEQ ID NO: 9562 - protein, 1495 aa, Homo Sapiens
MGTALLQRGGCFLLCLSLLLLGCWAELGSGLEFPGAEGQWTRFPKWNACCESEMSFQLKTRSARGLVLYFDDEGFCDFLELILTRGGRLQLSFSIFCAEPATLLADTPVNDGAWHSVRIRRQFRNTTLFIDQVEAKWVEVKSKRRDMTVFSGLFVGGLPPELRAAALKLTLASVREREPFKGWIRDVRVNSSQVLPVDSGEVKLDDEPPNSGGGSPCEAGEEGEGGVCLNGGVCSVVDDQAVCDCSRTGFRGKDCSQEDNNVEGLAHLMMGDQGKEEYIATFKGSEYFCYDLSQNPIQSSSDEITLSFKTLQRNGLMLHTGKSADYVNLALKNGAVSLVINLGSGAFEALVEPVNGKFNDNAWHDVKVTRNLRQVTISVDGILTTTGYTQEDYTMLGSDDFFYVGGSPSTADLPGSPVSNNFMGCLKEVVYKNNDVRLELSRLAKQGDPKMKIHGVVAFKCENVATLDPITFETPESFISLPKWNAKKTGSISFDFRTTEPNGLILFSHGKPRHQKDAKHPQMIKVDFFAIEMLDGHLYLLLDMGSGTIKIKALLKKVNDGEWYHVDFQRDGRSGTISVNTLRTPYTAPGESEILDLDDELYLGGLPENKAGLVFPTEVWTALLNYGYVGCIRDLFIDGQSKDIRQMAEVQSTAGVKPSCSKETAKPCLSNPCKNNGMCRDGWNRYVCDCSGTGYLGRSCEREATVLSYDGSMFMKIQLPVVMHTEAEDVSLRFRSQRAYGILMATTSRDSADTLRLELDAGRVKLTVNLDCIRINCNSSKGPETLFAGYNLNDNEWHTVRVVRRGKSLKLTVDDQQAMTGQMAGDHTRLEFHNIETGIITERRYLSSVPSNFIGHLQSLTFNGMAYIDLCKNGDIDYCELNARFGFRNIIADPVTFKTKSSYVALATLQAYTSMHLFFQFKTTSLDGLILYNSGDGNDFIVVELVKGYLHYVFDLGNGANLIKGSSNKPLNDNQWHNVMISRDTSNLHTVKIDTKITTQITAGARNLDLKSDLYIGGVAKETYKSLPKLVHAKEGFQGCLASVDLNGRLPDLISDALFCNGQIERGCEGPSTTCQEDSCSNQGVCLQQWDGFSCDCSMTSFSGPLCNDPGTTYIFSKGGGQITYKWPPNDRPSTRADRLAIGFSTVQKEAVLVRVDSSSGLGDYLELHIHQGKIGVKFNVGTDDIAIEESNAIINDGKYHVVRFTRSGGNATLQVDSWPVIERYPAGNNDNERLAIARQRIPYRLGRVVDEWLLDKGRQLTIFNSQATIIIGGKEQGQPFQGQLSGLYYNGLKVLNMAAENDANIAIVGNVRLVGEVPSSMTTESTATAMQSEMSTSIMETTTTLATSTARRGKPPTKEPISQTTDDILVASAECPSDDEDIDPCEPSSGGLANPTRAGGREPYPGSAEVIRESSSTTGMVVGIVAAAALCILILLYAMYKYRNRDEGSYHVDESRNYISNSAQSNGAVVKEKQPSSAKSSNKNKKNKDKEYYV

SEQ ID NO: 9563 - protein, 1507 aa, Homo Sapiens
MGTALLQRGGCFLLCLSLLLLGCWAELGSGLEFPGAEGQWTRFPKWNACCESEMSFQLKTRSARGLVLYFDDEGFCDFLELILTRGGRLQLSFSIFCAEPATLLADTPVNDGAWHSVRIRRQFRNTTLFIDQVEAKWVEVKSKRRDMTVFSGLFVGGLPPELRAAALKLTLASVREREPFKGWIRDVRVNSSQVLPVDSGEVKLDDEPPNSGGGSPCEAGEEGEGGVCLNGGVCSVVDDQAVCDCSRTGFRGKDCSQEDNNVEGLAHLMMGDQGKSKGKEEYIATFKGSEYFCYDLSQNPIQSSSDEITLSFKTLQRNGLMLHTGKSADYVNLALKNGAVSLVINLGSGAFEALVEPVNGKFNDNAWHDVKVTRNLRQHSGIGHAMVTISVDGILTTTGYTQEDYTMLGSDDFFYVGGSPSTADLPGSPVSNNFMGCLKEVVYKNNDVRLELSRLAKQGDPKMKIHGVVAFKCENVATLDPITFETPESFISLPKWNAKKTGSISFDFRTTEPNGLILFSHGKPRHQKDAKHPQMIKVDFFAIEMLDGHLYLLLDMGSGTIKIKALLKKVNDGEWYHVDFQRDGRSGTISVNTLRTPYTAPGESEILDLDDELYLGGLPENKAGLVFPTEVWTALLNYGYVGCIRDLFIDGQSKDIRQMAEVQSTAGVKPSCSKETAKPCLSNPCKNNGMCRDGWNRYVCDCSGTGYLGRSCEREATVLSYDGSMFMKIQLPVVMHTEAEDVSLRFRSQRAYGILMATTSRDSADTLRLELDAGRVKLTVNLDCIRINCNSSKGPETLFAGYNLNDNEWHTVRVVRRGKSLKLTVDDQQAMTGQMAGDHTRLEFHNIETGIITERRYLSSVPSNFIGHLQSLTFNGMAYIDLCKNGDIDYCELNARFGFRNIIADPVTFKTKSSYVALATLQAYTSMHLFFQFKTTSLDGLILYNSGDGNDFIVVELVKGYLHYVFDLGNGANLIKGSSNKPLNDNQWHNVMISRDTSNLHTVKIDTKITTQITAGARNLDLKSDLYIGGVAKETYKSLPKLVHAKEGFQGCLASVDLNGRLPDLISDALFCNGQIERGCEGPSTTCQEDSCSNQGVCLQQWDGFSCDCSMTSFSGPLCNDPGTTYIFSKGGGQITYKWPPNDRPSTRADRLAIGFSTVQKEAVLVRVDSSSGLGDYLELHIHQGKIGVKFNVGTDDIAIEESNAIINDGKYHVVRFTRSGGNATLQVDSWPVIERYPAGNNDNERLAIARQRIPYRLGRVVDEWLLDKGRQLTIFNSQATIIIGGKEQGQPFQGQLSGLYYNGLKVLNMAAENDANIAIVGNVRLVGEVPSSMTTESTATAMQSEMSTSIMETTTTLATSTARRGKPPTKEPISQTTDDILVASAECPSDDEDIDPCEPSSGGLANPTRAGGREPYPGSAEVIRESSSTTGMVVGIVAAAALCILILLYAMYKYRNRDEGSYHVDESRNYISNSAQSNGAVVKEKQPSSAKSSNKNKKNKDKEYYV

SEQ ID NO: 9564 - protein, 1496 aa, Homo Sapiens
MGTALLQRGGCFLLCLSLLLLGCWAELGSGLEFPGAEGQWTRFPKWNACCESEMSFQLKTRSARGLVLYFDDEGFCDFLELILTRGGRLQLSFSIFCAEPATLLADTPVNDGAWHSVRIRRQFRNTTLFIDQVEAKWVEVKSKRRDMTVFSGLFVGGLPPELRAAALKLTLASVREREPFKGWIRDVRVNSSQVLPVDSGEVKLDDEPPNSGGGSPCEAGEEGEGGVCLNGGVCSVVDDQAVCDCSRTGFRGKDCSQEDNNVEGLAHLMMGDQGKSKGKEEYIATFKGSEYFCYDLSQNPIQSSSDEITLSFKTLQRNGLMLHTGKSADYVNLALKNGAVSLVINLGSGAFEALVEPVNGKFNDNAWHDVKVTRNLRQVTISVDGILTTTGYTQEDYTMLGSDDFFYVGGSPSTADLPGSPVSNNFMGCLKEVVYKNNDVRLELSRLAKQGDPKMKIHGVVAFKCENVATLDPITFETPESFISLPKWNAKKTGSISFDFRTTEPNGLILFSHGKPRHQKDAKHPQMIKVDFFAIEMLDGHLYLLLDMGSGTIKIKALLKKVNDGEWYHVDFQRDGRSGTISVNTLRTPYTAPGESEILDLDDELYLGGLPENKAGLVFPTEVWTALLNYGYVGCIRDLFIDGQSKDIRQMAEVQSTAGVKPSCSKETAKPCLSNPCKNNGMCRDGWNRYVCDCSGTGYLGRSCEREATVLSYDGSMFMKIQLPVVMHTEAEDVSLRFRSQRAYGILMATTSRDSADTLRLELDAGRVKLTVNLDCIRINCNSSKGPETLFAGYNLNDNEWHTVRVVRRGKSLKLTVDDQQAMTGQMAGDHTRLEFHNIETGIITERRYLSSVPSNFIGHLQSLTFNGMAYIDLCKNGDIDYCELNARFGFRNIIADPVTFKTKSSYVALATLQAYTSMHLFFQFKTTSLDGLILYNSGDGNDFIVVELVKGYLHYVFDLGNGANLIKGSSNKPLNDNQWHNVMISRDTSNLHTVKIDTKITTQITAGARNLDLKSDLYIGGVAKETYKSLPKLVHAKEGFQGCLASVDLNGRLPDLISDALFCNGQIERGCEGPSTTCQEDSCSNQGVCLQQWDGFSCDCSMTSFSGPLCNDPGTTYIFSKGGGQITYKWPPNDRPSTRADRLAIGFSTVQKEAVLVRVDSSSGLGDYLELHIHQGKIGVKFNVGTDDIAIEESNAIINDGKYHVVRFTRSGGNATLQVDSWPVIERYPAGNNDNERLAIARQRIPYRLGRVVDEWLLDKGRQLTIFNSQATIIIGGKEQGQPFQGQLSGLYYNGLKVLNMAAENDANIAIVGNVRLVGEVPSSMTTESTATAMQSEMSTSIMETTTTLATSTARRGKPPTKEPISQTTDDILVASAECPSDDEDIDPCEPSSANPTRAGGREPYPGSAEVIRESSSTTGMVVGIVAAAALCILILLYAMYKYRNRDEGSYHVDESRNYISNSAQSNGAVVKEKQPSSAKSSNKNKKNKDKEYYV

SEQ ID NO: 9565 - protein, 459 aa, Homo Sapiens
MGTALLQRGGCFLLCLSLLLLGCWAELGSGLEFPGAEGQWTRFPKWNACCESEMSFQLKTRSARGLVLYFDDEGFCDFLELILTRGGRLQLSFSIFCAEPATLLADTPVNDGAWHSVRIRRQFRNTTLFIDQVEAKWVEVKSKRRDMTVFSGLFVGGLPPELRAAALKLTLASVREREPFKGWIRDVRVNSSQVLPVDSGEVKLDDEPPNSGGGSPCEAGEEGEGGVCLNGGVCSVVDDQAVCDCSRTGFRGKDCSQGKEEYIATFKGSEYFCYDLSQNPIQSSSDEITLSFKTLQRNGLMLHTGKSADYVNLALKNGAVSLVINLGSGAFEALVEPVNGKFNDNAWHDVKVTRNLRQVTISVDGILTTTGYTQEDYTMLGSDDFFYVGGSPSTADLPGSPVSNNFMGCLKEVNIVAIRIIPNSWSHHFRSSMKAPLLKTRCSRVKRHNFKFNILLLFM

SEQ ID NO: 9566 - protein, 277 aa, Homo Sapiens
MGTALLQRGGCFLLCLSLLLLGCWAELGSGLEFPGAEGQWTRFPKWNACCESEMSFQLKTRSARGLVLYFDDEGFCDFLELILTRGGRLQLSFSIFCAEPATLLADTPVNDGAWHSVRIRRQFRNTTLFIDQVEAKWVEVKSKRRDMTVFSGLFVGGLPPELRAAALKLTLASVREREPFKGWIRDVRVNSSQVLPVDSGEVKLDDEPPNSGGGSPCEAGEEGEGGVCLNGGVCSVVDDQAVCDCSRTGFRGKDCSQDNNVEGLAHLMMGDQGKSKD

SEQ ID NO: 9567 - protein, 293 aa, Homo Sapiens
MGTALLQRGGCFLLCLSLLLLGCWAELGSGLEFPGAEGQWTRFPKWNACCESEMSFQLKTRSARGLVLYFDDEGFCDFLELILTRGGRLQLSFSIFCAEPATLLADTPVNDGAWHSVRIRRQFRNTTLFIDQVEAKWVEVKSKRRDMTVFSGLFVGGLPPELRAAALKLTLASVREREPFKGWIRDVRVNSSQVLPVDSGEVKLDDEPPNSGGGSPCEAGEEGEGGVCLNGGVCSVVDDQAVCDCSRTGFRGKDCSQEDNNVEGLAHLMMGDQGKSKEMNDYLNYKKVKICYT

SEQ ID NO: 9568 - protein, 1499 aa, Homo Sapiens
MGTALLQRGGCFLLCLSLLLLGCWAELGSGLEFPGAEGQWTRFPKWNACCESEMSFQLKTRSARGLVLYFDDEGFCDFLELILTRGGRLQLSFSIFCAEPATLLADTPVNDGAWHSVRIRRQFRNTTLFIDQVEAKWVEVKSKRRDMTVFSGLFVGGLPPELRAAALKLTLASVREREPFKGWIRDVRVNSSQVLPVDSGEVKLDDEPPNSGGGSPCEAGEEGEGGVCLNGGVCSVVDDQAVCDCSRTGFRGKDCSQEDNNVEGLAHLMMGDQGKSKGKEEYIATFKGSEYFCYDLSQNPIQSSSDEITLSFKTLQRNGLMLHTGKSADYVNLALKNGAVSLVINLGSGAFEALVEPVNGKFNDNAWHDVKVTRNLRQVTISVDGILTTTGYTQEDYTMLGSDDFFYVGGSPSTADLPGSPVSNNFMGCLKEVVYKNNDVRLELSRLAKQGDPKMKIHGVVAFKCENVATLDPITFETPESFISLPKWNAKKTGSISFDFRTTEPNGLILFSHGKPRHQKDAKHPQMIKVDFFAIEMLDGHLYLLLDMGSGTIKIKALLKKVNDGEWYHVDFQRDGRSGTISVNTLRTPYTAPGESEILDLDDELYLGGLPENKAGLVFPTEVWTALLNYGYVGCIRDLFIDGQSKDIRQMAEVQSTAGVKPSCSKETAKPCLSNPCKNNGMCRDGWNRYVCDCSGTGYLGRSCEREATVLSYDGSMFMKIQLPVVMHTEAEDVSLRFRSQRAYGILMATTSRDSADTLRLELDAGRVKLTVNLDCIRINCNSSKGPETLFAGYNLNDNEWHTVRVVRRGKSLKLTVDDQQAMTGQMAGDHTRLEFHNIETGIITERRYLSSVPSNFIGHLQSLTFNGMAYIDLCKNGDIDYCELNARFGFRNIIADPVTFKTKSSYVALATLQAYTSMHLFFQFKTTSLDGLILYNSGDGNDFIVVELVKGYLHYVFDLGNGANLIKGSSNKPLNDNQWHNVMISRDTSNLHTVKIDTKITTQITAGARNLDLKSDLYIGGVAKETYKSLPKLVHAKEGFQGCLASVDLNGRLPDLISDALFCNGQIERGCEGPSTTCQEDSCSNQGVCLQQWDGFSCDCSMTSFSGPLCNDPGTTYIFSKGGGQITYKWPPNDRPSTRADRLAIGFSTVQKEAVLVRVDSSSGLGDYLELHIHQGKIGVKFNVGTDDIAIEESNAIINDGKYHVVRFTRSGGNATLQVDSWPVIERYPAGNNDNERLAIARQRIPYRLGRVVDEWLLDKGRQLTIFNSQATIIIGGKEQGQPFQGQLSGLYYNGLKVLNMAAENDANIAIVGNVRLVGEVPSSMTTESTATAMQSEMSTSIMETTTTLATSTARRGKPPTKEPISQTTDDILVASAECPSDDEDIDPCEPSSGGLANPTRAGGREPYPGSAEVIRESSSTTGMVVGIVAAAALCILILLYAMYKYRNRDEGSYHVDESRNYISNSAQSNGAVVKEKQPSSAKSSNKNKKNKDKEYYV

SEQ ID NO: 9569 - protein, 56 aa, Homo Sapiens
MTSGSKCPSTDSASLLPRKSRGLMAYILPLVQLTSSVGEDCSFQISTFLFDLSSIS

SEQ ID NO: 9570 - protein, 176 aa, Homo Sapiens
MTSGSKCPSTDSGKEEYIATFKGSEYFCYDLSQNPIQSSSDEITLSFKTLQRNGLMLHTGKSADYVNLALKNGAVSLVINLGSGAFEALVEPVNGKFNDNAWHDVKVTRNLRQVTISVDGILTTTGYTQEDYTMLGSDDFFYVGGSPSTADLPGSPIQHESTFAEDPMFQSQTAQL

SEQ ID NO: 9571 - protein, 903 aa, Homo Sapiens
MTSGSKCPSTDSGKEEYIATFKGSEYFCYDLSQNPIQSSSDEITLSFKTLQRNGLMLHTGKSADYVNLALKNGAVSLVINLGSGAFEALVEPVNGKFNDNAWHDVKVTRNLRQVTISVDGILTTTGYTQEDYTMLGSDDFFYVGGSPSTADLPGSPVSNNFMGCLKEVVYKNNDVRLELSRLAKQGDPKMKIHGVVAFKCENVATLDPITFETPESFISLPKWNAKKTGSISFDFRTTEPNGLILFSHGKPRHQKDAKHPQMIKVDFFAIEMLDGHLYLLLDMGSGTIKIKALLKKVNDGEWYHVDFQRDGRSGTISVNTLRTPYTAPGESEILDLDDELYLGGLPENKAGLVFPTEVWTALLNYGYVGCIRDLFIDGQSKDIRQMAEVQSTAGVKPSCSKETAKPCLSNPCKNNGMCRDGWNRYVCDCSGTGYLGRSCEREATVLSYDGSMFMKIQLPVVMHTEAEDVSLRFRSQRAYGILMATTSRDSADTLRLELDAGRVKLTVNLGKGPETLFAGYNLNDNEWHTVRVVRRGKSLKLTVDDQQAMTGQMAGDHTRLEFHNIETGIITERRYLSSVPSNFIGHLQSLTFNGMAYIDLCKNGDIDYCELNARFGFRNIIADPVTFKTKSSYVALATLQAYTSMHLFFQFKTTSLDGLILYNSGDGNDFIVVELVKGYLHYVFDLGNGANLIKGSSNKPLNDNQWHNVMISRDTSNLHTVKIDTKITTQITAGARNLDLKSDLYIGGVAKETYKSLPKLVHAKEGFQGCLASVDLNGRLPDLISDALFCNGQIERGCEGPSTTCQEDSCSNQGVCLQQWDGFSCDCSMTSFSGPLCNDPGTTYIFSKGGGQITYKWPPNDRPSTRADRLAIGFSTVQKEAVLVRVDSSSGLGDYLELHITLQ

SEQ ID NO: 9572 - protein, 75 aa, Homo Sapiens
MVVGIVAAAALCILILLYAMYKYRNRDEGSYHVDESRNYISNSAQSNGAVVKEKQPSSAKSSNKNKKNKDKEYYV

SEQ ID NO: 9573 - protein, 472 aa, Homo Sapiens
MYQRMLRCGAELGSPGGGGGGGGGGGAGGRLALLWIVPLTLSGLLGVAWGASSLGAHHIHHFHGSSKHHSVPIAIYRSPASLRGGHAGTTYIFSKGGGQITYKWPPNDRPSTRADRLAIGFSTVQKEAVLVRVDSSSGLGDYLELHIHQGKIGVKFNVGTDDIAIEESNAIINDGKYHVVRFTRSGGNATLQVDSWPVIERYPAGNNDNERLAIARQRIPYRLGRVVDEWLLDKGRQLTIFNSQATIIIGGKEQGQPFQGQLSGLYYNGLKVLNMAAENDANIAIVGNVRLVGEVPSSMTTESTATAMQSEMSTSIMETTTTLATSTARRGKPPTKEPISQTTDDILVASAECPSDDEDIDPCEPSSGGLANPTRAGGREPYPGSAEVIRESSSTTGMVVGIVAAAALCILILLYAMYKYRNRDEGSYHVDESRNYISNSAQSNGAVVKEKQPSSAKSSNKNKKNKDKEYYV

SEQ ID NO: 9574 - protein, 469 aa, Homo Sapiens
MYQRMLRCGAELGSPGGGGGGGGGGGAGGRLALLWIVPLTLSGLLGVAWGASSLGAHHIHHFHGSSKHHSVPIAIYRSPASLRGGHAGTTYIFSKGGGQITYKWPPNDRPSTRADRLAIGFSTVQKEAVLVRVDSSSGLGDYLELHIHQGKIGVKFNVGTDDIAIEESNAIINDGKYHVVRFTRSGGNATLQVDSWPVIERYPAGNNDNERLAIARQRIPYRLGRVVDEWLLDKGRQLTIFNSQATIIIGGKEQGQPFQGQLSGLYYNGLKVLNMAAENDANIAIVGNVRLVGEVPSSMTTESTATAMQSEMSTSIMETTTTLATSTARRGKPPTKEPISQTTDDILVASAECPSDDEDIDPCEPSSANPTRAGGREPYPGSAEVIRESSSTTGMVVGIVAAAALCILILLYAMYKYRNRDEGSYHVDESRNYISNSAQSNGAVVKEKQPSSAKSSNKNKKNKDKEYYV

SEQ ID NO: 9575 - protein, 442 aa, Homo Sapiens
MYQRMLRCGAELGSPGGGGGGGGGGGAGGRLALLWIVPLTLSGLLGVAWGASSLGAHHIHHFHGSSKHHSVPIAIYRSPASLRGGHAGTTYIFSKGGGQITYKWPPNDRPSTRADRLAIGFSTVQKEAVLVRVDSSSGLGDYLELHIHQGKIGVKFNVGTDDIAIEESNAIINDGKYHVVRFTRSGGNATLQVDSWPVIERYPAGRQLTIFNSQATIIIGGKEQGQPFQGQLSGLYYNGLKVLNMAAENDANIAIVGNVRLVGEVPSSMTTESTATAMQSEMSTSIMETTTTLATSTARRGKPPTKEPISQTTDDILVASAECPSDDEDIDPCEPSSGGLANPTRAGGREPYPGSAEVIRESSSTTGMVVGIVAAAALCILILLYAMYKYRNRDEGSYHVDESRNYISNSAQSNGAVVKEKQPSSAKSSNKNKKNKDKEYYV

SEQ ID NO: 9576 - protein, 136 aa, Homo Sapiens
SSQVLPVDSGEVKLDDEPPNSGGGSPCEAGEEGEGGVCLNGGVCSVVDDQAVCDCSRTGFRGKDCSQEIKFGLQCVLPVLLHDNDQGKYCCINTAKPLTEKDNNVEGLAHLMMGDQGKSKEKLEIFRWIRKDFTNF

SEQ ID NO: 9577 - protein, 123 aa, Homo Sapiens
TLSGLLGVAWGASSLGAHHIHHFHGSSKHHSVPIAIYRSPASLRGGHAGTTYIFSKGGGQITYKWPPNDRPSTRADRLAIGFSTVQKEAVLVRVDSSSGLGDYLELHIAFESFTASRSSASRC

SEQ ID NO: 9578 - protein, 33 aa, Homo Sapiens
  misc_feature (1)..(1): Xaa can be any naturally occurring amino acid
XFQRDGRSDFPFASSLVPPSTQNSCPGTISVNT

SEQ ID NO: 9579 - protein, 126 aa, Homo Sapiens
  misc_feature (1)..(1): Xaa can be any naturally occurring amino acid
XPELRAAALKLTLASVREREPFKGWIRDVRVNSSQVLPVDSGEVKLDDEPPNSGGGSPCEAGEEGEGGVCLNGGVCSVVDDQAVCDCSRTGFRGKDCSQGLAHLMMGDQGMGSVPFPLCFQCFLVL

SEQ ID NO: 9580 - protein, 169 aa, Homo Sapiens
  misc_feature (1)..(1): Xaa can be any naturally occurring amino acid
XSNNFMGCLKEVVYKNNDVRLELSRLAKQGDPKMKIHGVVAFKCENVATLDPITFETPESFISLPKWNAKKTGSISFDFRTTEPNGLILFSHGKPRHQKDAKHPQMIKVDFFAIEMLDGHLYLLLDMGSGTIKIKALLKKVNDGEWYHVDFQRDGRSGQMAGDHTRLEF

SEQ ID NO: 9581 - protein, 155 aa, Homo Sapiens
  misc_feature (1)..(1): Xaa can be any naturally occurring amino acid
XVFSGLFVGGLPPELRAAALKLTLASVREREPFKGWIRDVRVNSSQVLPVDSGEVKLDDEPPNSGGGSPCEAGEEGEGGVCLNGGVCSVVDDQAVCDCSRTGFRGKDCSQEDNNVEGLAHLMMGDQGKSKELMLILLCSITTQGLETAKSLIMCT

SEQ ID NO: 9582 - protein, 276 aa, Homo Sapiens
LLLLLLGAAEGARVSSSLSTTHHVHHFHSKHGTVPIAINRMPFLTRGGHAGTTYIFGKGGALITYTWPPNDRPSTRMDRLAVGFSTHQRSAVLVRVDSASGLGDYLQLHIDQGTVGVIFNVGTDDITIDEPNAIVSDGKYHVVRFTRSGGNATLQVDSWPVNERYPAGRQLTIFNSQAAIKIGGRDQGRPFQGQVSGLYYNGLKVLALAAESDPNVRTEGHLRLVGEGPSVLLSAETTATTLLADMATTIMETTTTMATTTTRRGRSPTLRDSTTQ

SEQ ID NO: 9583 - protein, 1712 aa, Homo Sapiens
MASGSRWRPTPPPLLLLLLLALAARADGLEFGGGPGQWARYARWAGAASSGELSFSLRTNATRALLLYLDDGGDCDFLELLLVDGRLRLRFTLSCAEPATLQLDTPVADDRWHMVLLTRDARRTALAVDGEARAAEVRSKRREMQVASDLFVGGIPPDVRLSALTLSTVKYEPPFRGLLANLKLGERPPALLGSQGLRGATADPLCAPARNPCANGGLCTVLAPGEVGCDCSHTGFGGKFCSEEEHPMEGPAHLTLNSEVGSLLFSEGGAGRGGAGDVHQPTKGKEEFVATFKGNEFFCYDLSHNPIQSSTDEITLAFRTLQRNGLMLHTGKSADYVNLSLKSGAVWLVINLGSGAFEALVEPVNGKFNDNAWHDVRVTRNLRQHAGIGHAMVNKLHYLVTISVDGILTTTGYTQEDYTMLGSDDFFYIGGSPNTADLPGSPVSNNFMGCLKDVVYKNNDFKLELSRLAKEGDPKMKLQGDLSFRCEDVAALDPVTFESPEAFVALPRWSAKRTGSISLDFRTTEPNGLLLFSQGRRAGGGAGSHSSAQRADYFAMELLDGHLYLLLDMGSGGIKLRASSRKVNDGEWCHVDFQRDGRKGSISVNSRSTPFLATGDSEILDLESELYLGGLPEGGRVDLPLPPEVWTAALRAGYVGCVRDLFIDGRSRDLRGLAEAQGAVGVAPFCSRETLKQCASAPCRNGGVCREGWNRFICDCIGTGFLGRVCEREATVLSYDGSMYMKIMLPNAMHTEAEDVSLRFMSQRAYGLMMATTSRESADTLRLELDGGQMKLTVNLDCLRVGCAPSKGPETLFAGHKLNDNEWHTVRVVRRGKSLQLSVDNVTVEGQMAGAHMRLEFHNIETGIMTERRFISVVPSNFIGHLSGLVFNGQPYMDQCKDGDITYCELNARFGLRAIVADPVTFKSRSSYLALATLQAYASMHLFFQFKTTAPDGLLLFNSGNGNDFIVIELVKGYIHYVFDLGNGPSLMKGNSDKPVNDNQWHNVVVSRDPGNVHTLKIDSRTVTQHSNGARNLDLKGELYIGGLSKNMFSNLPKLVASRDGFQGCLASVDLNGRLPDLIADALHRIGQVERGCDGPSTTCTEESCANQGVCLQQWDGFTCDCTMTSYGGPVCNDPGTTYIFGKGGALITYTWPPNDRPSTRMDRLAVGFSTHQRSAVLVRVDSASGLGDYLQLHIDQGTVGVIFNVGTDDITIDEPNAIVSDGKYHVVRFTRSGGNATLQVDSWPVNERYPAGNFDNERLAIARQRIPYRLGRVVDEWLLDKGRQLTIFNSQAAIKIGGRDQGRPFQGQVSGLYYNGLKVLALAAESDPNVRTEGHLRLVGEGPSVLLSAETTATTLLADMATTIMETTTTMATTTTRRGRSPTLRDSTTQNTDDLLVASAECPSDDEDLEECEPSTGGELILPIITEDSLDPPPVATRSPFVPPPPTFYPFLTGVGATQDTLPPPAARRPPSGGPCQAERDDSDCEEPIEASGFASGEVFDSSLPPTDDEDFYTTFPLVTDRTTLLSPRKPAPRPNLRTDGATGAPGVLFAPSAPAPNLPAGKMNHRDPLQPLLENPPLGPGAPTSFEPRRPPPLRPGVTSAPGFPHLPTANPTGPGERGPPGAVEVIRESSSTTGMVVGIVAAAALCILILLYAMYKYRNRDEGSYQVDQSRNYISNSAQSNGAVVKEKAPAAPKTPSKAKKNKDKEYYV

SEQ ID NO: 9584 - protein, 1642 aa, Homo Sapiens
MASGSRWRPTPPPLLLLLLLALAARADGLEFGGGPGQWARYARWAGAASSGELSFSLRTNATRALLLYLDDGGDCDFLELLLVDGRLRLRFTLSCAEPATLQLDTPVADDRWHMVLLTRDARRTALAVDGEARAAEVRSKRREMQVASDLFVGGIPPDVRLSALTLSTVKYEPPFRGLLANLKLGERPPALLGSQGLRGATADPLCAPARNPCANGGLCTVLAPGEVGCDCSHTGFGGKFCSEEEHPMEGPAHLTLNSEGKEEFVATFKGNEFFCYDLSHNPIQSSTDEITLAFRTLQRNGLMLHTGKSADYVNLSLKSGAVWLVINLGSGAFEALVEPVNGKFNDNAWHDVRVTRNLRQHAGIGHAMVTISVDGILTTTGYTQEDYTMLGSDDFFYIGGSPNTADLPGSPVSNNFMGCLKDVVYKNNDFKLELSRLAKEGDPKMKLQGDLSFRCEDVAALDPVTFESPEAFVALPRWSAKRTGSISLDFRTTEPNGLLLFSQGRRAGGGAGSHSSAQRADYFAMELLDGHLYLLLDMGSGGIKLRASSRKVNDGEWCHVDFQRDGRKGSISVNSRSTPFLATGDSEILDLESELYLGGLPEGGRVDLPLPPEVWTAALRAGYVGCVRDLFIDGRSRDLRGLAEAQGAVGVAPFCSRETLKQCASAPCRNGGVCREGWNRFICDCIGTGFLGRVCEREATVLSYDGSMYMKIMLPNAMHTEAEDVSLRFMSQRAYGLMMATTSRESADTLRLELDGGQMKLTVNLGKGPETLFAGHKLNDNEWHTVRVVRRGKSLQLSVDNVTVEGQMAGAHMRLEFHNIETGIMTERRFISVVPSNFIGHLSGLVFNGQPYMDQCKDGDITYCELNARFGLRAIVADPVTFKSRSSYLALATLQAYASMHLFFQFKTTAPDGLLLFNSGNGNDFIVIELVKGYIHYVFDLGNGPSLMKGNSDKPVNDNQWHNVVVSRDPGNVHTLKIDSRTVTQHSNGARNLDLKGELYIGGLSKNMFSNLPKLVASRDGFQGCLASVDLNGRLPDLIADALHRIGQVERGCDGPSTTCTEESCANQGVCLQQWDGFTCDCTMTSYGGPVCNDPGTTYIFGKGGALITYTWPPNDRPSTRMDRLAVGFSTHQRSAVLVRVDSASGLGDYLQLHIDQGTVGVIFNVGTDDITIDEPNAIVSDGKYHVVRFTRSGGNATLQVDSWPVNERYPAGRQLTIFNSQAAIKIGGRDQGRPFQGQVSGLYYNGLKVLALAAESDPNVRTEGHLRLVGEGPSVLLSAETTATTLLADMATTIMETTTTMATTTTRRGRSPTLRDSTTQNTDDLLVASAECPSDDEDLEECEPSTGGELILPIITEDSLDPPPVATRSPFVPPPPTFYPFLTGVGATQDTLPPPAARRPPSGGPCQAERDDSDCEEPIEASGFASGEVFDSSLPPTDDEDFYTTFPLVTDRTTLLSPRKPAPRPNLRTDGATGAPGVLFAPSAPAPNLPAGKMNHRDPLQPLLENPPLGPGAPTSFEPRRPPPLRPGVTSAPGFPHLPTANPTGPGERGPPGAVEVIRESSSTTGMVVGIVAAAALCILILLYAMYKYRNRDEGSYQVDQSRNYISNSAQSNGAVVKEKAPAAPKTPSKAKKNKDKEYYV

SEQ ID NO: 9585 - protein, 1712 aa, Homo Sapiens; identical to SEQ ID NO: 9583

SEQ ID NO: 9586 - protein, 1705 aa, Homo Sapiens
MASGSRWRPTPPPLLLLLLLALAARADGLEFGGGPGQWARYARWAGAASSGELSFSLRTNATRALLLYLDDGGDCDFLELLLVDGRLRLRFTLSCAEPATLQLDTPVADDRWHMVLLTRDARRTALAVDGEARAAEVRSKRREMQVASDLFVGGIPPDVRLSALTLSTVKYEPPFRGLLANLKLGERPPALLGSQGLRGATADPLCAPARNPCANGGLCTVLAPGEVGCDCSHTGFGGKFCSEEEHPMEGPAHLTLNSEVGSLLFSEGGAGRGGAGDVHQPTKGKEEFVATFKGNEFFCYDLSHNPIQSSTDEITLAFRTLQRNGLMLHTGKSADYVNLSLKSGAVWLVINLGSGAFEALVEPVNGKFNDNAWHDVRVTRNLRQHAGIGHAMVTISVDGILTTTGYTQEDYTMLGSDDFFYIGGSPNTADLPGSPVSNNFMGCLKDVVYKNNDFKLELSRLAKEGDPKMKLQGDLSFRCEDVAALDPVTFESPEAFVALPRWSAKRTGSISLDFRTTEPNGLLLFSQGRRAGGGAGSHSSAQRADYFAMELLDGHLYLLLDMGSGGIKLRASSRKVNDGEWCHVDFQRDGRKGSISVNSRSTPFLATGDSEILDLESELYLGGLPEGGRVDLPLPPEVWTAALRAGYVGCVRDLFIDGRSRDLRGLAEAQGAVGVAPFCSRETLKQCASAPCRNGGVCREGWNRFICDCIGTGFLGRVCEREATVLSYDGSMYMKIMLPNAMHTEAEDVSLRFMSQRAYGLMMATTSRESADTLRLELDGGQMKLTVNLDCLRVGCAPSKGPETLFAGHKLNDNEWHTVRVVRRGKSLQLSVDNVTVEGQMAGAHMRLEFHNIETGIMTERRFISVVPSNFIGHLSGLVFNGQPYMDQCKDGDITYCELNARFGLRAIVADPVTFKSRSSYLALATLQAYASMHLFFQFKTTAPDGLLLFNSGNGNDFIVIELVKGYIHYVFDLGNGPSLMKGNSDKPVNDNQWHNVVVSRDPGNVHTLKIDSRTVTQHSNGARNLDLKGELYIGGLSKNMFSNLPKLVASRDGFQGCLASVDLNGRLPDLIADALHRIGQVERGCDGPSTTCTEESCANQGVCLQQWDGFTCDCTMTSYGGPVCNDPGTTYIFGKGGALITYTWPPNDRPSTRMDRLAVGFSTHQRSAVLVRVDSASGLGDYLQLHIDQGTVGVIFNVGTDDITIDEPNAIVSDGKYHVVRFTRSGGNATLQVDSWPVNERYPAGNFDNERLAIARQRIPYRLGRVVDEWLLDKGRQLTIFNSQAAIKIGGRDQGRPFQGQVSGLYYNGLKVLALAAESDPNVRTEGHLRLVGEGPSVLLSAETTATTLLADMATTIMETTTTMATTTTRRGRSPTLRDSTTQNTDDLLVASAECPSDDEDLEECEPSTGGELILPIITEDSLDPPPVATRSPFVPPPPTFYPFLTGVGATQDTLPPPAARRPPSGGPCQAERDDSDCEEPIEASGFASGEVFDSSLPPTDDEDFYTTFPLVTDRTTLLSPRKPAPRPNLRTDGATGAPGVLFAPSAPAPNLPAGKMNHRDPLQPLLENPPLGPGAPTSFEPRRPPPLRPGVTSAPGFPHLPTANPTGPGERGPPGAVEVIRESSSTTGMVVGIVAAAALCILILLYAMYKYRNRDEGSYQVDQSRNYISNSAQSNGAVVKEKAPAAPKTPSKAKKNKDKEYYV

SEQ ID NO: 9587 - protein, 666 aa, Homo Sapiens
MPPGGSGPGGCPRRPPALAGPLPPPPPPPPPPLLPLLPLLLLLLLGAAEGARVSSSLSTTHHVHHFHSKHGTVPIAINRMPFLTRGGHAGTTYIFGKGGALITYTWPPNDRPSTRMDRLAVGFSTHQRSAVLVRVDSASGLGDYLQLHIDQGTVGVIFNVGTDDITIDEPNAIVSDGKYHVVRFTRSGGNATLQVDSWPVNERYPAGNFDNERLAIARQRIPYRLGRVVDEWLLDKGRQLTIFNSQAAIKIGGRDQGRPFQGQVSGLYYNGLKVLALAAESDPNVRTEGHLRLVGEGPSVLLSAETTATTLLADMATTIMETTTTMATTTTRRGRSPTLRDSTTQNTDDLLVASAECPSDDEDLEECEPSTGGELILPIITEDSLDPPPVATRSPFVPPPPTFYPFLTGVGATQDTLPPPAARRPPSGGPCQAERDDSDCEEPIEASGFASGEVFDSSLPPTDDEDFYTTFPLVTDRTTLLSPRKPAPRPNLRTDGATGAPGVLFAPSAPAPNLPAGKMNHRDPLQPLLENPPLGPGAPTSFEPRRPPPLRPGVTSAPGFPHLPTANPTGPGERGPPGAVEVIRESSSTTGMVVGIVAAAALCILILLYAMYKYRNRDEGSYQVDQSRNYISNSAQSNGAVVKEKAPAAPKTPSKAKKNKDKEYYV

SEQ ID NO: 9588 - protein, 293 aa, Homo Sapiens [sequence omitted]

SEQ ID NO: 9589 - protein, 215 aa, Homo Sapiens
  misc_feature (1)..(1): Xaa can be any naturally occurring amino acid
XADPLCAPARNPCANGGLCTVLAPGEVGCDCSHTGFGGKFCSEEEHPMEVGSLLFSEGGAGRGGAGDVHQPTKGKEEFVATFKGNEFFCYDLSHNPIQSSTDEITLAFRTLQRNGLMLHTGKSADYVNLSLKSGAVWLVINLGSGAFEALVEPVNGKFNDNAWHDVRVTRNLRQVTISVDGILTTTGYTQEDYTMLGSDDFFYIGGSPNTADLPG

SEQ ID NO: 9590 - protein, 206 aa, Homo Sapiens
  misc_feature (1)..(1): Xaa can be any naturally occurring amino acid
XCSEEEHPMEGPAHLTLNSEVGSLLFSEGGAGRGGAGDVHQPTKGKEEFVATFKGNEFFCYDLSHNPIQSSTDEITLAFRTLQRNGLMLHTGKSADYVNLSLKSGAVWLVINLGSGAFEALVEPVNGKFNDNAWHDVRVTRNLRQVTISVDGILTTTGYTQEDYTMLGSDDFFYIGGSPNTADLPGSPVSNNFMGCLKDVVYKNND

SEQ ID NO: 9591 - protein, 331 aa, Homo Sapiens
MDRAAVARVGAVASASVCALVAGVVLAQYIFTLKRKTGRKTKIIEMMPEFQKSSVRIKNPTRVEEIICGLIKGGAAKLQIITDFDMTLSRFSYKGKRCPTCHNIIDNCKLVTDECRKKLLQLKEKYYAIEVDPVLTVEEKYPYMVEWYTKSHGLLVQQALPKAKLKEIVAESDVMLKEGYENFFDKLQQHSIPVFIFSAGIGDVLEEVIRQAGVYHPNVKVVSNFMDFDETGVLKGFKGELIHVFNKHDGALRNTEYFNQLKDNSNIILLGDSQGDLRMADGVANVEHILKIGYLNDRVDELLEKYMDSYDIVLVQDESLEVANSILQKIL

SEQ ID NO: 9592 - protein, 331 aa, Homo Sapiens; identical to SEQ ID NO: 9591

SEQ ID NO: 9593 - protein, 42 aa, Homo Sapiens
MPEFQKSSVRIKNPTRVEEIICGLIKGGAAKLQIITDFDMTL

SEQ ID NO: 9594 - protein, 285 aa, Homo Sapiens
MPEFQKSSVRIKNPTRVEEIICGLIKGGAAKLQIITDFDMTLSRFSYKGKRCPTCHNIIDNCKLVTDECRKKLLQLKEKYYAIEVDPVLTVEEKYPYMVEWYTKSHGLLVQQALPKAKLKEIVAESDVMLKEGYENFFDKLQQHSIPVFIFSAGIGDVLEEVIRQAGVYHPNVKVVSNFMDFDETGVLKGFKGELIHVFNKHDGALRNTEYFNQLKDNSNIILLGDSQGDLRMADGVANVEHILKIGYLNDRVDELLEKYMDSYDIVLVQDESLEVANSILQKIL

SEQ ID NO: 9595 - protein, 285 aa, Homo Sapiens; identical to SEQ ID NO: 9594

SEQ ID NO: 9596 - protein, 54 aa, Homo Sapiens
MRAPSMDRAAVARVGAVASASVCALVAGVVLAQYIFTLKRKTGRKTKIIEMKIG

SEQ ID NO: 9597 - protein, 336 aa, Homo Sapiens
MRAPSMDRAAVARVGAVASASVCALVAGVVLAQYIFTLKRKTGRKTKIIEMMPEFQKSSVRIKNPTRVEEIICGLIKGGAAKLQIITDFDMTLSRFSYKGKRCPTCHNIIDNCKLVTDECRKKLLQLKEKYYAIEVDPVLTVEEKYPYMVEWYTKSHGLLVQQALPKAKLKEIVAESDVMLKEGYENFFDKLQQHSIPVFIFSAGIGDVLEEVIRQAGVYHPNVKVVSNFMDFDETGVLKGFKGELIHVFNKHDGALRNTEYFNQLKDNSNIILLGDSQGDLRMADGVANVEHILKIGYLNDRVDELLEKYMDSYDIVLVQDESLEVANSILQKIL

SEQ ID NO: 9598 - protein, 297 aa, Homo Sapiens
MTNQESAVHVKMMPEFQKSSVRIKNPTRVEEIICGLIKGGAAKLQIITDFDMTLSRFSYKGKRCPTCHNIIDNCKLVTDECRKKLLQLKEKYYAIEVDPVLTVEEKYPYMVEWYTKSHGLLVQQALPKAKLKEIVAESDVMLKEGYENFFDKLQQHSIPVFIFSAGIGDVLEEVIRQAGVYHPNVKVVSNFMDFDETGVLKGFKGELIHVFNKHDGALRNTEYFNQLKDNSNIILLGDSQGDLRMADGVANVEHILKIGYLNDRVDELLEKYMDSYDIVLVQDESLEVANSILQKIL

SEQ ID NO: 9599 - protein, 297 aa, Homo Sapiens; identical to SEQ ID NO: 9598

SEQ ID NO: 9600 - protein, 297 aa, Homo Sapiens; identical to SEQ ID NO: 9598

SEQ ID NO: 9601 - protein, 205 aa, Homo Sapiens
MTNQESAVHVKMMPEFQKSSVRIKNPTRVEEIICGLIKGGAAKLQIITDFDMTLSRFSYKGKRCPTCHNIIDNCKLVTDECRKKLLQLKEKYYAIEVDPVLTVEEKYPYMVEWYTKSHGLLVQQALPKAKLKEIVAESDVMLKEGYENFFDKLQQHSIPVFIFSAGIGDVLEEVIRQAGVYHPNVKVVSNFMDFDETVRISNRSS

SEQ ID NO: 9602 - protein, 548 aa, Homo Sapiens
MTMAAAAVVARGAGARAATAAALRGGCGTAARGRPCAGPARPLCTAPGTAPDMKRYLWERYREAKRSTEELVPSIMSNLLNPDAIFSNNEMSLSDIEIYGFDYDYTLVFYSKHLHTLIFNAARDLLINEHRYPAEIRKYEYDPNFAIRGLHYDVQRAVLMKIDAFHYIQLGTVYRGLSVVPDEEVIEMYEGSHVPLEQMSDFYGKSSHGNTMKQFMDIFSLPEMTLLSCVNEYFLKNNIDYEPVHLYKDVKDSIRDVHIKGIMYRAIEADIEKYICYAEQTRAVLAKLADHGKKMFLITNSPSSFVDKGMSYIVGKDWRDLFDVVIVQAEKPNFFNDKRRPFRKMNEKGVLLWDKIHKLQKGQIYKQGNLYEFLKLTGWRGSRVLYFGDHIYSDLADLTLKHGWRTGAIIPELRSELKIMNTEQYIQTMTWLQTLTGLLEQMQVHRDAESQLVLQEWKKERKEMREMTKSFFNAQFGSLFRTDQNPTYFLRRLSRFADIYMASLSCLLNYDVSHTFYPRRTPLQHELPAWSERPPTFGTPLLQEAQAK

SEQ ID NO: 9603 - protein, 135 aa, Homo Sapiens
  misc_feature (1)..(1): Xaa can be any naturally occurring amino acid
XAKLADHGKKMFLITNSPSSFVDKGMSYIVGKDWRDLFDVVIVQAEKPNFFNDKRRPFRKMNEKGVLLWDKIHKLQKGQIYKQGNLYEFLKLTGWRGSRVLYFGDHIYSDLATMVNDSRPSVSAGVVTHGNYFQN

SEQ ID NO: 9604 - protein, 122 aa, Homo Sapiens
  misc_feature (1)..(1): Xaa can be any naturally occurring amino acid
XTMTWLQTLTGLLEQMQVHRDAESQLVLQEWKKERKEMREMTKSFFNAQFGSLFRTDQNPTYFLRRLSRFADIYMASLSCLLNYDVSHTFYPRRTPLQHELPAWSERPPTFGTPLLQEAQAK

SEQ ID NO: 9605 - protein, 264 aa, Homo Sapiens
MCPRAARAPATLLLALGAVLWPAAGAWELTILHTNDVHSRLEQTSEDSSKCVNASRCMGGVARLFTKVQQIRRAEPNVLLLDAGDQYQGTIWFTVYKGAEVAHFMNALRYDAMALGNHEFDNGVEGLIEPLLKEAKFPILSANIKAKGPLASQISGLYLPYKVLPVGDEVVGIVGYTSKETPFLSNPGTNLVFEDEITALQPEVDKLKTLNVNKIIALGHSGFEMDKLIAQKVRGVDVVVGGHSNTFLYTGNCFKRIAWARMSR

SEQ ID NO: 9606 - protein, 574 aa, Homo Sapiens
MCPRAARAPATLLLALGAVLWPAAGAWELTILHTNDVHSRLEQTSEDSSKCVNASRCMGGVARLFTKVQQIRRAEPNVLLLDAGDQYQGTIWFTVYKGAEVAHFMNALRYDAMALGNHEFDNGVEGLIEPLLKEAKFPILSANIKAKGPLASQISGLYLPYKVLPVGDEVVGIVGYTSKETPFLSNPGTNLVFEDEITALQPEVDKLKTLNVNKIIALGHSGFEMDKLIAQKVRGVDVVVGGHSNTFLYTGNPPSKEVPAGKYPFIVTSDDGRKVPVVQAYAFGKYLGYLKIEFDERGNVISSHGNPILLNSSIPEDPSIKADINKWRIKLDNYSTQELGKTIVYLDGSSQSCRFRECNMGNLICDAMINNNLRHTDEMFWNHVSMCILNGGGIRSPIDERNNGTITWENLAAVLPFGGTFDLVQLKGSTLKKAFEHSVHRYGQSTGEFLQVGGIHVVYDLSRKPGDRVVKLDVLCTKCRVPSYDPLKMDEVYKVILPNFLANGGDGFQMIKDELLRHDSGDQDINVVSTYISKMKVIYPAVEGRIKFSTGSHCHGSFSLIFLSLWAVIFVLYQ

SEQ ID NO: 9607 - protein, 524 aa, Homo Sapiens
MCPRAARAPATLLLALGAVLWPAAGAWELTILHTNDVHSRLEQTSEDSSKCVNASRCMGGVARLFTKVQQIRRAEPNVLLLDAGDQYQGTIWFTVYKGAEVAHFMNALRYDAMALGNHEFDNGVEGLIEPLLKEAKFPILSANIKAKGPLASQISGLYLPYKVLPVGDEVVGIVGYTSKETPFLSNPGTNLVFEDEITALQPEVDKLKTLNVNKIIALGHSGFEMDKLIAQKVRGVDVVVGGHSNTFLYTGNPPSKEVPAGKYPFIVTSDDGRKVPVVQAYAFGKYLGYLKIEFDERGNVISSHGNPILLNSSIPEDPSIKADINKWRIKLDNYSTQELGKTIVYLDGSSQSCRFRECNMGNLICDAMINNNLRHTDEMFWNHVSMCILNGGGIRSPIDERNNGIHVVYDLSRKPGDRVVKLDVLCTKCRVPSYDPLKMDEVYKVILPNFLANGGDGFQMIKDELLRHDSGDQDINVVSTYISKMKVIYPAVEGRIKFSTGSHCHGSFSLIFLSLWAVIFVLYQ

SEQ ID NO: 9608 - protein, 230 aa, Homo Sapiens
  misc_feature (1)..(1): Xaa can be any naturally occurring amino acid
XDVVVGGHSNTFLYTGNPPSKEVPAGKYPFIVTSDDGRKVPVVQAYAFGKYLGYLKIEFDERGNVISSHGNPILLNSSIPEDPSIKADINKWRIKLDNYSTQELGKTIVYLDGSSQSCRFRECNMGNLICDAMINNNLRHTDEMFWNHVSMCILNGGGIRSPIDERNNGIHVVYDLSRKPGDRVVKLDVLCTKCRVPSYDPLKMDEVYKVILPNFLANGGDGFQMIKDEL

SEQ ID NO: 9609 - protein, 179 aa, Homo Sapiens
  misc_feature (1)..(1): Xaa can be any naturally occurring amino acid
XNPILLNSSIPEDPSIKADINKWRIKLDNYSTQELGKTIVYLDGSSQSCRFRECNMGNLICDAMINNNLRHTDEMFWNHVSMCILNGGGIRSPIDERNNGTITWENLAAVLPFGGTFDLVQLKGSTLKKAFEHSVHRYGQSTGEFLQVGDLKECCPICINQDDSWKEQPTAQTYLNTWF

SEQ ID NO: 9610 - protein, 257 aa, Homo Sapiens
MSILFYVIFLAYLRGIQGNNMDQRSLPEDSLNSLIIKLIQADILKNKLSKQMVDVKENYQSTLPKAEAPREPERGGPAKSAFQPVIAMDTELLRQQRRYNSPRVLLSDSTPLEPPPLYLMEDYVGSPVVANRTSRRKRYAEHKSHRGEYSVCDSESLWVTDKSSAIDIRGHQVTVLGEIKTGNSPVKQYFYETRCKEARPVKNGCRGIDDKHWNSQCKTSQTYVRALTSENNKLVGWRWIRIDTSCVCALSRKIGRT

SEQ ID NO: 9611 - protein, 270 aa, Homo Sapiens
MVTFATILQVNKVMSILFYVIFLAYLRGIQGNNMDQRSLPEDSLNSLIIKLIQADILKNKLSKQMVDVKENYQSTLPKAEAPREPERGGPAKSAFQPVIAMDTELLRQQRRYNSPRVLLSDSTPLEPPPLYLMEDYVGSPVVANRTSRRKRYAEHKSHRGEYSVCDSESLWVTDKSSAIDIRGHQVTVLGEIKTGNSPVKQYFYETRCKEARPVKNGCRGIDDKHWNSQCKTSQTYVRALTSENNKLVGWRWIRIDTSCVCALSRKIGRT

SEQ ID NO: 9612 - protein, 143 aa, Homo Sapiens
MLPLPSCSLPILLLFLLPSVPIESQPPPSTLPPFLAPEWDLLSPRVVLSRGAPAGPPLLFLLEAGAFRESAGAPANRSRRGVSETAPASRRGELAVCDAVSGWVTDRRTAVDLRGREVEVLGEVPAAGGSPLRQYFFETRCKA

SEQ ID NO: 9613 - protein, 210 aa, Homo Sapiens
MLPLPSCSLPILLLFLLPSVPIESQPPPSTLPPFLAPEWDLLSPRVVLSRGAPAGPPLLFLLEAGAFRESAGAPANRSRRGVSETAPASRRGELAVCDAVSGWVTDRRTAVDLRGREVEVLGEVPAAGGSPLRQYFFETRCKADNAEEGGPGAGGGGCRGVDRRHWVSECKAKQSYVRALTADAQGRVGWRWIRIDTACVCTLLSRTGRA

SEQ ID NO: 9614 - protein, 316 aa, Homo Sapiens
MGVCGYLFLPWKCLVVVSLRLLFLVPTGVPVRSGDATFPKAMDNVTVRQGESATLRCTIDNRVTRVAWLNRSTILYAGNDKWCLDPRVVLLSNTQTQYSIEIQNVDVYDEGPYTCSVQTDNHPKTSRVHLIVQVSPKIVEISSDISINEGNNISLTCIATGRPEPTVTWRHISPKAVGFVSEDEYLEIQGITREQSGDYECSASNDVAAPVVRRVKVTVNYPPYISEAKGTGVPVGQKGTLQCEASAVPSAEFQWYKDDKRLIEGKKGVKVENRPFLSKLIFFNVSEHDYGNYTCVASNKLGHTNASIMLFGETVL

SEQ ID NO: 9615 - protein, 344 aa, Homo Sapiens
MGVCGYLFLPWKCLVVVSLRLLFLVPTGVPVRSGDATFPKAMDNVTVRQGESATLRCTIDNRVTRVAWLNRSTILYAGNDKWCLDPRVVLLSNTQTQYSIEIQNVDVYDEGPYTCSVQTDNHPKTSRVHLIVQVSPKIVEISSDISINEGNNISLTCIATGRPEPTVTWRHISPKAVGFVSEDEYLEIQGITREQSGDYECSASNDVAAPVVRRVKVTVNYPPYISEAKGTGVPVGQKGTLQCEASAVPSAEFQWYKDDKRLIEGKKGVKVENRPFLSKLIFFNVSEHDYGNYTCVASNKLGHTNASIMLFGPGAVSEVSNGTSRRAGCVWLLPLLVLHLLLKF

SEQ ID NO: 9616 - protein, 355 aa, Homo Sapiens
MGVCGYLFLPWKCLVVVSLRLLFLVPTGVPVRSGDATFPKAMDNVTVRQGESATLRCTIDNRVTRVAWLNRSTILYAGNDKWCLDPRVVLLSNTQTQYSIEIQNVDVYDEGPYTCSVQTDNHPKTSRVHLIVQVSPKIVEISSDISINEGNNISLTCIATGRPEPTVTWRHISPKAVGFVSEDEYLEIQGITREQSGDYECSASNDVAAPVVRRVKVTVNYPPYISEAKGTGVPVGQKGTLQCEASAVPSAEFQWYKDDKRLIEGKKGVKVENRPFLSKLIFFNVSEHDYGNYTCVASNKLGHTNASIMLFEVKTTALTPWKGPGAVSEVSNGTSRRAGCVWLLPLLVLHLLLKF

SEQ ID NO: 9617 - protein, 344 aa, Homo Sapiens
MKTIQPKMHNSISWAIFTGLAALCLFQGVPVRSGDATFPKAMDNVTVRQGESATLRCTIDNRVTRVAWLNRSTILYAGNDKWCLDPRVVLLSNTQTQYSIEIQNVDVYDEGPYTCSVQTDNHPKTSRVHLIVQVSPKIVEISSDISINEGNNISLTCIATGRPEPTVTWRHISPKAVGFVSEDEYLEIQGITREQSGDYECSASNDVAAPVVRRVKVTVNYPPYISEAKGTGVPVGQKGTLQCEASAVPSAEFQWYKDDKRLIEGKKGVKVENRPFLSKLIFFNVSEHDYGNYTCVASNKLGHTNASIMLFGPGAVSEVSNGTSRRAGCVWLLPLLVLHLLLKF

SEQ ID NO: 9618 - protein, 18 aa, Homo Sapiens
MNGKRNGEGGKRWKWKGT

SEQ ID NO: 9619 - protein, 36 aa, Homo Sapiens
MNGKRNGEGGKRWKWKGTGVPVRSGDATFPKAMDNV

SEQ ID NO: 9620 - protein, 191 aa, Homo Sapiens
MNGKRNGEGGKRWKWKGTGVPVRSGDATFPKAMDNVTVRQGESATLRCTIDNRVTRVAWLNRSTILYAGNDKWCLDPRVVLLSNTQTQYSIEIQNVDVYDEGPYTCSVQTDNHPKTSRVHLIVQVSPKIVEISSDISINEGNNISLTCIATGRPEPTVTWRHISPKAVGFVSEDEYLEIQGITREQSGDYE

SEQ ID NO: 9621 - protein, 179 aa, Homo Sapiens
VGFVSEDEYLEIQGITREQSGDYECSASNDVAAPVVRRVKVTVNYPPYISEAKGTGVPVGQKGTLQCEASAVPSAEFQWYKDDKRLIEGKKGVKVENRPFLSKLIFFNVSEHDYGNYTCVASNKLGHTNASIMLFEVKTTALTPWKGPGAVSEVSNGTSRRAGCVWLLPLLVLHLLLKF

SEQ ID NO: 9622 - protein, 168 aa, Homo Sapiens
VGFVSEDEYLEIQGITREQSGDYECSASNDVAAPVVRRVKVTVNYPPYISEAKGTGVPVGQKGTLQCEASAVPSAEFQWYKDDKRLIEGKKGVKVENRPFLSKLIFFNVSEHDYGNYTCVASNKLGHTNASIMLFGPGAVSEVSNGTSRRAGCVWLLPLLVLHLLLKF

SEQ ID NO: 9623 - protein, 119 aa, Homo Sapiens
  misc_feature (1)..(1): Xaa can be any naturally occurring amino acid
XSAEFQWYKDDKRLIEGKKGVKVENRPFLSKLIFFNVSEHDYGNYTCVASNKLGHTNASIMLFELNEPTSSTLLQEVKTTALTPWKGPGAVSEVSNGTSRRAGCVWLLPLLVLHLLLKF

SEQ ID NO: 9624 - protein, 153 aa, Homo Sapiens
HYCKEGYYRDMGKPITHRKACKACDCHPVGAAGKTCNQTTGQCPCKDGVTGITCNRCAKGYQQSRSPIAPCIKIPVAPPTTAASSVEEPEAARQPNTFQAEGLSLLPGAAEKEGARCWGYRRRLGHRVAQAECRGPRSWAWGRITSSFSFASN

SEQ ID NO: 9625 - protein, 604 aa, Homo Sapiens
MMRAVWEALAALAAVACLVGAVRGGPGLSMFAGQAAQPDPCSDENGHPRRCIPDFVNAAFGKDVRVSSTCGRPPARYCVVSERGEERLRSCHLCNASDPKKAHPPAFLTDLNNPHNLTCWQSENYLQFPHNVTLTLSLGKKFEVTYVSLQFCSPRPESMAIYKSMDYGRTWVPFQFYSTQCRKMYNRPHRAPITKQNEQEAVCTDSHTDMRPLSGGLIAFSTLDGRPSAHDFDNSPVLQDWVTATDIRVAFSRLHTFGDENEDDSELARDSYFYAVSDLQVGGRCKCNGHAARCVRDRDDSLVCDCRHNTAGPECDRCKPFHYDRPWQRATAREANECVACNCNLHARRCRFNMELYKLSGRKSGGVCLNCRHNTAGRHCHYCKEGYYRDMGKPITHRKACKACDCHPVGAAGKTCNQTTGQCPCKDGVTGITCNRCAKGYQQSRSPIAPCIKIPVAPPTTAASSVEEPEDCDSYCKASKGKLKINMKKYCKKDYAVQIHILKADKAGDWWKFTVNIISVYKQGTSRIRRGDQSLWIRSRDIACKCPKIKPLKKYLLLGNAEDSPDQSGIVADKSSLVIQWRDTWARRLRKFQQREKKGKCKKA

SEQ ID NO: 9626 - protein, 580 aa, Homo Sapiens
MPGWPWGLLLTAGTLFAALSPGPPAPADPCHDEGGAPRGCVPGLVNAALGREVLASSTCGRPATRACDASDPRRAHSPALLTSPGGTASPLCWRSESLPRAPLNVTLTVPLGKAFELVFVSLRFCSAPPASVALLKSQDHGRSWAPLGFFSSHCDLDYGRLPAPANGPAGPGPEALCFPAPLAQPDGSGLLAFSMQDSSPPGLDLDSSPVLQDWVTATDVRVVLTRPSTAGDPRDMEAVVPYSYAATDLQVGGRCKCNGHASRCLLDTQGHLICDCRHGTEGPDCGRCKPFYCDRPWQRATARESHACLACSCNGHARRCRFNMELYRLSGRRSGGVCLNCRHNTAGRHCHYCREGFYRDPGRALSDRRACRACDCHPVGAAGKTCNQTTGQCPCKDGVTGLTCNRCAPGFQQSRSPVAPCVKTPIPGPTEDSSPVQPQDCDSHCKPARGSYRISLKKFCKKDYAVQVAVGARGEARGAWTRFPVAVLAVFRSGEERARRGSSALWVPAGDAACGCPRLLPGRRYLLLGGGPGAAAGGAGGRGPGLIAARGSLVLPWRDAWTRRLRRLQRRERRGRCSAA

SEQ ID NO: 9627 - protein, 176 aa, Homo Sapiens
MGNLALGRKLWADTTCGQNATELYCFYSENTDLTCRQPKCDKCNAAYPHLAHLPSAMADSSFRFPRTWWQSAEDVHREKIQLDLEAEFYFTHLIVMFKSPRPAAMVLDRSQDFGKTWKPYKYFATNCSATFGLEDDVVKKGAICTSKYSSPFPCTGGEVIFKALSPPYDTENPYSA

SEQ ID NO: 9628 - protein, 591 aa, Homo Sapiens
MGNLALGRKLWADTTCGQNATELYCFYSENTDLTCRQPKCDKCNAAYPHLAHLPSAMADSSFRFPRTWWQSAEDVHREKIQLDLEAEFYFTHLIVMFKSPRPAAMVLDRSQDFGKTWKPYKYFATNCSATFGLEDDVVKKGAICTSKYSSPFPCTGGEVIFKALSPPYDTENPYSAKVQEQLKITNLRVQLLKRQSCPCQRNDLNEEPQHFTHYAIYDFIVKGSCFCNGHADQCIPVHGFRPVKAPGTFHMVHGKCMCKHNTAGSHCQHCAPLYNDRPWEAADGKTGAPNECRTCKCNGHADTCHFDVNVWEASGNRSGGVCDDCQHNTEGQYCQRCKPGFYRDLRRPFSAPDACKPCSCHPVGSAVLPANSVTFCDPSNGDCPCKPGVAGRRCDRCMVGYWGFGDYGCRPCDCAGSCDPITGDCISSHTDIDWYHEVPDFRPVHNKSEPAWEWEDAQGFSALLHSGKCECKEQTLGNAKAFCGMKYSYVLKIKILSAHDKGTHVEVNVKIKKVLKSTKLKIFRGKRTLYPESWTDRGCTCPILNPGLEYLVAGHEDIRTGKLIVNMKSFVQHWKPSLGRKVMDILKRECK

SEQ ID NO: 9629 - protein, 591 aa, Homo Sapiens; identical to SEQ ID NO: 9628

SEQ ID NO: 9630 - protein, 628 aa, Homo Sapiens
MGSCARLLLLWGCTVVAAGLSGVAGVSSRCEKACNPRMGNLALGRKLWADTTCGQNATELYCFYSENTDLTCRQPKCDKCNAAYPHLAHLPSAMADSSFRFPRTWWQSAEDVHREKIQLDLEAEFYFTHLIVMFKSPRPAAMVLDRSQDFGKTWKPYKYFATNCSATFGLEDDVVKKGAICTSKYSSPFPCTGGEVIFKALSPPYDTENPYSAKVQEQLKITNLRVQLLKRQSCPCQRNDLNEEPQHFTHYAIYDFIVKGSCFCNGHADQCIPVHGFRPVKAPGTFHMVHGKCMCKHNTAGSHCQHCAPLYNDRPWEAADGKTGAPNECRTCKCNGHADTCHFDVNVWEASGNRSGGVCDDCQHNTEGQYCQRCKPGFYRDLRRPFSAPDACKPCSCHPVGSAVLPANSVTFCDPSNGDCPCKPGVAGRRCDRCMVGYWGFGDYGCRPCDCAGSCDPITGDCISSHTDIDWYHEVPDFRPVHNKSEPAWEWEDAQGFSALLHSGKCECKEQTLGNAKAFCGMKYSYVLKIKILSAHDKGTHVEVNVKIKKVLKSTKLKIFRGKRTLYPESWTDRGCTCPILNPGLEYLVAGHEDIRTGKLIVNMKSFVQHWKPSLGRKVMDILKRECK

SEQ ID NO: 9631 - protein, 605 aa, Homo Sapiens
MGSCARLLLLWGCTVVAAGLSGVAGVSSRCEKACNPRMGNLALGRKLWADTTCGQNATELYCFYSENTDLTCRQPKCDKCNAAYPHLAHLPSAMADSSFRFPRTWWQSAEDVHREKIQLDLEAEFYFTHLIVMFKSPRPAAMVLDRSQDFGKTWKPYKYFATNCSATFGLEDDVVKKGAICTSKYSSPFPCTGGEVIFKALSPPYDTENPYSAKVQEQLKITNLRVQLLKRQSCPCQRNDLNEEPQHFTHYAIYDFIVKGSCFCNGHADQCIPVHGFRPVKAPGTFHMVHGKCMCKHNTAGSHCQHCAPLYNDRPWEAADGKTGAPNECRTCKCNGHADTCHFDVNVWEASGNRSGGVCDDCQHNTEGQYCQRCKPGFYRDLRRPFSAPDACKPCSCHPVGSAVLPANSVTFCDPSNGDCPCKPGVAGRRCDRCMVGYWGFGDYGCRPCDCAGSCDPITGDCISSHTDIDWYHEVPDFRPVHNKSEPAWEWEDAQGFSALLHSVLKIKILSAHDKGTHVEVNVKIKKVLKSTKLKIFRGKRTLYPESWTDRGCTCPILNPGLEYLVAGHEDIRTGKLIVNMKSFVQHWKPSLGRKVMDILKRECK

SEQ ID NO: 9632 - protein, 75 aa, Homo Sapiens
MPCQRIPEATTTLATTPGAYSSDPQCQNYCNMSDTRVHMSLRRYCQQDHVLRAQVLASEAAGPAWQRLAVRVLAV

SEQ ID NO: 9633 - protein, 489 aa, Homo Sapiens
MPVTFALLLLLGQATADPCYDPQGRPQFCLPPVTQLAAVAASCPQACALSPGNHLGARETCNGSLTLALGGPFLLTSVSLRFCTPGPPALILSAAWASGGPWRLLWHRPAWPGALGGPERVTFHSTPGPKATVAASHLRVEFGGQAGLAAAGLRGRCQCHGHAARCAARARPPRCHCRHHTTGPGCESCRPSHRDWPWRPATPRHPHPCLPCSCNQHARRCRFNSELFRLSGGRSGGVCERCRHHTAGRHCHYCQPGFWRDPSQPIFSRRACRACQCHPIGATGGTCNQTSGQCTCKLGVTGLTCNRCGPGYQQSRSPRMPCQRIPEATTTLATTPGAYSSDPQCQNYCNMSDTRVHMSLRRYCQQDHVLRAQVLASEAAGPAWQRLAVRVLAVYKQRAQPVRRGDQDAWVPRADLTCGCLRLQPGTDYLLLGSAVGDPDPTRLILDRHGLALPWRPRWARPLKRLQQEERAGGCRGVRAPTPSPRPEH

SEQ ID NO: 9634 - protein, 480 aa, Homo Sapiens
MYLSRFLSIHALWVTVSSVMQPYPLVWGHYDLCKTQIYTEEGKVWDYMACQPESTDMTKYLKVKLDPPDITCGDPPETFCAMGNPYMCNNECDASTPELAHPPELMFDFEGRHPSTFWQSATWKEYPKPLQVNITLSWSKTIELTDNIVITFESGRPDQMILEKSLDYGRTWQPYQYYATDCLDAFHMDPKSVKDLSQHTVLEIICTEEYSTGYTTNSKIIHFEIKDRFAFFAGPRLRNMASLYGQLDTTKKLRDFFTVTDLRIRLLRPAVGEIFVDELHLARYFYAISDIKVRGRCKCNLHATVCVYDNSKLTCECEHNTTGPDCGKCKKNYQGRPWSPGSYLPIPKGTANTCIPSISSIGNPPKFNRIWPNISSLEVSNPKQVAPKLALSTVSSVQVANHKRANVCDNELLHCQNGGTCHNNVRCLCPAAYTGILCEKLRCEEAGSCGSDSGQGAPPHGSPALLLLTTLLGTASPLVF

SEQ ID NO: 9635 - protein, 539 aa, Homo Sapiens
MYLSRFLSIHALWVTVSSVMQPYPLVWGHYDLCKTQIYTEEGKVWDYMACQPESTDMTKYLKVKLDPPDITCGDPPETFCAMGNPYMCNNECDASTPELAHPPELMFDFEGRHPSTFWQSATWKEYPKPLQVNITLSWSKTIELTDNIVITFESGRPDQMILEKSLDYGRTWQPYQYYATDCLDAFHMDPKSVKDLSQHTVLEIICTEEYSTGYTTNSKIIHFEIKDRFAFFAGPRLRNMASLYGQLDTTKKLRDFFTVTDLRIRLLRPAVGEIFVDELHLARYFYAISDIKVRGRCKCNLHATVCVYDNSKLTCECEHNTTGPDCGKCKKNYQGRPWSPGSYLPIPKGTANTCIPSISSIGNCECFGHSNRCSYIDLLNTVICVSCKHNTRGQHCELCRLGYFRNASAQLDDENVCIECYCNPLGSIHDRCNGSGFCECKTGTTGPKCDECLPGNSWHYGCQPNVCDNELLHCQNGGTCHNNVRCLCPAAYTGILCEKLRCEEAGSCGSDSGQGAPPHGSPALLLLTTLLGTASPLVF

SEQ ID NO: 9636 - protein, 539 aa, Homo Sapiens; identical to SEQ ID NO: 9635

SEQ ID NO: 9637 - protein, 460 aa, Homo Sapiens
MYLSRFLSIHALWVTVSSVMQPYPLVWGHYDLCKTQIYTEEGKVWDYMACQPESTDMTKYLKVKLDPPDITCGDPPETFCAMGNPYMCNNECDASTPELAHPPELMFDFEGRHPSTFWQSATWKEYPKPLQVNITLSWSKTIELTDNIVITFESGRPDQMILEKSLDYGRTWQPYQYYATDCLDAFHMDPKSVKDLSQHTVLEIICTEEYSTGYTTNSKIIHFEIKDRFAFFAGPRLRNMASLYGQLDTTKKLRDFFTVTDLRIRLLRPAVGEIFVDELHLARYFYAISDIKVRGRCKCNLHATVCVYDNSKLTCECEHNTTGPDCGKCKKNYQGRPWSPGSYLPIPKGTANTCIPSISSIGNPPKFNRIWPNISSLEVSNPKQANVCDNELLHCQNGGTCHNNVRCLCPAAYTGILCEKLRCEEAGSCGSDSGQGAPPHGSPALLLLTTLLGTASPLVF

SEQ ID NO: 9638 - protein, 480 aa, Homo Sapiens; identical to SEQ ID NO: 9634

SEQ ID NO: 9639 - protein, 438 aa, Homo Sapiens
MYLSRFLSIHALWVTVSSVMQPYPLVWGHYDLCKTQIYTEEGKVWDYMACQPESTDMTKYLKVKLDPPDITCGDPPETFCAMGNPYMCNNECDASTPELAHPPELMFDFEGRHPSTFWQSATWKEYPKPLQVNITLSWSKTIELTDNIVITFESGRPDQMILEKSLDYGRTWQPYQYYATDCLDAFHMDPKSVKDLSQHTVLEIICTEEYSTGYTTNSKIIHFEIKDRFAFFAGPRLRNMASLYGQLDTTKKLRDFFTVTDLRIRLLRPAVGEIFVDELHLARYFYAISDIKVRGRCKCNLHATVCVYDNSKLTCECEHNTTGPDCGKCKKNYQGRPWSPGSYLPIPKGTANTCIPSISSIGTNVCDNELLHCQNGGTCHNNVRCLCPAAYTGILCEKLRCEEAGSCGSDSGQGAPPHGSPALLLLTTLLGTASPLVF

SEQ ID NO: 9640 - protein, 494 aa, Homo Sapiens
MYLSRFLSIHALWVTVSSVMQPYPLVWGHYDLCKTQIYTEEGKVWDYMACQPESTDMTKYLKVKLDPPDITCGDPPETFCAMGNPYMCNNECDASTPELAHPPELMFDFEGRHPSTFWQSATWKEYPKPLQVNITLSWSKTIELTDNIVITFESGRPDQMILEKSLDYGRTWQPYQYYATDCLDAFHMDPKSVKDLSQHTVLEIICTEEYSTGYTTNSKIIHFEIKDRFAFFAGPRLRNMASLYGQLDTTKKLRDFFTVTDLRIRLLRPAVGEIFVDELHLARYFYAISDIKVRGRCKCNLHATVCVYDNSKLTCECEHNTTGPDCGKCKKNYQGRPWSPGSYLPIPKGTANTCIPSISSIGNCECFGHSNRCSYIDLLNTVICVSCKHNTRGQHCELCRLGYFRNASAQLDDENVCIANVCDNELLHCQNGGTCHNNVRCLCPAAYTGILCEKLRCEEAGSCGSDSGQGAPPHGSPALLLLTTLLGTASPLVF

SEQ ID NO: 9641 - protein, 422 aa, Homo Sapiens
MLHLLALFLHCLPLASGDYDICKSWVTTDEGPTWEFYACQPKVMRLKDYVKVKVEPSGITCGDPPERFCSHENPYLCSNECDASNPDLAHPPRLMFDKEEEGLATYWQSITWSRYPSPLEANITLSWNKTVELTDDVVMTFEYGRPTVMVLEKSLDNGRTWQPYQFYAEDCMEAFGMSARRARDMSSSSAHRVLCTEEYSRWAGSKKEKHVRFEVRDRFAIFAGPDLRNMDNLYTRLESAKGLKEFFTLTDLRMRLLRPALGGTYVQRENLYKYFYAISNIEVIGRCKCNLHANLCSMREGSLQCECEHNTTGPDCGKCKKNFRTRSWRAGSYLPLPHGSPNACATAGSFGTLQTPPPGRSPSALRGSRRGLANVKEPAGSRPQISEMLLGCTVTLHQGSVGPHIPPKLSLPDPGGPWLGSQ

SEQ ID NO: 9642 - protein, 530 aa, Homo Sapiens
MLHLLALFLHCLPLASGDYDICKSWVTTDEGPTWEFYACQPKVMRLKDYVKVKVEPSGITCGDPPERFCSHENPYLCSNECDASNPDLAHPPRLMFDKEEEGLATYWQSITWSRYPSPLEANITLSWNKTVELTDDVVMTFEYGRPTVMVLEKSLDNGRTWQPYQFYAEDCMEAFGMSARRARDMSSSSAHRVLCTEEYSRWAGSKKEKHVRFEVRDRFAIFAGPDLRNMDNLYTRLESAKGLKEFFTLTDLRMRLLRPALGGTYVQRENLYKYFYAISNIEVIGRCKCNLHANLCSMREGSLQCECEHNTTGPDCGKCKKNFRTRSWRAGSYLPLPHGSPNACATAGSFGNCECYGHSNRCSYIDFLNVVTCVSCKHNTRGQHCQHCRLGYYRNGSAELDDENVCIECNCNQIGSVHDRCNETGFCECREGAAGPKCDDCLPTHYWRQGCYPNVCDDDQLLCQNGGTCLQNQRCACPRGYTGVRCEQPRCDPADDDGGLDCDRAPGAAPRPATLLGCLLLLGLAARLGR

SEQ ID NO: 9643 - protein, 170 aa, Homo Sapiens
MMAGMKIQLVCMLLLAFSSWSLCSDSEEEMKALEADFLTNMHTSKISKAHVPSWKMTLLNVCSLVNNLNSPAEETGEVHEEELVARRKLPTALDGFSLEAMLTIYQLHKICHSRAFQHWELIQEDILDTGNDKNGKEEVIKRKIPYILKRQLYENKPRRPYILKRDSYYY

SEQ ID NO: 9644 - protein, 95 aa, Homo Sapiens
MMAGMKIQLVCMLLLAFSSWSLCSDSEEEMKALEADFLTNMHTSKLIQEDILDTGNDKNGKEEVIKRKIPYILKRQLYENKPRRPYILKRDSYYY

SEQ ID NO: 9645 - protein, 103 aa, Homo Sapiens
MGIWQRLLLFGGVSLRAGGGATAPLGGSRAMVCGRQLSGAGSETLKQRRTQIMSRGLPKQKPIEGVKQVIVVASGKGGVGKSTTAVETGFHRVNQDGLHLLIS

SEQ ID NO: 9646 - protein, 319 aa, Homo Sapiens
MGIWQRLLLFGGVSLRAGGGATAPLGGSRAMVCGRQLSGAGSETLKQRRTQIMSRGLPKQKPIEGVKQVIVVASGKGGVGKSTTAVNLALALAANDSSKAIGLLDVDVYGPSVPKMMNLKGNPELSQSNLMRPLLNYGIACMSMGFLVEESEPVVWRGLMVMSAIEKLLRQVDWGQLDYLVVDMPPGTGDVQLSVSQNIPITGAVIVSTPQDIALMDAHKGAEMFRRVHVPVLGLVQNMSVFQCPKCKHKTHIFGADGARKLAQTLGLEVLGDIPLHLNIREASDTGQPIVFSQPESDEAKAYLRIAVEVVRRLPSPSE

SEQ ID NO: 9647 - protein, 173 aa, Homo Sapiens
MGIWQRLLLFGGVSLRAGGGATAPLGGSRAMVCGRQLSGAGSETLKQRRTQIMSRGLPKQKPIEGVKQVIVVASGKGGVGKSTTAVNLALALAANDSSKAIGLLDVDVYGPSVPKMMNLKGNPELSQSNLMRPLLNYGIACMSMGFLVEESEPVVWRGLMVMSAIEKLLRQVL

SEQ ID NO: 9648 - protein, 167 aa, Homo Sapiens
MGIWQRLLLFGGVSLRAGGGATAPLGGSRAMVCGRQLSGAGSETLKQRRTQIMSRGLPKQKPIEGVKQVIVVASGKGGVGKSTTAVNLALALAANDSVLGLVQNMSVFQCPKCKHKTHIFGADGARKLAQTLGLEVLGDIPLHLNIREASDTGQPIVFSQPESDEAK

SEQ ID NO: 9649 - protein, 54 aa, Homo Sapiens
MMRIEVKVKMMLSGAGSETLKQRRTQIMSRGLPKQKPIEGVKQVIVVASGKGGV

SEQ ID NO: 9650 - protein, 133 aa, Homo Sapiens
MSRGLPKQKPIEGVKQVIVVASGKGGVGKSTTAVNLALALAANDSSKAIGLLDVDVYGPSVPKMMNLKGNPELSQSNLMRPLLNYGIACMSMGFLVEESEPVVWRGLMVMSAIEKLLRQVDWGQLDYLVVDMP

SEQ ID NO: 9651 - protein, 130 aa, Homo Sapiens
VSLRAGGGATAPLGGSRAMVCGRQLSGAGSETLKQRRTQIMSRGLPKQKPIEGVKQVIVVASGKGGVGKSTTAVNLALALAANDSSKAIGLLDVDVYGPSVPKMMNLKGNPELSQSISQRCCRSCSRPPQ

SEQ ID NO: 9652 - protein, 111 aa, Homo Sapiens
MPPSGPRGTLLLLPLLLLLLLRAVLAVPLERGAPNKEETPATESPDTGLYYHRYLQEVIDVLETDGHFREKLQAANAEDIKSGKLSRELDFVSHHVRTKLDELKRQEVSRL

SEQ ID NO: 9653 - protein, 124 aa, Homo Sapiens
MPPSGPRGTLLLLPLLLLLLLRAVLAVPLERGAPNKEETPATESPDTGLYYHRYLQEVIDVLETDGHFREKLQAANAEDIKSGKLSRELDFVSHHVRTKLDELKRQEVSRLRMLLKAKMDAEQD

SEQ ID NO: 9654 - protein, 268 aa, Homo Sapiens
MPPSGPRGTLLLLPLLLLLLLRAVLAVPLERGAPNKEETPATESPDTGLYYHRYLQEVIDVLETDGHFREKLQAANAEDIKSGKLSRELDFVSHHVRTKLDELKRQEVSRLRMLLKAKMDAEQDPNVQVDHLNLLKQFEHLDPQNQHTFEARDLELLIQTATRDLAQYDAAHHEEFKRYEMLKEHERRRYLESLGEEQRKEAERKLEEQQRRHREHPKVNVPGSQAQLKEVWEELDGLDPNRDLTHPVLGPLRYLAILFPSDINSDGV

SEQ ID NO: 9655 - protein, 461 aa, Homo Sapiens
MPPSGPRGTLLLLPLLLLLLLRAVLAVPLERGAPNKEETPATESPDTGLYYHRYLQEVIDVLETDGHFREKLQAANAEDIKSGKLSRELDFVSHHVRTKLDELKRQEVSRLRMLLKAKMDAEQDPNVQVDHLNLLKQFEHLDPQNQHTFEARDLELLIQTATRDLAQYDAAHHEEFKRYEMLKEHERRRYLESLGEEQRKEAERKLEEQQRRHREHPKVNVPGSQAQLKEVWEELDGLDPNRFNPKTFFILHDINSDGVLDEQELEALFTKELEKVYDPKNEEDDMREMEEERLRMREHVMKNVDTNQDRLVTLEEFLASTQRKEFGDTGEGWETVEMHPAYTEEELRRFEEELAAREAELNAKAQRLSQETEALGRSQGRLEAQKRELQQAVLHMEQRKQQQQQQQGHKAPAAHPEGQLKFHPDTDDVPVPAPAGDQKEVDTSEKKLLERLPEVEVPQHL

SEQ ID NO: 9656 - protein, 461 aa, Homo Sapiens; identical to SEQ ID NO: 9655

SEQ ID NO: 9657 - protein, 75 aa, Homo Sapiens
MPPSGPRGTLLLLPLLLLLLLRAVLAVPLERGAPNKEETPATESPVSGPALLSSQVFAVVLQLLQTPVPVGRMLQ

SEQ ID NO: 9658 - protein, 295 aa, Homo Sapiens
  misc_feature (1)..(1): Xaa can be any naturally occurring amino acid
XPPSGPRGTLLLLPLLLLLLLRAVLAVPLERGAPNKEETPATESPDTGLYYHRYLQEVIDVLETDGHFREKLQAANAEDIKSGKLSRELDFVSHHVRTKLDELKRQEFEHLDPQNQHTFEARDLELLIQTATRDLAQYDAAHHEEFKRYEMLKEHERRRYLESLGEEQRKEAERKLEEQQRRHREHPKVNVPGSQAQLKEVWEELDGLDPNRFNPKTFFILHDINSDGVLDEQELEALFTKELEKVYDPKNEEDDMREMEEERLRMREHVMKNVDTNQDRLVTLEEFLASTQRKE

SEQ ID NO: 9659 - protein, 34 aa, Homo Sapiens
MRWRTILLQYCFLLITCLLTALEAVPIDIDKTKV

SEQ ID NO: 9660 - protein, 34 aa, Homo Sapiens; identical to SEQ ID NO: 9659

SEQ ID NO: 9661 - protein, 39 aa, Homo Sapiens
MRWRTILLQYCFLLITCLLTALEAVPIDIDKTKVQNIHP

SEQ ID NO: 9662 - protein, 69 aa, Homo Sapiens
MRWRTILLQYCFLLITCLLTALEAVPIDIDKTKVQNIHPVESAKIEPPDTGLYYDEYLKQVIDVLETDK

SEQ ID NO: 9663 - protein, 69 aa, Homo Sapiens; identical to SEQ ID NO: 9662

SEQ ID NO: 9664 - protein, 90 aa, Homo Sapiens
MRWRTILLQYCFLLITCLLTALEAVPIDIDKTKVQNIHPVESAKIEPPDTGLYYDEYLKQVIDVLETDKHFREKLQKADIEEIKSGRLSK

SEQ ID NO: 9665 - protein, 195 aa, Homo Sapiens
MRWRTILLQYCFLLITCLLTALEAVPIDIDKTKVQNIHPVESAKIEPPDTGLYYDEYLKQVIDVLETDKHFREKLQKADIEEIKSGRLSKELDLVSHHVRTKLDELKRQEVGRLRMLIKAKLDSLQDIGMDHQALLKQFDHLNHLNPDKFESTDLDMLIKAATSDLEHYDKTRHEEFKKYEMMKEHERREYLKTL

SEQ ID NO: 9666 - protein, 198 aa, Homo Sapiens
MRWRTILLQYCFLLITCLLTALEAVPIDIDKTKVQNIHPVESAKIEPPDTGLYYDEYLKQVIDVLETDKHFREKLQKADIEEIKSGRLSKELDLVSHHVRTKLDELKRQEVGRLRMLIKAKLDSLQDIGMDHQALLKQFDHLNHLNPDKFESTDLDMLIKAATSDLEHYDKTRHEEFKKYEMMKEHERREYLKTLNEE

SEQ ID NO: 9667 - protein, 420 aa, Homo Sapiens
MRWRTILLQYCFLLITCLLTALEAVPIDIDKTKVQNIHPVESAKIEPPDTGLYYDEYLKQVIDVLETDKHFREKLQKADIEEIKSGRLSKELDLVSHHVRTKLDELKRQEVGRLRMLIKAKLDSLQDIGMDHQALLKQFDHLNHLNPDKFESTDLDMLIKAATSDLEHYDKTRHEEFKKYEMMKEHERREYLKTLNEEKRKEEESKFEEMKKKHENHPKVNHPGSKDQLKEVWEETDGLDPNDFDPKTFFKLHDVNSDGFLDEQELEALFTKELEKVYDPKNEEDDMVEMEEERLRMREHVMNEVDTNKDRLVTLEEFLKATEKKEFLEPDSWETLDQQQFFTEEELKEYENIIALQENELKKKADELQKQKEELQRQHDQLEAQKLEYHQVIQQMEQKKLQQGIPPSGPAGELKFEPRV

SEQ ID NO: 9668 - protein, 390 aa, Homo Sapiens
MRWRTILLQYCFLLITCLLTALEAVPIDIDKTKVQNIHPVESAKIEPPDTGLYYDEYLKQVIDVLETDKHFREKLQKADIEEIKSGRLSKELDLVSHHVRTKLDELKRQEVGRLRMLIKAKLDSLQDIGMDHQALLKQFDHLNHLNPDKFESTDLDMLIKAATSDLEHYDKTRHEEFKKYEMMKEHERREYLKTLNEEKRKEEESKFEEMKKKHENHPKVNHPGSKDQLKEVWEETDGLDPNDFDPKTFFKLHDVNSDGFLDEQELEALFTKELEKVYDPKNEEDDMVEMEEERLRMREHVMNETLDQQQFFTEEELKEYENIIALQENELKKKADELQKQKEELQRQHDQLEAQKLEYHQVIQQMEQKKLQQGIPPSGPAGELKFEPHI

SEQ ID NO: 9669 - protein, 420 aa, Homo Sapiens
MRWRTILLQYCFLLITCLLTALEAVPIDIDKTKVQNIHPVESAKIEPPDTGLYYDEYLKQVIDVLETDKHFREKLQKADIEEIKSGRLSKELDLVSHHVRTKLDELKRQEVGRLRMLIKAKLDSLQDIGMDHQALLKQFDHLNHLNPDKFESTDLDMLIKAATSDLEHYDKTRHEEFKKYEMMKEHERREYLKTLNEEKRKEEESKFEEMKKKHENHPKVNHPGSKDQLKEVWEETDGLDPNDFDPKTFFKLHDVNSDGFLDEQELEALFTKELEKVYDPKNEEDDMVEMEEERLRMREHVMNEVDTNKDRLVTLEEFLKATEKKEFLEPDSWETLDQQQFFTEEELKEYENIIALQENELKKKADELQKQKEELQRQHDQLEAQKLEYHQVIQQMEQKKLQQGIPPSGPAGELKFEPHI

SEQ ID NO: 9670 - protein, 338 aa, Homo Sapiens
MRWRTILLQYCFLLITCLLTALEAVPIDIDKTKVQNIHPVESAKIEPPDTGLYYDEYLKQVIDVLETDKHFREKLQKADIEEIKSGRLSKELDLVSHHVRTKLDELKRQEVGRLRMLIKAKLDSLQDIGMDHQALLKQFDHLNHLNPDKFESTDLDMLIKAATSDLEHYDKTRHEEFKKYEMMKEHERREYLKTLNEEKRKEEESKFEEMKKKHENHPKVNHPGSKDQLKEVWEETDGLDPNDFDPKTFFKLHDVNSDGFLDEQELEALFTKELEKVYDPKNEEDDMVEMEEERLRMREHVMNEVDTNKDRLVTLEEFLKATEKKEFLEPDSWESPSI

SEQ ID NO: 9671 - protein, 420 aa, Homo Sapiens; identical to SEQ ID NO: 9669

SEQ ID NO: 9672 - protein, 231 aa, Homo Sapiens
MRWRTILLQYCFLLITCLLTALEAVPIDIDKTKVQNIHPVESAKIEPPDTGLYYDEYLKQVIDVLETDKHFREKLQKADIEEIKSGRLSKELDLVSHHVRTKLDELKRQEVGRLRMLIKAKLDSLQDIGMDHQALLKQFDHLNHLNPDKFESTDLDMLIKAATSDLEHYDKTRHEEFKKYEMMKEHERREYLKTLNEEKRKEEESKFEEMKKKHENHPKVNHPVHREAKIN

SEQ ID NO: 9673 - protein, 73 aa, Homo Sapiens
  misc_feature (1)..(1): Xaa can be any naturally occurring amino acid
XEERLRMREHVMNEVDTNKDRLVTLEEFLKATEKKEFLEPDSWEVIQQMEQKKLQQGIPPSGPAGELKFEPHI

SEQ ID NO: 9674 - protein, 198 aa, Homo Sapiens
  misc_feature (1)..(1): Xaa can be any naturally occurring amino acid
XTLNEEKRKEEESKFEEMKKKHENHPKVNHPGSKDQLKEVWEETDGLDPNDFDPKTFFKLHDVNSDGFLDEQELEALFTKELEKVYDPKNEEDDMVEMEEERLRMREHVMNETLDQQQFFTEEELKEYENIIALQENELKKKADELQKQKEELQRQHDQLEAQKLEYHQVIQQMEQKKLQQGIPPSGPAGELKFEPHI

SEQ ID NO: 9675 - protein, 375 aa, Homo Sapiens
MSSSLRPGPSRWRRAASIVLAAGWSRPETATPPSRPPPAEGFRLLLLQRSPHQGFMPGAHVFSGGVLDAADRSADWLGLFAPHHGPPRFGLGPAPFSRTAFPSLPDTDDHKTDNTGTLPEDVAFRICAVREAFEEAGVLLLRPRTSPPGPAPGPGLALEPPPGLASWRDRVRQDPRHFLRLCAHLDCTPDIWALHNWSAWLTPFLRGTTRRFDTAFFLCCLREPPPVYPDLAEVVGYQWSSPSEATESFLSKEIWLPPPQFYEVRRLANFASLSDLHKFCLGRALEGLERWLPIILLTADGMVHLLPGDELYLEDSDFLENLMSTEKKTEEIMKEGKQFHRIVTYHRHLYDIHVTVQPKYKHVYPKNSVVRKSHL

SEQ ID NO: 9676 - protein, 77 aa, Homo Sapiens
MAGRLLGKALAAVSLSLALASVTIRSSRCRGIQAFRNPAGRTGLVGRGLLGRWGPNHAADPIITRGWWIQERRLVPH

SEQ ID NO: 9677 - protein, 284 aa, Homo Sapiens
MAGRLLGKALAAVSLSLALASVTIRSSRCRGIQAFRNSFSSSWFHLNTNVMSGSNGSKENSHNKARTSPYPGSKVERSQVPNEKVGWLVEWQDYKPVEYTAVSVLAGPRWADPQIRNPAGRTGLVGRGLLGRWGPNHAADPIITRWKRDSSGNKIMHPVSGKHILQFVAIKRKDCGEWAIPGGMVDPGEKISATLKREFGEEALNSLQKTSAEKREIEEKLHKLFSQDHLVIYKGYVDDPRNTDNAWMETEAVNYHDETGEIMDNLMLEAGDDAGKVKWVDIND

SEQ ID NO: 9678 - protein, 350 aa, Homo Sapiens
MAGRLLGKALAAVSLSLALASVTIRSSRCRGIQAFRNSFSSSWFHLNTNVMSGSNGSKENSHNKARTSPYPGSKVERSQVPNEKVGWLVEWQDYKPVEYTAVSVLAGPRWADPQISESNFSPKFNEKDGHVERKSKNGLYEIENGRPRNPAGRTGLVGRGLLGRWGPNHAADPIITRWKRDSSGNKIMHPVSGKHILQFVAIKRKDCGEWAIPGGMVDPGEKISATLKREFGEEALNSLQKTSAEKREIEEKLHKLFSQDHLVIYKGYVDDPRNTDNAWMETEAVNYHDETGEIMDNLMLEAGDDAGKVKWVDINDKLKLYASHSQFIKLVAEKRDAHWSEDSEADCHAL

SEQ ID NO: 9679 - protein, 206 aa, Homo Sapiens
MSGSNGSKENSHNKARTSPYPGSKVERSQVPNEKVGWLVEWQDYKPVEYTAVSVLAGPRWADPQISESNFSPKFNEKDGHVERKSKNGLYEIENGRPRNPAGRTGLVGRGLLGRWGPNHAADPIITRWKRDSSGNKIMHPVSGKHILQFVAIKRKDCGEWAIPGGMVDPGEKISATLKREFGEEALNSLQKTSAEKREIEEKLHKL

SEQ ID NO: 9680 - protein, 300 aa, Homo Sapiens
MSGSNGSKENSHNKARTSPYPGSKVERSQVPNEKVGWLVEWQDYKPVEYTAVSVLAGPRWADPQISESNFSPKFNEKDGHVERKSKNGLYEIENGRPRNPAGRTGLVGRGLLGRWGPNHAADPIITRWKRDSSGNKIMHPVSGKHILQFVAIKRKDCGEWAIPGGMVDPGEKISATLKREFGEEALNSLQKTSAEKREIEEKLHKLFSQDHLVIYKGYVDDPRNTDNAWMETEAVNYHDETGEIMDNLMLEAGDDAGKVKWVDINDKLKLYASHSQFIKLVAEKRDAHWSEDSEADCHAL

SEQ ID NO: 9681 - protein, 1391 aa, Homo Sapiens
MPSSLLGAAMPASTSAAALQEALENAGRLIDRQLQEDRMYPDLSELLMVSAPNNPTVSGMSDMDYPLQGPGLLSVPNLPEISSIRRVPLPPELVEQFGHMQCNCMMGVFPPISRAWLTIDSDIFMWNYEDGGDLAYFDGLSETILAVGLVKPKAGIFQPHVRHLLVLATPVDIVILGLSYANLQTGSGVLNDSLSGGMQLLPDPLYSLPTDNTYLLTITSTDNGRIFLAGKDGCLYEVAYQAEAGWFSQRCRKINHSKSSLSFLVPSLLQFTFSEDDPILQIAIDNSRNILYTRSEKGVIQVYDLGQDGQGMSRVASVSQNAIVSAAGNIARTIDRSVFKPIVQIAVIENSESLDCQLLAVTHAGVRLYFSTCPFRQPLARPNTLTLVHVRLPPGFSASSTVEKPSKVHRALYSKGILLMAASENEDNDILWCVNHDTFPFQKPMMETQMTAGVDGHSWALSAIDELKVDKIITPLNKDHIPITDSPVVVQQHMLPPKKFVLLSAQGSLMFHKLRPVDQLRHLLVSNVGGDGEEIERFFKLHQEDQACATCLILACSTAACDREVSAWATRAFFRYGGEAQMRFPTTLPPPSNVGPILGSPVYSSSPVPSGSPYPNPSFLGTPSHGIQPPAMSTPVCALGNPATQATNMSCVTGPEIVYSGKHNGICIYFSRIMGNIWDASLVVERIFKSGNREITAIESSVPCQLLESVLQELKGLQEFLDRNSQFAGGPLGNPNTTAKVQQRLIGFMRPENGNPQQMQQELQRKFHEAQLSEKISLQAIQQLVRKSYQALALWKLLCEHQFTIIVAELQKELQEQLKITTFKDLVIRDKELTGALIASLINCYIRDNAAVDGISLHLQDICPLLYSTDDAICSKANELLQRSRQVQNKTEKERMLRESLKEYQKISNQVDLSNVCAQYRQVRFYEGVVELSLTAAEKKDPQGLGLHFYKHGEPEEDIVGLQAFQERLNSYKCITDTLQELVNQSKAAPQSPSVPKKPGPPVLSSDPNMLSNEEAGHHFEQMLKLSQRSKDELFSIALYNWLIQVDLADKLLQVASPFLEPHLVRMAKVDQNRVRYMDLLWRYYEKNRSFSNAARVLSRLADMHSTEISLQQRLEYIARAILSAKSSTAISSIAADGEFLHELEEKMEVARIQLQIQETLQRQYSHHSSVQDAVSQLDSELMDITKLYGEFADPFKLAECKLAIIHCAGYSDPILVQTLWQDIIEKELSDSVTLSSSDRMHALSLKIVLLGKIYAGTPRFFPLDFIVQFLEQQVCTLNWDVGFVIQTMNEIGVPLPRLLEVYDQLFKSRDPFWNRMKKPLHLLDCIHVLLIRYVENPSQVLNCERRRFTNLCLDAVCGYLVELQSMSSSVAVQAITGNFKSLQAKLERLH

SEQ ID NO: 9682 - protein, 1327 aa, Homo Sapiens
MPSSLLGAAMPASTSAAALQEALENAGRLIDRQLQEDRMYPDLSELLMVSAPNNPTVSGMSDMDYPLQGPGLLSVPNLPEISSIRRVPLPPELVEQFGHMQCNCMMGVFPPISRAWLTIDSDIFMWNYEDGGDLAYFDGLSETILAVGLVKPKAGIFQPHVRHLLVLATPVDIVILGLSYANLQTGSGVLNDSLSGGMQLLPDPLYSLPTDNTYLLTITSTDNGRIFLAGKDGCLYEVAYQAEAGWFSQRCRKINHSKSSLSFLVPSLLQFTFSEDDPILQIAIDNSRNILYTRSEKGVIQVYDLGQDGQGMSRVASVSQNAIVSAAGNIARTIDRSVFKPIVQIAVIENSESLDCQLLAVTHAGVRLYFSTCPFRQPLARPNTLTLVHVRLPPGFSASSTVEKPSKVHRALYSKGILLMAASENEDNDILWCVNHDTFPFQKPMMETQMTAGVDGHSWALSAIDELKVDKIITPLNKDHIPITDSPVVVQQHMLPPKKFVLLSAQGSLMFHKLRPVDQLRHLLVSNVGGDGEEIERFFKLHQEDQACATCLILACSTAACDREVSAWATRAFFRYGGEAQMRFPTTLPPPSNVGPILGSPVYSSSPVPSGSPYPNPSFLGTPSHGIQPPAMSTPVCALGNPATQATNMSCVTGPEIVYSGKHNGICIYFSRIMGNIWDASLVVERIFKSGNREITAIESSVPCQLLESVLQELKGLQEFLDRNSQFAGGPLGNPNTTAKVQQRLIGFMRPENGNPQQMQQELQRKFHEAQLSEKISLQAIQQLVRKSYQALALWKLLCEHQFTIIVAELQKANELLQRSRQVQNKTEKERMLRESLKEYQKISNQVDLSNVCAQYRQVRFYEGVVELSLTAAEKKDPQGLGLHFYKHGEPEEDIVGLQAFQERLNSYKCITDTLQELVNQSKAAPQSPSVPKKPGPPVLSSDPNMLSNEEAGHHFEQMLKLSQRSKDELFSIALYNWLIQVDLADKLLQVASPFLEPHLVRMAKVDQNRVRYMDLLWRYYEKNRSFSNAARVLSRLADMHSTEISLQQRLEYIARAILSAKSSTAISSIAADGEFLHELEEKMEVARIQLQIQETLQRQYSHHSSVQDAVSQLDSELMDITKLYGEFADPFKLAECKLAIIHCAGYSDPILVQTLWQDIIEKELSDSVTLSSSDRMHALSLKIVLLGKIYAGTPRFFPLDFIVQFLEQQVCTLNWDVGFVIQTMNEIGVPLPRLLEVYDQLFKSRDPFWNRMKKPLHLLDCIHVLLIRYVENPSQVLNCERRRFTNLCLDAVCGYLVELQSMSSSVAVQAITGNFKSLQAKLERLH

SEQ ID NO: 9683 - protein, 54 aa, Homo Sapiens
MPSSLLGAAMPASTSAAALQEALENAGRLIDRQLQEDRMYPDLSELLMVSAPSE

SEQ ID NO: 9684 - protein, 1332 aa, Homo Sapiens
MSDMDYPLQGPGLLSVPNLPEISSIRRVPLPPELVEQFGHMQCNCMMGVFPPISRAWLTIDSDIFMWNYEDGGDLAYFDGLSETILAVGLVKPKAGIFQPHVRHLLVLATPVDIVILGLSYANLQTGSGVLNDSLSGGMQLLPDPLYSLPTDNTYLLTITSTDNGRIFLAGKDGCLYEVAYQAEAGWFSQRCRKINHSKSSLSFLVPSLLQFTFSEDDPILQIAIDNSRNILYTRSEKGVIQVYDLGQDGQGMSRVASVSQNAIVSAAGNIARTIDRSVFKPIVQIAVIENSESLDCQLLAVTHAGVRLYFSTCPFRQPLARPNTLTLVHVRLPPGFSASSTVEKPSKVHRALYSKGILLMAASENEDNDILWCVNHDTFPFQKPMMETQMTAGVDGHSWALSAIDELKVDKIITPLNKDHIPITDSPVVVQQHMLPPKKFVLLSAQGSLMFHKLRPVDQLRHLLVSNVGGDGEEIERFFKLHQEDQACATCLILACSTAACDREVSAWATRAFFRYGGEAQMRFPTTLPPPSNVGPILGSPVYSSSPVPSGSPYPNPSFLGTPSHGIQPPAMSTPVCALGNPATQATNMSCVTGPEIVYSGKHNGICIYFSRIMGNIWDASLVVERIFKSGNREITAIESSVPCQLLESVLQELKGLQEFLDRNSQFAGGPLGNPNTTAKVQQRLIGFMRPENGNPQQMQQELQRKFHEAQLSEKISLQAIQQLVRKSYQALALWKLLCEHQFTIIVAELQKELQEQLKITTFKDLVIRDKELTGALIASLINCYIRDNAAVDGISLHLQDICPLLYSTDDAICSKANELLQRSRQVQNKTEKERMLRESLKEYQKISNQVDLSNVCAQYRQVRFYEGVVELSLTAAEKKDPQGLGLHFYKHGEPEEDIVGLQAFQERLNSYKCITDTLQELVNQSKAAPQSPSVPKKPGPPVLSSDPNMLSNEEAGHHFEQMLKLSQRSKDELFSIALYNWLIQVDLADKLLQVASPFLEPHLVRMAKVDQNRVRYMDLLWRYYEKNRSFSNAARVLSRLADMHSTEISLQQRLEYIARAILSAKSSTAISSIAADGEFLHELEEKMEVARIQLQIQETLQRQYSHHSSVQDAVSQLDSELMDITKLYGEFADPFKLAECKLAIIHCAGYSDPILVQTLWQDIIEKELSDSVTLSSSDRMHALSLKIVLLGKIYAGTPRFFPLDFIVQFLEQQVCTLNWDVGFVIQTMNEIGVPLPRLLEVYDQLFKSRDPFWNRMKKPLHLLDCIHVLLIRYVENPSQVLNCERRRFTNLCLDAVCGYLVELQSMSSSVAVQAITGNFKSLQAKLERLH

SEQ ID NO: 9685 - protein, 140 aa, Homo Sapiens
CKDDEAVVQAPRHAPVVRTPSIQPSLLPHAAPFAKSHLVHGSSPGVMGTSVATSASKIIPQGADSTMLATKTVKHGAPSPSHPISAPQAAAAAALRRQMASQAPAVNTLTESTLKNVPQVVNVQELKNNPATPSTAMGGL

SEQ ID NO: 9686 - protein, 78 aa, Homo Sapiens
GEGTAAASAGGFGFGSSSNTTSFGTLASQNAPTFGSLSQQTSGFGTQSSGFSGFGSGTGGFSFGSNNSSVQGFGGWRS

SEQ ID NO: 9687 - protein, 113 aa, Homo Sapiens
LQCLAALLLLGDPLGLEGCQHSVQPQPLQALWARREAKCSERALQLPAQEDSGLGAAATPHPSARSRVRMPPLSDHCPNRLLVLGPRVADSLVLDQAQEGSALGQITRKYPPF

SEQ ID NO: 9688 - protein, 2090 aa, Homo Sapiens
MGDEMDAMIPEREMKDFQFRALKKVRIFDSPEELPKERSSLLAVSNKYGLVFAGGASGLQIFPTKNLLIQNKPGDDPNKIVDKVQGLLVPMKFPIHHLALSCDNLTLSACMMSSEYGSIIAFFDVRTFSNEAKQQKRPFAYHKLLKDAGGMVIDMKWNPTVPSMVAVCLADGSIAVLQVTETVKVCATLPSTVAVTSVCWSPKGKQLAVGKQNGTVVQYLPTLQEKKVIPCPPFYESDHPVRVLDVLWIGTYVFAIVYAAADGTLETSPDVVMALLPKKEEKHPEIFVNFMEPCYGSCTERQHHYYLSYIEEWDLVLAASAASTEVSILARQSDQINWESWLLEDSSRAELPVTDKSDDSLPMGVVVDYTNQVEITISDEKTLPPAPVLMLLSTDGVLCPFYMINQNPGVKSLIKTPERLSLEGERQPKSPGSTPTTPTSSQAPQKLDASAAAAPASLPPSSPAAPIATFSLLPAGGAPTVFSFGSSSLKSSATVTGEPPSYSSGSDSSKAAPGPGPSTFSFVPPSKASLAPTPAASPVAPSAASFSFGSSGFKPTLESTPVPSVSAPNIAMKPSFPPSTSAVKVNLSEKFTAAATSTPVSSSQSAPPMSPFSSASKPAASGPLSHPTPLSAPPSSVPLKSSVLPSPSGRSAQGSSSPVPSMVQKSPRITPPAAKPGSPQAKSLQPAVAEKQGHQWKDSDPVMAGIGEEIAHFQKELEELKARTSKACFQVGTSEEMKMLRTESDDLHTFLLEIKETTESLHGDISSLKTTLLEGFAGVEEAREQNERNRDSGYLHLLYKRPLDPKSEAQLQEIRRLHQYVKFAVQDVNDVLDLEWDQHLEQKKKQRHLLVPERETLFNTLANNREIINQQRKRLNHLVDSLQQLRLYKQTSLWSLSSAVPSQSSIHSFDSDLESLCNALLKTTIESHTKSLPKVPAKLSPMKQAQLRNFLAKRKTPPVRSTAPASLSRSAFLSQRYYEDLDEVSSTSSVSQSLESEDARTSCKDDEAVVQAPRHAPVVRTPSIQPSLLPHAAPFAKSHLVHGSSPGVMGTSVATSASKIIPQGADSTMLATKTVKHGAPSPSHPISAPQAAAAAALRRQMASQAPAVNTLTESTLKNVPQVVNVQELKNNPATPSTAMGSSVPYSTAKTPHPVLTPVAANQAKQGSLINSLKPSGPTPASGQLSSGDKASGTAKIETAVTSTPSASGQFSKPFSFSPSGTGFNFGIITPTPSSNFTAAQGATPSTKESSQPDAFSSGGGSKPSYEAIPESSPPSGITSASNTTPGEPAASSSRPVAPSGTALSTTSSKLETPPSKLGELLFPSSLAGETLGSFSGLRVGQADDSTKPTNKASSTSLTSTQPTKTSGVPSGFNFTAPPVLGKHTEPPVTSSATTTSVAPPAATSTSSTAVFGSLPVTSAGSSGVISFGGTSLSAGKTSFSFGSQQTNSTVPPSAPPPTTAATPLPTSFPTLSFGSLLSSATTPSLPMSAGRSTEEATSSALPEKPGDSEVSASAASLLEEQQSAQLPQAPPQTSDSVKKEPVLAQPAVSNSGTAASSTSLVALSAEATPATTGVPDARTEAVPPASSFSVPGQTAVTAAAISSAGPVAVETSSTPIASSTTSIVAPGPSAEAAAFGTVTSGSSVFAQPPAASSSSAFNQLTNNTATAPSATPVFGQVAASTAPSLFGQQTGSTASTAAATPQVSSSGFSSPAFGTTAPGVFGQTTFGQASVFGQSASSAASVFSFSQPGFSSVPAFGQPASSTPTSTSGSVFGAASSTSSSSSFSFGQSSPNTGGGLFGQSNAPAFGQSPGFGQGGSVFGGTSAATTTAATSGFSFCQASGFGSSNTGSVFGQAASTGGIVFGQQSSSSSGSVFGSGNTGRGGGFFSGLGGKPSQDAANKNPFSSASGGFGSTATSNTSNLFGNSGAKTFGGFASSSFGEQKPTGTFSSGGGSVASQGFGFSSPNKTGGFGAAPVFGSPPTFGGSPGFGGVPAFGSAPAFTSPLGSTGGKVFGEGTAAASAGGFGFGSSSNTTSFGTLASQNAPTFGSLSQQTSGFGTQSSGFSGFGSGTGGFSFGSNNSSVQGFGGWRS

SEQ ID NO: 9689 - protein, 2080 aa, Homo Sapiens
MGDEMDAMIPEREMKDFQFRALKKVRIFDSPEELPKERSSLLAVSNKYGLVFAGGASGLQIFPTKNLLIQNKPGDDPNKIVDKVQGLLVPMKFPIHHLALSCDNLTLSACMMSSEYGSIIAFFDVRTFSNEAKQQKRPFAYHKLLKDAGGMVIDMKWNPTVPSMVAVCLADGSIAVLQVTETVKVCATLPSTVAVTSVCWSPKGKQLAVGKQNGTVVQYLPTLQEKKVIPCPPFYESDHPVRVLDVLWIGTYVFAIVYAAADGTLETSPDVVMALLPKKEEKHPEIFVNFMEPCYGSCTERQHHYYLSYIEEWDLVLAASAASTEVSILARQSDQINWESWLLEDSSRAELPVTDKSDDSLPMGVVVDYTNQVEITISDEKTLPPAPVLMLLSTDGVLCPFYMINQNPGVKSLIKTPERLSLEGERQPKSPGSTPTTPTSSQAPQKLDASAAAAPASLPPSSPAAPIATFSLLPAGGAPTVFSFGSSSLKSSATVTGEPPSYSSGSDSSKAAPGPGPSTFSFVPPSKASLAPTPAASPVAPSAASFSFGSSGFKPTLESTPVPSVSAPNIAMKPSFPPSTSAVKVNLSENSSQSAPPMSPFSSASKPAASGPLSHPTPLSAPPSSVPLKSSVLPSPSAGRSAQGSSSPVPSMVQKSPRITPPAAKPGSPQAKSLQPAVAEKQGHQWKDSDPVMAGIGEEIAHFQKELEELKARTSKACFQVGTSEEMKMLRTESDDLHTFLLEIKETTESLHGDISSLKTTLLEGFAGVEEAREQNERNRDSGYLHLLYKRPLDPKSEAQLQEIRRLHQYVKFAVQDVNDVLDLEWDQHLEQKKKQRHLLVPERETLFNTLANNREIINQQRKRLNHLVDSLQQLRLYKQTSLWSLSSAVPSQSSIHSFDSDLESLCNALLKTTIESHTKSLPKVPAKLSPMKQAQLRNFLAKRKTPPVRSTAPASLSRSAFLSQRYYEDLDEVSSTSSVSQSLESEDARTSCKDDEAVVQAPRHAPVVRTPSIQPSLLPHAAPFAKSHLVHGSSPGVMGTSVATSASKIIPQGADSTMLATKTVKHGAPSPSHPISAPQAAAAAALRRQMASQAPAVNTLTESTLKNVPQVVNVQELKNNPATPSTAMGSSVPYSTAKTPHPVLTPVAANQAKQGSLINSLKPSGPTPASGQLSSGDKASGTAKIETAVTSTPSASGQFSKPFSFSPSGTGFNFGIITPTPSSNFTAAQGATPSTKESSQPDAFSSGGGSKPSYEAIPESSPPSGITSASNTTPGEPAASSSRPVAPSGTALSTTSSKLETPPSKLGELLFPSSLAGETLGSFSGLRVGQADDSTKPTNKASSTSLTSTQPTKTSGVPSGFNFTAPPVLGKHTEPPVTSSATTTSVAPPAATSTSSTAVFGSLPVTSAGSSGVISFGGTSLSAGKTSFSFGSQQTNSTVPPSAPPPTTAATPLPTSFPTLSFGSLLSSATTPSLPMSAGRSTEEATSSALPEKPGDSEVSASAASLLEEQQSAQLPQAPPQTSDSVKKEPVLAQPAVSNSGTAASSTSLVALSAEATPATTGVPDARTEAVPPASSFSVPGQTAVTAAAISSAGPVAVETSSTPIASSTTSIVAPGPSAEAAAFGTVTSGSSVFAQPPAASSSSAFNQLTNNTATAPSATPVFGQVAASTAPSLFGQQTGSTASTAAATPQVSSSGFSSPAFGTTAPGVFGQTTFGQASVFGQSASSAASVFSFSQPGFSSVPAFGQPASSTPTSTSGSVFGAASSTSSSSSFSFGQSSPNTGGGLFGQSNAPAFGQSPGFGQGGSVFGGTSAATTTAATSGFSFCQASGFGSSNTGSVFGQAASTGGIVFGQQSSSSSGSVFGSGNTGRGGGFFSGLGGKPSQDAANKNPFSSASGGFGSTATSNTSNLFGNSGAKTFGGFASSSFGEQKPTGTFSSGGGSVASQGFGFSSPNKTGGFGAAPVFGSPPTFGGSPGFGGVPAFGSAPAFTSPLGSTGGKVFGEGTAAASAGGFGFGSSSNTTSFGTLASQNAPTFGSLSQQTSGFGTQSSGFSGFGSGTGGFSFGSNNSSVQGFGGWRS

SEQ ID NO: 9690 - protein, 52 aa, Homo Sapiens
MKFPIHHLALSCDNLTLSACMMSSEYGSIIAFFDVRTFSNEAKQQKRPFAYH

SEQ ID NO: 9691 - protein, 1519 aa, Homo Sapiens
MKPSFPPSTSAVKVNLSEKFTAAATSTPVSSSQSAPPMSPFSSASKPAASGPLSHPTPLSAPPSSVPLKSSVLPSPSGRSAQGSSSPVPSMVQKSPRITPPAAKPGSPQAKSLQPAVAEKQGHQWKDSDPVMAGIGEEIAHFQKELEELKARTSKACFQVGTSEEMKMLRTESDDLHTFLLEIKETTESLHGDISSLKTTLLEGFAGVEEAREQNERNRDSGYLHLLYKRPLDPKSEAQLQEIRRLHQYVKFAVQDVNDVLDLEWDQHLEQKKKQRHLLVPERETLFNTLANNREIINQQRKRLNHLVDSLQQLRLYKQTSLWSLSSAVPSQSSIHSFDSDLESLCNALLKTTIESHTKSLPKVPAKLSPMKQAQLRNFLAKRKTPPVRSTAPASLSRSAFLSQRYYEDLDEVSSTSSVSQSLESEDARTSCKDDEAVVQAPRHAPVVRTPSIQPSLLPHAAPFAKSHLVHGSSPGVMGTSVATSASKIIPQGADSTMLATKTVKHGAPSPSHPISAPQAAAAAALRRQMASQAPAVNTLTESTLKNVPQVVNVQELKNNPATPSTAMGSSVPYSTAKTPHPVLTPVAANQAKQGSLINSLKPSGPTPASGQLSSGDKASGTAKIETAVTSTPSASGQFSKPFSFSPSGTGFNFGIITPTPSSNFTAAQGATPSTKESSQPDAFSSGGGSKPSYEAIPESSPPSGITSASNTTPGEPAASSSRPVAPSGTALSTTSSKLETPPSKLGELLFPSSLAGETLGSFSGLRVGQADDSTKPTNKASSTSLTSTQPTKTSGVPSGFNFTAPPVLGKHTEPPVTSSATTTSVAPPAATSTSSTAVFGSLPVTSAGSSGVISFGGTSLSAGKTSFSFGSQQTNSTVPPSAPPPTTAATPLPTSFPTLSFGSLLSSATTPSLPMSAGRSTEEATSSALPEKPGDSEVSASAASLLEEQQSAQLPQAPPQTSDSVKKEPVLAQPAVSNSGTAASSTSLVALSAEATPATTGVPDARTEAVPPASSFSVPGQTAVTAAAISSAGPVAVETSSTPIASSTTSIVAPGPSAEAAAFGTVTSGSSVFAQPPAASSSSAFNQLTNNTATAPSATPVFGQVAASTAPSLFGQQTGSTASTAAATPQVSSSGFSSPAFGTTAPGVFGQTTFGQASVFGQSASSAASVFSFSQPGFSSVPAFGQPASSTPTSTSGSVFGAASSTSSSSSFSFGQSSPNTGGGLFGQSNAPAFGQSPGFGQGGSVFGGTSAATTTAATSGFSFCQASGFGSSNTGSVFGQAASTGGIVFGQQSSSSSGSVFGSGNTGRGGGFFSGLGGKPSQDAANKNPFSSASGGFGSTATSNTSNLFGNSGAKTFGGFASSSFGEQKPTGTFSSGGGSVASQGFGFSSPNKTGGFGAAPVFGSPPTFGGSPGFGGVPAFGSAPAFTSPLGSTGGKVFGEGTAAASAGGFGFGSSSNTTSFGTLASQNAPTFGSLSQQTSGFGTQSSGFSGFGSGTGGFSFGSNNSSVQGFGGWRS

SEQ ID NO: 9692 - protein, 495 aa, Homo Sapiens
MKSSLLLRGVHFCFHLPGATPSTKESSQPDAFSSGGGSKPSYEAIPESSPPSGITSASNTTPGEPAASSSRPVAPSGTALSTTSSKLETPPSKLGELLFPSSLAGETLGSFSGLRVGQADDSTKPTNKASSTSLTSTQPTKTSGVPSGFNFTAPPVLGKHTEPPVTSSATTTSVAPPAATSTSSTAVFGSLPVTSAGSSGVISFGGTSLSAGKTSFSFGSQQTNSTVPPSAPPPTTAATPLPTSFPTLSFGSLLSSATTPSLPMSAGRSTEEATSSALPEKPGDSEVSASAASLLEEQQSAQLPQAPPQTSDSVKKEPVLAQPAVSNSGTAASSTSLVALSAEATPATTGVPDARTEAVPPASSFSVPGQTAVTAAAISSAGPVAVETSSTPIASSTTSIVAPGPSAEAAAFGTVTSGSSVFAQPPAASSSSAFNQLTNNTATAPSATPVFGQVAASTAPSLFGQQTGSTASTAAATPQVSSSGFSSPAFGTTAP

SEQ ID NO: 9693 - protein, 916 aa, Homo Sapiens
MKSSLLLRGVHFCFHLPGTAKIETAVTSTPSASGQFSKPFSFSPSGTGFNFGIITPTPSSNFTAAQGATPSTKESSQPDAFSSGGGSKPSYEAIPESSPPSGITSASNTTPGEPAASSSRPVAPSGTALSTTSSKLETPPSKLGELLFPSSLAGETLGSFSGLRVGQADDSTKPTNKASSTSLTSTQPTKTSGVPSGFNFTAPPVLGKHTEPPVTSSATTTSVAPPAATSTSSTAVFGSLPVTSAGSSGVISFGGTSLSAGKTSFSFGSQQTNSTVPPSAPPPTTAATPLPTSFPTLSFGSLLSSATTPSLPMSAGRSTEEATSSALPEKPGDSEVSASAASLLEEQQSAQLPQAPPQTSDSVKKEPVLAQPAVSNSGTAASSTSLVALSAEATPATTGVPDARTEAVPPASSFSVPGQTAVTAAAISSAGPVAVETSSTPIASSTTSIVAPGPSAEAAAFGTVTSGSSVFAQPPAASSSSAFNQLTNNTATAPSATPVFGQVAASTAPSLFGQQTGSTASTAAATPQVSSSGFSSPAFGTTAPGVFGQTTFGQASVFGQSASSAASVFSFSQPGFSSVPAFGQPASSTPTSTSGSVFGAASSTSSSSSFSFGQSSPNTGGGLFGQSNAPAFGQSPGFGQGGSVFGGTSAATTTAATSGFSFCQASGFGSSNTGSVFGQAASTGGIVFGQQSSSSSGSVFGSGNTGRGGGFFSGLGGKPSQDAANKNPFSSASGGFGSTATSNTSNLFGNSGAKTFGGFASSSFGEQKPTGTFSSGGGSVASQGFGFSSPNKTGGFGAAPVFGSPPTFGGSPGFGGVPAFGSAPAFTSPLGSTGGKVFGEGTAAASAGGFGFGSSSNTTSFGTLASQNAPTFGSLSQQTSGFGTQSSGFSGFGSGTGGFSFGSNNSSVQGFGGWRS

SEQ ID NO: 9694 - protein, 187 aa, Homo Sapiens
  misc_feature (1)..(1): Xaa can be any naturally occurring amino acid
XARQSDQINWESWLLEDSSRAELPVTDKSDDSLPMGVVVDYTNQVEITISDEKTLPPAPVLMLLSTDGVLCPFYMINQNPGVKSLIKTPERLSLEGERQPKSPASLAPTPAASPVAPSAASFSFGSSGFKPTLESTPVPSVSAPNIAMKPSFPPSTSAVKVNLSEKFTAAATSTPVSSSQSAPPMSP

SEQ ID NO: 9695 - protein, 145 aa, Homo Sapiens
  misc_feature (1)..(1): Xaa can be any naturally occurring amino acid
XGVPAFGSAPAFTSPLGSTGGKVFGEGTAAASAGGFGFGSSSNTTSFGTLASQNAPTFGSLSQQTSGFGTQSSGFSGFGSGTGGLSRVLVAGEAEGVSAGLSIPGTNRILSFFPEKCWSRLFRPTLPSKHIHPERNNRNQNSQGA

SEQ ID NO: 9696 - protein, 967 aa, Homo Sapiens
  misc_feature (1)..(1): Xaa can be any naturally occurring amino acid
XKTPHPVLTPVAANQAKQGSLINSLKPSGPTPASGQLSSGDKASGTAKIETAVTSTPSASGQFSKPFSFSPSGTGFNFGIITPTPSSNFTAAQGATPSTKESSQPDAFSSGGGSKPSYEAIPESSPPSGITSASNTTPGEPAASSSRPVAPSGTALSTTSSKLETPPSKLGELLFPSSLAGETLGSFSGLRVGQADDSTKPTNKASSTSLTSTQPTKTSGVPSGFNFTAPPVLGKHTEPPVTSSATTTSVAPPAATSTSSTAVFGSLPVTSAGSSGVISFGGTSLSAGKTSFSFGSQQTNSTVPPSAPPPTTAATPLPTSFPTLSFGSLLSSATTPSLPMSAGRSTEEATSSALPEKPGDSEVSASAASLLEEQQSAQLPQAPPQTSDSVKKEPVLAQPAVSNSGTAASSTSLVALSAEATPATTGVPDARTEAVPPASSFSVPGQTAVTAAAISSAGPVAVETSSTPIASSTTSIVAPGPSAEAAAFGTVTSGSSVFAQPPAASSSSAFNQLTNNTATAPSATPVFGQVAASTAPSLFGQQTGSTASTAAATPQVSSSGFSSPAFGTTAPGVFGQTTFGQASVFGQSASSAASVFSFSQPGFSSVPAFGQPASSTPTSTSGSVFGAASSTSSSSSFSFGQSSPNTGGGLFGQSNAPAFGQSPGFGQGGSVFGGTSAATTTAATSGFSFCQASGFGSSNTGSVFGQAASTGGIVFGQQSSSSSGSVFGSGNTGRGGGFFSGLGGKPSQDAANKNPFSSASGGFGSTATSNTSNLFGNSGAKTFGGFASSSFGEQKPTGTFSSGGGSVASQGFGFSSPNKTGGFGAAPVFGSPPTFGGSPGFGGVPAFGSAPAFTSPLGSTGGKVFGEGTAAASAGGFGSLAMSLSPTLKGRLLLMRPKAGGGREQAAPGRKSNESRSLGHLCMERALTSPLKVWEQQQHHILRHARESECPHFRITVPTDFWFWDPE

SEQ ID NO: 9697 - protein, 114 aa, Homo Sapiens
AMMLSDRLTFLGKYREFHRMYGEKRFADAASLLLSLMTSRIAPRSFWMTLLTDALPLLEQKQVIFSAEQTYELMRCLEDLTSRRPVHGESDTEQLQYGPLVLLSFTSIICWKLL

SEQ ID NO: 9698 - protein, 191 aa, Homo Sapiens
LDWVRLHVCEVDSLSADVLGSENPSKHDSFWNLGRLDEARQMLSKEADASPASAGICRIMGDLMRTMPILSPGNTQTLTELELKWQHWHEECERYLQDSTFATSPHLESLLKIMLGDEAALLEQKELLSNWYHFLVTRLLYSNPTVKPIDLHYYAQSSLDLFLGGESSPEPLDNILLAAFEFDIHQVIKEC

SEQ ID NO: 9699 - protein, 19 aa, Homo Sapiens
LLAAFEFDIHQVIKECSFL

SEQ ID NO: 9700 - protein, 18 aa, Homo Sapiens
LTDALPLLEQKQQNRLMS

SEQ ID NO: 9701 - protein, 611 aa, Homo Sapiens
MEELDGEPTVTLIPGVNSKKNQMYFDWGPGEMLVCETSFNKKEKSEMVPSCPFIYIIRKDVDVYSQILRKLFNESHGIFLGLQRIDEELTGKSRKSQLVRVSKNYRSVIRACMEEMHQVAIAAKDPANGRQFSSQVSILSAMELIWNLCEILFIEVAPAGPLLLHLLDWVRLHVCEVDSLSADVLGSENPSKHDSFWNLPGNTQTLTELELKWQHWHEECERYLQDSTFATSPHLESLLKIMLGDEAALLEQKELLSNWYHFLVTRLLYSNPTVKPIDLHYYAQSSLDLFLGGESSPEPLDNILLAAFEFDIHQVIKECSIALSNWWFVAHLTDLLDHCKLLQSHNLYFGSNMREFLLLEYASGLFAHPSLWQLGVDYFDYCPELGRVSLELHIERIPLNTEQKALKVLRICEQRQMTEQVRSICKILAMKAVRNNRLGSALSWSIRAKDAAFATLVSDRFLRDYCERGCFSDLDLIDNLGPAMMLSDRLTFLGKYREFHRMYGEKRFADAASLLLSLMTSRIAPRSFWMTLLTDALPLLEQKQVIFSAEQTYELMRCLEDLTSRRPVHGESDTEQLQDDDIETTKVEMLRLSLARNLARAIIREGSLEGS

SEQ ID NO: 9702 - protein, 656 aa, Homo Sapiens
MEELDGEPTVTLIPGVNSKKNQMYFDWGPGEMLVCETSFNKKEKSEMVPSCPFIYIIRKDVDVYSQILRKLFNESHGIFLGLQRIDEELTGKSRKSQLVRVSKNYRSVIRACMEEMHQVAIAAKDPANGRQFSSQVSILSAMELIWNLCEILFIEVAPAGPLLLHLLDWVRLHVCEVDSLSADVLGSENPSKHDSFWNLVTILVLQGRLDEARQMLSKEADASPASAGICRIMGDLMRTMPILSPGNTQTLTELELKWQHWHEECERYLQDSTFATSPHLESLLKIMLGDEAALLEQKELLSNWYHFLVTRLLYSNPTVKPIDLHYYAQSSLDLFLGGESSPEPLDNILLAAFEFDIHQVIKECSIALSNWWFVAHLTDLLDHCKLLQSHNLYFGSNMREFLLLEYASGLFAHPSLWQLGVDYFDYCPELGRVSLELHIERIPLNTEQKALKVLRICEQRQMTEQVRSICKILAMKAVRNNRLGSALSWSIRAKDAAFATLVSDRFLRDYCERGCFSDLDLIDNLGPAMMLSDRLTFLGKYREFHRMYGEKRFADAASLLLSLMTSRIAPRSFWMTLLTDALPLLEQKQVIFSAEQTYELMRCLEDLTSRRPVHGESDTEQLQDDDIETTKVEMLRLSLARNLARAIIREGSLEGS

SEQ ID NO: 9703 - protein, 169 aa, Homo Sapiens
MEELDGEPTVTLIPGVNSKKNQMYFDWGPGEMLVCETSFNKKEKSEMVPSCPFIYIIRKDVDVYSQILRKLFNESHGIFLGLQRIDEELTGKSRKSQLVRVSKNYRSVIRACMEEMHQVAIAAKDPANGRQFSSQVSILSAMELIWNLCEILFIEVAPGDHLGAAGPAG

SEQ ID NO: 9704 - protein, 544 aa, Homo Sapiens
MEEMHQVAIAAKDPANGRQFSSQVSILSAMELIWNLCEILFIEVAPAGPLLLHLLDWVRLHVCEVDSLSADVLGSENPSKHDSFWNLVTILVLQGRLDEARQMLSKEADASPASAGICRIMGDLMRTMPILSPGNTQTLTELELKWQHWHEECERYLQDSTFATSPHLESLLKIMLGDEAALLEQKELLSNWYHFLVTRLLYSNPTVKPIDLHYYAQSSLDLFLGGESSPEPLDNILLAAFEFDIHQVIKECSIALSNWWFVAHLTDLLDHCKLLQSHNLYFGSNMREFLLLEYASGLFAHPSLWQLGVDYFDYCPELGRVSLELHIERIPLNTEQKALKVLRICEQRQMTEQVRSICKILAMKAVRNNRLGSALSWSIRAKDAAFATLVSDRFLRDYCERGCFSDLDLIDNLGPAMMLSDRLTFLGKYREFHRMYGEKRFADAASLLLSLMTSRIAPRSFWMTLLTDALPLLEQKQVIFSAEQTYELMRCLEDLTSRRPVHGESDTEQLQDDDIETTKVEMLRLSLARNLARAIIREGSLEGS

SEQ ID NO: 9705 - protein, 259 aa, Homo Sapiens
MREFLLLEYASGLFAHPSLWQLGVDYFDYCPELGRVSLELHIERIPLNTEQKALKVLRICEQRQMTEQVRSICKILAMKAVRNNRLGSALSWSIRAKDAAFATLVSDRFLRDYCERGCFSDLDLIDNLGPAMMLSDRLTFLGKYREFHRMYGEKRFADAASLLLSLMTSRIAPRSFWMTLLTDALPLLEQKQVIFSAEQTYELMRCLEDLTSRRPVHGESDTEQLQDDDIETTKVEMLRLSLARNLARAIIREGSLEGS

SEQ ID NO: 9706 - protein, 120 aa, Homo Sapiens
MYFDWGPGEMLVCETSFNKKEKSEMVPSCPFIYIIRKDVDVYSQILRKLFNESHGIFLGLQRIDEELTGKSRKSQLVRVSKNYRSVIRACMEEMHQVAIAAKDPANGRQFSSQVSILSAM

SEQ ID NO: 9707 - protein, 272 aa, Homo Sapiens
VTILVLQGRLDEARQMLSKEADASPASAGICRIMGDLMRTMPILSPGNTQTLTELELKWQHWHEECERYLQDSTFATSPHLESLLKIMLGDEAALLEQKELLSNWYHFLVTRLLYSNPTVKPIDLHYYAQSSLDLFLGGESSPEPLDNILLAAFEFDIHQVIKECSFGSNMREFLLLEYASGLFAHPSLWQLGVDYFDYCPELGRVSLELHIERIPLNTEQKALKVLRICEQRQMTEQVRSICKILAMKAVRNNRLGSALSWSIRAKDAAFA

SEQ ID NO: 9708 - protein, 46 aa, Homo Sapiens
  misc_feature (1)..(1): Xaa can be any naturally occurring amino acid
XEKRFADAASLLLSLMTSRIAPRSFWMTLLTDALPLLEQKQNRLMS

SEQ ID NO: 9709 - protein, 302 aa, Homo Sapiens
  misc_feature (1)..(1): Xaa can be any naturally occurring amino acid
XHEECERYLQDSTFATSPHLESLLKSSLDLFLGGESSPEPLDNILLAAFEFDIHQVIKECSIALSNWWFVAHLTDLLDHCKLLQSHNLYFGSNMREFLLLEYASGLFAHPSLWQLGVDYFDYCPELGRVSLELHIERIPLNTEQKALKVLRICEQRQMTEQVRSICKILAMKAVRNNRLGSALSWSIRAKDAAFATLVSDRFLRDYCERGCFSDLDLIDNLGPAMMLSDRLTFLGKYREFHRMYGEKRFADAASLLLSLMTSRIAPRSFWMTLLTDALPLLEQKQVIFSAEQTYELMRCLED

SEQ ID NO: 9710 - protein, 100 aa, Homo Sapiens
  misc_feature (1)..(1): Xaa can be any naturally occurring amino acid
XLFIEVAPAGPLLLHLLDWVRLHVCEVDSLSADVLGSENPSKHDSFWNLIMLGDEAALLEQKELLSNWYHFLVTRLLYSNPTVKPIDLHYYAQPGPVSGR

SEQ ID NO: 9711 - protein, 98 aa, Homo Sapiens
  misc_feature (1)..(1): Xaa can be any naturally occurring amino acid
XSLMTSRIAPRSFWMTLLTDALPLLEQKQVKVIFSAEQTYELMRCLEDLTSRRPVHGESDTEQLQDDDIETTKVEMLRLSLARNLARAIIREGSLEGS

SEQ ID NO: 9712 - protein, 89 aa, Homo Sapiens
MPVNSSGPDWVTVIPRRIKETNSLELSQGSGTFPSGYYYKDQWRPRKFKMRQFNDPTTLQSAYKEKWCIYLVTQQSGNGLNTLLHLFQI

SEQ ID NO: 9713 - protein, 53 aa, Homo Sapiens
MWTNFFKLRLFCCLLAVLMVVVLVINVTQVEYLDHETVSATFIDSSGQFVSSQ

SEQ ID NO: 9714 - protein, 559 aa, Homo Sapiens
MWTNFFKLRLFCCLLAVLMVVVLVINVTQVEYLDHETVSATFIDSSGQFVSSQVTGISRNPYCGYDQQTLSSQERMEEDSLLAALHRQVPDVGPVPFVKSTDPSSSYFVILNSAAFFKVGSQLEVLVHVQDFQRKPKKYGGDYLQARIHSLKLQAGAVGRVVDYQNGFYKVFFTLLWPGKVKVSVSLVHPSEGIRVLQRLQEDKPDRVYFKSLFRSGRISETTECNVCLPGNLPLCNFTDLYTGEPWFCFKPKKLPCSSRITHFKGGYLKGLLTAAESAFFQSGVNIKMPVNSSGPDWVTVIPRRIKETNSLELSQGSGTFPSGYYYKDQWRPRKFKMRQFNDPDNITECLQRKVVHLFGDSTIRQWFEYLTTFVPDLVEFNLGSPKNVGPFLAVDQKHNILLKYRCHGPPIRFTTVFSNELHYVANELNGIVGGKNTVVAIAVWSHFSTFPLEVYIRRLRNIRRAVVRLLDRSPKTVVVIRTANAQELGPEVSLFNSDWYNFQLDTILRRMFSGVGVYLVDAWEMTLAHYLPHKLHPDEVIVKNQLDMFLSFVCPLET

SEQ ID NO: 9715 - protein, 559 aa, Homo Sapiens; identical to SEQ ID NO: 9714

SEQ ID NO: 9716 - protein, 559 aa, Homo Sapiens; identical to SEQ ID NO: 9714

SEQ ID NO: 9717 - protein, 260 aa, Homo Sapiens
MEKFNTISVSKCNKETVAMKEKCKFGMTSTIPSGHVWRNTWNPVSCSLATVKMKECLRGKLIYLMGDSTIRQWMEYFKASINTLKSVDLHESGKLQHQLAVDLDRNINIQWQKYCYPLIGSMTYSVKEMEYLTRAIDRTGGEKNTVIVISLGQHFRPFPIDVFIRRALNVHKAIQHLLLRSPDTMVIIKTENIREMYNDAERFSDFHGYIQYLIIKDIFQDLSVSIIDAWDITIAYGTNNVHPPQHVVGNQINILLNYIC

SEQ ID NO: 9718 - protein, 544 aa, Homo Sapiens
MKISMINYKSLLALLFILASWIIFTVFQNSTKVWSALNLSISLHYWNNSTKSLFPKTPLISLKPLTETELRIKEIIEKLDQQIPPRPFTHVNTTTSATHSTATILNPRDTYCRGDQLHILLEVRDHLGRRKQYGGDFLRARMSSPALMAGASGKVTDFNNGTYLVSFTLFWEGQVSLSLLLIHPSEGVSALWSARNQGYDRVIFTGQFVNGTSQVHSECGLILNTNAELCQYLDNRDQEGFYCVRPQHMPCAALTHMYSKNKKVSYLSKQEKSLFERSNVGVEIMEKFNTISVSKCNKETVAMKEKCKFGMTSTIPSGHVWRNTWNPVSCSLATVKMKECLRGKLIYLMGDSTIRQWMEYFKASINTLKSVDLHESGKLQHQLAVDLDRNINIQWQKYCYPLIGSMTYSVKEMEYLTRAIDRTGGEKNTVIVISLGQHFRPFPIDVFIRRALNVHKAIQHLLLRSPDTMVIIKTENIREMYNDAERFSDFHGYIQYLIIKDIFQDLSVSIIDAWDITIAYGTNNVHPPQHVVGNQINILLNYIC

SEQ ID NO: 9719 - protein, 139 aa, Homo Sapiens
MQAACWYVLFLLQPTVYLVTCANLTNGGKSELLKSGSSKSTLKHIWTESSKDLSISRLLSQTFRGKENDTDLDLRYDTPEPYSEQDLWDWLRNSTDLQEPRPRAKRRPIVKTGKFKKMFGWGDFHSNIKTVKLNLLITG

SEQ ID NO: 9720 - protein, 143 aa, Homo Sapiens
MQAACWYVLFLLQPTVYLVTCANLTNGGKSELLKSGSSKSTLKHIWTESSKDLSISRLLSQTFRGKENDTDLDLRYDTPEPYSEQDLWDWLRNSTDLQEPRPRAKRRPIVKTGKFKKMFGWGDFHSNIKTVKLNLLITGKIVD

SEQ ID NO: 9721 - protein, 271 aa, Homo Sapiens
MQAACWYVLFLLQPTVYLVTCANLTNGGKSELLKSGSSKSTLKHIWTESSKDLSISRLLSQTFRGKENDTDLDLRYDTPEPYSEQDLWDWLRNSTDLQEPRPRAKRRPIVKTGKFKKMFGWGDFHSNIKTVKLNLLITGKIVDHGNGTFSVYFRHNSTGQGNVSVSLVPPTKIVEFDLAQQTVIDAKDSKSFNCRIEYEKVDKATKNTLCNYDPSKTCYQEQTQSHVSWLCSKPFKVICIYISFYSTDYKLVQKVCPDYNYHSDTPYFPSG

SEQ ID NO: 9722 - protein, 253 aa, Homo Sapiens
VTCANLTNGGKSELLKSGSSKSTLKHIWTESSKDLSISRLLSQTFRGKENDTDLDLRYDTPEPYSEQDLWDWLRNSTDLQEPRPRAKRRPIVKTGKFKKMFGWGDFHSNIKTVKLNLLITGKIVDHGNGTFSVYFRHNSTGQGNVSVSLVPPTKIVEFDLAQQTVIDAKDSKSFNCRIEYEKVDKATKNTLCNYDPSKTCYQEQTQSHVSWLCSKPFKVICIYISFYSTDYKLVQKVCPDYNYHSDTPYFPSG

SEQ ID NO: 9723 - protein, 264 aa, Homo Sapiens
MRLRPLPLVVVPGLLQLLFCDSKEVVHATEGLDWEDKDAPGTLVGNVVHSRIISPLRLFVKQSPVPKPGPMAYADSMENFWDWLANITEIQEPLARTKRRPIVKTGKFKKMFGWGDFHSNIKTVKLNLLITGKIVDHGNGTFSVYFRHNSTGLGNVSVSLVPPSKVVEFEVSPQSTLETKESKSFNCRIEYEKTDRAKKTALCNFDPSKICYQEQTQSHVSWLCSKPFKVICIYIAFYSVDYKLVQKVCPDYNYHSETPYLSSG

SEQ ID NO: 9724 - protein, 354 aa, Homo Sapiens
MQLTRCCFVFLVQGSLYLVICGQDDGPPGSEDPERDDHEGQPRPRVPRKRGHISPKSRPMANSTLLGLLAPPGEAWGILGQPPNRPNHSPPPSAKVKKIFGWGDFYSNIKTVALNLLVTGKIVDHGNGTFSVHFQHNATGQGNISISLVPPSKAVEFHQEQQIFIEAKASKIFNCRMEWEKVERGRRTSLCTHDPAKICSRDHAQSSATWSCSQPFKVVCVYIAFYSTDYRLVQKGPSLLSGDVRHTPLLQTTLRSPPWRLETAGTGAAHQWTPTVCRSASHSAVETAGRRRKQWGQRPWAPSPPPLAELSAGTGGTLTPLLLLSSCGEPDAGDSWRARPSWHTVLPAPGMDSF

SEQ ID NO: 9725 - protein, 252 aa, Homo Sapiens
MQLTRCCFVFLVQGSLYLVICGQDDGPPGSEDPERDDHEGQPRPRVPRKRGHISPKSRPMANSTLLGLLAPPGEAWGILGQPPNRPNHSPPPSAKVKKIFGWGDFYSNIKTVALNLLVTGKIVDHGNGTFSVHFQHNATGQGNISISLVPPSKAVEFHQEQQIFIEAKASKIFNCRMEWEKVERGRRTSLCTHDPAKICSRDHAQSSATWSCSQPFKVVCVYIAFYSTDYRLVQKVCPDYNYHSDTPYYPSG

SEQ ID NO: 9726 - protein, 308 aa, Homo Sapiens
MRLLPEWFLLLFGPWLLRKAVSAQIPESGRPQYLGLRPAAAGAGAPGQQLPEPRSSDGLGVGRAWSWAWPTNHTGALARAGAAGALPAQRTKRKPSIKAARAKKIFGWGDFYFRVHTLKFSLLVTGKIVDHVNGTFSVYFRHNSSSLGNLSVSIVPPSKRVEFGGVWLPGPVPHPLQSTLALEGVLPGLGPPLGMAAAAAGPGLGGSLGGALAGPLGGALGVPGAKESRAFNCHVEYEKTNRARKHRPCLYDPSQVCFTEHTQSQAAWLCAKPFKVICIFVSFLSFDYKLVQKVCPDYNFQSEHPYFG

SEQ ID NO: 9727 - protein, 36 aa, Homo Sapiens
MRLLPEWFLLLFGPWLLRKPRPGLSLPPARSWEHPA

SEQ ID NO: 9728 - protein, 481 aa, Homo Sapiens
MKGRGMLVLLLHAVVLGLPSAWAVGACARACPAACACSTVERGCSVRCDRAGLLRVPAELPCEAVSIDLDRNGLRFLGERAFGTLPSLRRLSLRHNNLSFITPGAFKGLPRLAELRLAHNGDLRYLHARTFAALSRLRRLDLAACRLFSVPERLLAELPALRELAAFDNLFRRVPGALRGLANLTHAHLERGRIEAVASSSLQGLRRLRSLSLQANRVRAVHAGAFGDCGVLEHLLLNDNLLAELPADAFRGLRRLRTLNLGGNALDRVARAWFADLAELELLYLDRNSIAFVEEGAFQNLSGLLALHLNGNRLTVLAWVAFQPGFFLGRLFLFRNPWCCDCRLEWLRDWMEGSGRVTDVPCASPGSVAGLDLSQVTFGRSSDGLCVDPEELNLTTSSPGPSPEPAATTVSRFSSLLSKLLAPRVPVEEAANTTGGLANASLSDSLSSRGVGGAGRQPWFLLASCLLPSVAQHVVFGLQMD

SEQ ID NO: 9729 - protein, 481 aa, Homo Sapiens; identical to SEQ ID NO: 9728

SEQ ID NO: 9730 - protein, 157 aa, Homo Sapiens
MAKLRQKNPRAVRQAEEVRGLEHLHMDVAVNFSQGALLSPHLHNVCAEAVDAIYTRQEDVRFWLEQGVDSSVFEALPKASEQAELPRCRQVGDHGKPCVCRYGLSLAWYPCMLKYCHSRDRPTPYKCGIRSCQKSYSFDFYVPQRQLCLWDEDPYPG

SEQ ID NO: 9731 - protein, 273 aa, Homo Sapiens
MRLPGVPLARPALLLLLPLLAPLLGTGAPAELRVRVRLPDGQVTEESLQADSDADSISLELRKPDGTLVSFTADFKKDVKVFRALILGELEKGQSQFQALCFVTQLQHNEIIPSEAMAKLRQKNPRAVRQAEEVRGLEHLHMDVAVNFSQGALLSPHLHNVCAEAVDAIYTRQEDVRFWLEQGVDSSVFEALPKASEQAELPRCRQVGDHGKPCVCRYGLSLAWYPCMLKYCHSRDRPTPYKCGIRSCQKSYSFDFYVPQRQLCLWDEDPYPG

SEQ ID NO: 9732 - protein, 85 aa, Homo Sapiens
MKTLFLGVTLGLAAALSFTLEEEDEGGSVHPEENPDAEDGGAWQIQRLWGQEAHIPAGAARDGRLRLLLQRPAPWGPALHGKACG

SEQ ID NO: 9733 - protein, 147 aa, Homo Sapiens
MKTLFLGVTLGLAAALSFTLEEEDEGGSVHPEENPDAEDGGAWQIQRLWGQEAHIPAGAARDGRLRLLLQRPAPWGPALHGKACGICSLQGRAAVPTLAHLATSPAGRNPNTNLEALEEFKKLVQHKGLSEEDIFMPLQTGSCVLEH

SEQ ID NO: 9734 - protein, 228 aa, Homo Sapiens
MKTLFLGVTLGLAAALSFTLEEEDITGTWYVKAMVVDKDFPEDRRPRKVSPVKVTALGGGNLEATFTFMREDRCIQKKILMRKTEEPGKFSAYGGRKLIYLQELPGTDDYVFYCKDQRRGGLRYMGKLVASAPCRAVPLSPPWLTWPPHLQVGILIPTWRPWKNLRNWCSTRDSRRRTFSCPCRREAAFSNTRQPPGLHLQSPPYHQTQSPDHLDLPSSHDPSLLPPT

SEQ ID NO: 9735 - protein, 220 aa, Homo Sapiens
MKTLFLGVTLGLAAALSFTLEEEDITGTWYVKAMVVDKDFPEDRRPRKVSPVKVTALGGGNLEATFTFMREDRCIQKKILMRKTEEPGKFSAYGGRKLIYLQELPGTDDYVFYCKDQRRGGLRYMGKLVASAPCRAVPLSPPWLTWPPHLQVGILIPTWRPWKNLRNWCSTRDSRRRTFSCPCRREAAFSNTRVTPGSAPPEPTLPPDTEPGPPGPTLQP

SEQ ID NO: 9736 - protein, 146 aa, Homo Sapiens
MKTLFLGVTLGLAAALSFTLEEEDITGTWYVKAMVVDKDFPEDRRPRKVSPVKVTALGGGNLEATFTFMREDRCIQKKILMRKTEEPGKFSAYGGRKLIYLQELPGTDDYVFYCKDQRRGGLRYMGKLVGPCRCPHLGSPGHLTCR

SEQ ID NO: 9737 - protein, 170 aa, Homo Sapiens
MKTLFLGVTLGLAAALSFTLEEEDITGTWYVKAMVVDKDFPEDRRPRKVSPVKVTALGGGNLEATFTFMREDRCIQKKILMRKTEEPGKFSAYGGRKLIYLQELPGTDDYVFYCKDQRRGGLRYMGKLVGRNPNTNLEALEEFKKLVQHKGLSEEDIFMPLQTGSCVLEH

SEQ ID NO: 9738 - protein, 170 aa, Homo Sapiens; identical to SEQ ID NO: 9737

SEQ ID NO: 9739 - protein, 165 aa, Homo Sapiens
MKTLFLGVTLGLAAALSFTLEEEDITGTWYVKAMVVDKDFPEDRRPRKVSPVKVTALGGGKLEATFTFMREDRCIQKKILMRKTEEPGKYSACLSAVEMDQITPALWEALAIDTLRKLRIGTRRPRIRWGQEAHVPAGAAQEGPLHLLLQRPAPWGPAPHGKACG

SEQ ID NO: 9740 - protein, 220 aa, Homo Sapiens [sequence omitted]

SEQ ID NO: 9741 - protein, 170 aa, Homo Sapiens
MKTLFLGVTLGLAAALSFTLEEEDITGTWYVKAMVVDKDFPEDRRPRKVSPVKVTALGGGKLEATFTFMREDRCIQKKILMRKTEEPGKYSAYGGRKLMYLQELPRRDHYIFYCKDQHHGGLLHMGKLVGRNSDTNREALEEFKKLVQRKGLSEEDIFTPLQTGSCVPEH

SEQ ID NO: 9742 - protein, 170 aa, Homo Sapiens; identical to SEQ ID NO: 9741

SEQ ID NO: 9743 - protein, 477 aa, Homo Sapiens
MIAFLLTSVLMIPHAGGHPLDTPHLPQELPPGLPNNINITFFSGMFKNVESVAEIFDCLGPHFTWLQAVFTNFPVLIQFVNGMKCVAGLCPRDFEDYGCTCRFEMEGLPVDESDSCCFQHRRCYEEAAEMDCLQDPAKLSTEVNCVSKKIICESKDNCEHLLCTCDKAAIECLARSSLNSSLNLLDTSFCLAQTPETTIKEDLTTLLPRVVPVEPTDTSLTALSGEEAGHDQEGVGAARATSPPGSAEIVATRVTAKIVTLVPAGIKSLGLAVSSVENDPEETTEKACDRFTFLHLGSGDNMQVMPQLGEMLFCLTSRCPEEFESYGCYCGQEGRGEPRDDLDRCCLSHHCCLEQVRRLGCLLERLPWSPVVCVDHTPKCGGQSLCEKLLCACDQTAAECMTSASFNQSLKSPSRLGCPGQPAACEDSLHPVPAAPTLGSSSEEDSEEDPPQEDLGRAKRFLRKSLGPLGIGPLHGR

SEQ ID NO: 9744 - protein, 271 aa, Homo Sapiens
MIIVAFALIIFFAVKTRRKMDRYDKSNILWDKEHIYDEQPPNVEEWVKNVSAGTQDVPSPPSDYVERVDSPMAYSSNGKVNDKRFYPESSYKSTPVPEVVQELPLTSPVDDFRQPRYSSGGNFETPSKRAPAKGRAGRSKRTEQDHYETDYTTGGESCDELEEDWIREYPPITSDQQRQLYKRNFDTGLQEYKSLQSELDEINKELSRLDKELDDYREESEEYMAAADEYNRLKQVKGSADYKSKKNHCKQLKSKLSHIKKMVGDYDRQKT

SEQ ID NO: 9745 - protein, 522 aa, Homo Sapiens
MSSRPLESPPPYRPDEFKPNHYAPSNDIYGGEMHVRPMLSQPAYSFYPEDEILHFYKWTSPPGVIRILSMLIIVMCIAIFACVASTLAWDRGYGTSLLGGSVGYPYGGSGFGSYGSGYGYGYGYGYGYGGYTDPRAAKGFMLAMAAFCFIAALVIFVTSVIRSEMSRTRRYYLSVIIVSAILGIMVFIATIVYIMGVNPTAQSSGSLYGSQIYALCNQFYTPAATGLYVDQYLYHYCVVDPQEAIAIVLGFMIIVAFALIIFFAVKTRRKMDRYDKSNILWDKEHIYDEQPPNVEEWVKNVSAGTQDVPSPPSDYVERVDSPMAYSSNGKVNDKRFYPESSYKSTPVPEVVQELPLTSPVDDFRQPRYSSGGNFETPSKRAPAKGRAGRSKRTEQDHYETDYTTGGESCDELEEDWIREYPPITSDQQRQLYKRNFDTGLQEYKSLQSELDEINKELSRLDKELDDYREESEEYMAAADEYNRLKQVKGSADYKSKKNHCKQLKSKLSHIKKMVGDYDRQKT

SEQ ID NO: 9746 - protein, 522 aa, Homo Sapiens; identical to SEQ ID NO: 9745

SEQ ID NO: 9747 - protein, 216 aa, Homo Sapiens
GPLNSWIPPFSGILQQQQQAQIPGLSQFSLSALDQFAGLLPNQIPLTGEASFAQGAQAGQVDPLQLQTPPQTQPGPSHVMPYVFSFKMPQEQGQMFQYYPVYMVLPWEQPQQTVPRSPQQTRQQQYEEQAISGGQQQLAFDPQLGTAPEIAVMSTGEEIPYLQKEAINFRHDSAGVFMPSTSPKPSTTNVFTSAVDQTITPELPEEKDKTDSLREP

SEQ ID NO: 9748 - protein, 279 aa, Homo Sapiens
MKIIILLGFLGATLSAPLIPQRLMSASNSNELLLNLNNGQLLPLQLQGPLNSWIPPFSGILQQQQQAQIPGLSQFSLSALDQFAGLLPNQIPLTGEASFAQGAQAGQVDPLQLQTPPQTQPGPSHVMPYVFSFKMPQEQGQMFQYYPVYMVLPWEQPQQTVPRSPQQTRQQQYEEQIPFYAQFGYIPQLAEPAISGGQQQLAFDPQLGTAPEIAVMSTGEEIPYLQKEAINFRHDSAGVFMPSTSPKPSTTNVFTSAVDQTITPELPEEKDKTDSLREP

SEQ ID NO: 9749 - protein, 253 aa, Homo Sapiens
MKIIILLGFLGATLSAPLLLNLNNGQLLPLQLQGPLNSWIPPFSGILQQQQQAQIPGLSQFSLSALDQFAGLLPNQIPLTGEASFAQGAQAGQVDPLQLQTPPQTQPGPSHVMPYVFSFKMPQEQGQMFQYYPVYMVLPWEQPQQTVPRSPQQTRQQQYEEQIPFYAQFGYIPQLAEPAISGGQQQLAFDPQLGTAPEIAVMSTGEEIPYLQKEAINFRHDSAGVFMPSTSPKPSTTNVFTSAVDQTITPELP

SEQ ID NO: 9750 - protein, 30 aa, Homo Sapiens
QTPPQTQPGPSHVMPYVFSFKMPQEQGQNI

SEQ ID NO: 9751 - protein, 176 aa, Homo Sapiens
MARRHCFSYWLLVCWLVVTVAEALSTFYLQQHINLHMDKKRYLRLLEIHKIMRTLPTARSLHSPLHLPRGVRSQGPSPSQRHPGVPSIFFHEGPESILGFQTDLSSLQGVTTVFHSSHFIGHTVTLLIGISPEEDSREEAHLRKAEREEKPKHTEAKKSLSFRKKQQKDFCFIFRN

SEQ ID NO: 9752 - protein, 130 aa, Homo Sapiens
MARRHCFSYWLLVCWLVVTVAEGQEEVFTPPGDSQNNADATDCQIFTLTPPPAPRSPVTRAQPITKTPRCPFHFFPRRPRIHFRFPNRPFVPSRCNHRFPFQPFYWPHRYLTYRYFPRRRLQRGSSSEES

SEQ ID NO: 9753 - protein, 85 aa, Homo Sapiens
MARRHCFSYWLLVCWLVVTVAEGQEEVFTPPGDSQNNADATDCQIFTLTPPPAPRSPVTRAQPITKTPRYFPRRRLQRGSSSEES

SEQ ID NO: 9754 - protein, 40 aa, Homo Sapiens
MARRHCFSYWLLVCWLVVTVAEVETGFHHVSQDGLDLLTS

SEQ ID NO: 9755 - protein, 52 aa, Homo Sapiens
MPARALLPRRMGHRTLASTPALWASIPCPRSELRLDLVLPSGQSFRWLTASA

SEQ ID NO: 9756 - protein, 357 aa, Homo Sapiens
MPARALLPRRMGHRTLASTPALWASIPCPRSELRLDLVLPSGQSFRWREQSPAHWSGVLADQVWTLTQTEEQLHCTVYRGDKSQASRPTPDELEAVRKYFQLDVTLAQLYHHWGSVDSHFQEVAQKFQGVRLLRQDPIECLFSFICSSNNNIARITGMVERLCQAFGPRLIQLDDVTYHGFPSLQALAGPEVEAHLRKLGLGYRARYVSASARAILEEQGGLAWLQQLRESSYEEAHKALCILPGVGTKGLLGNAFDGHQLLRPLIFCQDHLREGPPIGRGDSQGEELEPQLPSSLSSIPYGFCDHCWTKDVDDPPLVTHPSPGSRDGHMTQAWPVKVVSPLATVIGHVMQASLLAL

SEQ ID NO: 9757 - protein, 424 aa, Homo Sapiens
MPARALLPRRMGHRTLASTPALWASIPCPRSELRLDLVLPSGQSFRWREQSPAHWSGVLADQVWTLTQTEEQLHCTVYRGDKSQASRPTPDELEAVRKYFQLDVTLAQLYHHWGSVDSHFQEVAQKFQGVRLLRQDPIECLFSFICSSNNNIARITGMVERLCQAFGPRLIQLDDVTYHGFPSLQALAGPEVEAHLRKLGLGYRARYVSASARAILEEQGGLAWLQQLRESSYEEAHKALCILPGVGTKVADCICLMALDKPQAVPVDVHMWHIAQRDYSWHPTTSQAKGPSPQTNKELGNFFRSLWGPYAGWAQAGLLGNAFDGHQLLRPLIFCQDHLREGPPIGRGDSQGEELEPQLPSSLSSIPYGFCDHCWTKDVDDPPLVTHPSPGSRDGHMTQAWPVKVVSPLATVIGHVMQASLLAL

SEQ ID NO: 9758 - protein, 410 aa, Homo Sapiens
MPARALLPRRMGHRTLASTPALWASIPCPRSELRLDLVLPSGQSFRWREQSPAHWSGVLADQVWTLTQTEEQLHCTVYRGDKSQASRPTPDELEAVRKYFQLDVTLAQLYHHWGSVDSHFQEVAQKFQGVRLLRQDPIECLFSFICSSNNNIARITGMVERLCQAFGPRLIQLDDVTYHGFPSLQALAGPEVEAHLRKLGLGYRARYVSASARAILEEQGGLAWLQQLRESSYEEAHKALCILPGVGTKVADCICLMALDKPQAVPVDVHMWHIAQRDYSWHPTTSQAKGPSPQTNKELGNFFRSLWGPYAGWAQATPPSYRCCSVPTCANPAMLRSHQQSAERVPKGRKARWGTLDKEIPQAPSPPFPTSLSPSPPSLMLGRGLPVTTSKARHPQIKQSVCTTRWGGGY

SEQ ID NO: 9759 - protein, 356 aa, Homo Sapiens
MPARALLPRRMGHRTLASTPALWASIPCPRSELRLDLVLPSGQSFRWREQSPAHWSGVLADQVWTLTQTEEQLHCTVYRGDKSQASRPTPDELEAVRKYFQLDVTLAQLYHHWGSVDSHFQEVAQKFQGVRLLRQDPIECLFSFICSSNNNIARITGMVERLCQAFGPRLIQLDDVTYHGFPSLQALAGPEVEAHLRKLGLGYRARYVSASARAILEEQGGLAWLQQLRESSYEEAHKALCILPGVGTKVADCICLMALDKPQAVPVDVHMWHIAQRDYSWHPTTSQAKGPSPQTNKELGNFFRSLWGPYAGWAQALCQVITTFMTFLGPHRLDQMPPEELQTSSSRLGGPPWQCI

SEQ ID NO: 9760 - protein, 324 aa, Homo Sapiens
MPARALLPRRMGHRTLASTPALWASIPCPRSELRLDLVLPSGQSFRWREQSPAHWSGVLADQVWTLTQTEEQLHCTVYRGDKSQASRPTPDELEAVRKYFQLDVTLAQLYHHWGSVDSHFQEVAQKFQGVRLLRQDPIECLFSFICSSNNNIARITGMVERLCQAFGPRLIQLDDVTYHGFPSLQALAGPEVEAHLRKLGLGYRARYVSASARAILEEQGGLAWLQQLRESSYEEAHKALCILPGVGTKVADCICLMALDKPQAVPVDVHMWHIAQRDYSWHPTTSQAKGPSPQTNKELGNFFRSLWGPYAGWAQAVSVPRCPP

SEQ ID NO: 9761 - protein, 345 aa, Homo Sapiens
MPARALLPRRMGHRTLASTPALWASIPCPRSELRLDLVLPSGQSFRWREQSPAHWSGVLADQVWTLTQTEEQLHCTVYRGDKSQASRPTPDELEAVRKYFQLDVTLAQLYHHWGSVDSHFQEVAQKFQGVRLLRQDPIECLFSFICSSNNNIARITGMVERLCQAFGPRLIQLDDVTYHGFPSLQALAGPEVEAHLRKLGLGYRARYVSASARAILEEQGGLAWLQQLRESSYEEAHKALCILPGVGTKVADCICLMALDKPQAVPVDVHMWHIAQRDYSWHPTTSQAKGPSPQTNKELGNFFRSLWGPYAGWAQAVLFSADLRQSRHAQEPPAKRRKGSKGPEG

SEQ ID NO: 9762 - protein, 322 aa, Homo Sapiens
MPARALLPRRMGHRTLASTPALWASIPCPRSELRLDLVLPSGQSFRWREQSPAHWSGVLADQVWTLTQTEEQLHCTVYRGDKSQASRPTPDELEAVRKYFQLDVTLAQLYHHWGSVDSHFQEVAQKFQGVRLLRQDPIECLFSFICSSNNNIARITGMVERLCQAFGPRLIQLDDVTYHGFPSLQALAGPEVEAHLRKLGLGYRARYVSASARAILEEQGGLAWLQQLRESSYEEAHKALCILPGVGTKVADCICLMALDKPQAVPVDVHMWHIAQRDYSWHPTTSQAKGPSPQTNKELGNFFRSLWGPYAGWAQAAGSDAS

SEQ ID NO: 9763 - protein, 195 aa, Homo Sapiens
MPARALLPRRMGHRTLASTPALWASIPCPRSELRLDLVLPSGQSFRWREQSPAHWSGVLADQVWTLTQTEEQLHCTVYRGDKSQASRPTPDELEAVRKYFQLDVTLAQLYHHWGSVDSHFQEVAQKFQGVRLLRQDPIECLFSFICSSNNNIARITGMVERLCQAFGPRLIQLDDVTYHGFPSLQALAGPPWQCI

SEQ ID NO: 9764 - protein, 168 aa, Homo Sapiens
  misc_feature (1)..(1): Xaa can be any naturally occurring amino acid
XASIPCPRSELRLDLVLPSGQSFRWREQSPAHWSGVLADQVWTLTQTEEQLHCTVYRGDKSQASRPTPDELEAVRKYFQLDVTLAQLYHHWGSVDSHFQEVAQKFQGVRLLRQDPIECLFSFICSSNNNIARITGMVERLCQAFGPRLIQLDDVTYHGFPSLQALAGG

SEQ ID NO: 9765 - protein, 128 aa, Homo Sapiens
  misc_feature (1)..(1): Xaa can be any naturally occurring amino acid
XELEAVRKYFQLDVTLAQLYHHWGSVDSHFQEVAQKFQGVRLLRQDPIECLFSFICSSNNNIARITGMVERLCQAFGPRLIQLDDVTYHGFPSLQALAGVPVPAEGLLTSASAFQSPLRSRQPEADRR

SEQ ID NO: 9766 - protein, 132 aa, Homo Sapiens
  misc_feature (1)..(1): Xaa can be any naturally occurring amino acid
XMMSPTMASPACRPWLVADCICLMALDKPQAVPVDVHMWHIAQRDYSWHPTTSQAKGPSPQTNKELGNFFRSLWGPYAGWAQATPPSYRCCSVPTCANPAMLRSHQQSAERVPKGRKARWGTLDKEIPQAPS

SEQ ID NO: 9767 - protein, 222 aa, Homo Sapiens
  misc_feature (1)..(1): Xaa can be any naturally occurring amino acid
XPCGPPSRALALSCAWTWFCLLDNLSGVRLLRQDPIECLFSFICSSNNNIARITGMVERLCQAFGPRLIQLDDVTYHGFPSLQALAGPEVEAHLRKLGLGYRARYVSASARAILEEQGGLAWLQQLRESSYEEAHKALCILPGVGTKVADCICLMALDKPQAVPVDVHMWHIAQRDYSWHPTTSQAKGPSPQTNKELGNFFRSLWGPYAGWAQAVSVPRCPP

SEQ ID NO: 9768 - protein, 263 aa, Homo Sapiens
  misc_feature (1)..(1): Xaa can be any naturally occurring amino acid
XVRKYFQLDVTLAQLYHHWGSVDSHFQEVAQKFQGVRLLRQDPIECLFSFICSSNNNIARITGMVERLCQAFGPRLIQLDDVTYHGFPSLQALAGPEVEAHLRKLGLGYRARYVSASARAILEEQGGLAWLQQLRESSYEEAHKALCILPGVGTKGLLGNAFDGHQLLRPLIFCQDHLREGPPIGRGDSQGEELEPQLPSSLSSIPYGFCDHCWTKDVDDPPLVTHPSPGSRDGHMTQAWPVKVVSPLATVIGHVMQASLLAL

SEQ ID NO: 9769 - protein, 298 aa, Homo Sapiens
MKTLQSTLLLLLLVPLIKPAPPTQQDSRIIYDYGTDNFEESIFSQDYEDKYLDGKNIKEKETVIIPNEKSLQLQKDEAITPLPPKKENDEMPTCLLCVCLSGSVYCEEVDIDAVPPLPKESAYLYARFNKIKKLTAKDFADIPNLRRLDFTGNLIEDIEDGTFSKLSLLEELSLAENQLLKLPVLPPKLTLFNAKYNKIKSRGIKANAFKKLNNLTFLYLDHNALESVPLNLPESLRVIHLQFNNIASITDDTFCKANDTSYIRDRIEEIRLEGNPIVLGKHPNSFICLKRLPIGSYF

SEQ ID NO: 9770 - protein, 298 aa, Homo Sapiens; identical to SEQ ID NO: 9769

SEQ ID NO: 9771 - protein, 268 aa, Homo Sapiens
MLAKISTTWKLFLKLLGPEILLSSLKSRHSFSHSPSHLGLMHRHEHLLRKTTKNFKTATTTLQSTLLLLLLVPLIKPAPPTQQDSRIIYDYGTDNFEESIFSQDYEDKYLDGKNIKEKETVIIPNEKSLQLQKDEAITPLPPKKENDEMPTCLLCVCLSGSVYCEEVDIDAVPPLPKESAYLYARFNKIKKLTAKDFADIPNLRRLDFTGNLIEDIEDGTFSKLSLLEELSLAENQLLKLPVLPPKLTLFNAKYNKIKSRGIKANAFK

SEQ ID NO: 9772 - protein, 545 aa, Homo Sapiens
MPPFLLLTCLFITGTSVSPVALDPCSAYISLNEPWRNTDHQLDESQGPPLCDNHVNGEWYHFTGMAGDAMPTFCIPENHCGTHAPVWLNGSHPLEGDGIVQRQACASFNGNCCLWNTTVEVKACPGGYYVYRLTKPSVCFHVYCGHFYDICDEDCHGSCSDTSECTCAPGTVLGPDRQTCFDENECEQNNGGCSEICVNLKNSYRCECGVGRVLRSDGKTCEDVEGCHNNNGGCSHSCLGSEKGYQCECPRGLVLSEDNHTCQVPVLCKSNAIEVNIPRELVGGLELFLTNTSCRGVSNGTHVNILFSLKTCGTVVDVVNDKIVASNLVTGLPKQTPGSSGDFIIRTSKLLIPVTCEFPRLYTISEGYVPNLRNSPLEIMSRNHGIFPFTLEIFKDNEFEEPYREALPTLKLRDSLYFGIEPVVHVSGLESLVESCFATPTSKIDEVLKYYLIRDGCVSDDSVKQYTSRDHLAKHFQVPVFKFVGKDHKEVFLHCRVLVCGVLDERSRCAQGCHRRMRRGAGGEDSAGLQGQTLTGGPIRIDWED

SEQ ID NO: 9773 - protein, 321 aa, Homo Sapiens
MPPFLLLTCLFITGTSVSPVALDPCSAYISLNEPWRNTDHQLDESQGPPLCDNHVNGEWYHFTGMAGDAMPTFCIPENHCGTHAPVWLNGSHPLEGDGIVQRQACASFNGNCCLWNTTVEVKACPGGYYVYRLTKPSVCFHVYCGHFYDICDEDCHGSCSDTSECTCAPGTVLGPDRQTCFDENECEQNNGGCSEICVNLKNSYRCECGVGRVLRSDGKTCEDVEGCHNNNGGCSHSCLGSEKGYQCECPRGLVLSEDNHTCQVPVLCKSNAIEVNIPRELVGGLELFLTNTSCRGVSNGTHVNILFSLKTCGTVVDLCFR

SEQ ID NO: 9774 - protein, 129 aa, Homo Sapiens
MCSRDARTKQLRQLLEKVQNMSQSIEVLDRRTQRDLQYVEKMENQMKGLESKFKQVEESHKQHLARQFKAIKAKMDELRPLIPVLEEYKADAKLVLQFKEEVQNLTSVLNELQEEIGAYDYDELQSRVS

SEQ ID NO: 9775 - protein, 163 aa, Homo Sapiens
MEGPGGSGFHLRLEAFCKCKSPINVFDPVRPALQVGLTRVLPTNPEESWQVYSSAQDSEGRCICTVVAPQQTMCSRDARTKQLRQLLEKVQNMSQSIEVLDRRTQRDLQYVEKMENQMKGLESKFKQVEESHKQHLARQFKAIKAKMDELRPLIPVLEEYKAD

SEQ ID NO: 9776 - protein, 458 aa, Homo Sapiens
MGEAPGREGRGPCPQLESPRRRRVLPTNPEESWQVYSSAQDSEGRCICTVVAPQQTMCSRDARTKQLRQLLEKVQNMSQSIEVLDRRTQRDLQYVEKMENQMKGLESKFKQVEESHKQHLARQFKAIKAKMDELRPLIPVLEEYKADAKLVLQFKEEVQNLTSVLNELQEEIGAYDYDELQSRVSNLEERLRACMQKLACGKLTGISDPVTVKTSGSRFGSWMTDPLAPEGDNRVWYMDGYHNNRFVREYKSMVDFMNTDNFTSHRLPHPWSGTGQVVYNGSIYFNKFQSHIIIRFDLKTETILKTRSLDYAGYNNMYHYAWGGHSDIDLMVDESGLWAVYATNQNAGNIVVSRLDPVSLQTLQTWNTSYPKRSAGEAFIICGTLYVTNGYSGGTKVHYAYQTNASTYEYIDIPFQNKYSHISMLDYNPKDRALYAWNNGHQILYNVTLFHVIRSDEL

SEQ ID NO: 9777 - protein, 129 aa, Homo Sapiens
MPGRWRWQRDMHPARKLLSLLFLILMGTELTQDSAAPDSLLRSSKGSTRGSLAAIVIWRGKSESRIAKTPGIFRGGGTLVLPPTHTPEWLILPLGITLPLGAPETGGGDCAAETWKGSQRAGQLCALLA

SEQ ID NO: 9778 - protein, 167 aa, Homo Sapiens
MPGRWRWQRDMHPARKLLSLLFLILMGTELTQNKRENKAEKMGGPESERKTTGEKTLNELPLFCLEAHAGSLALPRMCSPNPNPAVGLCRPAYPQSPSPGAAQTISQSLLERFCMASRRGFLGPRKAWWRVVVVHCCWTDAFIHVHTHTHTCTHRGADTCREEPTRS

SEQ ID NO: 9779 - protein, 467 aa, Homo Sapiens
MPGRWRWQRDMHPARKLLSLLFLILMGTELTQVLPTNPEESWQVYSSAQDSEGRCICTVVAPQQTMCSRDARTKQLRQLLEKVQNMSQSIEVLDRRTQRDLQYVEKMENQMKGLESKFKQVEESHKQHLARQFKAIKAKMDELRPLIPVLEEYKADAKLVLQFKEEVQNLTSVLNELQEEIGAYDYDELQSRVSNLEERLRACMQKLACGKLTGISDPVTVKTSGSRFGSWMTDPLAPEGDNRVWYMDGYHNNRFVREYKSMVDFMNTDNFTSHRLPHPWSGTGQVVYNGSIYFNKFQSHIIIRFDLKTETILKTRSLDYAGYNNMYHYAWGGHSDIDLMVDESGLWAVYATNQNAGNIVVSRLDPVSLQTLQTWNTSYPKRSAGEAFIICGTLYVTNGYSGGTKVHYAYQTNASTYEYIDIPFQNKYSHISMLDYNPKDRALYAWNNGHQILYNVTLFHVIRSDEL

SEQ ID NO: 9780 - protein, 135 aa, Homo Sapiens
MPGRWRWQRDMHPARKLLSLLFLILMGTELTQVLPTNPEESWQVYSSAQDSEGRCICTVVAPQQTMCSRDARTKQLRQLLEKVQNMSQSIEVLDRRTQRDLQYVEKMENQMKGLESKFKQVEESHKQHLARQFKG

SEQ ID NO: 9781 - protein, 208 aa, Homo Sapiens
MSQSIEVLDRRTQRDLQYVEKMENQMKGLESKFKQVEESHKQHLARQFKAIKAKMDELRPLIPVLEEYKADAKLVLQFKEEVQNLTSVLNELQEEIGAYDYDELQSRVSNLEERLRACMQKLACGKLTGISDPVTVKTSGSRFGSWMTDPLAPEGDNRVWYMDGYHNNRFVREYKSMVDFMNTDNFTSHRLPHPWSGTGQVVYNGSIY

SEQ ID NO: 9782 - protein, 485 aa, Homo Sapiens
MSVPLLKIGVVLSTMAMITNWMSQTLPSLVGLNTTKLSAAGGGTLDRSTGVLPTNPEESWQVYSSAQDSEGRCICTVVAPQQTMCSRDARTKQLRQLLEKVQNMSQSIEVLDRRTQRDLQYVEKMENQMKGLESKFKQVEESHKQHLARQFKAIKAKMDELRPLIPVLEEYKADAKLVLQFKEEVQNLTSVLNELQEEIGAYDYDELQSRVSNLEERLRACMQKLACGKLTGISDPVTVKTSGSRFGSWMTDPLAPEGDNRVWYMDGYHNNRFVREYKSMVDFMNTDNFTSHRLPHPWSGTGQVVYNGSIYFNKFQSHIIIRFDLKTETILKTRSLDYAGYNNMYHYAWGGHSDIDLMVDESGLWAVYATNQNAGNIVVSRLDPVSLQTLQTWNTSYPKRSAGEAFIICGTLYVTNGYSGGTKVHYAYQTNASTYEYIDIPFQNKYSHISMLDYNPKDRALYAWNNGHQILYNVTLFHVIRSDEL

SEQ ID NO: 9783 - protein, 153 aa, Homo Sapiens
MSVPLLKIGVVLSTMAMITNWMSQTLPSLVGLNTTKLSAAGGGTLDRSTGVLPTNPEESWQVYSSAQDSEGRCICTVVAPQQTMCSRDARTKQLRQLLEKVQNMSQSIEVLDRRTQRDLQYVEKMENQMKGLESKFKQVEESHKQHLARQFKG

SEQ ID NO: 9784 - protein, 99 aa, Homo Sapiens
  misc_feature (1)..(1): Xaa can be any naturally occurring amino acid
XSHKQHLARQFKAIKAKMDELRPLIPVLEEYKADAKLVLQFKEEVQNLTSVLNELQEEIGAYDYDELQSRVSNLEERLRACMQKLGVVHGRLSQQPLRT

SEQ ID NO: 9785 - protein, 78 aa, Homo Sapiens
MEVLELRTYRDLQYVRGMETLMRSLDARLRAADGSLSAKSFQELKDRMTELLPLSSVLEQYKADTRTIVRLREEAVGS

SEQ ID NO: 9786 - protein, 376 aa, Homo Sapiens
MEVLELRTYRDLQYVRGMETLMRSLDARLRAADGSLSAKSFQELKDRMTELLPLSSVLEQYKADTRTIVRLREEVRNLSGSLAAIQEEMGAYGYEDLQQRVMALEARLHACAQKLGCGKLTGVSNPITVRAMGSRFGSWMTDTMAPSADSRVWYMDGYYKGRRVLEFRTLGDFIKGQNFIQHLLPQPWAGTGHVVYNGSLFYNKYQSNVVVKYHFRSRSVLVQRSLPGAGYNNTFPYSWGGFSDMDFMVDESGLWAVYTTNQNAGNIVVSRLDPHTLEVMRSWDTGYPKRSAGEAFMICGVLYVTNSHLAGAKVYFAYFTNTSSYEYTDVPFHNQYSHISMLDYNPRERALYTWNNGHQVLYNVTLFHVISTSGDP

SEQ ID NO: 9787 - protein, 336 aa, Homo Sapiens
MSVPLLKIGAVLSTMAMVTNWMSQTLPSLVGLNGTVSRAGASEKITLFQNPEEGWQLYTSAQAPDGKCICTAVIPAQSTCSRDGRSRELRQLMEKVQNVSQSMEVLELRTYRDLQYVRGMETLMRSLDARLRAADGSLSAKSFQELKDRMTELLPLSSVLEQYKADTRTIVRLREEVRNLSGSLAAIQEEMGAYGYEDLQQRVMALEARLHACAQKLGCGKLTGVSNPITVRAMGSRFGSWMTDTMAPSADSRVWYMDGYYKGRRVLEFRTLGDFIKGQNFIQHLLPQPWAGTGHVVYNGSLFYNKYQSNVVVKYHFRSRSVLVQRSLPGAGYNNT

SEQ ID NO: 9788 - protein, 454 aa, Homo Sapiens
MWPLTVPPPLLLLLCSGLAGQTLFQNPEEGWQLYTSAQAPDGKCICTAVIPAQSTCSRDGRSRELRQLMEKVQNVSQSMEVLELRTYRDLQYVRGMETLMRSLDARLRAADGSLSAKSFQELKDRMTELLPLSSVLEQYKADTRTIVRLREEVRNLSGSLAAIQEEMGAYGYEDLQQRVMALEARLHACAQKLGCGKLTGVSNPITVRAMGSRFGSWMTDTMAPSADSRVWYMDGYYKGRRVLEFRTLGDFIKGQNFIQHLLPQPWAGTGHVVYNGSLFYNKYQSNVVVKYHFRSRSVLVQRSLPGAGYNNTFPYSWGGFSDMDFMVDESGLWAVYTTNQNAGNIVVSRLDPHTLEVMRSWDTGYPKRSAGEAFMICGVLYVTNSHLAGAKVYFAYFTNTSSYEYTDVPFHNQYSHISMLDYNPRERALYTWNNGHQVLYNVTLFHVISTSGDP

SEQ ID NO: 9789 - protein, 458 aa, Homo Sapiens
MQATSNLLNLLLLSLFAGLDPSKTQISPKEGWQVYSSAQDPDGRCICTVVAPEQNLCSRDAKSRQLRQLLEKVQNMSQSIEVLNLRTQRDFQYVLKMETQMKGLKAKFRQIEDDRKTLMTKHFQELKEKMDELLPLIPVLEQYKTDAKLITQFKEEIRNLSAVLTGIQEEIGAYDYEELHQRVLSLETRLRDCMKKLTCGKLMKITGPVTVKTSGTRFGAWMTDPLASEKNNRVWYMDSYTNNKIVREYKSIADFVSGAESRTYNLPFKWAGTNHVVYNGSLYFNKYQSNIIIKYSFDMGRVLAQRSLEYAGFHNVYPYTWGGFSDIDLMADEIGLWAVYATNQNAGNIVISQLNQDTLEVMKSWSTGYPKRSAGESFMICGTLYVTNSHLTGAKVYYSYSTKTSTYEYTDIPFHNQYFHISMLDYNARDRALYAWNNGHQVLFNVTLFHIIKTEDDT

SEQ ID NO: 9790 - protein, 478 aa, Homo Sapiens
MSPPLLKLGAVLSTMAMISNWMSQTLPSLVGLNTTRLSTPDTLTQISPKEGWQVYSSAQDPDGRCICTVVAPEQNLCSRDAKSRQLRQLLEKVQNMSQSIEVLNLRTQRDFQYVLKMETQMKGLKAKFRQIEDDRKTLMTKHFQELKEKMDELLPLIPVLEQYKTDAKLITQFKEEIRNLSAVLTGIQEEIGAYDYEELHQRVLSLETRLRDCMKKLTCGKLMKITGPVTVKTSGTRFGAWMTDPLASEKNNRVWYMDSYTNNKIVREYKSIADFVSGAESRTYNLPFKWAGTNHVVYNGSLYFNKYQSNIIIKYSFDMGRVLAQRSLEYAGFHNVYPYTWGGFSDIDLMADEIGLWAVYATNQNAGNIVISQLNQDTLEVMKSWSTGYPKRSAGESFMICGTLYVTNSHLTGAKVYYSYSTKTSTYEYTDIPFHNQYFHISMLDYNARDRALYAWNNGHQVLFNVTLFHIIKTEDDT

SEQ ID NO: 9791 - protein, 140 aa, Homo Sapiens
MSQSIEVLNLRTQRDFQYVLKMETQMKGLKAKFRQIEDDRKTLMTKHFQELKEKMDELLPLIPVLEQYKTDAKLITQFKEEIRNLSAVLTGIQEEIGAYDYEELHQRVLSLETRLRDCMKKLIDLKKRKEEEKRQQKGEA

SEQ ID NO: 9792 - protein, 510 aa, Homo Sapiens
MRPGLSFLLALLFFLGQAAGDLGDVGPPIPSPGFSSFPGVDSSSSFSSSSRSGSSSSRSLGSGGSVSQLFSNFTGSVDDRGTCQCSVSLPDTTFPVDRVERLEFTAHVLSQKFEKELSKVREYVQLISVYEKKLLNLTVRIDIMEKDTISYTELDFELIKVEVKEMEKLVIQLKESFGGSSEIVDQLEVEIRNMTLLVEKLETLDKNNVLAIRREIVALKTKLKECEASKDQNTPVVHPPPTPGSCGHGGVVNISKPSVVQLNWRGFSYLYGAWGRDYSPQHPNKGLYWVAPLNTDGRLLEYYRLYNTLDDLLLYINARELRITYGQGSGTAVYNNNMYVNMYNTGNIARVNLTTNTIAVTQTLPNAAYNNRFSYANVAWQDIDFAVDENGLWVIYSTEASTGNMVISKLNDTTLQVLNTWYTKQYKPSASNAFMVCGVLYATRTMNTRTEEIFYYYDTNTGKEGKLDIVMHKMQEKVQSINYNPFDQKLYVYNDGYLLNYDLSVLQKPQ

SEQ ID NO: 9793 - protein, 68 aa, Homo Sapiens
MMVALRGASALLVLFLAAFLPPPQCTQDPAMVHYIYQRFRVLEGWKNVPKQRGHTFKNSKSSQKIYLS

SEQ ID NO: 9794 - protein, 402 aa, Homo Sapiens
MMVALRGASALLVLFLAAFLPPPQCTQDPAMVHYIYQRFRVLEQGLEKCTQATRAYIQEFQEFSKNISVMLGRCQTYTSEYKSAVGNLALRVERAQREIDYIQYLREADECIESEDKTLAEMLLQEAEEEKKIRTLLNASCDNMLMGIKSLKIVKKMMDTHGSWMKDAVYNSPKVYLLIGSRNNTVWEFANIRAFMEDNTKPAPRKQILTLSWQGTGQVIYKGFLFFHNQATSNEIIKYNLQKRTVEDRMLLPGGVGRALVYQHSPSTYIDLAVDEHGLWAIHSGPGTHSHLVLTKIEPGTLGVEHSWDTPCRSQDAEASFLLCGVLYVVYSTGGQGPHRITCIYDPLGTISEEDLPNLFFPKRPRSHSMIHYNPRDKQLYAWNEGNQIIYKLQTKRKLPLK

SEQ ID NO: 9795 - protein, 402 aa, Homo Sapiens; identical to SEQ ID NO: 9794

SEQ ID NO: 9796 - protein, 56 aa, Homo Sapiens
MMVALRGASALLVLFLAAFLPPPQCTQDPAMVHYIYQRFRVLEQGLEKCTQAVTTC

SEQ ID NO: 9797 - protein, 652 aa, Homo Sapiens
MAAAALPPRPLLLLPLVLLLSGRPTRADSKVFGDLDQVRMTSEGSDCRCKCIMRPLSKDACSRVRSGRARVEDFYTVETVSSGTDCRCSCTAPPSSLNPCENEWKMEKLKKQAPELLKLQSMVDLLEGTLYSMDLMKVHAYVHKVASQMNTLEESIKANLSRENEVVKDSVRHLSEQLRHYENHSAIMLGIKKELSRLGLQLLQKDAAAAPATPATGTGSKAQDTARGKGKDISKYGSVQKSFADRGLPKPPKEKLLQVEKLRKESGKGSFLQPTAKPRALAQQQAVIRGFTYYKAGKQEVTEAVADNTLQGTSWLEQLPPKVEGRSNSAEPNSAEQDEAEPRSSERVDLASGTPTSIPATTTTATTTPTPTTSLLPTEPPSGPEVSSQGREASCEGTLRAVDPPVRHHSYGRHEGAWMKDPAARDDRIYVTNYYYGNSLVEFRNLENFKQGRWSNMYKLPYNWIGTGHVVYQGAFYYNRAFTKNIIKYDLRQRFVASWALLPDVVYEDTTPWKWRGHSDIDFAVDESGLWVIYPAVDDRDEAQPEVIVLSRLDPGDLSVHRETTWKTRLRRNSYGNCFLVCGILYAVDTYNQQEGQVAYAFDTHTGTDARPQLPFLNEHAYTTQIDYNPKERVLYAWDNGHQLTYTLHFVV

SEQ ID NO: 9798 - protein, 318 aa, Homo Sapiens
MAAAALPPRPLLLLPLVLLLSGRPTRADSKVFGDLDQVRMTSEGSDCRCKCIMRPLSKDACSRVRSGRARVEDFYTVETVSSGTDCRCSCTAPPSSLNPCENEWKMEKLKKQAPELLKSIKANLSRENEVVKDSVRHLSEQLRHYENHSAIMLGIKKELSRLGLQLLQKDAAAAPATPATGTGSKAQDTARGKGKDISKYGSVQKSFADRGLPKPPKEKLLQVEKLRKESGKGSFLQPTAKPRALAQQQAVIRGFTYYKAGKQEVTEAVADNTLQGTSWLEQLPPKVEGRSNSAEPNSAEQDEAEPRSSERVDLASGT

SEQ ID NO: 9799 - protein, 438 aa, Homo Sapiens
MSKRDKAGKDTARGKGKDISKYGSVQKSFADRGLPKPPKEKLLQVEKLRKESGKGSFLQPTAKPRALAQQQAVIRGFTYYKAGKQEVTEAVADNTLQGTSWLEQLPPKVEGRSNSAEPNSAEQDEAEPRSSERVDLASGTPTSIPATTTTATTTPTPTTSLLPTEPPSGPEVSSQGREASCEGTLRAVDPPVRHHSYGRHEGAWMKDPAARDDRIYVTNYYYGNSLVEFRNLENFKQGRWSNMYKLPYNWIGTGHVVYQGAFYYNRAFTKNIIKYDLRQRFVASWALLPDVVYEDTTPWKWRGHSDIDFAVDESGLWVIYPAVDDRDEAQPEVIVLSRLDPGDLSVHRETTWKTRLRRNSYGNCFLVCGILYAVDTYNQQEGQVAYAFDTHTGTDARPQLPFLNEHAYTTQIDYNPKERVLYAWDNGHQLTYTLHFVV

SEQ ID NO: 9800 - protein, 90 aa, Homo Sapiens
ETTWRTGLRRNFYGNCFVICGVLYAVDSYNQRNANISYAFDTHTNTQIVPRLLFENEYSYTTQIDYNPKDRLLYAWDNGHQVTYHVIFAY

SEQ ID NO: 9801 - protein, 751 aa, Homo Sapiens
MAKPRLLVLYFALIVVPAWVSSIVLTGTSEPPDAQTVAPAEDETLQNEADNQENVLSQLLGDYDKVKAMSEGSDCQCKCVVRPLGRDACQRINAGASRKEDFYTVETITSGSSCKCACVAPPSALNPCEGDFRLQKLREADSQDLKLSTIIDMLEGAFYGLDLLKLHSVTTKLVGRVDKLEEEVSKNLTKENEQIKEDMEEIRTEMNKRGKENCSENILDSMPDIRSALQRDAAAAYAHPEQYEERFLQEETVSQQINSIELLQTRPLALPEVVKSQRPLQRQVHLRGRPASQPTVIRGITYYKAKVSEEENDIEEQQDEFFSGDNGVDLLIEDQLLRHNGLMTSVTRRPAATRQGHSTAVTSDLNARTAPWSSALPQPSTSDPSIANHASVGPTLQTTSVSPDPTRESVLQPSPQVPATTVAHTATQQPAAPAPPAVSPREALMEAMHTVPVPPTTVRTDSLGKDAPAGWGTTPASPTLSPEEEDDIRNVIGRCKDTLSTITGPTTQNTYGRNEGAWMKDPLAKDERIYVTNYYYGNTLVEFRNLENFKQGRWSNSYKLPYSWIGTGHVVYNGAFYYNRAFTRNIIKYDLKQRYVAAWAMLHDVAYEEATPWRWQGHSDVDFAVDENGLWLIYPALDDEGFSQEVIVLSKLNAADLSTQKETTWRTGLRRNFYGNCFVICGVLYAVDSYNQRNANISYAFDTHTNTQIVPRLLFENEYSYTTQIDYNPKDRLLYAWDNGHQVTYHVIFAY

SEQ ID NO: 9802 - protein, 750 aa, Homo Sapiens
MAKPRLLVLYFALIVVPAWVSSIVLTGTSEPPDAQTVAPAEDETLQNEADNQENVLSQLLGDYDKVKAMSEGSDCQCKCVVRPLGRDACQRINAGASRKEDFYTVETITSGSSCKCACVAPPSALNPCEGDFRLQKLREADSQDLKLSTIIDMLEGAFYGLDLLKLHSVTTKLVGRVDKLEEEVSKNLTKENEQIKEDMEEIRTEMNKRGKENCSENILDSMPDIRSALQRDAAAAYAHPEYEERFLQEETVSQQINSIELLQTRPLALPEVVKSQRPLQRQVHLRGRPASQPTVIRGITYYKAKVSEEENDIEEQQDEFFSGDNGVDLLIEDQLLRHNGLMTSVTRRPAATRQGHSTAVTSDLNARTAPWSSALPQPSTSDPSIANHASVGPTLQTTSVSPDPTRESVLQPSPQVPATTVAHTATQQPAAPAPPAVSPREALMEAMHTVPVPPTTVRTDSLGKDAPAGWGTTPASPTLSPEEEDDIRNVIGRCKDTLSTITGPTTQNTYGRNEGAWMKDPLAKDERIYVTNYYYGNTLVEFRNLENFKQGRWSNSYKLPYSWIGTGHVVYNGAFYYNRAFTRNIIKYDLKQRYVAAWAMLHDVAYEEATPWRWQGHSDVDFAVDENGLWLIYPALDDEGFSQEVIVLSKLNAADLSTQKETTWRTGLRRNFYGNCFVICGVLYAVDSYNQRNANISYAFDTHTNTQIVPRLLFENEYSYTTQIDYNPKDRLLYAWDNGHQVTYHVIFAY

SEQ ID NO: 9803 - protein, 233 aa, Homo Sapiens
MKDPLAKDERIYVTNYYYGNTLVEFRNLENFKQGRWSNSYKLPYSWIGTGHVVYNGAFYYNRAFTRNIIKYDLKQRYVAAWAMLHDVAYEEATPWRWQGHSDVDFAVDENGLWLIYPALDDEGFSQEVIVLSKLNAADLSTQKETTWRTGLRRNFYGNCFVICGVLYAVDSYNQRNANISYAFDTHTNTQIVPRLLFENEYSYTTQIDYNPKDRLLYAWDNGHQVTYHVIFAY

SEQ ID NO: 9804 - protein, 88 aa, Homo Sapiens
TWRTGLRRNFYGNCFVICGVLYAVDSYNQRNANISYAFDTHTNTQIVPRLLFENEYSYTTQIDYNPKDRLLYAWDNGHQVTYHVIFAY

SEQ ID NO: 9805 - protein, 386 aa, Homo Sapiens
MAQWHCSQRTQAGGHGVGERLAQCQDQSSRHAAELRDFKNKMLPLLEVAEKEREALRTEADTISGRVDRLEREVDYLETQNPALPCVEFDEKVTGGPGTKGKGRRNEKYDMVTDCGYTISQVRSMKILKRFGGPAGLWTKDPLGQTEKIYVLDGTQNDTAFVFPRLRDFTLAMAARKASRVRVPFPWVGTGQLVYGGFLYFARRPPGRPGGGGEMENTLQLIKFHLANRTVVDSSVFPAEGLIPPYGLTADTYIDLAADEEGLWAVYATREDDRHLCLAKLDPQTLDTEQQWDTPCPRENAEAAFVICGTLYVVYNTRPASRARIQCSFDASGTLTPERAALPYFPRRYGAHASLRYNPRERQLYAWDDGYQIVYKLEMRKKEEEV

SEQ ID NO: 9806 - protein, 406 aa, Homo Sapiens
MGPSTPLLILFLLSWSGPLQGQQHHLVEYMERRLAALEERLAQCQDQSSRHAAELRDFKNKMLPLLEVAEKEREALRTEADTISGRVDRLEREVDYLETQNPALPCVEFDEKVTGGPGTKGKGRRNEKYDMVTDCGYTISQVRSMKILKRFGGPAGLWTKDPLGQTEKIYVLDGTQNDTAFVFPRLRDFTLAMAARKASRVRVPFPWVGTGQLVYGGFLYFARRPPGRPGGGGEMENTLQLIKFHLANRTVVDSSVFPAEGLIPPYGLTADTYIDLAADEEGLWAVYATREDDRHLCLAKLDPQTLDTEQQWDTPCPRENAEAAFVICGTLYVVYNTRPASRARIQCSFDASGTLTPERAALPYFPRRYGAHASLRYNPRERQLYAWDDGYQIVYKLEMRKKEEEV

SEQ ID NO: 9807 - protein, 345 aa, Homo Sapiens
MLPLLEVAEKEREALRTEADTISGRVDRLEREVDYLETQNPALPCVEFDEKVTGGPGTKGKGRRNEKYDMVTDCGYTISQVRSMKILKRFGGPAGLWTKDPLGQTEKIYVLDGTQNDTAFVFPRLRDFTLAMAARKASRVRVPFPWVGTGQLVYGGFLYFARRPPGRPGGGGEMENTLQLIKFHLANRTVVDSSVFPAEGLIPPYGLTADTYIDLAADEEGLWAVYATREDDRHLCLAKLDPQTLDTEQQWDTPCPRENAEAAFVICGTLYVVYNTRPASRARIQCSFDASGTLTPERAALPYFPRRYGAHASLRYNPRERQLYAWDDGYQIVYKLEMRKKEEEV

SEQ ID NO: 9808 - protein, 421 aa, Homo Sapiens
MGFLSPIYVIFFFFGVKVHCQYETYQWDEDYDQEPDDDYQTGFPFRQNVDYGVPFHQYTLGCVSECFCPTNFPSSMYCDNRKLKTIPNIPMHIQQLYLQFNEIEAVTANSFINATHLKEINLSHNKIKSQKIDYGVFAKLPNLLQLHLEHNNLEEFPFPLPKSLERLLLGYNEISKLQTNAMDGLVNLTMLDLCYNYLHDSLLKDKIFAKMEKLMQLNLCSNRLESMPPGLPSSLMYLSLENNSISSIPEKYFDKLPKLHTLRMSHNKLQDIPYNIFNLPNIVELSVGHNKLKQAFYIPRNLEHLYLQNNEIEKMNLTVMCPSIDPLHYHHLTYIRVDQNKLKEPISSYIFFCFPHIHTIYYGEQRSTNGQTIQLKTQVFRRFPDDDDESEDHDDPDNAHESPEQEGAEGHFDLHYYENQE

SEQ ID NO: 9809 - protein, 440 aa, Homo Sapiens
MEYQILKMSLCLFILLFLTPGILCICPLQCICTERHRHVDCSGRNLSTLPSGLQENIIHLNLSYNHFTDLHNQLTQYTNLRTLDISNNRLESLPAHLPRSLWNMSAANNNIKLLDKSDTAYQWNLKYLDVSKNMLEKVVLIKNTLRSLEVLNLSSNKLWTVPTNMPSKLHIVDLSNNSLTQILPGTLINLTNLTHLYLHNNKFTFIPDQSFDQLFQLQEITLYNNRWSCDHKQNITYLLKWMMETKAHVIGTPCSTQISSLKEHNMYPTPSGFTSSLFTVSGMQTVDTINSLSVVTQPKVTKIPKQYRTKETTFGATLSKDTTFTSTDKAFVPYPEDTSTETINSHEAAAATLTIHLQDGMVTNTSLTSSTKSSPTPMTLSITSGMPNNFSEMPQQSTTLNLWREETTTNVKTPLPSVANAWKVNASFLLLLNVVVMLAV

SEQ ID NO: 9810 - protein, 158 aa, Homo Sapiens
MALEVLMLLAVLIWTGAENLHVKISCSLDWLMVSVIPVAESRNLYIFADELHLGMGCPANRIHTYVYEFIYLVRDCGIRTRVVSEETLLFQTELYFTPRNIDHDPQEIHLECSTSRKSVWLTPVSTENEIKLDPSPFIADFQTTAEELGLLSSSPNLL

SEQ ID NO: 9811 - protein, 86 aa, Homo Sapiens
MVSVIPVAESRNLYIFADELHLGMGCPANRIHTYVYEFIYLVRDCGIRTRVVSEETLLFQTELYFTPRNIDHDPQEIHLECSTSSV

SEQ ID NO: 9812 - protein, 304 aa, Homo Sapiens
MDNVTVRQGESATLRCTIDDRVTRVAWLNRSTILYAGNDKWSIDPRVIILVNTPTQYSIMIQNVDVYDEGPYTCSVQTDNHPKTSRVHLIVQVPPQIMNISSDITVNEGSSVTLLCLAIGRPEPTVTWRHLSVKEGQGFVSEDEYLEISDIKRDQSGEYECSALNDVAAPDVRKVKITVNYPPYISKAKNTGVSVGQKGILSCEASAVPMAEFQWFKEETRLATGLDGMRIENKGRMSTLTFFNVSEKDYGNYTCVATNKLGNTNASITLYGPGAVIDGVNSASRALACLWLSGTLLAHFFIKF

SEQ ID NO: 9813 - protein, 345 aa, Homo Sapiens
MGVCGYLFLPWKCLVVVSLRLLFLVPTGVPVRSGDATFPKAMDNVTVRQGESATLRCTIDDRVTRVAWLNRSTILYAGNDKWSIDPRVIILVNTPTQYSIMIQNVDVYDEGPYTCSVQTDNHPKTSRVHLIVQVPPQIMNISSDITVNEGSSVTLLCLAIGRPEPTVTWRHLSVKEGQGFVSEDEYLEISDIKRDQSGEYECSALNDVAAPDVRKVKITVNYPPYISKAKNTGVSVGQKGILSCEASAVPMAEFQWFKEETRLATGLDGMRIENKGRMSTLTFFNVSEKDYGNYTCVATNKLGNTNASITLYGPGAVIDGVNSASRALACLWLSGTLLAHFFIKF

SEQ ID NO: 9814 - protein, 354 aa, Homo Sapiens
MGVCGYLFLPWKCLVVVSLRLLFLVPTGVPVRSGDATFPKAMDNVTVRQGESATLRCTIDDRVTRVAWLNRSTILYAGNDKWSIDPRVIILVNTPTQYSIMIQNVDVYDEGPYTCSVQTDNHPKTSRVHLIVQVPPQIMNISSDITVNEGSSVTLLCLAIGRPEPTVTWRHLSVKEGQGFVSEDEYLEISDIKRDQSGEYECSALNDVAAPDVRKVKITVNYPPYISKAKNTGVSVGQKGILSCEASAVPMAEFQWFKEETRLATGLDGMRIENKGRMSTLTFFNVSEKDYGNYTCVATNKLGNTNASITLYEISPSSAVAGPGAVIDGVNSASRALACLWLSGTLLAHFFIKF

SEQ ID NO: 9815 - protein, 345 aa, Homo Sapiens; identical to SEQ ID NO: 9813

SEQ ID NO: 9816 - protein, 338 aa, Homo Sapiens
MYHPAYWVVFSATTALLFIPGVPVRSGDATFPKAMDNVTVRQGESATLRCTIDDRVTRVAWLNRSTILYAGNDKWSIDPRVIILVNTPTQYSIMIQNVDVYDEGPYTCSVQTDNHPKTSRVHLIVQVPPQIMNISSDITVNEGSSVTLLCLAIGRPEPTVTWRHLSVKEGQGFVSEDEYLEISDIKRDQSGEYECSALNDVAAPDVRKVKITVNYPPYISKAKNTGVSVGQKGILSCEASAVPMAEFQWFKEETRLATGLDGMRIENKGRMSTLTFFNVSEKDYGNYTCVATNKLGNTNASITLYGPGAVIDGVNSASRALACLWLSGTLLAHFFIKF

SEQ ID NO: 9817 - protein, 248 aa, Homo Sapiens
MKLTFFLGLLALISCFTPSESQRFSRRPYLPGQLPPPPLYRPRWVPPSPPPPYDSRLNSPLSLPFVPGRVPPSSFSRFSQAVILSQLFPLESIRQPRLFPGYPNLHFPLRPYYVGPIRILKPPFPPIPFFLAIYLPISNPEPQINITTADTTITTNPPTTATATTSTSTKPTMTISSSTVPISSTPEPATSISAATPAASTENTTQILANRPHTVLLNATVQVTTSNQTILSSPAFKSFWQKLFAIFG

SEQ ID NO: 9818 - protein, 174 aa, Homo Sapiens
MRLLAFLSLLALVLQETGTASLPRKERKRREEQMPREGDSFEVLPLRNDVLNPDNYGEVIDLSNYEELTDYGDQLPEVKVTSLAPATSISPAKSTTAPGTPSSNPTMTRPTTAGLLLSSQPNHEDIPPLPRRTAYLYARFNRISRIRAEDFKGLTKLKRIDLSNNLISSIDNDA

SEQ ID NO: 9819 - protein, 332 aa, Homo Sapiens
MRLLAFLSLLALVLQETGTASLPRKERKRREEQMPREGDSFEVLPLRNDVLNPDNYGEVIDLSNYEELTDYGDQLPEVKVTSLAPATSISPAKSTTAPGTPSSNPTMTRPTTAGLLLSSQPNHGLPTCLVCVCLGSSVYCDDIDLEDIPPLPRRTAYLYARFNRISRIRAEDFKGLTKLKRIDLSNNLISSIDNDAFRLLHALQDLILPENQLEALPVLPSGIEFLDVRLNRLQSSGIQPAAFRAMEKLQFLYLSDNLLDSIPGPLPLSLRSVHLQNNLIETMQRDVFCDPEEHKHTRRQLEDIRLDGNPINLSLFPSAYFCLPRLPIGRFT

SEQ ID NO: 9820 - protein, 301 aa, Homo Sapiens
MHPEPAPPPSRSSPELPPSGGSTTSGSRRSRRRSGDGEPPGAPPPPPSAVTYPDWIGQSYSEVMSLNEHSMQALSWRKLYLSRAKLKASSRTSALLSGFAMVAMVEVQLDADHDYPPGLLIAFSACTTVLVAVHLFALMISTCILPNIEAVSNVHNLNSVKESPHERMHRHIELAWAFSTVIGTLLFLAEVVLLCWVKFLPLKKQPGQPRPTSKPPASGAAANVSTSGITPGQAAAIASTTIMVPFGLIFIVFAVHFYRSLVSHKTDRQFQELNELAEFARLQDQLDHRGDHPLTPGSHYA

SEQ ID NO: 9821 - protein, 201 aa, Homo Sapiens
MALSWVLTVLSLLPLLEAQIPLCANLVPVPITNATLDRITGKWFYIASAFRNEEYNKSVQEIQATFFYFTPNKTEDTIFLREYQTRQDQCIYNTTYLNVQRENGTISRYVGGQEHFAHLLILRDTKTYMLAFDVNDEKNWGLSVYADKPETTKEQLGEFYEALDCLRIPKSDVVYTDWKKDKCEPLEKQHEKERKQEEGES

SEQ ID NO: 9822 - protein, 201 aa, Homo Sapiens
MALSWVLTVLSLLPLLEAQIPLCANLVPVPITNATLDRITGKWFYIASAFRNEEYNKSVQEIQATFFYFTPNKTEDTIFLREYQTRQNQCFYNSSYLNVQRENGTVSRYEGGREHVAHLLFLRDTKTLMFGSYLDDEKNWGLSFYADKPETTKEQLGEFYEALDCLCIPRSDVMYTDWKKDKCEPLEKQHEKERKQEEGES

SEQ ID NO: 9823 - protein, 65 aa, Homo Sapiens
MDYGLQFTSSRKFLSISPIVLYLLASFYTKYDAAHFLINTASLLSVLLPKLPQFHGVRVFGINKY

SEQ ID NO: 9824 - protein, 153 aa, Homo Sapiens
MNVGVAHSEVNPNTRVMNSRGIWLAYIILVGLLHMVLLSIPFFSIPVVWTLTNVIHNLATYVFLHTVKGTPFETPDQGKARLLTHWEQMDYGLQFTSSRKFLSISPIVLYLLASFYTKYDAAHFLINTASLLSVLLPKLPQFHGVRVFGINKY

SEQ ID NO: 9825 - protein, 153 aa, Homo Sapiens; identical to SEQ ID NO: 9824

SEQ ID NO: 9826 - protein, 119 aa, Homo Sapiens
MVLLSIPFFSIPVVWTLTNVIHNLATYVFLHTVKGTPFETPDQGKARLLTHWEQMDYGLQFTSSRKFLSISPIVLYLLASFYTKYDAAHFLINTASLLSVLLPKLPQFHGVRVFGINKY

SEQ ID NO: 9827 - protein, 75 aa, Homo Sapiens
MAAETLLSSLLGLLLLGLLLPASLTGGVGSLNLEELSEMRYGIEILPLPVMGGQPFFASLPPDPPFFPRANLRTW

SEQ ID NO: 9828 - protein, 75 aa, Homo Sapiens; identical to SEQ ID NO: 9827

SEQ ID NO: 9829 - protein, 125 aa, Homo Sapiens
MAAETLLSSLLGLLLLGLLLPASLTGGVGSLNLEELSEMRYGIEILPLPVMGGQSQSSDVVIVSSKYKQRYECRLPAGAIHFQREREEETPAYQGPGIPELLSPMRDAPCLLKGGMERPQVENRL

SEQ ID NO: 9830 - protein, 406 aa, Homo Sapiens
MAAETLLSSLLGLLLLGLLLPASLTGGVGSLNLEELSEMRYGIEILPLPVMGGQSQSSDVVIVSSKYKQRYECRLPAGAIHFQREREEETPAYQGPGIPELLSPMRDAPCLLKTKDWWTYEFCYGRHIQQYHMEDSASGAPNDFQNNVQVKVIRSPADLIRFIEELKGGTKKGKPNIGQEQPVDDAAEVPQREPEKERGDPERQREMEEEEDEDEDEDEDEDERQLLGEFEKELEGILLPSDRDRLRSEVKAGMERELENIIQETEKELDPDGLKKESERDRAMLALTSTLNKLIKRLEEKQSPELVKKHKKKRVVPKKPPPSPQPTGKIEIKIVRPWAEGTEEGARWLTDEDTRNLKEIFFNILVPGAEEAQKERQRQKELESNYRRVWGSPGGEGTGDLDEFDF

SEQ ID NO: 9831 - protein, 560 aa, Homo Sapiens
MAAETLLSSLLGLLLLGLLLPASLTGGVGSLNLEELSEMRYGIEILPLPVMGGQSQSSDVVIVSSKYKQRYECRLPAGAIHFQREREEETPAYQGPGIPELLSPMRDAPCLLKTKDWWTYEFCYGRHIQQYHMEDSEIKGEFLCDEGAGISGDYIDRVDEPLSCSYVLTIRTPRLCPHPLLRPPPSAAPQAILCHPSLQPEEYMAYVQRQADSKQYGDKIIEELQDLGPQVWSETKSGVAPQKMAGASPTKDDSKDSDFWKMLNEPEDQAPGGEEVPAEEQDPSPEAADSASGAPNDFQNNVQVKVIRSPADLIRFIEELKGGTKKGKPNIGQEQPVDDAAEVPQREPEKERGDPERQREMEEEEDEDEDEDEDEDERQLLGEFEKELEGILLPSDRDRLRSEVKAGMERELENIIQETEKELDPDGLKKESERDRAMLALTSTLNKLIKRLEEKQSPELVKKHKKKRVVPKKPPPSPQPTGKIEIKIVRPWAEGTEEGARWLTDEDTRNLKEIFFNILVPGAEEAQKERQRQKELESNYRRVWGSPGGEGTGDLDEFDF

SEQ ID NO: 9832 - protein, 613 aa, Homo Sapiens
MAAETLLSSLLGLLLLGLLLPASLTGGVGSLNLEELSEMRYGIEILPLPVMGGQSQSSDVVIVSSKYKQRYECRLPAGAIHFQREREEETPAYQGPGIPELLSPMRDAPCLLKTKDWWTYEFCYGRHIQQYHMEDSEIKGEVLYLGYYQSAFDWDDETAKASKQHRLKRYHSQTYGNGSKCDLNGRPREAEVRFLCDEGAGISGDYIDRVDEPLSCSYVLTIRTPRLCPHPLLRPPPSAAPQAILCHPSLQPEEYMAYVQRQAVDSKQYGDKIIEELQDLGPQVWSETKSGVAPQKMAGASPTKDDSKDSDFWKMLNEPEDQAPGGEEVPAEEQDPSPEAADSASGAPNDFQNNVQVKVIRSPADLIRFIEELKGGTKKGKPNIGQEQPVDDAAEVPQREPEKERGDPERQREMEEEEDEDEDEDEDEDERQLLGEFEKELEGILLPSDRDRLRSEVKAGMERELENIIQETEKELDPDGLKKESERDRAMLALTSTLNKLIKRLEEKQSPELVKKHKKKRVVPKKPPPSPQPTGKIEIKIVRPWAEGTEEGARWLTDEDTRNLKEIFFNILVPGAEEAQKERQRQKELESNYRRVWGSPGGEGTGDLDEFDF

SEQ ID NO: 9833 - protein, 667 aa, Homo Sapiens
MAAETLLSSLLGLLLLGLLLPASLTGGVGSLNLEELSEMRYGIEILPLPVMGGQSQSSDVVIVSSKYKQRYECRLPAGAIHFQREREEETPAYQGPGIPELLSPMRDAPCLLKTKDWWTYEFCYGRHIQQYHMEDSEIKGEVLYLGYYQSAFDWDDETAKASKQHRLKRYHSQTYGNGSKCDLNGRPREAEVRFLCDEGAGISGDYIDRVDEPLSCSYVLTIRTPRLCPHPLLRPPPSAAPQAILCHPSLQPEEYMAYVQRQADSKQYGDKIIEELQDLGPQVWSETKSGVAPQKMAGASPTKDDSKDSDFWKMLNEPEDQAPGGEEVPAEEQDPSPEAADSASGAPNDFQNNVQVKVIRSPADLIRFIEELKGGTKKGKPNIGQEQPVDDAAEVPQREPEKERGDPERQREMEEEEDEDEDEDEDEDERQLLGEFEKELEGILLPSDRDRLRSEVKAGMERELENIIQETEKELDPDGLKKESERDRAMLALTSTLNKLIKRLEEKQSPELVKKHKKKRVVPKKPPPSPQPTEEDPEHRVRVRVTKLRLGGPNQDLTVLEMKRENPQLKQIEGLVKELLEREGLTAAGKIEIKIVRPWAEGTEEGARWLTDEDTRNLKEIFFNILVPGAEEAQKERQRQKELESNYRRVWGSPGGEGTGDLDEFDF

SEQ ID NO: 9834 - protein, 597 aa, Homo Sapiens
MAAETLLSSLLGLLLLGLLLPASLTGGVGSLNLEELSEMRYGIEILPLPVMGGQSQSSDVVIVSSKYKQRYECRLPAGAIHFQREREEETPAYQGPGIPELLSPMRDAPCLLKTKDWWTYEFCYGRHIQQYHMEDSEIKGEVLYLGYYQSAFDWDDETAKASKQHRLKRYHSQTYGNGSKCDLNGRPREAEVRFLCDEGAGISGDYIDRVDEPLSCSYVLTIRTPRLCPHPLLRPPPSAAPQAILCHPSLQPEEYMAYVQRQADSKQYGDKIIEELQDLGPQVWSETKSGVAPQKMAGASPTKDDSKDSDFWKMLNEPEDQAPGGEEVPAEEQDPSPEAADSASGAPNDFQNNVQVKVIRSPADLIRFIEELKGGTKKGKPNIGQEQPVDDAAEVPQREPEKERGDPERQREMEEEEDEDEDEDEDEDERQLLGEFEKELEGILLPSDRDRLRSETEKELDPDGLKKESERDRAMLALTSTLNKLIKRLEEKQSPELVKKHKKKRVVPKKPPPSPQPTGKIEIKIVRPWAEGTEEGARWLTDEDTRNLKEIFFNILVPGAEEAQKERQRQKELESNYRRVWGSPGGEGTGDLDEFDF

SEQ ID NO: 9835 - protein, 652 aa, Homo Sapiens
MAAETLLSSLLGLLLLGLLLPASLTGGVGSLNLEELSEMRYGIEILPLPVMGGQSQSSDVVIVSSKYKQRYECRLPAGAIHFQREREEETPAYQGPGIPELLSPMRDAPCLLKTKDWWTYEFCYGRHIQQYHMEDSEIKGEVLYLGYYQSAFDWDDETAKASKQHRLKRYHSQTYGNGSKCDLNGRPREAEVRFLCDEGAGISGDYIDRVDEPLSCSYVLTIRTPRLCPHPLLRPPPSAAPQAILCHPSLQPEEYMAYVQRQADSKQYGDKIIEELQDLGPQVWSETKSGVAPQKMAGASPTKDDSKDSDFWKMLNEPEDQAPGGEEVPAEEQDPSPEAADSASGAPNDFQNNVQVKVIRSPADLIRFIEELKGGTKKGKPNIGQEQPVDDAAEVPQREPEKERGDPERQREMEEEEDEDEDEDEDEDERQLLGEFEKELEGILLPSDRDRLRSETEKELDPDGLKKESERDRAMLALTSTLNKLIKRLEEKQSPELVKKHKKKRVVPKKPPPSPQPTEEDPEHRVRVRVTKLRLGGPNQDLTVLEMKRENPQLKQIEGLVKELLEREGLTAAGKIEIKIVRPWAEGTEEGARWLTDEDTRNLKEIFFNILVPGAEEAQKERQRQKELESNYRRVWGSPGGEGTGDLDEFDF

SEQ ID NO: 9836 - protein, 612 aa, Homo Sapiens
MAAETLLSSLLGLLLLGLLLPASLTGGVGSLNLEELSEMRYGIEILPLPVMGGQSQSSDVVIVSSKYKQRYECRLPAGAIHFQREREEETPAYQGPGIPELLSPMRDAPCLLKTKDWWTYEFCYGRHIQQYHMEDSEIKGEVLYLGYYQSAFDWDDETAKASKQHRLKRYHSQTYGNGSKCDLNGRPREAEVRFLCDEGAGISGDYIDRVDEPLSCSYVLTIRTPRLCPHPLLRPPPSAAPQAILCHPSLQPEEYMAYVQRQADSKQYGDKIIEELQDLGPQVWSETKSGVAPQKMAGASPTKDDSKDSDFWKMLNEPEDQAPGGEEVPAEEQDPSPEAADSASGAPNDFQNNVQVKVIRSPADLIRFIEELKGGTKKGKPNIGQEQPVDDAAEVPQREPEKERGDPERQREMEEEEDEDEDEDEDEDERQLLGEFEKELEGILLPSDRDRLRSEVKAGMERELENIIQETEKELDPDGLKKESERDRAMLALTSTLNKLIKRLEEKQSPELVKKHKKKRVVPKKPPPSPQPTGKIEIKIVRPWAEGTEEGARWLTDEDTRNLKEIFFNILVPGAEEAQKERQRQKELESNYRRVWGSPGGEGTGDLDEFDF

SEQ ID NO: 9837 - protein, 580 aa, Homo Sapiens
MAAETLLSSLLGLLLLGLLLPASLTGGVGSLNLEELSEMRYGIEILPLPVMGGQSQSSDVVIVSSKYKQRYECRLPAGAIHFQREREEETPAYQGPGIPELLSPMRDAPCLLKTKDWWTYEFCYGRHIQQYHMEDSEIKGEVLYLGYYQSAFDWDDETAKFLCDEGAGISGDYIDRVDEPLSCSYVLTIRTPRLCPHPLLRPPPSAAPQAILCHPSLQPEEYMAYVQRQAVDSKQYGDKIIEELQDLGPQVWSETKSGVAPQKMAGASPTKDDSKDSDFWKMLNEPEDQAPGGEEVPAEEQDPSPEAADSASGAPNDFQNNVQVKVIRSPADLIRFIEELKGGTKKGKPNIGQEQPVDDAAEVPQREPEKERGDPERQREMEEEEDEDEDEDEDEDERQLLGEFEKELEGILLPSDRDRLRSEVKAGMERELENIIQETEKELDPDGLKKESERDRAMLALTSTLNKLIKRLEEKQSPELVKKHKKKRVVPKKPPPSPQPTGKIEIKIVRPWAEGTEEGARWLTDEDTRNLKEIFFNILVPGAEEAQKERQRQKELESNYRRVWGSPGGEGTGDLDEFDF

SEQ ID NO: 9838 - protein, 146 aa, Homo Sapiens
MAAETLLSSLLGLLLLGLLLPASLTGGVGSLNLEELSEMRYGIEILPLPVMGGQSQSSDVVIVSSKYKQRYECRLPAGAIHFQREREEETPAYQGPGIPELLSPMRDAPCLLKTKDWWTYEFCYGRHIQQYHMEDSEIKGLQAASS

SEQ ID NO: 9839 - protein, 186 aa, Homo Sapiens
MAAETLLSSLLGLLLLGLLLPASLTGGVGSLNLEELSEMRYGIEILPLPVMGGQSQSSDVVIVSSKYKQRYECRLPAGAIHFQREREEETPAYQGPGIPELLSPMRDAPCLLKTKDWWTYEFCYGRHIQQYHMEGILLPSDRDRLRSEVKAGMERELENIIQETEKELDPDGLKKESERDRAMLAL

SEQ ID NO: 9840 - protein, 162 aa, Homo Sapiens
MAAETLLSSLLGLLLLGLLLPASLTGGVGSLNLEELSEMRYGIEILPLPVMGGQSQSSDVVIVSSKYKQRYECRLPAGAIHFQREREEETPAYQGPGIPELLSPMRDAPCLLKTYGNGSKCDLNGRPREAEVRFLCDEGAGISGDYIDRVDEPLSCSYVLTI

SEQ ID NO: 9841 - protein, 538 aa, Homo Sapiens
MAAETLLSSLLGLLLLGLLLPASLTGGVGSLNLEELSEMRYGIEILPLPVMGGQTKDWWTYEFCYGRHIQQYHMEDSEIKGEVLYLGYYQSAFDWDDETAKASKQHRLKRYHSQTYGNGSKCDLNGRPREAEVRFLCDEGAGISGDYIDRVDEPLSCSYVLTIRTPRLCPHPLLRPPPSAAPQAILCHPSLQPEEYMAYVQRQADSKQYGDKIIEELQDLGPQVWSETKSGVAPQKMAGASPTKDDSKDSDFWKMLNEPEDQAPGGEEVPAEEQDPSPEAADSASGAPNDFQNNVQVKVIRSPADLIRFIEELKGGTKKGKPNIGQEQPVDDAAEVPQREPEKERGDPERQREMEEEEDEDEDEDEDEDERQLLGEFEKELEGILLPSDRDRLRSETEKELDPDGLKKESERDRAMLALTSTLNKLIKRLEEKQSPELVKKHKKKRVVPKKPPPSPQPTGKIEIKIVRPWAEGTEEGARWLTDEDTRNLKEIFFNILVPGAEEAQKERQRQKELESNYRRVWGSPGGEGTGDLDEFDF

SEQ ID NO: 9842 - protein, 252 aa, Homo Sapiens
MALVLILQLLTLFPPASYHPKPWLGAQPATVVTPGVNVTLRCRAPQPAWRFGLFKPGEIAPLLFRDVSSELAEFFLEEVTPAQGGSYRCCYRRPDWGPGVWSQPSDVLELLVTEELPRPSLVALPGPVVGPGANVSLRCAGRLRNMSFVLYREGVAAPLQYRHSAQPWADFTLLGARAPGTYSCYYHTPSAPYVLSQRSEVLVISWEDSGSSDYTRGNLVRLGLAGLVLISLGALVTFDWRSQNRAPAGIRP

SEQ ID NO: 9843 - protein, 271 aa, Homo Sapiens
MALVLILQLLTLFPPASYHPKPWLGAQPATVVTPGVNVTLRCRAPQPAWRFGLFKPGEIAPLLFRDVSSELAEFFLEEVTPAQGGSYRCCYRRPDWGPGVWSQPSDVLELLVTEELPRPSLVALPGPVVGPGANVSLRCAGRLRNMSFVLYREGVAAPLQYRHSAQPWADFTLLGARAPGTYSCYYHTPSAPYVLSQRSEVLVISWEGEGPEARPASSAPGMQAPGPPPSDPGAQAPSLSSFRPRGLVLQPLLPQTQDSWDPAPPPSDPGV

SEQ ID NO: 9844 - protein, 271 aa, Homo Sapiens; identical to SEQ ID NO: 9843

SEQ ID NO: 9845 - protein, 268 aa, Homo Sapiens [sequence omitted]

SEQ ID NO: 9846 - protein, 161 aa, Homo Sapiens
MALVLILQLLTLWPLCHTDITPSAGRILSGGGDSSPRGKLPLLLPKARLGAGCLVPAQRCPGAAGDRGAAAAVAGGAARAGGGSWRQREPALRGPPAEHELRAVPRGRGGPAAVPPLRAALGRLHAAGRPRPRHLQLLLSHALRALRAVAAQRGAGHQLGR

SEQ ID NO: 9847 - protein, 267 aa, Homo Sapiens
MALVLILQLLTLWPLCHTDITPSVAIIVPPASYHPKPWLGAQPATVVTPGVNVTLRCRAPQPAWRFGLFKPGEIAPLLFRDVSSELAEFFLEEVTPAQGGSYRCCYRRPDWGPGVWSQPSDVLELLVTEELPRPSLVALPGPVVGPGANVSLRCAGRLRNMSFVLYREGVAAPLQYRHSAQPWADFTLLGARAPGTYSCYYHTPSAPYVLSQRSEVLVISWEDSGSSDYTRGNLVRLGLAGLVLISLGALVTFDWRSQNRAPAGIRP

SEQ ID NO: 9848 - protein, 267 aa, Homo Sapiens; identical to SEQ ID NO: 9847

SEQ ID NO: 9849 - protein, 286 aa, Homo Sapiens
MALVLILQLLTLWPLCHTDITPSVAIIVPPASYHPKPWLGAQPATVVTPGVNVTLRCRAPQPAWRFGLFKPGEIAPLLFRDVSSELAEFFLEEVTPAQGGSYRCCYRRPDWGPGVWSQPSDVLELLVTEELPRPSLVALPGPVVGPGANVSLRCAGRLRNMSFVLYREGVAAPLQYRHSAQPWADFTLLGARAPGTYSCYYHTPSAPYVLSQRSEVLVISWEGEGPEARPASSAPGMQAPGPPPSDPGAQAPSLSSFRPRGLVLQPLLPQTQDSWDPAPPPSDPGV

SEQ ID NO: 9850 - protein, 286 aa, Homo Sapiens; identical to SEQ ID NO: 9849

SEQ ID NO: 9851 - protein, 263 aa, Homo Sapiens
MALVLILQLLTLWPLCHTDITPSVPPASYHPKPWLGAQPATVVTPGVNVTLRCRAPQPAWRFGLFKPGEIAPLLFRDVSSELAEFFLEEVTPAQGGSYRCCYRRPDWGPGVWSQPSDVLELLVTEELPRPSLVALPGPVVGPGANVSLRCAGRLRNMSFVLYREGVAAPLQYRHSAQPWADFTLLGARAPGTYSCYYHTPSAPYVLSQRSEVLVISWEDSGSSDYTRGNLVRLGLAGLVLISLGALVTFDWRSQNRAPAGIRP

SEQ ID NO: 9852 - protein, 282 aa, Homo Sapiens
MALVLILQLLTLWPLCHTDITPSVPPASYHPKPWLGAQPATVVTPGVNVTLRCRAPQPAWRFGLFKPGEIAPLLFRDVSSELAEFFLEEVTPAQGGSYRCCYRRPDWGPGVWSQPSDVLELLVTEELPRPSLVALPGPVVGPGANVSLRCAGRLRNMSFVLYREGVAAPLQYRHSAQPWADFTLLGARAPGTYSCYYHTPSAPYVLSQRSEVLVISWEGEGPEARPASSAPGMQAPGPPPSDPGAQAPSLSSFRPRGLVLQPLLPQTQDSWDPAPPPSDPGV

SEQ ID NO: 9853 - protein, 231 aa, Homo Sapiens
MASMAAIGSCSKEYRVLLGQLQKQTDLMQDTSRLLDPYIRIQGLDVPKLREHCRERPGAFPSEETLRGLGRRGFLQTLNATLGCVLHRLADLEQRLPKAQDLERSGLNIEDLEKLQMARPNILGLRNNIYCMAQLLDNSDTAEPTKAGRGASQPPTPTPASDAFQRKLEGCRFLHGYHRFMHSVGRVFSKWGESPNRSRRHSPHQALRKGVRRTRPSRKGKRLMTRGQLPR

SEQ ID NO: 9854 - protein, 20 aa, Homo Sapiens
MGVLLTQRTLLNTYPRPGCS

SEQ ID NO: 9855 - protein, 252 aa, Homo Sapiens
MGVLLTQRTLLSLVLALLFPSMASMAAIGSCSKEYRVLLGQLQKQTDLMQDTSRLLDPYIRIQGLDVPKLREHCRERPGAFPSEETLRGLGRRGFLQTLNATLGCVLHRLADLEQRLPKAQDLERSGLNIEDLEKLQMARPNILGLRNNIYCMAQLLDNSDTAEPTKAGRGASQPPTPTPASDAFQRKLEGCRFLHGYHRFMHSVGRVFSKWGESPNRSRRHSPHQALRKGVRRTRPSRKGKRLMTRGQLPR

SEQ ID NO: 9856 - protein, 188 aa, Homo Sapiens
LEPATEYMARVRCADASHFWKWSEWSGQNFTTLEAAPSEAPDVWRIVSLEPGNHTVTLFWKPLSKLHANGKILFYNVVVENLDKPSSSELHSIPAPANSTKLILDRCSYQICVIANNSVGASPASVIVISADPENSVSTCFSGTVPSVWGEGDFSHGSGHFCPGDSSTYMGNYLKFIQVTATLTNSHH

SEQ ID NO: 9857 - protein, 979 aa, Homo Sapiens
MALFAVFQTTFFLTLLSLRTYQSEVLAERLPLTPVSLKVSTNSTRQSLHLQWTVHNLPYHQELKMVFQIQISRIETSNVIWVGNYSTTVKWNQVLHWSWESELPLECATHFVRIKSLVDDAKFPEPNFWSNWSSWEEVSVQDSTGQDILFVFPKDKLVEEGTNVTICYVSRNIQNNVSCYLEGKQIHGEQLDPHVTAFNLNSVPFIRNKGTNIYCEASQGNVSEGMKGIVLFVSKVLEEPKDFSCETEDFKTLHCTWDPGTDTALGWSKQPSQSYTLFESFSGEKKLCTHKNWCNWQITQDSQETYNFTLIAENYLRKRSVNILFNLTHRVYLMNPFSVNFENVNATNAIMTWKVHSIRNNFTYLCQIELHGEGKMMQYNVSIKVNGEYFLSELEPATEYMARVRCADASHFWKWSEWSGQNFTTLEAAPSEAPDVWRIVSLEPGNHTVTLFWKPLSKLHANGKILFYNVVVENLDKPSSSELHSIPAPANSTKLILDRCSYQICVIANNSVGASPASVIVISADPENKEVEEERIAGTEGGFSLSWKPQPGDVIGYVVDWCDHTQDVLGDFQWKNVGPNTTSTVISTDAFRPGVRYDFRIYGLSTKRIACLLEKKTGYSQELAPSDNPHVLVDTLTSHSFTLSWKDYSTESQPGFIQGYHVYLKSKARQCHPRFEKAVLSDGSECCKYKIDNPEEKALIVDNLKPESFYEFFITPFTSAGEGPSATFTKVTTPDEHSSMLIHILLPMVFCVLLIMVMCYLKSQWIKETCYPDIPDPYKSSILSLIKFKENPHLIIMNVSDCIPDAIEVVSKPEGTKIQFLGTRKSLTETELTKPNYLYLLPTEKNHSGPGPCICFENLTYNQAASDSGSCGHVPVSPKAPSMLGLMTSPENVLKALEKNYMNSLGEIPAGETSLNYVSQLASPMFGDKDSLPTNPVEAPHCSEYKMQMAVSLRLALPPPTENSSLSSITLLDPGEHYC

SEQ ID NO: 9858 - protein, 342 aa, Homo Sapiens
MALFAVFQTTFFLTLLSLRTYQSEVLAERLPLTPVSLKVSTNSTRQSLHLQWTVHNLPYHQELKMVFQIQISRIETSNVIWVGNYSTTVKWNQVLHWSWESELPLECATHFVRIKSLVDDAKFPEPNFWSNWSSWEEVSVQDSTGQDILFVFPKDKLVEEGTNVTICYVSRNIQNNVSCYLEGKQIHGEQLDPHVTAFNLNSVPFIRNKGTNIYCEASQGNVSEGMKGIVLFVSKVLEEPKDFSCETEDFKTLHCTWDPGTDTALGWSKQPSQSYTLFESFSGEKKLCTHKNWCNWQITQDSQETYNFTLIAENYLRKRSVNILFNLTHRGETRVVTAHRGH

SEQ ID NO: 9859 - protein, 35 aa, Homo Sapiens
  misc_feature (1)..(1): Xaa can be any naturally occurring amino acid
XIKETCYPDIPDPYKSSILSLIKFKISSKVWLNRR

SEQ ID NO: 9860 - protein, 62 aa, Homo Sapiens
  misc_feature (1)..(1): Xaa can be any naturally occurring amino acid
XSMLIHILLPMVFCVLLIMVMCYLKSQWIKETCYPDIPDPYKSSILSLIKFKISSKVWLNRR

SEQ ID NO: 9861 - protein, 111 aa, Homo Sapiens
MLDWRLASAHFILAVTLTLWSSGKVLSVDVTTTEAFDSGVIDVQSTPTVREEKSATDLTAKLLLLDELVSLENDVIETKKKRSFSGFGSPLDRLSAGSVDHKGKQRCNFLG

SEQ ID NO: 9862 - protein, 133 aa, Homo Sapiens
MLDWRLASAHFILAVTLTLWSSGKVLSVDVTTTEAFDSGVIDVQSTPTVREEKSATDLTAKLLLLDELVSLENDVIETKKKRSFSGFGSPLDRLSAGSVDHKGKQRKVVDHPKRRFGIPMDRIGRNRLSNSRG

SEQ ID NO: 9863 - protein, 815 aa, Homo Sapiens
MFRLGLLVCFYNDLELLDATVAQVLLYQMIKCSHLRGFQAGVQKLKAELLDIAMENQTLNETLGSLSDAVVGLTYSQLESLSPEAVHGAISTLNQVSGWAKSQVIILSAKYLAHEKVLSFYNVSQMGALLAGVSTQAFCSMKRKDISQVLRSAVSQYVSDLSPAQQQGILSKMVQAEDTAPGIVEIQGAFFKEVSLFDLRRQPGFNSTVLKDKELGRSQALFLYELLLKTTRRPEELLSAGQLVKGVTCSHIDAMSTDFFLAHFQDFQNNFALLSPYQVNCLAWKYWEVSRLSMPPFLLAALPARYLASVPASQCVPFLISLGKSWLDSLVLDSHKKTSVLRKVQQCLDDSIADEYTVDIMGNLLCHLPAAIIDRGISPRAWATALHGLRDCPDLNPEQKAAVRLKLLGQYGLPQHWTAETTKDLGPFLVLFSGDELSSIATKFPEILLQAASKMARTLPTKEFLWAVFQSVRNSSDKIPSYDPMPGCHGVVAPSSDDIFKLAEANACWALEDLRCMEEDTFIRTVELLGAVQGFSRPQLMTLKEKAIQVWDMPSYWREHHIVSLGRIALALNESELEQLDLSSIDTVASLSWQTEWTPGQAESILQGYLDDSGYSIQDLKSFHLVGLGATLCAINITEIPLIKISEFRVVVARIGTLLCSTHVLAEFKRKAEVVFGDPTEWTSSVLQELGTIAAGLTKAELRMLDKDLMPYFQPSAIKCLPDEIFKELSAEQIASLGPENAAAVTHAQRRRLSPLQLQSLQQALDGAKTHSWQDAPASAGPTRTSSSRSPAGALQSWGLWLGCPLLVLMAKLLW

SEQ ID NO: 9864 - protein, 1060 aa, Homo Sapiens
MGNSITYRDQAAVENHLEQRLHQPQKLLEDLRKTDAQQFRTAMKCLLEDKKDGLDLKDIIIDLGEIRERALQSPGVNRSLFLITLERCFQMLNSLECVEILGKVLRGSSGSFLQPDITERLPRDLREDAFKNLSAVFKDLYDKTSAHSQRALYSWMTGILQTSSNATDDSASWVSAEHLWVLGRYMVHLSFEEITKISPIEIGLFISYDNATKQLDMVYDITPELAQAFLERISSSNFNMRNTSTIHRLGLLVCFYNDLELLDATVAQVLLYQMIKCSHLRGFQAGVQKLKAELLDIAMENQTLNETLGSLSDAVVGLTYSQLESLSPEAVHGAISTLNQVSGWAKSQVIILSAKYLAHEKVLSFYNVSQMGALLAGVSTQAFCSMKRKDISQVLRSAVSQYVSDLSPAQQQGILSKMVQAEDTAPGIVEIQGAFFKEVSLFDLRRQPGFNSTVLKDKELGRSQALFLYELLLKTTRRPEELLSAGQLVKGVTCSHIDAMSTDFFLAHFQDFQNNFALLSPYQVNCLAWKYWEVSRLSMPPFLLAALPARYLASVPASQCVPFLISLGKSWLDSLVLDSHKKTSVLRKVQQCLDDSIADEYTVDIMGNLLCHLPAAIIDRGISPRAWATALHGLRDCPDLNPEQKAAVRLKLLGQYGLPQHWTAETTKDLGPFLVLFSGDELSSIATKFPEILLQAASKMARTLPTKEFLWAVFQSVRNSSDKIPSYDPMPGCHGVVAPSSDDIFKLAEANACWALEDLRCMEEDTFIRTVELLGAVQGFSRPQLMTLKEKAIQVWDMPSYWREHHIVSLGRIALALNESELEQLDLSSIDTVASLSWQTEWTPGQAESILQGYLDDSGYSIQDLKSFHLVGLGATLCAINITEIPLIKISEFRVVVARIGTLLCSTHVLAEFKRKAEVVFGDPTEWTSSVLQELGTIAAGLTKAELRMLDKDLMPYFQPSAIKCLPDEIFKELSAEQIASLGPENAAAVTHAQRRRLSPLQLQSLQQALDGAKTHSWQDAPASAGPTRTSSSRSPAGALQSWGLWLGCPLLVLMAKLLW

SEQ ID NO: 9865 - protein, 1153 aa, Homo Sapiens
MSQEPTTYSLFLFLFLSHGVSSYTVPNSRQDLHPLLQNMAEEIIDGSYLNALLDLIQFQSSHVWTDDLSHRVLAYLNSRNVAFTIPSLQAAVENHLEQRLHQPQKLLEDLRKTDAQQFRTAMKCLLEDKKDGLDLKDIIIDLGEIRERALQSPGVNRSLFLITLERCFQMLNSLECVEILGKVLRGSSGSFLQPDITERLPRDLREDAFKNLSAVFKDLYDKTSAHSQRALYSWMTGILQTSSNATDDSASWVSAEHLWVLGRYMVHLSFEEITKISPIEIGLFISYDNATKQLDMVYDITPELAQAFLERISSSNFNMRNTSTIHRQAHELWALEPFPKMLGLLVCFYNDLELLDATVAQVLLYQMIKCSHLRGFQAGVQKLKAELLDIAMENQTLNETLGSLSDAVVGLTYSQLESLSPEAVHGAISTLNQVSGWAKSQVIILSAKYLAHEKVLSFYNVSQMGALLAGVSTQAFCSMKRKDISQVLRSAVSQYVSDLSPAQQQGILSKMVQAEDTAPGIVEIQGAFFKEVSLFDLRRQPGFNSTVLKDKELGRSQALFLYELLLKTTRRPEELLSAGQLVKGVTCSHIDAMSTDFFLAHFQDFQNNFALLSPYQVNCLAWKYWEVSRLSMPPFLLAALPARYLASVPASQCVPFLISLGKSWLDSLVLDSHKKTSVLRKVQQCLDDSIADEYTVDIMGNLLCHLPAAIIDRGISPRAWATALHGLRDCPDLNPEQKAAVRLKLLGQYGLPQHWTAETTKDLGPFLVLFSGDELSSIATKFPEILLQAASKMARTLPTKEFLWAVFQSVRNSSDKIPSYDPMPGCHGVVAPSSDDIFKLAEANACWALEDLRCMEEDTFIRTVELLGAVQGFSRPQLMTLKEKAIQVWDMPSYWREHHIVSLGRIALALNESELEQLDLSSIDTVASLSWQTEWTPGQAESILQGYLDDSGYSIQDLKSFHLVGLGATLCAINITEIPLIKISEFRVVVARIGTLLCSTHVLAEFKRKAEVVFGDPTEWTSSVLQELGTIAAGLTKAELRMLDKDLMPYFQPSAIKCLPDEIFKELSAEQIASLGPENAAAVTHAQRRRLSPLQLQSLQQALDGAKTHSWQDAPASAGPTRTSSSRSPAGALQSWGLWLGCPLLVLMAKLLW

SEQ ID NO: 9866 - protein, 1139 aa, Homo Sapiens
MSQEPTTYSLFLFLFLSHGVSSYTVPNSRQDLHPLLQNMAEEIIDGSYLNALLDLIQFQSSHVWTDDLSHRVLAYLNSRNVAFTIPSLQAAVENHLEQRLHQPQKLLEDLRKTDAQQFRTAMKCLLEDKKDGLDLKDIIIDLGEIRERALQSPGVNRSLFLITLERCFQMLNSLECVEILGKVLRGSSGSFLQPDITERLPRDLREDAFKNLSAVFKDLYDKTSAHSQRALYSWMTGILQTSSNATDDSASWVSAEHLWVLGRYMVHLSFEEITKISPIEIGLFISYDNATKQLDMVYDITPELAQAFLERISSSNFNMRNTSTIHRLGLLVCFYNDLELLDATVAQVLLYQMIKCSHLRGFQAGVQKLKAELLDIAMENQTLNETLGSLSDAVVGLTYSQLESLSPEAVHGAISTLNQVSGWAKSQVIILSAKYLAHEKVLSFYNVSQMGALLAGVSTQAFCSMKRKDISQVLRSAVSQYVSDLSPAQQQGILSKMVQAEDTAPGIVEIQGAFFKEVSLFDLRRQPGFNSTVLKDKELGRSQALFLYELLLKTTRRPEELLSAGQLVKGVTCSHIDAMSTDFFLAHFQDFQNNFALLSPYQVNCLAWKYWEVSRLSMPPFLLAALPARYLASVPASQCVPFLISLGKSWLDSLVLDSHKKTSVLRKVQQCLDDSIADEYTVDIMGNLLCHLPAAIIDRGISPRAWATALHGLRDCPDLNPEQKAAVRLKLLGQYGLPQHWTAETTKDLGPFLVLFSGDELSSIATKFPEILLQAASKMARTLPTKEFLWAVFQSVRNSSDKIPSYDPMPGCHGVVAPSSDDIFKLAEANACWALEDLRCMEEDTFIRTVELLGAVQGFSRPQLMTLKEKAIQVWDMPSYWREHHIVSLGRIALALNESELEQLDLSSIDTVASLSWQTEWTPGQAESILQGYLDDSGYSIQDLKSFHLVGLGATLCAINITEIPLIKISEFRVVVARIGTLLCSTHVLAEFKRKAEVVFGDPTEWTSSVLQELGTIAAGLTKAELRMLDKDLMPYFQPSAIKCLPDEIFKELSAEQIASLGPENAAAVTHAQRRRLSPLQLQSLQQALDGAKTHSWQDAPASAGPTRTSSSRSPAGALQSWGLWLGCPLLVLMAKLLW

SEQ ID NO: 9867 - protein, 1139 aa, Homo Sapiens; identical to SEQ ID NO: 9866

SEQ ID NO: 9868 - protein, 353 aa, Homo Sapiens
MSQEPTTYSLFLFLFLSHGVSSYTVPNSRQDLHPLLQNMAEEIIDGSYLNALLDLIQFQSSHVWTDDLSHRVLAYLNSRNVAFTIPSLQAAVENHLEQRLHQPQKLLEDLRKTDAQQFRTAMKCLLEDKKDGLDLKDIIIDLGEIRERALQSPGVNRSLFLITLERCFQMLNSLECVEILGKVLRGSSGSFLQPDITERLPRDLREDAFKNLSAVFKDLYDKTSAHSQRALYSWMTGILQTSSNATDDSASWVSAEHLWVLGRYMVHLSFEEITKISPIEIGLFISYDNATKQLDMVYDITPELAQAFLERISSSNFNMRNTSTIHSSKQNSWTLPWRTRPSMRPWVLCRMQL

SEQ ID NO: 9869 - protein, 94 aa, Homo Sapiens
AMGDKATVVGGQAEAPDSVAMSSWERRLHRAKCAPSYLFSCFNGGECVHPAFCDCRRFNATGPRCQMVYNAGPERDSICRAWGQHHVETFDGLY

SEQ ID NO: 9870 - protein, 2913 aa, Homo Sapiens
MGVLASALCWLLCVWLPWGEQAAESLRVQRLAAAPVLWGSAEPQPEPAGQPSSSHQEATLAMGDKATVVGGQQAEAPDSVAMSSWERRLHRAKCAPSYLFSCFNGGECVHPAFCDCRRFNATGPRCQMVYNAGPERDSICRAWGQHHVETFDGLYYYLSGKGSYTLVGRHEPEGQSFSIQVHNDPQCGSSPYTCSRAVSLFFVGEQEIHLAKEVTHGGMRVQLPHVMGSARLQQLAGYVIVRHQSAFTLAWDGASAVYIKMSPELLGWTHGLCGNNNADPKDDLVTSSGKLTDDVVEFVHSWQEQAPNQPPGPTTSSLPRPPCLQQNPGTMQGVYEQCEALLRPPFDACHAYVSPLPFTASCTSDLCQSMGDVATWCRALAEYARACAQAGRPLQGWRTQLRQCTVHCKEKAFTYNECIACCPASCHPRASCVDSEIACVDGCYCPNGLIFEDGGCVAPAECPCEFHGTLYPPGSVVKEDCNTCTCTSGKWECSTAVCPAECSVTGDIHFTTFDGRRYTFPATCQYILAKSRSSGTFTVTLQNAPCGLNQDGACVQSVSVILHQDPRRQVTLTQAGDVLLFDQYKIIPPYTDDAFEIRRLSSVFLRVRTNVGVRVLYDREGLRLYLQVDQRWVEDTVGLCGTFNGNTQDDFLSPVGVPESTPQLFGNSWKTLSACSPLVSGSPLDPCDVHLQAASYSVQACSVLTGEMFAPCSAFLSPVPYFEQCRRDACRCGQPCLCATLAHYAHLCRRHGLPVDFRARLPACALSCEASKEYSPCVAPCGRTCQDLASPEACGVDGGDDLSRDECVEGCACPPDTYLDTQADLCVPRNQCSCHFQGVDYPPGDSDIPSLGHCHCKDGVMSCDSRAPAAACPAGQVFVNCSDLHTDLELSRERTCEQQLLNLSVSARGPCLSGCACPQGLLRHGDACFLPEECPCTWKGKEYFPGDQVMSPCHTCVCQRGSFQCTLHPCASTCTAYGDRHYRTFDGLPFDFVGACKVHLVKSTSDVSFSVIVENVNCYSSGMICRKFISINVGNSLIVFDDDSGNPSPESFLDDKQEVHTWRVGFFTLVHFPQEHITLLWDQRTTVHVQAGPQWQGQLAGLCGNFDLKTINEMRTPENLELTNPQEFGSSWAAVECPDTLDPRDMCVLNPLREPFAKKECSILLSEVFEICHPVVDVTWFYSNCLTDTCGCSQGGDCECFCASVSAYAHQCCQHGVAVDWRTPRLCPYDCDFFNKVLGKGPYQLSSLAAGGALVGMKAVGDDIVLVRTEDVAPADIVSFLLTAALYKAKAHDPDVVSLEAADRPNFFLHVTANGSLELAKWQGRDTFQQHASFLLHRGTRQAGLVALESLAKPSSFLYVSGAVLALRLYEHTEVFRRGTLFRLLDAKPSGAAYPICEWRYDACASPCFQTCRDPRAASCRDVPRVEGCVPVCPTPQVLDEVTQRCVYLEDCVEPAVWVPTEALGNETLPPSQGLPTPSDEEPQLSQESPRTPTHRPALTPAAPLTTALNPPVTATEEPVVSPGPTQTTLQQPLELTASQLPAGPTESPASKGVTASLLAIPHTPESSSLPVALQTPTPGMVSGAMETTRVTVIFAGSPNITVSSRSPPAPRFPLMTKAVTVRGHGSLPVRTTPPQPSLTASPSSRPVASPGAISRSPTSSGSHKAVLTPAVTKVISRTGVPQPTQAQSASSPSTPLTVAGTAAEQVPVSPLATRSLEIVLSTEKGEAGHSQPMGSPASPQPHPLPSAPPRPAQHTTMATRSPALPPETPAAASLSTATDGLAATPFMSLESTRPSQLLSGLPPDTSLPLAKVGTSAPVATPGPKASVITTPLQPQATTLPAQTLSPVLPFTPAAMTQAHPPTHIAPPAAGTAPGLLLGATLPTSGVLPVAEGTASMVSVVPRKSTTGKVAILSKQVSLPTSMYGSAEGGPTELTPATSHPLTPLVAEPEGAQAGTALPVPTSYALSRVSARTAPQDSMLVLLPQLAEAHGTSAGPHLAAEPVDEATTEPSGRSAPALSIVEGLAEALATTTEANTSTTCVPIAEQDCVRHICLEGQLIRVNQSQHCPQGAAPPRCGILGLAVRVGGDRCCPLWECACRCSIFPDLSFVTFDGSHVALFKEAIYILSQSPDEMLTVHVLDCKSANLGHLNWPPFCLVMLNMTHLAHQVTIDRFNRKVTVDLQPVWPPVSRYGFRIEDTGHMYMILTPSDIQIQWLHSSGLMIVEASKTSKAQGHGLCGICDGDAANDLTLKDGSVVGGAEDPAPFLDSWQVPSSLTSVGQTRFRPDSCATTDCSPCLRMVSNRTFSACHRFVPPESFCELWIRDTKYVQQPCVALTVYVAMCHKFHVCIEWRRSDYCPFLCSSDSTYQACVTACEPPKTCQDGILGPLDPEHCQVLGEGCVCSEGTILHRRHSALCIPEAKCACTDSMGVPRALGETWNSSLSGCCQHQCQAPDTIVPVDLGCPSPRPESCLRFGEVALLLPTKDPCCLGTVCVCNQTLCEGLAPTCRPGHRLLTHFQEDSCCPSYSCECDPDLCEAELVPSCRQDQILITGRLGDSCCTSYFCACGDCPDSIPECQEGEALTVHRNTTELCCPLYQCVCENFRCPQVQCGLGTALVEVWSPDRCCPYKSCECDCDTIPVPRCHLWEKSQLDEEFMHSVENVCGCAKYECVKAPVCLSRELGVMQPGQTVVELSADGVCHTSRCTTVLDPLTNFYQINTTSVLCDIHCEANQEYEHPRDLAACCGSCRNVSCLFTFPNGTTSLFLPGASWIADCARHHCSSTPLGAVLVRSPISCPPLNETECAKVGGSVVPSLEGCCRTCKEDGRSCKKVTIRMTIRKNECRSSTPVNLVSCDGRCPSASIYNYNINTYARFCKCCREVGLQRRSVQLFCATNATWVPYTVQEPTDCACQWS

SEQ ID NO: 9871 - protein, 2925 aa, Homo Sapiens
MGVLASALCWLLCVWLPWGEQAAESLRVQRLGERVVDSGRSGARGMRNVKGMRNGPAQTRVSSSSSHQEATLAMGDKATVVGGQQAEAPDSVAMSSWERRLHRAKCAPSYLFSCFNGGECVHPAFCDCRRFNATGPRCQMVYNAGPERDSICRAWGQHHVETFDGLYYYLSGKGSYTLVGRHEPEGQSFSIQVHNDPQCGSSPYTCSRAVSLFFVGEQEIHLAKEVTHGGMRVQLPHVMGSARLQQLAGYVIVRHQSAFTLAWDGASAVYIKMSPELLGWTHGLCGNNNADPKDDLVTSSGKLTDDVVEFVHSWQEQAPNQPPGPTTSSLPRPPCLQQNPGTMQGVYEQCEALLRPPFDACHAYVSPLPFTASCTSDLCQSMGDVATWCRALAEYARACAQAGRPLQGWRTQLRQCTVHCKEKAFTYNECIACCPASCHPRASCVDSEIACVDGCYCPNGLIFEDGGCVAPAECPCEFHGTLYPPGSVVKEDCNTCTCTSGKWECSTAVCPAECSVTGDIHFTTFDGRRYTFPATCQYILAKSRSSGTFTVTLQNAPCGLNQDGACVQSVSVILHQDPRRQVTLTQAGDVLLFDQYKIIPPYTDDAFEIRRLSSVFLRVRTNVGVRVLYDREGLRLYLQVDQRWVEDTVGLCGTFNGNTQDDFLSPVGVPESTPQLFGNSWKTLSACSPLVSGSPLDPCDVHLQAASYSVQACSVLTGEMFAPCSAFLSPVPYFEQCRRDACRCGQPCLCATLAHYAHLCRRHGLPVDFRARLPACALSCEASKEYSPCVAPCGRTCQDLASPEACGVDGGDDLSRDECVEGCACPPDTYLDTQADLCVPRNQCSCHFQGVDYPPGDSDIPSLGHCHCKDGVMSCDSRAPAAACPAGQVFVNCSDLHTDLELSRERTCEQQLLNLSVSARGPCLSGCACPQGLLRHGDACFLPEECPCTWKGKEYFPGDQVMSPCHTCVCQRGSFQCTLHPCASTCTAYGDRHYRTFDGLPFDFVGACKVHLVKSTSDVSFSVIVENVNCYSSGMICRKFISINVGNSLIVFDDDSGNPSPESFLDDKQEVHTWRVGFFTLVHFPQEHITLLWDQRTTVHVQAGPQWQGQLAGLCGNFDLKTINEMRTPENLELTNPQEFGSSWAAVECPDTLDPRDMCVLNPLREPFAKKECSILLSEVFEICHPVVDVTWFYSNCLTDTCGCSQGGDCECFCASVSAYAHQCCQHGVAVDWRTPRLCPYDCDFFNKVLGKGPYQLSSLAAGGALVGMKAVGDDIVLVRTEDVAPADIVSFLLTAALYKAKAHDPDVVSLEAADRPNFFLHVTANGSLELAKWQGRDTFQQHASFLLHRGTRQAGLVALESLAKPSSFLYVSGAVLALRLYEHTEVFRRGTLFRLLDAKPSGAAYPICEWRYDACASPCFQTCRDPRAASCRDVPRVEGCVPVCPTPQVLDEVTQRCVYLEDCVEPAVWVPTEALGNETLPPSQGLPTPSDEEPQLSQESPRTPTHRPALTPAAPLTTALNPPVTATEEPVVSPGPTQTTLQQPLELTASQLPAGPTESPASKGVTASLLAIPHTPESSSLPVALQTPTPGMVSGAMETTRVTVIFAGSPNITVSSRSPPAPRFPLMTKAVTVRGHGSLPVRTTPPQPSLTASPSSRPVASPGAISRSPTSSGSHKAVLTPAVTKVISRTGVPQPTQAQSASSPSTPLTVAGTAAEQVPVSPLATRSLEIVLSTEKGEAGHSQPMGSPASPQPHPLPSAPPRPAQHTTMATRSPALPPETPAAASLSTATDGLAATPFMSLESTRPSQLLSGLPPDTSLPLAKVGTSAPVATPGPKASVITTPLQPQATTLPAQTLSPVLPFTPAAMTQAHPPTHIAPPAAGTAPGLLLGATLPTSGVLPVAEGTASMVSVVPRKSTTGKVAILSKQVSLPTSMYGSAEGGPTELTPATSHPLTPLVAEPEGAQAGTALPVPTSYALSRVSARTAPQDSMLVLLPQLAEAHGTSAGPHLAAEPVDEATTEPSGRSAPALSIVEGLAEALATTTEANTSTTCVPIAEQDCVRHICLEGQLIRVNQSQHCPQGAAPPRCGILGLAVRVGGDRCCPLWECACRCSIFPDLSFVTFDGSHVALFKEAIYILSQSPDEMLTVHVLDCKSANLGHLNWPPFCLVMLNMTHLAHQVTIDRFNRKVTVDLQPVWPPVSRYGFRIEDTGHMYMILTPSDIQIQWLHSSGLMIVEASKTSKAQGHGLCGICDGDAANDLTLKDGSVVGGAEDPAPFLDSWQVPSSLTSVGQTRFRPDSCATTDCSPCLRMVSNRTFSACHRFVPPESFCELWIRDTKYVQQPCVALTVYVAMCHKFHVCIEWRRSDYCPFLCSSDSTYQACVTACEPPKTCQDGILGPLDPEHCQVLGEGCVCSEGTILHRRHSALCIPEAKCACTDSMGVPRALGETWNSSLSGCCQHQCQAPDTIVPVDLGCPSPRPESCLRFGEVALLLPTKDPCCLGTVCVCNQTLCEGLAPTCRPGHRLLTHFQEDSCCPSYSCECDPDLCEAELVPSCRQDQILITGRLGDSCCTSYFCACGDCPDSIPECQEGEALTVHRNTTELCCPLYQCVCENFRCPQVQCGLGTALVEVWSPDRCCPYKSCECDCDTIPVPRCHLWEKSQLDEEFMHSVENVCGCAKYECVKAPVCLSRELGVMQPGQTVVELSADGVCHTSRCTTVLDPLTNFYQINTTSVLCDIHCEANQEYEHPRDLAACCGSCRNVSCLFTFPNGTTSLFLPGASWIADCARHHCSSTPLGAVLVRSPISCPPLNETECAKVGGSVVPSLEGCCRTCKEDGRSCKKVTIRMTIRKNECRSSTPVNLVSCDGRCPSASIYNYNINTYARFCKCCREVGLQRRSVQLFCATNATWVPYTVQEPTDCACQWS

SEQ ID NO: 9872 - protein, 71 aa, Homo Sapiens
GEFLTVDLNSTHFCCPQYYCVCEPNLCPMPLLNCAEDMNLVKENVSGQCCPTWHCECNCENLIMPTCEVIS

SEQ ID NO: 9873 - protein, 2344 aa, Homo Sapiens
MIPWSIFLLHVLLFSLQEYICASSILMGTSKNGFNENRQKRALLAAQFEATSPRYFFHDAINWGESKIKGSCPYECLNGAFCSKTGTCDCQIFQALGTRCQIIPNMGNGRDGICKTWGQYHFETFDGIYYYFPGNCSYIFAKDCGDLEPRYTVWVHNSPKCLGSVYSCYRSISLFFSNQEEIRIYGHEIKKNGISLTLPQTIGQIFIEKLADYILVKTTFGFSLAWDGISGIYLKLSEDHKGKSCGLCGNYNDIQSDDFIILQEDYTEDIAMFANSWSVQTPDDTKCVLTPSDFPNPCSSGMPAFEAIFFKCQILLQFPFLSCHEYIDPYLYIASCVNDLCKTDDDETYCRAATEYARACSHAGYPIQDWRDDFPACTDKCDDSFVHRDCISCCPPTCTFEKQCLGSNLHCLDGCYCPDGLVMDNGTCISLENCPCGFHGLAYSVGSKIEQECTECVCVGGVWNCTEQDCPVQCSVVGDSHFTTFDGRHYSFIGMCQYILVKGTGKDKFTITLQKAPCEQNLGLVCLQSITLILEDDFNKQVTLGRGGQILTSPNQGFNLNGIVEIQTLSSLFILLKTTFGLKILFAIDGERIYIQLTSAWKRRTLGLCGTFNGNIRDDFLSPSGMIEGTPQLHANAWRVSSTCFAPVHVPVVDPCNINQQNIGYAAHCDVIHQELFAPCHIYISPGLYYQLCRHDACKCGSSCLCNALAHYAYLCGQHGVPIDFRTQISFCAVVCQKGMLYHHCSSFCLHSCISLSSPEQCSDDCAEGCNCPEGKFYEDTLNFCVPIFHCRCHYRGSVYQPGELIPTPSGLCQCSNGTVKCDELATPSAVHICPEGKEYFDCRFPDPELPAGGVNCETTCANLAMNFTCTPSSPCISGCVCAPGMAEHRGKCYVPESCPCIWKDWEYLSGEVIATPCYTCVCRRGMFNCTYYPCPAVCTIYGDRHYYSFDGLEYDYISDCQVFLIKSADDSDISVIAQNKKCFDNDIVCSKSVLISVGDTEIYLNDTPYKQKQSGFFLENKSTYQLWKAGYYIVVYFPEKDITILWDRKTTIHIKVGPQWKNKLSGLCGNFDKCTSNDMTTSNNLEVRNARVFGDSWALGQCESPDETIKPCEAHQNKFPYAKKECSILYSDIFASCRNVIDVTSFAKNCHEDTCNCNLGGDCECLCTSIAAYAYKCCQEGISIHWRSSTVCSLDCEYYNEGLGEGPYMLASYGQSGLVLGANMTSRSVFCLPRSSVHTSLFFYFMITPGLFKEKVSSLALVSLESAERPNYFLYVHDNDTLSLELWEANSAFHRRATFFHHQGLWIPGYSAFELYSKKGFFIIFTDSSVKASKYDDSEEFKHSSSFSIEEIQAAVPYRKMCEWRYEPCATPCFKTCSDPEALACKFLPPVEGCLPYCPKNMILDEVTLKCVYPRDCIPVIPTEPTLMPPAKPTVPMFTVWEMITPSDITVFDMLTPTTGLECEPQKFDPVYDCSQYICLNMEWQLYNWSLNCPKDVEMPDCGFRGRPVQVNSDICCPEWECPCRCSMLSELSIITFDGNNAALYSMASYILVRIPGEIIVAHIEKCSMNQNGNSLKKLAPSGRISGLCFKKLNVTTPIHKIIVNRLARKVEVDSIVVPLPFSSQELSIEDSGSMYVITTPAGLIIKWSHLTGIIDIHFGFRFNLSSYTEGLCGICNEDPDDDLRMQNGTIITNMEDIGLFIESWEIEKSFEVTMRRPVRNCTEHDCSQCIDLLNRRIFIPCHDKVSPEDFCEKMWINYTYFWNYECDALSAYVALCNKFDICIQWRTPDYCSLSCPEGKEYQPCVRPCEARTCLNQWFYGHTSCLNLREDCVCKVGTILHRPHSAQCIPEKECACTDSEDQPRTAGEIWNGGIDECTLYKCLENGSIIPIEPDCDEEPTPVCEREAEVVMGIIDKWTCCSKEVCGCDTTLCETSIPTCTNSQKLIVGHSPLSCCPQYKCECDPLKCPSISTPECREDQFMIQVRQEEPCCFSPFCVCESCTKPVPLCHDGEFLTVDLNSTHFCCPQYYCVCEPNLCPMPLLNCAEDMNLVKENVSGQCCPTWHCECNCENLIMPTCEVGEFTAIDHNFQSDCGCIQYLCEKDDVCVFQEVSVLNPGQSMIKYLEEDFCYAIECLEEKDNHTGFHTLNFTLVNCSKKCDVHQVYTPSPSDYGCCGTCKNVSCKFHMENGTSVVYAVGSTWHYNCTTYECVKTDEGAIILNYTMVCPPFNETECKMNEGIVKLYNEGCCKICKREERICQKVIIKSVIRKQDCMSQSPINVASCDGKCPSATIYNINIESHLRFCKCCRENGVRNLSVPLYCSGNGTEIMYTLQEPIDCTCQWN

SEQ ID NO: 9874 - protein, 2353 aa, Homo Sapiens
MNIVRKLNLMIPWSIFLLHVLLFSLQEYICASSILMGTSKNGFNENRQKRALLAAQFEATSPRYFFHDAINWGESKIKGSCPYECLNGAFCSKTGTCDCQIFQALGTRCQIIPNMGNGRDGICKTWGQYHFETFDGIYYYFPGNCSYIFAKDCGDLEPRYTVWVHNSPKCLGSVYSCYRSISLFFSNQEEIRIYGHEIKKNGISLTLPQTIGQIFIEKLADYILVKTTFGFSLAWDGISGIYLKLSEDHKGKSCGLCGNYNDIQSDDFIILQEDYTEDIAMFANSWSVQTPDDTKCVLTPSDFPNPCSSGMPAFEAIFFKCQILLQFPFLSCHEYIDPYLYIASCVNDLCKTDDDETYCRAATEYARACSHAGYPIQDWRDDFPACTDKCDDSFVHRDCISCCPPTCTFEKQCLGSNLHCLDGCYCPDGLVMDNGTCISLENCPCGFHGLAYSVGSKIEQECTECVCVGGVWNCTEQDCPVQCSVVGDSHFTTFDGRHYSFIGMCQYILVKGTGKDKFTITLQKAPCEQNLGLVCLQSITLILEDDFNKQVTLGRGGQILTSPNQGFNLNGIVEIQTLSSLFILLKTTFGLKILFAIDGERIYIQLTSAWKRRTLGLCGTFNGNIRDDFLSPSGMIEGTPQLHANAWRVSSTCFAPVHVPVVDPCNINQQNIGYAAHCDVIHQELFAPCHIYISPGLYYQLCRHDACKCGSSCLCNALAHYAYLCGQHGVPIDFRTQISFCAVVCQKGMLYHHCSSFCLHSCISLSSPEQCSDDCAEGCNCPEGKFYEDTLNFCVPIFHCRCHYRGSVYQPGELIPTPSGLCQCSNGTVKCDELATPSAVHICPEGKEYFDCRFPDPELPAGGVNCETTCANLAMNFTCTPSSPCISGCVCAPGMAEHRGKCYVPESCPCIWKDWEYLSGEVIATPCYTCVCRRGMFNCTYYPCPAVCTIYGDRHYYSFDGLEYDYISDCQVFLIKSADDSDISVIAQNKKCFDNDIVCSKSVLISVGDTEIYLNDTPYKQKQSGFFLENKSTYQLWKAGYYIVVYFPEKDITILWDRKTTIHIKVGPQWKNKLSGLCGNFDKCTSNDMTTSNNLEVRNARVFGDSWALGQCESPDETIKPCEAHQNKFPYAKKECSILYSDIFASCRNVIDVTSFAKNCHEDTCNCNLGGDCECLCTSIAAYAYKCCQEGISIHWRSSTVCSLDCEYYNEGLGEGPYMLASYGQSGLVLGANMTSRSVFCLPRSSVHTSLFFYFMITPGLFKEKVSSLALVSLESAERPNYFLYVHDNDTLSLELWEANSAFHRRATFFHHQGLWIPGYSAFELYSKKGFFIIFTDSSVKASKYDDSEEFKHSSSFSIEEIQAAVPYRKMCEWRYEPCATPCFKTCSDPEALACKFLPPVEGCLPYCPKNMILDEVTLKCVYPRDCIPVIPTEPTLMPPAKPTVPMFTVWEMITPSDITVFDMLTPTTGLECEPQKFDPVYDCSQYICLNMEWQLYNWSLNCPKDVEMPDCGFRGRPVQVNSDICCPEWECPCRCSMLSELSIITFDGNNAALYSMASYILVRIPGEIIVAHIEKCSMNQNGNSLKKLAPSGRISGLCFKKLNVTTPIHKIIVNRLARKVEVDSIVVPLPFSSQELSIEDSGSMYVITTPAGLIIKWSHLTGIIDIHFGFRFNLSSYTEGLCGICNEDPDDDLRMQNGTIITNMEDIGLFIESWEIEKSFEVTMRRPVRNCTEHDCSQCIDLLNRRIFIPCHDKVSPEDFCEKMWINYTYFWNYECDALSAYVALCNKFDICIQWRTPDYCSLSCPEGKEYQPCVRPCEARTCLNQWFYGHTSCLNLREDCVCKVGTILHRPHSAQCIPEKECACTDSEDQPRTAGEIWNGGIDECTLYKCLENGSIIPIEPDCDEEPTPVCEREAEVVMGIIDKWTCCSKEVCGCDTTLCETSIPTCTNSQKLIVGHSPLSCCPQYKCECDPLKCPSISTPECREDQFMIQVRQEEPCCFSPFCVCESCTKPVPLCHDGEFLTVDLNSTHFCCPQYYCVCEPNLCPMPLLNCAEDMNLVKENVSGQCCPTWHCECNCENLIMPTCEVGEFTAIDHNFQSDCGCIQYLCEKDDVCVFQEVSVLNPGQSMIKYLEEDFCYAIECLEEKDNHTGFHTLNFTLVNCSKKCDVHQVYTPSPSDYGCCGTCKNVSCKFHMENGTSVVYAVGSTWHYNCTTYECVKTDEGAIILNYTMVCPPFNETECKMNEGIVKLYNEGCCKICKREERICQKVIIKSVIRKQDCMSQSPINVASCDGKCPSATIYNINIESHLRFCKCCRENGVRNLSVPLYCSGNGTEIMYTLQEPIDCTCQWN

SEQ ID NO: 9875 - protein, 2308 aa, Homo Sapiens
MNIVRKLNLMIPWSIFLLHVLLFSLQEYICASSILMGTSKNGFNENRQKRALLAAQFEATSPRYFFHDAINWGESKIKGSCPYECLNGAFCSKTGTCDCQIFQALGTRCQIIPNMGNGRDGICKTWGQYHFETFDGIYYYFPGNCSYIFAKDCGDLEPRYTVWVHNSPKCLGSVYSCYRSISLFFSNQEEIRIYGHEIKKNGISLTLPQTIGQIFIEKLADYILVKTTFGFSLAWDGISGIYLKLSEDHKGKSCGLCGNYNDIQSDDFIILQEDYTEDIAMFANSWSVQTPDDTKCVLTPSDFPNPCSSGMPAFEAIFFKCQILLQFPFLSCHEYIDPYLYIASCVNDLCKTDDDETYCRAATEYARACSHAGYPIQDWRDDFPACTDKCDDSFVHRDCISCCPPTCTFEKQCLGSNLHCLDGCYCPDGLVMDNGTCISLENCPCGFHGLAYSVGSKIEQECTECVCVGGVWNCTEQDCPVQCSVVGDSHFTTFDGRHYSFIGMCQYILVKGTGKDKFTITLQKAPCEQNLGLVCLQSITLILEDDFNKQVTLGRGGQILTSPNQGFNLNGIVEIQTLSSLFILLKTTFGLKILFAIDGERIYIQLTSAWKRRTLGLCGTFNGNIRDDFLSPSGMIEGTPQLHANAWRVSSTCFAPVHVPVVDPCNINQQNIGYAAHCDVIHQELFAPCHIYISPGLYYQLCRHDACKCGSSCLCNALAHYAYLCGQHGVPIDFRTQISFCAVVCQKGMLYHHCSSFCLHSCISLSSPEQCSDDCAEGCNCPEGKFYEDTLNFCVPIFHCRCHYRGSVYQPGELIPTPSGLCQCSNGTVKCDELATPSAVHICPEGKEYFDCRFPDPELPAGGVNCETTCANLAMNFTCTPSSPCISGCVCAPGMAEHRGKCYVPESCPCIWKDWEYLSGEVIATPCYTCVCRRGMFNCTYYPCPAVCTIYGDRHYYSFDGLEYDYISDCQVFLIKKQSGFFLENKSTYQLWKAGYYIVVYFPEKDITILWDRKTTIHIKVGPQWKNKLSGLCGNFDKCTSNDMTTSNNLEVRNARVFGDSWALGQCESPDETIKPCEAHQNKFPYAKKECSILYSDIFASCRNVIDVTSFAKNCHEDTCNCNLGGDCECLCTSIAAYAYKCCQEGISIHWRSSTVCSLDCEYYNEGLGEGPYMLASYGQSGLVLGANMTSRSVFCLPRSSVHTSLFFYFMITPGLFKEKVSSLALVSLESAERPNYFLYVHDNDTLSLELWEANSAFHRRATFFHHQGLWIPGYSAFELYSKKGFFIIFTDSSVKASKYDDSEEFKHSSSFSIEEIQAAVPYRKMCEWRYEPCATPCFKTCSDPEALACKFLPPVEGCLPYCPKNMILDEVTLKCVYPRDCIPVIPTEPTLMPPAKPTVPMFTVWEMITPSDITVFDMLTPTTGLECEPQKFDPVYDCSQYICLNMEWQLYNWSLNCPKDVEMPDCGFRGRPVQVNSDICCPEWECPCRCSMLSELSIITFDGNNAALYSMASYILVRIPGEIIVAHIEKCSMNQNGNSLKKLAPSGRISGLCFKKLNVTTPIHKIIVNRLARKVEVDSIVVPLPFSSQELSIEDSGSMYVITTPAGLIIKWSHLTGIIDIHFGFRFNLSSYTEGLCGICNEDPDDDLRMQNGTIITNMEDIGLFIESWEIEKSFEVTMRRPVRNCTEHDCSQCIDLLNRRIFIPCHDKVSPEDFCEKMWINYTYFWNYECDALSAYVALCNKFDICIQWRTPDYCSLSCPEGKEYQPCVRPCEARTCLNQWFYGHTSCLNLREDCVCKVGTILHRPHSAQCIPEKECACTDSEDQPRTAGEIWNGGIDECTLYKCLENGSIIPIEPDCDEEPTPVCEREAEVVMGIIDKWTCCSKEVCGCDTTLCETSIPTCTNSQKLIVGHSPLSCCPQYKCECDPLKCPSISTPECREDQFMIQVRQEEPCCFSPFCVCESCTKPVPLCHDGEFLTVDLNSTHFCCPQYYCVCEPNLCPMPLLNCAEDMNLVKENVSGQCCPTWHCECNCENLIMPTCEVGEFTAIDHNFQSDCGCIQYLCEKDDVCVFQEVSVLNPGQSMIKYLEEDFCYAIECLEEKDNHTGFHTLNFTLVNCSKKCDVHQVYTPSPSDYGCCGTCKNVSCKFHMENGTSVVYAVGSTWHYNCTTYECVKTDEGAIILNYTMVCPPFNETECKMNEGIVKLYNEGCCKICKREERICQKVIIKSVIRKQDCMSQSPINVASCDGKCPSATIYNINIESHLRFCKCCRENGVRNLSVPLYCSGNGTEIMYTLQEPIDCTCQWN

SEQ ID NO: 9876 - protein, 101 aa, Homo Sapiens
NFTLVNCSKKCDVHQVYTPSPSDYGCCGTCKNVSCKFHMENGTSVVYAVGSTWHYNCTTYECVKTDEGAIILNYTMVCPPFNETECKMVCTLLYLRKFIII

SEQ ID NO: 9877 - protein, 752 aa, Homo Sapiens
  misc_feature (1)..(1): Xaa can be any naturally occurring amino acid
XEIIVAHIEKCSMNQNGNSLKKLAPSGRISGLCFKKLNVTTPIHKIIVNRLARKVEVDSIVVPLPFSSQELSIEDSGSMYVITTPAGLIIKWSHLTGIIDIHFGFRFNLSSYTEGLCGICNEDPDDDLRMQNGTIITNMEDIGLFIESWEIEKSFEVTMRRPVRNCTEHDCSQCIDLLNRRIFIPCHDKVSPEDFCEKMWINYTYFWNYECDALSAYVALCNKFDICIQWRTPDYCSLSCPEGKEYQPCVRPCEARTCLNQWFYGHTSCLNLREDCVCKVGTILHRPHSAQCIPEKECACTDSEDQPRTAGEIWNGGIDECTLYKCLENGSIIPIEPDCDEEPTPVCEREAEVVMGIIDKWTCCSKEVCGCDTTLCETSIPTCTNSQKLIVGHSPLSCCPQYKCECDPLKCPSISTPECREDQFMIQVRQEEPCCFSPFCVCESCTKPVPLCHDGEFLTVDLNSTHFCCPQYYCVCEPNLCPMPLLNCAEDMNLVKENVSGQCCPTWHCEKDDVCVFQEVSVLNPGQSMIKYLEEDFCYAIECLEEKDNHTGFHTLNFTLVNCSKKCDVHQVYTPSPSDYGCCGTCKNVSCKFHMENGTSVVYAVGSTWHYNCTTYECVKTDEGAIILNYTMVCPPFNETECKMNEGIVKLYNEGCCKICKREERICQKVIIKSVIRKQDCMSQSPINVASCDGKCPSATIYNINIESHLRFCKCCRENGVRNLSVPLYCSGNGTEIMYTLQEPIDCTCQWN

SEQ ID NO: 9878 - protein, 166 aa, Homo Sapiens
  misc_feature (1)..(1): Xaa can be any naturally occurring amino acid
XHSPLSCCPQYKCECDPLKCPSISTPECREDQFMIQVRQEEPCCFSPFCVCESCTKPVPLCHDGEFLTVDLNSTHFCCPQYYCVCEPNLCPMPLLNCAEDMNLVKENVSGQCCPTWHCECNCENLIMPTCEVQPCADADIRTLGCLGRADQEHFHEAKFLRENLLQ

SEQ ID NO: 9879 - protein, 477 aa, Homo Sapiens
MWMFSWLCAILIILAIAGMNTIAKTTPHTKFTKKSEEREMPKGLKPSSGPPPEEEETLFTEMAEMAEPITKPSALDSVFGTATLSPFENFTLDPADFFLNCCDCCSPVPGQKGEPGETGQPGPKGEAGNLGIPGPPGVVGPQGPRGYKGEKGLKGERGDQGVPGYPGKPGAQGEPGPKGDKGNIGLGGVKGQKGSKGDTCGNCTKGEKGDQGAMGSPGLHGGPGAKGEKGEMGEKGEMGDKGCCGDSGERGGKGQKGEGGMKGEKGSKGDSGMEGKSGRNGLPGAKGDPGIKGEKGELGPPGLLGPTGPKGDIGNKGVRGPTGKKGSRGFKGSKGELARVPRSAFSAGLSKPFPPPNIPIKFEKILYNDQGNYSPVTGKFNCSIPGTYVFSYHITVRGRPARISLVAQNKKQFKSRETLYGQEIDQASLLVILKLSAGDQVWLEVSKDWNGVYVSAEDDSIFTGFLLYPEETSGISP

SEQ ID NO: 9880 - protein, 128 aa, Homo Sapiens
MARILLLFLPGLVAVCAVHGIFMDRLASKKLCADDECVYTISLASAQEDYNAPDCRFINVKKGQQIYVYSKLVKENGAGEFWAGSVYGDGQDEMGVVGYFPRNLVKEQRVYQEATKEVPTTDIDFFCE

SEQ ID NO: 9881 - protein, 89 aa, Homo Sapiens
MQACMVPGLALCLLLGPLAGAKPVQEEGDPYAELPAMPYWPFSTSDFWNYVQHFQALGAYPQIEDMARTFFAHFPLGSTLGFHVPYQED

SEQ ID NO: 9882 - protein, 89 aa, Homo Sapiens; identical to SEQ ID NO: 9881

SEQ ID NO: 9883 - protein, 1134 aa, Homo Sapiens
MGLLASAGLLLLLVIGHPRSLGLKCGIRMVNMKSKEPAVGSRFFSRISSWRNSTVTGHPWQVSLKSDEHHFCGGSLIQEDRVVTAAHCLDSLSEKQLKNITVTSGEYSLFQKDKQEQNIPVSKIITHPEYNSREYMSPDIALLYLKHKVKFGNAVQPICLPDSDDKVEPGILCLSSGWGKISKTSEYSNVLQEMELPIMDDRACNTVLKSMNLPPLGRTMLCAGFPDWGMDACQGDSGGPLVCRRGGGIWILAGITSWVAGCAGGSVPVRNNHVKASLGIFSKVSELMDFITQNLFTGLDRGQPLSKVGSRYITKALSSVQEVNGSQRGKGILDMEKQVGCDHDYVSLRSSSGVLFNQRSLMEDDGKQNKRVCGKILPSPLLAETSEAMVPFVSDTEDSGSGFELTVTAVQKSEAGSGCGSLAILVEEGTNHSAKYPDLYPSNTRCHWFICAPEKHIIKLTFEDFAVKFSPNCIYDAVVIYGDSEEKHKLAKLCGMLTITSIFSSSNMTVIYFKSDGKNRLQGFKARFTILPSESLNKFEPKLPPQNNPVSTVKAILHDVCGIPPFSPQWLSRRIAGGEEACPHCWPWQVGLRFLGDYQCGGAIINPVWILTAAHCVQLKNNPLSWTIIAGDHDRNLKESTEQVRRAKHIIVHEDFNTLSYDSDIALIQLSSPLEYNSVVRPVCLPHSAEPLFSSEICAVTGWGSISADGGLASRLQQIQVHVLEREVCEHTYYSAHPGGITEKMICAGFAASGEKDFCQGDSGGPLVCRHENGPFVLYGIVSWGAGCVQPWKPGVFARVMIFLDWIQSKINGPASLQTNNKCKTLKQQLPPPTPSPDSASWPGCCSEAELEKPRGFFPTPRYLLDYRGRLECSWVLRVSASSMAKFTIEYLSLLGSPVCQDSVLIIYEERHSKRKTAGGLHGRRLYSMTFMSPGPLVRVTFHALVRGAFGISYIVLKVLGPKDSKITRLSQSSNREHLVPCEDVLLTKPEGIMQIPRNSHRTTMGCQWRLVAPLNHIIQLNIINFPMKPTTFVCHGHLRVYEGFGPGKKLIASFAGTLAMILTKDILKREKLNFINTYIMHIWENSVYDNVRSVGKRKQKKFASNLSYSMEAEKSRIQVPADLVPAKGSLSGS

SEQ ID NO: 9884 - protein, 80 aa, Homo Sapiens
REHLVPCEDVLLTKPEGIMQIPRNSHRTTMGCQWRLVAPLNHIIQLNIINFPMKPTTFVCHGHLRVYEGFGPGKKLIGEC

SEQ ID NO: 9885 - protein, 121 aa, Homo Sapiens
  misc_feature (1)..(1): Xaa can be any naturally occurring amino acid
XKITRLSQSSNREHLVPCEDVLLTKPEGIMQIPRNSHRTTMGCQWRLVAPLNHIIQLNIINFPMKPTTFVCHGHLRVYEGFGPGKKLIAHLHGSKKEFILISSAAYLTVHFKTDESERKRF

SEQ ID NO: 9886 - protein, 565 aa, Homo Sapiens
MLISRNKLILLLGIVFFERGKSATLSLPKAPSCGQSLVKVQPWNYFNIFSRILGGSQVEKGSYPWQVSLKQRQKHICGGSIVSPQWVITAAHCIANRNIVSTLNVTAGEYDLSQTDPGEQTLTIETVIIHPHFSTKKPMDYDIALLKMAGAFQFGHFVGPICLPELREQFEAGFICTTAGWGRLTEGGVLSQVLQEVNLPILTWEECVAALLTLKRPISGKTFLCTGFPDGGRDACQGDSGGSLMCRNKKGAWTLAGVTSWGLGCGRGWRNNVRKSDQGSPGIFTDISKVLPWIHEHIQTGNRRKSSRAWCSEQDVIVSGAEGKLHFPESLHLYYESKQRCVWTLLVPEEMHVLLSFSHLDVESCHHSYLSMYSLEDRPIGKFCGESLPSSILIGSNSLRLKFVSDATDNAAGFNLTYKALKPNYIPDSGCSYLTVLFEEGLIQSLNYPENYSDKANCDWIFQASKHHLIKLSFQSLEIEESGDCTSDYVTVHSDVERKKEIARLCGYDVPTPVLSPSSIMLISFQSDENGTCRGFQATVSFIPKAVYPDLNISISEDESMFLET

SEQ ID NO: 9887 - protein, 565 aa, Homo Sapiens; identical to SEQ ID NO: 9886

SEQ ID NO: 9888 - protein, 678 aa, Homo Sapiens
MWKLLLWVGLVLVLKHHDGAAHKLVCYFTNWAHSRPGPASILPHDLDPFLCTHLIFAFASMNNNQIVAKDLQDEKILYPEFNKLKERNRELKTLLSIGGWNFGTSRFTTMLSTFANREKFIASVISLLRTHDFDGLDLFFLYPGLRGSPMHDRWTFLFLIEELLFAFRKEALLTMRPRLLLSAAVSGVPHIVQTSYDVRFLGRLLDFINVLSYDLHGSWERFTGHNSPLFSLPEDPKSSAYAMNYWRKLGAPSEKLIMGIPTYGRTFRLLKASKNGLQARAIGPASPGKYTKQEGFLAYFEICSFVWGAKKHWIDYQYVPYANKGKEWVGYDNAISFSYKAWFIRREHFGGAMVWTLDMDDVRGTFCGTGPFPLVYVLNDILVRAEFSSTSLPQFWLSSAVNSSSTDPERLAVTTAWTTDSKILPPGGEAGVTEIHGKCENMTITPRGTTVTPTKETVSLGKHTVALGEKTEITGAMTMTSVGHQSMTPGEKALTPVGHQSVTTGQKTLTSVGYQSVTPGEKTLTPVGHQSVTPVSHQSVSPGGTTMTPVHFQTETLRQNTVAPRRKAVAREKVTVPSRNISVTPEGQTMPLRGENLTSEVGTHPRMGNLGLQMEAENRMMLSSSPVIQLPEQTPLAFDNRFVPIYGNHSSVNSVTPQTSPLSLKKEIPENSAVDEEA

SEQ ID NO: 9889 - protein, 520 aa, Homo Sapiens
MAALKLLSSGLRLCASARGSGATWYKGCVCSFSTSAHRHTKFYTDPVEAVKDIPDGATVLVGGFGLCGIPENLIDALLKTGVKGLTAVSNNAGVDNFGLGLLLRSKQIKRMVSSYVGENAEFERQYLSGELEVELTPQGTLAERIRAGGAGVPAFYTPTGYGTLVQEGGSPIKYNKDGSVAIASKPREVREFNGQHFILEEAITGDFALVKAWKADRAGNVIFRKSARNFNLPMCKAAETTVVEVEEIVDIGAFAPEDIHIPQIYVHRLIKGEKYEKRIERLSIRKEGDGEAKSAKPGDDVRERIIKRAALEFEDGMYANLGIGIPLLASNFISPNITVHLQSENGVLGLGPYPRQHEADADLINAGKETVTILPGASFFSSDESFAMIRGGHVDLTMLGAMQVSKYGDLANWMIPGKMVKGMGGAMDLVSSAKTKVVVTMEHSAKGNAHKIMEKCTLPLTGKQCVNRIITEKAVFDVDKKKGLTLIELWEGLTVDDVQKSTGCDFAVSPKLMPMQQIAN

SEQ ID NO: 9890 - protein, 123 aa, Homo Sapiens
MLGAMQVSKYGDLANWMIPGKMVKGMGGAMDLVSSAKTKVVVTMEHSAKGNAHKIMEKCTLPLTGKQCVNRIITEKAVFDVDKKKGLTLIELWEGLTVDDVQKSTGCDFAVSPKLMPMQQIAN

SEQ ID NO: 9891 - protein, 123 aa, Homo Sapiens; identical to SEQ ID NO: 9890

SEQ ID NO: 9892 - protein, 334 aa, Homo Sapiens
MMVREFNGQHFILEEAITGDFALVKAWKADRAGNVIFRKSARNFNLPMCKAAETTVVEVEEIVDIGAFAPEDIHIPQIYVHRLIKGEKYEKRIERLSIRKEGDGEAKSAKPGDDVRERIIKRAALEFEDGMYANLGIGIPLLASNFISPNITVHLQSENGVLGLGPYPRQHEADADLINAGKETVTILPGASFFSSDESFAMIRGGHVDLTMLGAMQVSKYGDLANWMIPGKMVKGMGGAMDLVSSAKTKVVVTMEHSAKGNAHKIMEKCTLPLTGKQCVNRIITEKAVFDVDKKKGLTLIELWEGLTVDDVQKSTGCDFAVSPKLMPMQQIAN

SEQ ID NO: 9893 - protein, 517 aa, Homo Sapiens
MAALRLLASVLGRGVPAGGSGLALSQGCARCFATSPRLRAKFYADPVEMVKDISDGATVMIGGFGLCGIPENLIAALLRTRVKDLQVVSSNVGVEDFGLGLLLAARQVRRIVCSYVGENTLCESQYLAGELELELTPQGTLAERIRAGGAGVPAFYTPTGYGTLVQEGGAPIRYTPDGHLALMSQPREVREFNGDHFLLERAIRADFALVKGWKADRAGNVVFRRSARNFNVPMCKAADVTAVEVEEIVEVGAFPPEDIHVPNIYVDRVIKGQKYEKRIERLTILKEEDGDAGKEEDARTRIIRRAALEFEDGMYANLGIGIPLLASNFISPSMTVHLHSENGILGLGPFPTEDEVDADLINAGKQTVTVLPGGCFFASDDSFAMIRGGHIQLTMLGAMQVSKYGDLANWMIPGKKVKGMGGAMDLVSSQKTRVVVTMQHCTKDNTPKIMEKCTMPLTGKRCVDRIITEKAVFDVHRKKELTLRELWEGLTVDDIKKSTGCAFAVSPNLRPMQQVAP

SEQ ID NO: 9894 - protein, 56 aa, Homo Sapiens
MACAAVMIPGLLRCSVGAIRIEAASLRLTLSTLRHLTLTRLCQQLRCVELPVSHRQ

SEQ ID NO: 9895 - protein, 312 aa, Homo Sapiens
MACAAVMIPGLLRCSVGAIRIEAASLRLTLSTLRHLTLTSIMKSKRKTDHMERTASVLRREIVSAAKVCGAASESPSVKSLRLLVADQDFSFKAGQWVDFFIPGVSVVGGFSICSSPRLLEQERVIELAVKYTNHPPALWVHNTCTLDCEVAVRVGGEFFFDPQPADASRNLVLIAGGVGINPLLSILRHAADLLREQANKRNGYEIGTIKLFYSAKNTSELLFKKNILDLVNEFPEKIACSLHVTKQTTQINAELKPYITEGRITEKEIRDHISKETLFYICGPPPMTDFFSKQLENNHVPKEHICFEKWW

SEQ ID NO: 9896 - protein, 312 aa, Homo Sapiens; identical to SEQ ID NO: 9895

SEQ ID NO: 9897 - protein, 311 aa, Homo Sapiens
MACAAVMIPGLLRCSVGAIRIEAASLRLTLSTLRHLTLTSIMKSKRKTDHMERTASVLRREIVSAAKVCGAASESPSVKSLRLLVADQDFSFKAGQWVDFFIPGVSVVGGFSICSSPRLLEQERVIELAVKYTNHPPALWVHNTCTLDCEVAVRVGGEFFFDPQPADASRNLVLIAGGVGINPLLSILRHAADLLREQANKRNGYEIGTIKLFYSAKNTSELLFKKNILDLVNEFPEKIACSLHVTKQTTQINAELKPYITGRITEKEIRDHISKETLFYICGPPPMTDFFSKQLENNHVPKEHICFEKWW

SEQ ID NO: 9898 - protein, 71 aa, Homo Sapiens
MACAAVMIPGLLRCSVGAIRIEAASLRLTLSTLRHLTLTSIMKSKRKTDHMERTASVLRRESNLFHQGRKH

SEQ ID NO: 9899 - protein, 330 aa, Homo Sapiens
MTPKISWTSKFSVCPESAMACAAVMIPGLLRCSVGAIRIEAASLRLTLSTLRHLTLTSIMKSKRKTDHMERTASVLRREIVSAAKVCGAASESPSVKSLRLLVADQDFSFKAGQWVDFFIPGVSVVGGFSICSSPRLLEQERVIELAVKYTNHPPALWVHNTCTLDCEVAVRVGGEFFFDPQPADASRNLVLIAGGVGINPLLSILRHAADLLREQANKRNGYEIGTIKLFYSAKNTSELLFKKNILDLVNEFPEKIACSLHVTKQTTQINAELKPYITEGRITEKEIRDHISKETLFYICGPPPMTDFFSKQLENNHVPKEHICFEKWW

SEQ ID NO: 9900 - protein, 330 aa, Homo Sapiens; identical to SEQ ID NO: 9899

SEQ ID NO: 9901 - protein, 125 aa, Homo Sapiens
MAGPSLACCLLGLLALTSACYIQNCPLGGKRAAPDLDVRKCLPCGPGGKGRCFGPNICCAEELGCFVGTAEALRCQEENYLPSPCQSGQKACGSGGRCAVLGLCCSPDGCHADPACDAEATFSQR

SEQ ID NO: 9902 - protein, 207 aa, Homo Sapiens
MAVRALKLLTTLLAVVAAASQAEVESEAGWGMVTPDLLFAEGTAAYARGDWPGVVLSMERALRSRAALRALRLRCRTQCAADFPWELDPDWSPSPAQASGAAALRDLSFFGGLLRRAACLRRCLGPPAAHSLSEEMELEFRKRSPYNYLQVAYFKDLETQPHMQEFRLGVRLYSEEQPQEAVPHLEAALQEYFVAYEECRALCEGPY

SEQ ID NO: 9903 - protein, 804 aa, Homo Sapiens
MAVRALKLLTTLLAVVAAASQAEVESEAGWGMVTPDLLFAEGTAAYARGDWPGVVLSMERALRSRAALRALRLRCRTQCAADFPWELDPDWSPSPAQASGAAALRDLSFFGGLLRRAACLRRCLGPPAAHSLSEEMELEFRKRSPYNYLQVAYFKINKLEKAVAAAHTFFVGNPEHMEMQQNLDYYQTMSGVKEADFKDLETQPHMQEFRLGVRLYSEEQPQEAVPHLEAALQEYFVAYEECRALCEGPYDYDGYNYLEYNADLFQAITDHYIQVLNCKQNCVTELASHPSREKPFEDFLPSHYNYLQFAYYNIGNYTQAVECAKTYLLFFPNDEVMNQNLAYYAAMLGEEHTRSIGPRESAKEYRQRSLLEKELLFFAYDVFGIPFVDPDSWTPEEVIPKRLQEKQKSERETAVRISQEIGNLMKEIETLVEEKTKESLDVSRLTREGGPLLYEGISLTMNSKLLNGSQRVVMDGVISDHECQELQRLTNVAATSGDGYRGQTSPHTPNEKFYGVTVFKALKLGQEGKVPLQSAHLYYNVTEKVRRIMESYFRLDTPLYFSYSHLVCRTAIEEVQAERKDDSHPVHVDNCILNAETLVCVKEPPAYTFRDYSAILYLNGDFDGGNFYFTELDAKTVTAEVQPQCGRAVGFSSGTENPHGVKAVTRGQRCAIALWFTLDPRHSERVRAARAGESSWCCGDPFPERPWFAFLFPKSHCQWLRHERSTWDTSSNALSLWSHCLVLPGPAVNGIQVGKEVKTGSDAEFLVPSLGPTSAVLFQRVGPAGKEMSLGPLRNLPCPLGSSS

SEQ ID NO: 9904 - protein, 736 aa, Homo Sapiens
MAVRALKLLTTLLAVVAAASQAEVESEAGWGMVTPDLLFAEGTAAYARGDWPGVVLSMERALRSRAALRALRLRCRTQCAADFPWELDPDWSPSPAQASGAAALRDLSFFGGLLRRAACLRRCLGPPAAHSLSEEMELEFRKRSPYNYLQVAYFKINKLEKAVAAAHTFFVGNPEHMEMQQNLDYYQTMSGVKEADFKDLETQPHMQEFRLGVRLYSEEQPQEAVPHLEAALQEYFVAYEECRALCEGPYDYDGYNYLEYNADLFQAITDHYIQVLNCKQNCVTELASHPSREKPFEDFLPSHYNYLQFAYYNIGNYTQAVECAKTYLLFFPNDEVMNQNLAYYAAMLGEEHTRSIGPRESAKEYRQRSLLEKELLFFAYDVFGIPFVDPDSWTPEEVIPKRLQEKQKSERETAVRISQEIGNLMKEIETLVEEKTKESLDVSRLTREGGPLLYEGISLTMNSKLLNGSQRVVMDGVISDHECQELQRLTNVAATSGDGYRGQTSPHTPNEKFYGVTVFKALKLGQEGKVPLQSAHLYYNVTEKVRRIMESYFRLDTPLYFSYSHLVCRTAIEEVQAERKDDSHPVHVDNCILNAETLVCVKEPPAYTFRDYSAILYLNGDFDGGNFYFTELDAKTVTAEVQPQCGRAVGFSSGTENPHGVKAVTRGQRCAIALWFTLDPRHSERDRVQADDLVKMLFSPEEMDLSQEQPLDAQQGPPEPAQESLSGSESKPKDEL

SEQ ID NO: 9905 - protein, 697 aa, Homo Sapiens
MAVRALKLLTTLLAVVAAASQAEVESEAGWGMVTPDLLFAEGTAAYARGDWPGVVLSMERALRSRAALRALRLRCRTQCAADFPWELDPDWSPSPAQASGAAALRDLSFFGGLLRRAACLRRCLGPPAAHSLSEEMELEFRKRSPYNYLQVAYFKINKLEKAVAAAHTFFVGNPEHMEMQQNLDYYQTMSGVKEADFKDLETQPHMQEFRLGVRLYSEEQPQEAVPHLEAALQEYFVAYEECRALCEGPYDYDGYNYLEYNADLFQAITDHYIQVLNCKQNCVTELASHPSREKPFEDFLPSHYNYLQFAYYNIGNYTQAVECAKTYLLFFPNDEVMNQNLAYYAAMLGEEHTRSIGPRESAKEYRQRSLLEKELLFFAYDVFGIPFVDPDSWTPEEVIPKRLQEKQKSERETAVRISQEIGNLMKEIETLVEEKTKESLDVSRLTREGGPLLYEGISLTMNSKLLNGSQRVVMDGVISDHECQELQRLTNVAATSGDGYRGQTSPHTPNEKFYGVTVFKALKLGQEGKVPLQSAHLYYNVTEKVRRIMESYFRLDTPLYFSYSHLVCRTAIEEVQAERKDDSHPVHVDNCILNAETLVCVKEPPAYTFRDYSAILYLNGDFDGGNFYFTELDAKTVTAEVQPQCGRAVGFSSGTENPHGVKAVTRGQRCAIALWFTLDPRHSERVRAARAGQGAGR

SEQ ID NO: 9906 - protein, 222 aa, Homo Sapiens
  misc_feature (1)..(1): Xaa can be any naturally occurring amino acid
XTPEEVIPKRLQEKQKSERETAVRISQEIGNLMKEIETLVEEKTKESLDVSRLTREGGPLLYEGISLTMNSKLLNGSQRVVMDGVISDHECQELQRLTNVAATSGDGYRGQTSPHTPNEKFYGVTVFKALKFHVAGEASQSWWKAKRSKSHLTWMAAGKERTSAAGARRQSSSAECPPVLQRDGEGAAHHGVLLPPGYAPLLFLLSSGVPHCHRRGPGREEG

SEQ ID NO: 9907 - protein, 134 aa, Homo Sapiens
MEMQQNIENYRATAGVEALQLVDREAKPHMESYNAGVKHYEADDFEMAIRHFEQALREYFVEDTECRTLCEGPQRFEEYEYLGYKAGLYEAIADHYMQVLVCQHECVRELATRPGRLSPIENFLPLHYDYLQFA

SEQ ID NO: 9908 - protein, 137 aa, Homo Sapiens
MEMQQNIENYRATAGVEALQLVDREAKPHMESYNAGVKHYEADDFEMAIRHFEQALREYFVEDTECRTLCEGPQRFEEYEYLGYKAGLYEAIADHYMQVLVCQHECVRELATRPGRLSPIENFLPLHYDYLQFAYYR

SEQ ID NO: 9909 - protein, 527 aa, Homo Sapiens
MEMQQNIENYRATAGVEALQLVDREAKPHMESYNAGVKHYEADDFEMAIRHFEQALREYFVEDTECRTLCEGPQRFEEYEYLGYKAGLYEAIADHYMQVLVCQHECVRELATRPGRLSPIENFLPLHYDYLQFAYYRVGEYVKALECAKAYLLCHPDDEDVLDNVDYYESLLDDSIDPASIEAREDLTMFVKRHKLESELIKSAAEGLGFSYTEPNYWIRYGGRQDENRVPSGVNVEGAEVHGFSMGKKLSPKIDRDLREGGPLLYENITFVYNSEQLNGTQRVLLDNVLSEEQCRELHSVASGIMLVGDGYRGKTSPHTPNEKFEGATVLKALKSGYEGRVPLKSARLFYDISEKARRIVESYFMLNSTLYFSYTHMVCRTALSGQQDRRNDLSHPIHADNCLLDPEANECWKEPPAYTFRDYSALLYMNDDFEGGEFIFTEMDAKTVTASIKPKCGRMISFSSGGENPHGVKAVTKGKRCAVALWFTLDPLYRELERIQADEVIAILDQEQQGKHELNINPKDEL

SEQ ID NO: 9910 - protein, 708 aa, Homo Sapiens
MRERIWAPPLLLLLPLLLPPPLWGGPPDSPRRELELEPGPLQPFDLLYASGAAAYYSGDYERAVRDLEAALRSHRRLREIRTRCARHCAARHPLPPPPPGEGPGAELPLFRSLLGRARCYRSCETQRLGGPASRHRVSEDVRSDFQRRVPYNYLQRAYIKLNQLEKAVEAAHTFFVANPEHMEMQQNIENYRATAGVEALQLVDREAKPHMESYNAGVKHYEADDFEMAIRHFEQALREYFVEDTECRTLCEGPQRFEEYEYLGYKAGLYEAIADHYMQVLVCQHECVRELATRPGRLSPIENFLPLHYDYLQFAYYRVGEYVKALECAKAYLLCHPDDEDVLDNVDYYESLLDDSIDPASIEAREDLTMFVKRHKLESELIKSAAEGLGFSYTEPNYWIRYGGRQDENRVPSGVNVEGAEVHGFSMGKKLSPKIDRDLREGGPLLYENITFVYNSEQLNGTQRVLLDNVLSEEQCRELHSVASGIMLVGDGYRGKTSPHTPNEKFEGATVLKALKSGYEGRVPLKSARLFYDISEKARRIVESYFMLNSTLYFSYTHMVCRTALSGQQDRRNDLSHPIHADNCLLDPEANECWKEPPAYTFRDYSALLYMNDDFEGGEFIFTEMDAKTVTASIKPKCGRMISFSSGGENPHGVKAVTKGKRCAVALWFTLDPLYRELERIQADEVIAILDQEQQGKHELNINPKDEL

SEQ ID NO: 9911 - protein, 736 aa, Homo Sapiens
MLRLLRPLLLLLLLPPPGSPEPPGLTQLSPGAPPQAPDLLYADGLRAYAAGAWAPAVALLREALRSQAALGRVRLDCGASCAADPGAALPAVLLGAPEPDSGPGPTQGSWERQLLRAALRRADCLTQCAARRLGPGGAARLRVGSALRDAFRRREPYNYLQRAYYQLKKLDLAAAAAHTFFVANPMHLQMREDMAKYRRMSGVRPQSFRDLETPPHWAAYDTGLELLGRQEAGLALPRLEEALQGSLAQMESCRADCEGPEEQQGAEEEEDGAASQGGLYEAIAGHWIQVLQCRQRCVGETATRPGRSFPVPDFLPNQLRRLHEAHAQVGNLSQAIENVLSVLLFYPEDEAAKRALNQYQAQLGEPRPGLGPREDIQRFILRSLGEKRQLYYAMEHLGTSFKDPDPWTPAALIPEALREKLREDQEKRPWDHEPVKPKPLTYWKDVLLLEGVTLTQDSRQLNGSERAVLDGLLTPAECGVLLQLAKDAAGAGARSGYRGRRSPHTPHERFEGLTVLKAAQLARAGTVGSQGAKLLLEVSERVRTLTQAYFSPERPLHLSFTHLVCRSAIEGEQEQRMDLSHPVHADNCVLDPDTGECWREPPAYTYRDYSGLLYLNDDFQGGDLFFTEPNALTVTARVRPRCGRLVAFSSGVENPHGVWAVTRGRRCALALWHTWAPEHREQEWIEAKELLQESQEEEEEEEEEMPSKDPSPEPPSRRHQRVQDKTGRAPRVREEL

SEQ ID NO: 9912 - protein, 85 aa, Homo Sapiens
MARVAWGLLWLLLGSAGAQYEKYSFRGFPPEDLMPLAAAYGHALEQYEGESWRESARYLEAALRLHRLLRDSEAFCHANCSGPAP

SEQ ID NO: 9913 - protein, 437 aa, Homo Sapiens
MARVAWGLLWLLLGSAGAQYEKYSFRGFPPEDLMPLAAAYGHALEQYEGESWRESARYLEAALRLHRLLRDSEAFCHANCSGPAPAAKPDPDGGRADEWACELRLFGRVLERAACLRRCKRTLPAFQVPYPPRQLLRDFQSRLPYQYLHYALFKANRLEKAVAAAYTFLQRNPKHELTAKYLNYYQGMLDVADESLTDLEAQPYEAVFLRAVKLYNSGDFRSSTEDMERALSEYLAVFARCLAGCEGAHEQVDFKDFYPAIADLFAESLQCKVDCEANLTPNVGGYFVDKFVATMYHYLQFAYYKLNDVRQAARSAASYMLFDPKDSVMQQNLVYYRFHRARWGLEEEDFQPREEAMLYHNQTAELRELLEFTHMYLQSDDEMELEETEPPLEPEDALSDAEFEGEGDYEEGMYADWWQEPDAKGDEAEAEPEPELA

SEQ ID NO: 9914 - protein, 437 aa, Homo Sapiens; identical to SEQ ID NO: 9913

SEQ ID NO: 9915 - protein, 221 aa, Homo Sapiens
  misc_feature (1)..(1): Xaa can be any naturally occurring amino acid
XKRTLPAFQVPYPPRQLLRDFQSRLPYQYLHYALFKANRLEKAVAAAYTFLQRNPKHELTAKYLNYYQGMLDVADESLTDLEAQPYEAVFLRAVKLYNSGDFRSSTEDMERALSEYLAVFARCLAGCEGAHEQVDFKDFYPAIAVNDVRQAARSAASYMLFDPKDSVMQQNLVYYRFHRARWGLEEEDFQPREEAMLYHNQTAELRELLEFTHMYLQSDDE

SEQ ID NO: 9916 - protein, 73 aa, Homo Sapiens
  misc_feature (1)..(1): Xaa can be any naturally occurring amino acid
XLRELLEFTHMYLQSDDEMELEETEPPLEPEDALSDAEFEGEGDYEEGMYADWWQEPDAKGDEAEAEPEPELA

SEQ ID NO: 9917 - protein, 534 aa, Homo Sapiens
MIWYILIIGILLPQSLAHPGFFTSIGQMTDLIHTEKDLVTSLKDYIKAEEDKLEQIKKWAEKLDRLTSTATKDPEGFVGHPVNAFKLMKRLNTEWSELENLVLKDMSDGFISNLTIQRQYFPNDEDQVGAAKALLRLQDTYNLDTDTISKGNLPGVKHKSFLTAEDCFELGKVAYTEADYYHTELWMEQALRQLDEGEISTIDKVSVLDYLSYAVYQQGDLDKALLLTKKLLELDPEHQRANGNLKYFEYIMAKEKDVNKSASDDQSDQKTTPKKKGVAVDYLPERQKYEMLCRGEGIKMTPRRQKKLFCRYHDGNRNPKFILAPAKQEDEWDKPRIIRFHDIISDAEIEIVKDLAKPRLSRATVHDPETGKLTTAQYRVSKSAWLSGYENPVVSRINMRIQDLTGLDVSTAEELQVANYGVGGQYEPHFDFARKDEPDAFKELGTGNRIATWLFYMSDVSAGGATVFPEVGASVWPKKGTAVFWYNLFASGEGDYSTRHAACPVLVGNKWVSNKWLHERGQEFRRPCTLSELE

SEQ ID NO: 9918 - protein, 534 aa, Homo Sapiens
MIWYILIIGILLPQSLAHPGFFTSIGQMTDLIHTEKDLVTSLKDYIKAEEDKLEQIKKWAEKLDRLTSTATKDPEGFVGHPVNAFKLMKRLNTEWSELENLVLKDMSDGFISNLTIQRQYFPNDEDQVGAAKALLRLQDTYNLDTDTISKGNLPGVKHKSFLTAEDCFELGKVAYTEADYYHTELWMEQALRQLDEGEISTIDKVSVLDYLSYAVYQQGDLDKALLLTKKLLELDPEHQRANGNLKYFEYIMAKEKDVNKSASDDQSDQKTTPKKKGVAVDYLPERQKYEMLCRGEGIKMTPRRQKKLFCRYHDGNRNPKFILAPAKQEDEWDKPRIIRFHDIISDAEIEIVKDLAKPRLRRATISNPITGDLETVHYRISKSAWLSGYENPVVSRINMRIQDLTGLDVSTAEELQVANYGVGGQYEPHFDFARKDEPDAFKELGTGNRIATWLFYMSDVSAGGATVFPEVGASVWPKKGTAVFWYNLFASGEGDYSTRHAACPVLVGNKWVSNKWLHERGQEFRRPCTLSELE

SEQ ID NO: 9919 - protein, 534 aa, Homo Sapiens; identical to SEQ ID NO: 9917

SEQ ID NO: 9920 - protein, 516 aa, Homo Sapiens
MIWYILIIGILLPQSLAHPGFFTSIGQMTDLIHTEKDLVTSLKDYIKAEEDKLEQIKKWAEKLDRLTSTATKDPEGFVGHPVNAFKLMKRLNTEWSELENLVLKDMSDGFISNLTIQRQYFPNDEDQVGAAKALLRLQDTYNLDTDTISKGNLPGVKHKSFLTAEDCFELGKVAYTEADYYHTELWMEQALRQLDEGEISTIDKVSVLDYLSYAVYQQGDLDKALLLTKKLLELDPEHQRANGNLKYFEYIMAKEKDVNKSASDDQSDQKTTPKKKGVAVDYLPERQKYEMLCRGEGIKMTPRRQKKLFCRYHDGNRNPKFILAPAKQEDEWDKPRIIRFHDIISDAEIEIVKDLAKPRLSRATVHDPETGKLTTAQYRVSKSAWLSGYENPVVSRINMRIQDLTGLDVSTAEELQKDEPDAFKELGTGNRIATWLFYMSDVSAGGATVFPEVGASVWPKKGTAVFWYNLFASGEGDYSTRHAACPVLVGNKWVSNKWLHERGQEFRRPCTLSELE

SEQ ID NO: 9921 - protein, 534 aa, Homo Sapiens; identical to SEQ ID NO: 9918

SEQ ID NO: 9922 - protein, 50 aa, Homo Sapiens
MKLWVSALLMAWFGVLSCVQAEFFTSIGHMTDLIYAEKELVQSLKEYILV

SEQ ID NO: 9923 - protein, 101 aa, Homo Sapiens
MKLWVSALLMAWFGVLSCVQAEFFTSIGHMTDLIYAEKELVQSLKEYILVEEAKLSKIKSWANKMEALTSKSAADAEGYLAHPVNAYKLVKRLNTDWPALE

SEQ ID NO: 9924 - protein, 114 aa, Homo Sapiens
MKLWVSALLMAWFGVLSCVQAEFFTSIGHMTDLIYAEKELVQSLKEYILVEEAKLSKIKSWANKMEALTSKSAADAEGYLAHPVNAYKLVKRLNTDWPALEDLVLQDSAAGFIA

SEQ ID NO: 9925 - protein, 147 aa, Homo Sapiens
MKLWVSALLMAWFGVLSCVQAEFFTSIGHMTDLIYAEKELVQSLKEYILVEEAKLSKIKSWANKMEALTSKSAADAEGYLAHPVNAYKLVKRLNTDWPALEDLVLQDSAAGFIANLSVQRQFFPTDEDEIGAAKALMRLQDTYRLDP

SEQ ID NO: 9926 - protein, 153 aa, Homo Sapiens
MKLWVSALLMAWFGVLSCVQAEFFTSIGHMTDLIYAEKELVQSLKEYILVEEAKLSKIKSWANKMEALTSKSAADAEGYLAHPVNAYKLVKRLNTDWPALEDLVLQDSAAGFIANLSVQRQFFPTDEDEIGAAKALMRLQDTYRLDPGTISRG

SEQ ID NO: 9927 - protein, 167 aa, Homo Sapiens
MKLWVSALLMAWFGVLSCVQAEFFTSIGHMTDLIYAEKELVQSLKEYILVEEAKLSKIKSWANKMEALTSKSAADAEGYLAHPVNAYKLVKRLNTDWPALEDLVLQDSAAGFIANLSVQRQFFPTDEDEIGAAKALMRLQDTYRLDPGTISRGELPGTKYQAMLSVD

SEQ ID NO: 9928 - protein, 184 aa, Homo Sapiens
MKLWVSALLMAWFGVLSCVQAEFFTSIGHMTDLIYAEKELVQSLKEYILVEEAKLSKIKSWANKMEALTSKSAADAEGYLAHPVNAYKLVKRLNTDWPALEDLVLQDSAAGFIANLSVQRQFFPTDEDEIGAAKALMRLQDTYRLDPGTISRGELPGTKYQAMLSVDDCFGMGRSAYNEGDYYH

SEQ ID NO: 9929 - protein, 204 aa, Homo Sapiens
MKLWVSALLMAWFGVLSCVQAEFFTSIGHMTDLIYAEKELVQSLKEYILVEEAKLSKIKSWANKMEALTSKSAADAEGYLAHPVNAYKLVKRLNTDWPALEDLVLQDSAAGFIANLSVQRQFFPTDEDEIGAAKALMRLQDTYRLDPGTISRGELPGTKYQAMLSVDDCFGMGRSAYNEGDYYHTVLWMEQVLKQLDAGEEATT

SEQ ID NO: 9930 - protein, 535 aa, Homo Sapiens
MKLWVSALLMAWFGVLSCVQAEFFTSIGHMTDLIYAEKELVQSLKEYILVEEAKLSKIKSWANKMEALTSKSAADAEGYLAHPVNAYKLVKRLNTDWPALEDLVLQDSAAGFIANLSVQRQFFPTDEDEIGAAKALMRLQDTYRLDPGTISRGELPGTKYQAMLSVDDCFGMGRSAYNEGDYYHTVLWMEQVLKQLDAGEEATTTKSQVLDYLSYAVFQLGDLHRALELTRRLLSLDPSHERAGGNLRYFEQLLEEEREKTLTNQTEAELATPEGIYERPVDYLPERDVYESLCRGEGVKLTPRRQKRLFCRYHHGNRAPQLLIAPFKEEDEWDSPHIVRYYDVMSDEEIERIKEIAKPKLARATVRDPKTGVLTVASYRVSKSSWLEEDDDPVVARVNRRMQHITGLTVKTAELLQVANYGVGGQYEPHFDFSRNDERDTFKHLGTGNRVATFLNYMSDVEAGGATVFPDLGAAIWPKKGTAVFWYNLLRSGEGDYRTRHAACPVLVGCKWVSNKWFHERGQEFLRPCGSTEVD

SEQ ID NO: 9931 - protein, 533 aa, Homo Sapiens
MKLWVSALLMAWFGVLSCVQAEFFTSIGHMTDLIYAEKELVQSLKEYILVEEAKLSKIKSWANKMEALTSKSAADAEGYLAHPVNAYKLVKRLNTDWPALEDLVLQDSAAGFIANLSVQRQFFPTDEDEIGAAKALMRLQDTYRLDPGTISRGELPGTKYQAMLSVDDCFGMGRSAYNEGDYYHTVLWMEQVLKQLDAGEEATTTKSQVLDYLSYAVFQLGDLHRALELTRRLLSLDPSHERAGGNLRYFEQLLEEEREKTLTNQTEAELATPEGIYERPVDYLPERDVYESLCRGEGVKLTPRRQKRLFCRYHHGNRAPQLLIAPFKEEDEWDSPHIVRYYDVMSDEEIERIKEIAKPKLARATVRDPKTGVLTVASYRVSKSSWLEEDDDPVVARVNRRMQHITGLTVKTAELLQVANYGVGGQYEPHFDFSRRPFDSGLKTEGNRLATFLNYMSDVEAGGATVFPDLGAAIWPKKGTAVFWYNLLRSGEGDYRTRHAACPVLVGCKWVSNKWFHERGQEFLRPCGSTEVD

SEQ ID NO: 9932 - protein, 533 aa, Homo Sapiens; identical to SEQ ID NO: 9931

SEQ ID NO: 9933 - protein, 533 aa, Homo Sapiens; identical to SEQ ID NO: 9931

SEQ ID NO: 9934 - protein, 535 aa, Homo Sapiens; identical to SEQ ID NO: 9930

SEQ ID NO: 9935 - protein, 535 aa, Homo Sapiens; identical to SEQ ID NO: 9930

SEQ ID NO: 9936 - protein, 236 aa, Homo Sapiens
MKRQLVTNSFLHHLLIGQKRPRNAPRTLPSVTMKLWVSALLMAWFGVLSCVQAEFFTSIGHMTDLIYAEKELVQSLKEYILVEEAKLSKIKSWANKMEALTSKSAADAEGYLAHPVNAYKLVKRLNTDWPALEDLVLQDSAAGFIANLSVQRQFFPTDEDEIGAAKALMRLQDTYRLDPGTISRGELPGTKYQAMLSVDDCFGMGRSAYNEGDYYHTVLWMEQVLKQLDAGEEATT

SEQ ID NO: 9937 - protein, 104 aa, Homo Sapiens
MGPGARLAALLAVLALGTGDPERAAARGDTFSALTSVARALAPERRLLGLLRRYLRGEEARLRDLTRFYDKVLSLHEDSTTPVANPLLAFTLIKRLQSDWRNVL

SEQ ID NO: 9938 - protein, 544 aa, Homo Sapiens
MGPGARLAALLAVLALGTGDPERAAARGDTFSALTSVARALAPERRLLGLLRRYLRGEEARLRDLTRFYDKVLSLHEDSTTPVANPLLAFTLIKRLQSDWRNVVHSLEASENIRALKDGYEKVEQDLPAFEDLEGAARALMRLQDVYMLNVKGLARGVFQRVTGSAITDLYSPKRLFSLTGDDCFQVGKVAYDMGDYYHAIPWLEEAVSLFRGSYGEWKTEDEASLEDALDHLAFAYFRAGNVSCALSLSREFLLYSPDNKRMARNVLKYERLLAESPNHVVAEAVIQRPNIPHLQTRDTYEGLCQTLGSQPTLYQIPSLYCSYETNSNAYLLLQPIRKEVIHLEPYIALYHDFVSDSEAQKIRELAEPWLQRSVVASGEKQLQVEYRISKSAWLKDTVDPKLVTLNHRIAALTGLDVRPPYAEYLQVVNYGIGGHYEPHFDHATSPSSPLYRMKSGNRVATFMIYLSSVEAGGATAFIYANLSVPVVRNAALFWWNLHRSGEGDSDTLHAGCPVLVGDKWVANKWIHEYGQEFRRPCSSSPED

SEQ ID NO: 9939 - protein, 604 aa, Homo Sapiens
MGPGARLAALLAVLALGTGDPERAAARGDTFSALTSVARALAPERRLLGLLRRYLRGEEARLRDLTRFYDKVLSLHEDSTTPVANPLLAFTLIKRLQSDWRNVVHSLEASENIRALKDGYEKVEQDLPAFEDLEGAARALMRLQDVYMLNVKGLARGVFQRVTGSAITDLYSPKRLFSLTGDDCFQVGKVAYDMGDYYHAIPWLEEAVSLFRGSYGEWKTEDEASLEDALDHLAFAYFRAGNVSCALSLSREFLLYSPDNKRMARNVLKYERLLAESPNHVVAEAVIQRPNIPHLQTRDTYEGLCQTLGSQPTLYQIPSLYCSYETNSNAYLLLQPIRKEVIHLEPYIALYHDFVSDSEAQKIRELAEPWLQRSVVASGEKQLQVEYRISKSAWLKDTVDPKLVTLNHRIAALTGLDVRPPYAEYLQVVNYGIGGHYEPHFDHATSPSSPLYRMKSGNRVATFMIYLSSVEAGGATAFIYANLSVPVVRHCFGGTCTGVVKGTVTHFMLAVLSWWEISGWPTSGYMSMDRNSADPAAPALKTELLAERSWWSPVAFQRSQEPKAGVGEEKAEQPPGRRPCQLCLCLANQRQGRGCYQGTLRMYI

SEQ ID NO: 9940 - protein, 257 aa, Homo Sapiens
MGPGARLAALLAVLALGTGDPERAAARGDTFSALTSVARALAPERRLLGLLRRYLRGEEARLRDLTRFYDKVLSLHEDSTTPVANPLLAFTLIKRLQSDWRNVVHSLEASENIRALKDGYEKVEQDLPAFEDLEGAARALMRLQDVYMLNVKGLARGVFQRVTGSAITDLYSPKRLFSLTGDDCFQVGKVAYDMGDYYHAIPWLEEAVSLFRGSYGEWKTEDEASLEDALDHLAFAYFRAGNVSCALSLSREFLLYR

SEQ ID NO: 9941 - protein, 61 aa, Homo Sapiens
SVPVVRNAALFWWNLHRSGEGDSDTLHAGCPVLVGDKWVANKWIHEYGQEFRRPCSSSPED

SEQ ID NO: 9942 - protein, 200 aa, Homo Sapiens
METRLPPRNIQDVESDSAKQFLQAAEAIDDIPFGITSNSDVFSKYQLDKDGVVLFKKFDEGRNNFEGEVTKENLLDFIKHNQLPLVIEFTEQTAPKIFGGEIKTHILLFLPKSVSDYDGKLSNFKTAAESFKGKILFIFIDSDHTDNQRILEFFGLKKEECPAVRLITLEEEMTKYKPESEELTAERITEFCHRFLEGKI

SEQ ID NO: 9943 - protein, 117 aa, Homo Sapiens
METRLPPRNIQFDEGRNNFEGEVTKENLLDFIKHNQLPLVIEFTEQTAPKIFGGEIKTHILLFLPKSVSDYDGKLSNFKTAAESFKGKILFIFIDSDHTDNQRILEFFGLKKEECPA

SEQ ID NO: 9944 - protein, 54 aa, Homo Sapiens
MLRRALLCLAVAALVRADAPEEEDHVLVLRKSNFAEALAAHKCPLVWPLQGSGP

SEQ ID NO: 9945 - protein, 156 aa, Homo Sapiens
MLRRALLCLAVAALVRADAPEEEDHVLVLRKSNFAEALAAHKYLLVDATEESDLAQQYGVRGYPTIKFFRNGDTASPKEYTAGREADDIVNWLKKRTGPAATTLPDGAAAESLVESSEVAVIGFFKDVESDSAKQFLQAAEAIDDIPFGITSNSDV

SEQ ID NO: 9946 - protein, 208 aa, Homo Sapiens
MLRRALLCLAVAALVRADAPEEEDHVLVLRKSNFAEALAAHKYLLVEFSGREADDIVNWLKKRTGPAATTLPDGAAAESLVESSEVAVIGFFKDVESDSAKQFLQAAEAIDDIPFGITSNSDVFSKYQLDKDGVVLFKKFDEGRNNFEGEVTKENLLDFIKHNQLPLVIEFTEQTAPKIFGGEIKTHILLFLPKSVSDYDGKLSNFKT

SEQ ID NO: 9947 - protein, 148 aa, Homo Sapiens
MLRRALLCLAVAALVRADAPEEEDHVLVLRKSNFAEALAAHKYLLVEFYAPWCGHCKALAPEYAKAAGKLKAEGSEIRLAKMDSTANEVEAVKVHSFPTLKFFPASADRTVIDYNGERTLDGFKKFLESGGQDGAGDDDDLEDLEEAE

SEQ ID NO: 9948 - protein, 188 aa, Homo Sapiens
MLRRALLCLAVAALVRADAPEEEDHVLVLRKSNFAEALAAHKYLLVEFYAPWCGHCKALAPEYAKAAGKLKAEGSEIRLAKVDATEESDLAQQYGVRGYPTIKFFRNGDTASPKEYTAAESLVESSEVAVIGFFKDVESDSAKQFLQAAEAIDDIPFGITSNSDVFSKYQLDKDGVVLFKKFDEGRNN

SEQ ID NO: 9949 - protein, 508 aa, Homo Sapiens
MLRRALLCLAVAALVRADAPEEEDHVLVLRKSNFAEALAAHKYLLVEFYAPWCGHCKALAPEYAKAAGKLKAEGSEIRLAKVDATEESDLAQQYGVRGYPTIKFFRNGDTASPKEYTAGREADDIVNWLKKRTGPAATTLPDGAAAESLVESSEVAVIGFFKDVESDSAKQFLQAAEAIDDIPFGITSNSDVFSKYQLDKDGVVLFKKFDEGRNNFEGEVTKENLLDFIKHNQLPLVIEFTEQTAPKIFGGEIKTHILLFLPKSVSDYDGKLSNFKTAAESFKGKILFIFIDSDHTDNQRILEFFGLKKEECPAVRLITLEEEMTKYKPESEELTAERITEFCHRFLEGKIKPHLMSQELPEDWDKQPVKVLVGKNFEDVAFDEKKNVFVEFYAPWCGHCKQLAPIWDKLGETYKDHENIVIAKMDSTANEVEAVKVHSFPTLKFFPASADRTVIDYNGERTLDGFKKFLESGGQDGAGDDDDLEDLEEAEEPDMEEDDDQKAVKDEL

SEQ ID NO: 9950 - protein, 464 aa, Homo Sapiens
MLRRALLCLAVAALVRADAPEEEDHVLVLRKSNFAEALAAHKYLLVEFYAPWCGHCKALAPEYAKAAGKLKAEGSEIRLAKVDATEESDLAQQYGVRGYPTIKFFRNGDTASPKEYTGDVESDSAKQFLQAAEAIDDIPFGITSNSDVFSKYQLDKDGVVLFKKFDEGRNNFEGEVTKENLLDFIKHNQLPLVIEFTEQTAPKIFGGEIKTHILLFLPKSVSDYDGKLSNFKTAAESFKGKILFIFIDSDHTDNQRILEFFGLKKEECPAVRLITLEEEMTKYKPESEELTAERITEFCHRFLEGKIKPHLMSQELPEDWDKQPVKVLVGKNFEDVAFDEKKNVFVEFYAPWCGHCKQLAPIWDKLGETYKDHENIVIAKMDSTANEVEAVKVHSFPTLKFFPASADRTVIDYNGERTLDGFKKFLESGGQDGAGDDDDLEDLEEAEEPDMEEDDDQKAVKDEL

SEQ ID NO: 9951 - protein, 166 aa, Homo Sapiens
MLRRALLCLAVAALVRADAPEEEDHVLVLRKSNFAEALAAHKYLLVEFYAPWCGHCKALAPEYAKAAGKLKAEGSEIRLAKVDATEESDLAQQYGVRGYPTIKFFRNGDTASPKEYTGFDEGRNNFEGEVTKENLLDFIKHNQLPLVIEFTEQTAPKIFGGEIKTH

SEQ ID NO: 9952 - protein, 106 aa, Homo Sapiens
MLRRALLCLAVAALVRADAPEEEDHVLVLRKSNFAEALAAHKYLLVEFYAPWCGHCKALAPEYAKAAGKLKAEGSEIRPPRRSLSPVWEGRSRTGHGHSVPPAVSP

SEQ ID NO: 9953 - protein, 274 aa, Homo Sapiens
  misc_feature (1)..(1): Xaa can be any naturally occurring amino acid
XFEGEVTKENLLDFIKHNQLPLVIEFTEQSVSDYDGKLSNFKTAAESFKGKILFIFIDSDHTDNQRILEFFGLKKEECPAVRLITLEEEMTKYKPESEELTAERITEFCHRFLEGKIKPHLMSQELPEDWDKQPVKVLVGKNFEDVAFDEKKNVFVEFYAPWCGHCKQLAPIWDKLGETYKDHENIVIAKMDSTANEVEAVKVHSFPTLKFFPASADRTVIDYNGERTLDGFKKFLESGGQDGAGDDDDLEDLEEAEEPDMEEDDDQKAVKDEL

SEQ ID NO: 9954 - protein, 132 aa, Homo Sapiens
LMATLKAPLRVHITSLLPTPEDNLEIVLHRWENNSCVEKKVLGEKTENPKKFKINYTVANEATLLDTDYDNFLFLCLQDTTTPIQSMMCQYLARVLVEDDEIMQGFIRAFRPLPRHLWYLLDLKQMEEPCRF

SEQ ID NO: 9955 - protein, 143 aa, Homo Sapiens
MLCLLLTLGVALVCGVPAMDIPQTKQDLELPKLAGTWHSMAMATNNISLMATLKAPLRVHITSLLPTPEDNLEIVLHRWENNSCVEKKVLGEKTENPKKFKINSRVLVEDDEIMQGFIRAFRPLPRHLWYLLDLKQMEEPCRF

SEQ ID NO: 9956 - protein, 180 aa, Homo Sapiens
MLCLLLTLGVALVCGVPAMDIPQTKQDLELPKLAGTWHSMAMATNNISLMATLKAPLRVHITSLLPTPEDNLEIVLHRWENNSCVEKKVLGEKTENPKKFKINYTVANEATLLDTDYDNFLFLCLQDTTTPIQSMMCQYLARVLVEDDEIMQGFIRAFRPLPRHLWYLLDLKQMEEPCRF

SEQ ID NO: 9957 - protein, 180 aa, Homo Sapiens; identical to SEQ ID NO: 9956

SEQ ID NO: 9958 - protein, 180 aa, Homo Sapiens; identical to SEQ ID NO: 9956

SEQ ID NO: 9959 - protein, 169 aa, Homo Sapiens
MLCLLLTLGVALVCGVPAMDIPQTKQDLELPKLAGTWHSMAMATNNISLMATLKAPLRVHITSLLPTPEDNLEIVLHRWENNSCVEKKVLGEKTENPKKFKINYTVANEATLLDTDYDNFLFLCLQDTTTPIQSMMCQYLESWWRTMRSCRDSSGLSGPCPGTYGTCWT

SEQ ID NO: 9960 - protein, 33 aa, Homo Sapiens
  misc_feature (1)..(1): Xaa can be any naturally occurring amino acid
XEIMQGFIRAFRPLPRHLWYLLDLKQMEEPCRF

SEQ ID NO: 9961 - protein, 126 aa, Homo Sapiens
  misc_feature (1)..(1): Xaa can be any naturally occurring amino acid
XPLRVHITSLLPTPEDNLEIVLHRWENNSCVEKKVLGEKTENPKKFKINYTVANEATLLDTDYDNFLFLCLQDTTTPIQSMMCQYLARVLVEDDEIMQGFIRAFRPLPRHLWYLLDLKQMEEPCRF

SEQ ID NO: 9962 - protein, 131 aa, Homo Sapiens
  misc_feature (1)..(1): Xaa can be any naturally occurring amino acid
XVPAMDIPQTKQDLELPKAPLRVHITSLLPTPEDNLEIVLHRWENNSCVEKKVLGEKTENPKKFKINCKASGAPQLSWKPQGPRTDPASSTARVLVEDDEIMQGFIRAFRPLPRHLWYLLDLKQMEEPCRF

SEQ ID NO: 9963 - protein, 25 aa, Homo Sapiens
MAGRVPSLLVLLVFPSSCLAFRSPL

SEQ ID NO: 9964 - protein, 28 aa, Homo Sapiens
MAGRVPSLLVLLVFPSSCLAFRSPLSVF

SEQ ID NO: 9965 - protein, 29 aa, Homo Sapiens
MAGRVPSLLVLLVFPSSCLAFRSPLSVFK

SEQ ID NO: 9966 - protein, 42 aa, Homo Sapiens
MAGRVPSLLVLLVFPSSCLAFRSPLSVFKRFKETTRPFSNEC

SEQ ID NO: 9967 - protein, 53 aa, Homo Sapiens
MAGRVPSLLVLLVFPSSCLAFRSPLSVFKRFKETTRPFSNECLGTTRPVVPID

SEQ ID NO: 9968 - protein, 68 aa, Homo Sapiens
MAGRVPSLLVLLVFPSSCLAFRSPLSVFKRFKETTRPFSNECLGTTRPVVPIDSSDFALDIRMPGVTP

SEQ ID NO: 9969 - protein, 175 aa, Homo Sapiens
MAGRVPSLLVLLVFPSSCLAFRSPLSVFKRFKETTRPFSNECLGTTRPVVPIDSSDFALDIRMPGVTPKQLTSSLEPAWILSITCYFLDAICLHPLEVTGFVMKEPVQIKPIFCMPGREMLPLPGSPKVLDSELEERLEVNTLYYRYTMGILVLLEIITRTVLVCPYTSHVCHSL

SEQ ID NO: 9970 - protein, 974 aa, Homo Sapiens
MAGRVPSLLVLLVFPSSCLAFRSPLSVFKRFKETTRPFSNECLGTTRPVVPIDSSDFALDIRMPGVTPKQSDTYFCMSMRIPVDEEAFVIDFKPRASMDTVHHMLLFGCNMPSSTGSYWFCDEGTCTDKANILYAWARNAPPTRLPKGVGFRVGGETGSKYFVLQVHYGDISAFRDNNKDCSGVSLHLTRLPQPLIAGMYLMMSVDTVIPAGEKVVNSDISCHYKNYPMHVFAYRVHTHHLGKVVSGYRVRNGQWTLIGRQSPQLPQAFYPVGHPVDVSFGDLLAARCVFTGEGRTEATHIGGTSSDEMCNLYIMYYMEAKHAVSFMTCTQNVAPDMFRTIPPEANIPIPVKSDMVMMHEHHKETEYKDKIPLLQQPKREEEEVLDQGDFYSLLSKLLGEREDVVHVHKYNPTEKAESESDLVAEIANVVQKKDLGRSDAREGAEHERGNAILVRDRIHKFHRLVSTLRPPESRVFSLQQPPPGEGTWEPEHTGDFHMEEALDWPGVYLLPGQVSGVALDPKNNLVIFHRGDHVWDGNSFDSKFVYQQIGLGPIEEDTILVIDPNNAAVLQSSGKNLFYLPHGLSIDKDGNYWVTDVALHQVFKLDPNNKEGPVLILGRSMQPGSDQNHFCQPTDVAVDPGTGAIYVSDGYCNSRIVQFSPSGKFITQWGEESSGSSPLPGQFTVPHSLALVPLLGQLCVADRENGRIQCFKTDTKEFVREIKHSSFGRNVFAISYIPGLLFAVNGKPHFGDQEPVQGFVMNFSNGEIIDIFKPVRKHFDMPHDIVASEDGTVYIGDAHTNTVWKFTLTEKLEHRSVKKAGIEVQEIKEAEAVVETKMENKPTSSELQKMQEKQKLIKEPGSGVPVVLITTLLVIPVVVLLAIAIFIRWKKSRAFGADSEHKLETSSGRVLGRFRGKGSGGLNLGNFFASRKGYSRKGFDRLSTEGSDQEKEDDGSESEEEYSAPLPALAPSSS

SEQ ID NO: 9971 - protein, 887 aa, Homo Sapiens
MAGRVPSLLVLLVFPSSCLAFRSPLSVFKRFKETTRPFSNECLGTTRPVVPIDSSDFALDIRMPGVTPKQSDTYFCMSMRIPVDEEAFVIDFKPRASMDTVHHMLLFGCNMPSSTGSYWFCDEGTCTDKANILYAWARNAPPTRLPKGVGFRVGGETGSKYFVLQVHYGDISAFRDNNKDCSGVSLHLTRLPQPLIAGMYLMMSVDTVIPAGEKVVNSDISCHYKNYPMHVFAYRVHTHHLGKVVSGYRVRNGQWTLIGRQSPQLPQAFYPVGHPVDVSFGDLLAARCVFTGEGRTEATHIGGTSSDEMCNLYIMYYMEAKHAVSFMTCTQNVAPDMFRTIPPEANIPIPVKSDMVMMHEHHKETEYKDKIPLLQQPKREEEEVLDQGDFYSLLSKLLGEREDVVHVHKYNPTEKAESESDLVAEIANVVQKKDLGRSDAREGAEHERGNAILVRDRIHKFHRLVSTLRPPESRVFSLQQPPPGEGTWEPEHTGDFHMEEALDWPGVYLLPGQVSGVALDPKNNLVIFHRGDHVWDGNSFDSKFVYQQIGLGPIEEDTILVIDPNNAAVLQSSGKNLFYLPHGLSIDKDGNYWVTDVALHQVFKLDPNNKEGPVLILGRSMQPGSDQNHFCQPTDVAVDPGTGAIYVSDGYCNSRIVQFSPSGKFITQWGEESSGSSPLPGQFTVPHSLALVPLLGQLCVADRENGRIQCFKTDTKEFVREIKHSSFGRNVFAISYIPGLLFAVNGKPHFGDQEPVQGFVMNFSNGEIIDIFKPVRKHFDMPHDIVASEDGTVYIGDAHTNTVWKFTLTEKLEHRSVKKAGIEVQEIKGKGSGGLNLGNFFASRKGYSRKGFDRLSTEGSDQEKEDDGSESEEEYSAPLPALAPSSS

SEQ ID NO: 9972 - protein, 866 aa, Homo Sapiens
MAGRVPSLLVLLVFPSSCLAFRSPLSVFKRFKETTRPFSNECLGTTRPVVPIDSSDFALDIRMPGVTPKQSDTYFCMSMRIPVDEEAFVIDFKPRASMDTVHHMLLFGCNMPSSTGSYWFCDEGTCTDKANILYAWARNAPPTRLPKGVGFRVGGETGSKYFVLQVHYGDISAFRDNNKDCSGVSLHLTRLPQPLIAGMYLMMSVDTVIPAGEKVVNSDISCHYKNYPMHVFAYRVHTHHLGKVVSGYRVRNGQWTLIGRQSPQLPQAFYPVGHPVDVSFGDLLAARCVFTGEGRTEATHIGGTSSDEMCNLYIMYYMEAKHAVSFMTCTQNVAPDMFRTIPPEANIPIPVKSDMVMMHEHHKETEYKDKIPLLQQPKREEEEVLDQDFHMEEALDWPGVYLLPGQVSGVALDPKNNLVIFHRGDHVWDGNSFDSKFVYQQIGLGPIEEDTILVIDPNNAAVLQSSGKNLFYLPHGLSIDKDGNYWVTDVALHQVFKLDPNNKEGPVLILGRSMQPGSDQNHFCQPTDVAVDPGTGAIYVSDGYCNSRIVQFSPSGKFITQWGEESSGSSPLPGQFTVPHSLALVPLLGQLCVADRENGRIQCFKTDTKEFVREIKHSSFGRNVFAISYIPGLLFAVNGKPHFGDQEPVQGFVMNFSNGEIIDIFKPVRKHFDMPHDIVASEDGTVYIGDAHTNTVWKFTLTEKLEHRSVKKAGIEVQEIKEAEAVVETKMENKPTSSELQKMQEKQKLIKEPGSGVPVVLITTLLVIPVVVLLAIAIFIRWKKSRAFGDSEHKLETSSGRVLGRFRGKGSGGLNLGNFFASRKGYSRKGFDRLSTEGSDQEKEDDGSESEEEYSAPLPALAPSSS

SEQ ID NO: 9973 - protein, 905 aa, Homo Sapiens
MAGRVPSLLVLLVFPSSCLAFRSPLSVFKRFKETTRPFSNECLGTTRPVVPIDSSDFALDIRMPGVTPKQSDTYFCMSMRIPVDEEAFVIDFKPRASMDTVHHMLLFGCNMPSSTGSYWFCDEGTCTDKANILYAWARNAPPTRLPKGVGFRVGGETGSKYFVLQVHYGDISAFRDNNKDCSGVSLHLTRLPQPLIAGMYLMMSVDTVIPAGEKVVNSDISCHYKNYPMHVFAYRVHTHHLGKVVSGYRVRNGQWTLIGRQSPQLPQAFYPVGHPVDVSFGDLLAARCVFTGEGRTEATHIGGTSSDEMCNLYIMYYMEAKHAVSFMTCTQNVAPDMFRTIPPEANIPIPVKSDMVMMHEHHKETEYKDKIPLLQQPKREEEEVLDQGDFYSLLSKLLGEREDVVHVHKYNPTEKAESESDLVAEIANVVQKKDLGRSDAREGAEHERGNAILVRDRIHKFHRLVSTLRPPESRVFSLQQPPPGEGTWEPEHTGDFHMEEALDWPGVYLLPGQVSGVALDPKNNLVIFHRGDHVWDGNSFDSKFVYQQIGLGPIEEDTILVIDPNNAAVLQSSGKNLFYLPHGLSIDKDGNYWVTDVALHQVFKLDPNNKEGPVLILGRSMQPGSDQNHFCQPTDVAVDPGTGAIYVSDGYCNSRIVQFSPSGKFITQWGEESSGSSPLPGQFTVPHSLALVPLLGQLCVADRENGRIQCFKTDTKEFVREIKHSSFGRNVFAISYIPGLLFAVNGKPHFGDQEPVQGFVMNFSNGEIIDIFKPVRKHFDMPHDIVASEDGTVYIGDAHTNTVWKFTLTEKLEHRSVKKAGIEVQEIKDSEHKLETSSGRVLGRFRGKGSGGLNLGNFFASRKGYSRKGFDRLSTEGSDQEKEDDGSESEEEYSAPLPALAPSSS

SEQ ID NO: 9974 - protein, 973 aa, Homo Sapiens [sequence omitted]

SEQ ID NO: 9975 - protein, 679 aa, Homo Sapiens
  misc_feature (1)..(1): Xaa can be any naturally occurring amino acid
XMHVFAYRVHTHHLGKVVSGYRVRNGQWTLIGRQSPQLPQAFYPVGHPVDVSFGDLLAARCVFTGEGRTEATHIGGTSSDEMCNLYIMYYMEAKHAVSFMTCTQNVAPDMFRTIPPEANIPIPVKSDMVMMHEHHKETEYKDKIPLLQQPKREEEEVLDQGDFYSLLSKLLGEREDVVHVHKYNPTEKAESESDLVAEIANVVQKKDLGRSDAREGAEHERGNAILVRDRIHKFHRLVSTLRPPESRVFSLQQPPPGEGTWEPEHTGDFHMEEALDWPGVYLLPGQVSGVALDPKNNLVIFHRGDHVWDGNSFDSKFVYQQIGLGPIEEDTILVIDPNNAAVLQSSGKNLFYLPHGLSIDKDGNYWVTDVALHQVFKLDPNNKEGPVLILGRSMQPGSDQNHFCQPTDVAVDPGTGAIYVSDGYCNSRIVQFSPSGKFITQWGEESSGSSPLPGQFTVPHSLALVPLLGQLCVADRENGRIQCFKTDTKEFVREIKHSSFGRNVFAISYIPGLLFAVNGKPHFGDQEPVQGFVMNFSNGEIIDIFKPVRKHFDMPHDIVASEDGTVYIGDAHTNTVWKFTLTEKLEHRSVKKAGIEVQEIKADSEHKLETSSGRVLGRFRGKGSGGLNLGNFFASRKGYSRKGFDRLSTEGSDQEKEDDGSESEEEYSAPLPALAPSSS

SEQ ID NO: 9976 - protein, 250 aa, Homo Sapiens
  misc_feature (1)..(1): Xaa can be any naturally occurring amino acid
XRIQCFKTDTKEFVREIKHSSFGRNVFAISYIPGLLFAVNGKPHFGDQEPVQGFVMNFSNGEIIDIFKPVRKHFDMPHDIVASEDGTVYIGDAHTNTVWKFTLTEKLEHRSVKKAGIEVQEIKEAEAVVETKMENKPTSSELQKMQEKQKLIKEPGSGVPVVLITTLLVIPVVVLLAIAIFIRWKKSRAFGGKGSGGLNLGNFFASRKGYSRKGFDRLSTEGSDQEKEDDGSESEEEYSAPLPALAPSSS

SEQ ID NO: 9977 - protein, 675 aa, Homo Sapiens
MCRECCEYDQIECVCPGKREVVGYTIPCCRNEENECDSCLIHPGCTIFENCKSCRNGSWGGTLDDFYVKGFYCAECRAGWYGGDCMRCGQVLRAPKGQILLESYPLNAHCEWTIHAKPGFVIQLRFVMLSLEFDYMCQYDYVEVRDGDNRDGQIIKRVCGNERPAPIQSIGSSLHVLFHSDGSKNFDGFHAIYEEITACSSSPCFHDGTCVLDKAGSYKCACLAGYTGQRCENLLEAGKSKIKASEDSLSVLEERNCSDPGGPVNGYQKITGGPGLINGRHAKIGTVVSFFCNNSYVLSGNEKRTCQQNGEWSGKQPICIKACREPKISDLVRRRVLPMQVQSRETPLHQLYSAAFSKQKLQSAPTKKPALPFGDLPMGYQHLHTQLQYECISPFYRRLGSSRRTCLRTGKWSGRAPSCIPICGKIENITAPKTQGLRWPWQAAIYRRTSGVHDGSLHKGAWFLVCSGALVNERTVVVAAHCVTDLGKVTMIKTADLKVVLGKFYRDDDRDEKTIQSLQISAIILHPNYDPILLDADIAILKLLDKARISTRVQPICLAASRDLSTSFQESHITVAGWNVLADVRSPGFKNDTLRSGVVSVVDSLLCEEQHEDHGIPVSVTDNMFCASWEPTAPSDICTAETGGIAAVSFPGRASPEPRWHLMGLVSWSYDKTCS

SEQ ID NO: 9978 - protein, 680 aa, Homo Sapiens
MCRECCEYDQIECVCPGKREVVGYTIPCCRNEENECDSCLIHPGCTIFENCKSCRNGSWGGTLDDFYVKGFYCAECRAGWYGGDCMRCGQVLRAPKGQILLESYPLNAHCEWTIHAKPGFVIQLRFVMLSLEFDYMCQYDYVEVRDGDNRDGQIIKRVCGNERPAPIQSIGSSLHVLFHSDGSKNFDGFHAIYEEITACSSSPCFHDGTCVLDKAGSYKCACLAGYTGQRCENLLEERNCSDPGGPVNGYQKITGGPGLINGRHAKIGTVVSFFCNNSYVLSGNEKRTCQQNGEWSGKQPICIKACREPKISDLVRRRVLPMQVQSRETPLHQLYSAAFSKQKLQSAPTKKPALPFGDLPMGYQHLHTQLQYECISPFYRRLGSSRRTCLRTGKWSGRAPSCIPICGKIENITAPKTQGLRWPWQAAIYRRTSGVHDGSLHKGAWFLVCSGALVNERTVVVAAHCVTDLGKVTMIKTADLKVVLGKFYRDDDRDEKTIQSLQISAIILHPNYDPILLDADIAILKLLDKARISTRVQPICLAASRDLSTSFQESHITVAGWNVLADVRSPGFKNDTLRSGVVSVVDSLLCEEQHEDHGIPVSVTDNMFCASWEPTAPSDICTAETGGIAAVSFPGRASPEPRWHLMGLVSWSYDKTCSHRLSTAFTKVLPFKDWIERNMK

SEQ ID NO: 9979 - protein, 178 aa, Homo Sapiens
MELGCWTQLGLTFLQLLLISSLPREYTVINEACPGAEWNIMCRECCEYDQIECVCPGKREVVGYTIPCCRNEENECDSCLIHPGCTIFENCKSCRNGSWGGTLDDFYVKGFYCAECRAGWYGGDCMPCSSSPCFHDGTCVLDKAGSYKCACLAGYTGQRCENLLEERNCSDPGGPVNG

SEQ ID NO: 9980 - protein, 609 aa, Homo Sapiens
MELGCWTQLGLTFLQLLLISSLPREYTVINEACPGAEWNIMCRECCEYDQIECVCPGKREVVGYTIPCCRNEENECDSCLIHPGCTIFENCKSCRNGSWGGTLDDFYVKGFYCAECRAGWYGGDCMPCSSSPCFHDGTCVLDKAGSYKCACLAGYTGQRCENLLEERNCSDPGGPVNGYQKITGGPGLINGRHAKIGTVVSFFCNNSYVLSGNEKRTCQQNGEWSGKQPICIKACREPKISDLVRRRVLPMQVQSRETPLHQLYSAAFSKQKLQSAPTKKPALPFGDLPMGYQHLHTQLQYECISPFYRRLGSSRRTCLRTGKWSGRAPSCIPICGKIENITAPKTQGLRWPWQAAIYRRTSGVHDGSLHKGAWFLVCSGALVNERTVVVAAHCVTDLGKVTMIKTADLKVVLGKFYRDDDRDEKTIQSLQISAIILHPNYDPILLDADIAILKLLDKARISTRVQPICLAASRDLSTSFQESHITVAGWNVLADVRSPGFKNDTLRSGVVSVVDSLLCEEQHEDHGIPVSVTDNMFCASWEPTAPSDICTAETGGIAAVSFPGRASPEPRWHLMGLVSWSYDKTCSHRLSTAFTKVLPFKDWIERNMK

SEQ ID NO: 9981 - protein, 737 aa, Homo Sapiens
MELGCWTQLGLTFLQLLLISSLPREYTVINEACPGAEWNIMCRECCEYDQIECVCPGKREVVGYTIPCCRNEENECDSCLIHPGCTIFENCKSCRNGSWGGTLDDFYVKGFYCAECRAGWYGGDCMRCGQVLRAPKGQILLESYPLNAHCEWTIHAKPGFVIQLRFVMLSLEFDYMCQYDYVEVRDGDNRDGQIIKRVCGNERPAPIQSIGSSLHVLFHSDGSKNFDGFHAIYEEITACSSSPCFHDGTCVLDKAGSYKCACLAGYTGQRCENLLEAGKSKIKASEDSLSVLEERNCSDPGGPVNGYQKITGGPGLINGRHAKIGTVVSFFCNNSYVLSGNEKRTCQQNGEWSGKQPICIKACREPKISDLVRRRVLPMQVQSRETPLHQLYSAAFSKQKLQSAPTKKPALPFGDLPMGYQHLHTQLQYECISPFYRRLGSSRRTCLRTGKWSGRAPSCIPICGKIENITAPKTQGLRWPWQAAIYRRTSGVHDGSLHKGAWFLVCSGALVNERTVVVAAHCVTDLGKVTMIKTADLKVVLGKFYRDDDRDEKTIQSLQISAIILHPNYDPILLDADIAILKLLDKARISTRVQPICLAASRDLSTSFQESHITVAGWNVLADVRSPGFKNDTLRSGVVSVVDSLLCEEQHEDHGIPVSVTDNMFCASWEPTAPSDICTAETGGIAAVSFPGRASPEPRWHLMGLVSWSYDKTCSHRLSTAFTKVLPFKDWIERNMK

SEQ ID NO: 9982 - protein, 720 aa, Homo Sapiens
MELGCWTQLGLTFLQLLLISSLPREYTVINEACPGAEWNIMCRECCEYDQIECVCPGKREVVGYTIPCCRNEENECDSCLIHPGCTIFENCKSCRNGSWGGTLDDFYVKGFYCAECRAGWYGGDCMRCGQVLRAPKGQILLESYPLNAHCEWTIHAKPGFVIQLRFVMLSLEFDYMCQYDYVEVRDGDNRDGQIIKRVCGNERPAPIQSIGSSLHVLFHSDGSKNFDGFHAIYEEITACSSSPCFHDGTCVLDKAGSYKCACLAGYTGQRCENLLEERNCSDPGGPVNGYQKITGGPGLINGRHAKIGTVVSFFCNNSYVLSGNEKRTCQQNGEWSGKQPICIKACREPKISDLVRRRVLPMQVQSRETPLHQLYSAAFSKQKLQSAPTKKPALPFGDLPMGYQHLHTQLQYECISPFYRRLGSSRRTCLRTGKWSGRAPSCIPICGKIENITAPKTQGLRWPWQAAIYRRTSGVHDGSLHKGAWFLVCSGALVNERTVVVAAHCVTDLGKVTMIKTADLKVVLGKFYRDDDRDEKTIQSLQISAIILHPNYDPILLDADIAILKLLDKARISTRVQPICLAASRDLSTSFQESHITVAGWNVLADVRSPGFKNDTLRSGVVSVVDSLLCEEQHEDHGIPVSVTDNMFCASWEPTAPSDICTAETGGIAAVSFPGRASPEPRWHLMGLVSWSYDKTCSHRLSTAFTKVLPFKDWIERNMK

SEQ ID NO: 9983 - protein, 416 aa, Homo Sapiens
MLKLAPWCLSFVTTPMFLVAMRKELASRMEWSGKQPICIKACREPKISDLVRRRVLPMQVQSRETPLHQLYSAAFSKQKLQSAPTKKPALPFGDLPMGYQHLHTQLQYECISPFYRRLGSSRRTCLRTGKWSGRAPSCIPICGKIENITAPKTQGLRWPWQAAIYRRTSGVHDGSLHKGAWFLVCSGALVNERTVVVAAHCVTDLGKVTMIKTADLKVVLGKFYRDDDRDEKTIQSLQISAIILHPNYDPILLDADIAILKLLDKARISTRVQPICLAASRDLSTSFQESHITVAGWNVLADVRSPGFKNDTLRSGVVSVVDSLLCEEQHEDHGIPVSVTDNMFCASWEPTAPSDICTAETGGIAAVSFPGRASPEPRWHLMGLVSWSYDKTCSHRLSTAFTKVLPFKDWIERNMK

SEQ ID NO: 9984 - protein, 1251 aa, Homo Sapiens
MRLLLLVPLLLAPAPGSSAPKVRRQSDTWGPWSQWSPCSRTCGGGVSFRERPCYSQRRDGGSSCVGPARSHRSCRTESCPDGARDFRAEQCAEFDGAEFQGRRYRWLPYYSAPNKCELNCIPKGENFYYKHREAVVDGTPCEPGKRDVCVDGSCRVVGCDHELDSSKQEDKCLRCGGDGTTCYPVAGTFDANDLSRAVKNVRGEYYLNGHWTIEAARALPAASTILHYERGAEGDLAPERLHARGPTSEPLVIELISQEPNPGVHYEYHLPLRRPSPGFSWSHGSWSDCSAECGGGHQSRLVFCTIDHEAYPDHMCQRQPRPADRRSCNLHPCPETKRWKAGPWAPCSASCGGGSQSRSVYCISSDGAGIQEAVEEAECAGLPGKPPAIQACNLQRCAAWSPEPWGECSVSCGVGVRKRSVTCRGERGSLLHTAACSLEDRPPLTEPCVHEDCPLLSDQAWHVGTWGLCSKSCSSGTRRRQVICAIGPPSHCGSLQHSKPVDVEPCNTQPCHLPQEVPSMQDVHTPASNPWMPLGPQESPASDSRGQWWAAQEHPSARGDHRGERGDPRGDQGTHLSALGPAPSLQQPPYQQPLRSGSGPHDCRHSPHGCCPDGHTASLGPQWQGCPGAPCQQSRYGCCPDRVSVAEGPHHAGCTKSYGGDSTGGMPRSRAVASTVHNTHQPQAQQNEPSECRGSQFGCCYDNVATAAGPLGEGCVGQPSHAYPVRCLLPSAHGSCADWAARWYFVASVGQCNRFWYGGCHGNANNFASEQECMSSCQGSLHGPRRPQPGASGRSTHTDGGGSSPAGEQEPSQHRTGAAVQRKPWPSGGLWRQDQQPGPGEAPHTQAFGEWPWGQELGSRAPGLGGDAGSPAPPFHSSSYRISLAGVEPSLVQAALGQLVRLSCSDDTAPESQAAWQKDGQPISSDRHRLQFDGSLIIHPLQAEDAGTYSCGSTRPGRDSQKIQLRIIGGDMAVLSEAELSRFPQPRDPAQDFGQAGAAGPLGAIPSSHPQPANRLRLDQNQPRVVDASPGQRIRMTCRAEGFPPPAIEWQRDGQPVSSPRHQLQPDGSLVISRVAVEDGGFYTCVAFNGQDRDQRWVQLRVLGELTISGLPPTVTVPEGDTARLLCVVAGESVNIRWSRNGLPVQADGHRVHQSPDGTLLIYNLRARDEGSYTCSAYQGSQAVSRSTEVKVVSPAPTAQPRDPGRDCVDQPELANCDLILQAQLCGNEYYSSFCCASCSRFQPHAQPIWQ

SEQ ID NO: 9985 - protein, 929 aa, Homo Sapiens
MRLLLLVPLLLAPAPGSSAPKVRRQSDTWGPWSQWSPCSRTCGGGVSFRERPCYSQRRDGGSSCVGPARSHRSCRTESCPDGARDFRAEQCAEFDGAEFQGRRYRWLPYYSAPNKCELNCIPKGENFYYKHREAVVDGTPCEPGKRDVCVDGSCRVVGCDHELDSSKQEDKCLRCGGDGTTCYPVAGTFDANDLSRAVKNVRGEYYLNGHWTIEAARALPAASTILHYERGAEGDLAPERLHARGPTSEPLVIELISQEPNPGVHYEYHLPLRRPSPGFSWSHGSWSDCSAECGGGHQSRLVFCTIDHEAYPDHMCQRQPRPADRRSCNLHPCPETKRWKAGPWAPCSASCGGGSQSRSVYCISSDGAGIQEAVEEAECAGLPGKPPAIQACNLQRCAAWSPEPWGECSVSCGVGVRKRSVTCRGERGSLLHTAACSLEDRPPLTEPCVHEDCPLLSDQAWHVGTWGLCSKSCSSGTRRRQVICAIGPPSHCGSLQHSKPVDVEPCNTQPCHLPQEVPSMQDVHTPASNPWMPLGPQESPASDSRGQWWAAQEHPSARGDHRGERGDPRGDQGTHLSALGPAPSLQQPPYQQPLRSGSGPHDCRHSPHGCCPDGHTASLGPQWQGCPGAPCQQSRYGCCPDRVSVAEGPHHAGCTKSYGGDSTGGMPRSRAVASTVHNTHQPQAQQNEPSECRGSQFGCCYDNVATAAGPLGEGCVGQPSHAYPVRCLLPSAHGSCADWAARWYFVASVGQCNRFWYGGCHGNANNFASEQECMSSCQGSLHGPRRPQPGASGRSTHTDGGGSSPAGEQEPSQHRTGAAVQRKPWPSGGLWRQDQQPGPGEAPHTQAFGEWPWGQELGSRAPGLGGDAGSPAPPFHSSSYRISLAGVEPSLVQAALGQLVRLSCSDDTAPESQAAWQKDGQPISSDRFT

SEQ ID NO: 9986 - protein, 808 aa, Homo Sapiens
MRLLLLVPLLLAPAPGSSAPKVRRQSDTWGPWSQWSPCSRTCGGGVSFRERPCYSQRRDGGSSCVGPARSHRSCRTESCPDGARDFRAEQCAEFDGAEFQGRRYRWLPYYSAPNKCELNCIPKGENFYYKHREAVVDGTPCEPGKRDVCVDGSCRVVGCDHELDSSKQEDKCLRCGGDGTTCYPVAGTFDANDLSRGYNQILIVPMGATSILIDEAAASRNFLAVKNVRGEYYLNGHWTIEAARALPAASTILHYERGAEGDLAPERLHARGPTSEPLVIELISQEPNPGVHYEYHLPLRRPSPGFSWSHGSWSDCSAECGGGHQSRLVFCTIDHEAYPDHMCQRQPRPADRRSCNLHPCPETKRWKAGPWAPCSASCGGGSQSRSVYCISSDGAGIQEAVEEAECAGLPGKPPAIQACNLQRCAAWSPEPWGECSVSCGVGVRKRSVTCRGERGSLLHTAACSLEDRPPLTEPCVHEDCPLLSDQAWHVGTWGLCSKSCSSGTRRRQVICAIGPPSHCGSLQHSKPVDVEPCNTQPCHLPQEVPSMQDVHTPASNPWMPLGPQESPASDSRGQWWAAQEHPSARGDHRGERGDPRGDQGTHLSALGPAPSLQQPPYQQPLRSGSGPHDCRHSPHGCCPDGHTASLGPQWQGCPGAPCQQSRYGCCPDRVSVAEGPHHAGCTKSYGGDSTGGMPRSRAVASTVHNTHQPQAQQNEPSECRGSQFGCCYDNVATAAGPLGEGCVGQPSHGLAWQVWSPRWCRQPWGSWCGSPAQTTLPRNPRLPGRKMASPSPLTGVCDGPPTSSDRCV

SEQ ID NO: 9987 - protein, 1262 aa, Homo Sapiens
MRLLLLVPLLLAPAPGSSAPKVRRQSDTWGPWSQWSPCSRTCGGGVSFRERPCYSQRRDGGSSCVGPARSHRSCRTESCPDGARDFRAEQCAEFDGAEFQGRRYRWLPYYSAPNKCELNCIPKGENFYYKHREAVVDGTPCEPGKRDVCVDGSCRVVGCDHELDSSKQEDKCLRCGGDGTTCYPVAGTFDANDLSRGYNQILIVPMGATSILIDEAAASRNFLAVKNVRGEYYLNGHWTIEAARALPAASTILHYERGAEGDLAPERLHARGPTSEPLVIELISQEPNPGVHYEYHLPLRRPSPGFSWSHGSWSDCSAECGGGHQSRLVFCTIDHEAYPDHMCQRQPRPADRRSCNLHPCPETKRWKAGPWAPCSASCGGGSQSRSVYCISSDGAGIQEAVEEAECAGLPGKPPAIQACNLQRCAAWSPEPWGECSVSCGVGVRKRSVTCRGERGSLLHTAACSLEDRPPLTEPCVHEDCPLLSDQAWHVGTWGLCSKSCSSGTRRRQVICAIGPPSHCGSLQHSKPVDVEPCNTQPCHLPQEVPSMQDVHTPASNPWMPLGPQESPASDSRGQWWAAQEHPSARGDHRGERGDPRGDQGTHLSALGPAPSLQQPPYQQPLRSGSGPHDCRHSPHGCCPDGHTASLGPQWQGCPGAPCQQSRYGCCPDRVSVAEGPHHAGCTKSYGGDSTGGMPRSRAVASTVHNTHQPQAQQNEPSECRGSQFGCCYDNVATAAGPLGEGCVGQPSHDWAARWYFVASVGQCNRFWYGGCHGNANNFASEQECMSSCQGSLHGPRRPQPGASGRSTHTDGGGSSPAGEQEPSQHRTGAAVQRKPWPSGGLWRQDQQPGPGEAPHTQAFGEWPWGQELGSRAPGLGGDAGSPAPPFHSSSYRISLAGVEPSLVQAALGQLVRLSCSDDTAPESQAAWQKDGQPISSDRHRLQFDGSLIIHPLQAEDAGTYSCGSTRPGRDSQKIQLRIIGGDMAVLSEAELSRFPQPRDPAQDFGQAGAAGPLGAIPSSHPQPANRLRLDQNQPRVVDASPGQRIRMTCRAEGFPPPAIEWQRDGQPVSSPRHQLQPDGSLVISRVAVEDGGFYTCVAFNGQDRDQRWVQLRVLGELTISGLPPTVTVPEGDTARLLCVVAGESVNIRWSRNGLPVQADGHRVHQSPDGTLLIYNLRARDEGSYTCSAYQGSQAVSRSTEVKVVSPAPTAQPRDPGRDCVDQPELANCDLILQAQLCGNEYYSSFCCASCSRFQPHAQPIWQ

SEQ ID NO: 9988 - protein, 1278 aa, Homo Sapiens
MRLLLLVPLLLAPAPGSSAPKVRRQSDTWGPWSQWSPCSRTCGGGVSFRERPCYSQRRDGGSSCVGPARSHRSCRTESCPDGARDFRAEQCAEFDGAEFQGRRYRWLPYYSAPNKCELNCIPKGENFYYKHREAVVDGTPCEPGKRDVCVDGSCRVVGCDHELDSSKQEDKCLRCGGDGTTCYPVAGTFDANDLSRGYNQILIVPMGATSILIDEAAASRNFLAVKNVRGEYYLNGHWTIEAARALPAASTILHYERGAEGDLAPERLHARGPTSEPLVIELISQEPNPGVHYEYHLPLRRPSPGFSWSHGSWSDCSAECGGGHQSRLVFCTIDHEAYPDHMCQRQPRPADRRSCNLHPCPETKRWKAGPWAPCSASCGGGSQSRSVYCISSDGAGIQEAVEEAECAGLPGKPPAIQACNLQRCAAWSPEPWGECSVSCGVGVRKRSVTCRGERGSLLHTAACSLEDRPPLTEPCVHEDCPLLSDQAWHVGTWGLCSKSCSSGTRRRQVICAIGPPSHCGSLQHSKPVDVEPCNTQPCHLPQEVPSMQDVHTPASNPWMPLGPQESPASDSRGQWWAAQEHPSARGDHRGERGDPRGDQGTHLSALGPAPSLQQPPYQQPLRSGSGPHDCRHSPHGCCPDGHTASLGPQWQGCPGAPCQQSRYGCCPDRVSVAEGPHHAGCTKSYGGDSTGGMPRSRAVASTVHNTHQPQAQQNEPSECRGSQFGCCYDNVATAAGPLGEGCVGQPSHAYPVRCLLPSAHGSCADWAARWYFVASVGQCNRFWYGGCHGNANNFASEQECMSSCQGSLHGPRRPQPGASGRSTHTDGGGSSPAGEQEPSQHRTGAAVQRKPWPSGGLWRQDQQPGPGEAPHTQAFGEWPWGQELGSRAPGLGGDAGSPAPPFHSSSYRISLAGVEPSLVQAALGQLVRLSCSDDTAPESQAAWQKDGQPISSDRHRLQFDGSLIIHPLQAEDAGTYSCGSTRPGRDSQKIQLRIIGGDMAVLSEAELSRFPQPRDPAQDFGQAGAAGPLGAIPSSHPQPANRLRLDQNQPRVVDASPGQRIRMTCRAEGFPPPAIEWQRDGQPVSSPRHQLQPDGSLVISRVAVEDGGFYTCVAFNGQDRDQRWVQLRVLGELTISGLPPTVTVPEGDTARLLCVVAGESVNIRWSRNGLPVQADGHRVHQSPDGTLLIYNLRARDEGSYTCSAYQGSQAVSRSTEVKVVSPAPTAQPRDPGRDCVDQPELANCDLILQAQLCGNEYYSSFCCASCSRFQPHAQPIWQ

SEQ ID NO: 9989 - protein, 1278 aa, Homo Sapiens; identical to SEQ ID NO: 9988

SEQ ID NO: 9990 - protein, 214 aa, Homo Sapiens
VHNTHQPQAQQNEPSECRGSQFGCCYDNVATAAGPLGEGCVGQPSHAYPVRCLLPSAHGSCADWAARWYFVASVGQCNRFWYGGCHGNANNFASEQECMSSCQGSLHGPRRPQPGASGRSTHTDGGGSSPAGEQEPSQHRTGAAVQRKPWPSGGLWRQDQQPGPGEAPHTQAFGEWPWGQELGSRAPGLGGDAGSPAPPFHSSSYRSHFPPLQD

SEQ ID NO: 9991 - protein, 311 aa, Homo Sapiens
  misc_feature (1)..(1): Xaa can be any naturally occurring amino acid
XCMSSCQGSLHGPRRPQPGASGRSTHTDGGGSSPAGEQEPSQHRTGAAVQRKPWPSGGLWRQDQQPGPGEAPHTQAFGEWPWGQELGSRAPGLGGDAGSPAPPFHSSSYRISLAGVEPSLVQAALGQLVRLSCSDDTAPESQAAWQKDGQPISSDRHRLQFDGSLIIHPLQAEDAGTYSCGSTRPGRDSQKIQLRIIGGDMAVLSEAELSRFPQPRDPAQDFGQAGAAGPLGAIPSSHPQPANRLRLDQNQPRVVDASPGQRIRMTCRAEGFPPPAIEWQRDGQPVSSPSTHRPAQGPWQGLRRPARAGQL

SEQ ID NO: 9992 - protein, 1627 aa, Homo Sapiens
MRLWSWVLHLGLLSAALGCGLAERPRRARRDPRAGRPPRPAAGPATCATRAARGRRASPPPPPPPGGAWEAVRVPRRRQQREARGATEEPSPPSRALYFSGRGEQLRLRADLELPRDAFTLQVWLRAEGGQRSPAVITGLYDKCSYISRDRGWVVGIHTISDQDNKDPRYFFSLKTDRARQVTTINAHRSYLPGQWVYLAATYDGQFMKLYVNGAQVATSGEQVGGIFSPLTQKCKVLMLGGSALNHNYRGYIEHFSLWKVARTQREILSDMETHGAHTALPQLLLQENWDNVKHAWSPMKDGSSPKVEFSNAHGFLLDTSLEPPLCGQTLCDNTEVIASYNQLSSFRQPKVVRYRVVNLYEDDHKNPTVTREQVDFQHHQLAEAFKQYNISWELDVLEVSNSSLRRRLILANCDISKIGDENCDPECNHTLTGHDGGDCRHLRHPAFVKKQHNGVCDMDCNYERFNFDGGECCDPEITNVTQTCFDPDSPHRAYLDVNELKNILKLDGSTHLNIFFAKSSEEELAGVATWPWDKEALMHLGGIVLNPSFYGMPGHTHTMIHEIGHSLGLYHVFRGISEIQSCSDPCMETEPSFETGDLCNDTNPAPKHKSCGDPGPGNDTCGFHSFFNTPYNNFMSYADDDCTDSFTPNQVARMHCYLDLVYQGWQPSRKPAPVALAPQVLGHTTDSVTLEWFPPIDGHFFERELGSACHLCLEGRILVQYASNASSPMPCSPSGHWSPREAEGHPDVEQPCKSSVRTWSPNSAVNPHTVPPACPEPQGCYLELEFLYPLVPESLTIWVTFVSTDWDSSGAVNDIKLLAVSGKNISLGPQNVFCDVPLTIRLWDVGEEVYGIQIYTLDEHLEIDAAMLTSTADTPLCLQCKPLKYKVVRDPPLQMDVASILHLNRKFVDMDLNLGSVYQYWVITISGTEESEPSPAVTYIHGSGYCGDGIIQKDQGEQCDDMNKINGDGCSLFCRQEVSFNCIDEPSRCYFHDGDGVCEEFEQKTSIKDCGVYTPQGFLDQWASNASVSHQDQQCPGWVIIGQPAASQVCRTKVIDLSEGISQHAWYPCTISYPYSQLAQTTFWLRAYFSQPMVAAAVIVHLVTDGTYYGDQKQETISVQLLDTKDQSHDLGLHVLSCRNNPLIIPVVHDLSQPFYHSQAVRVSFSSPLVAISGVALRSFDNFDPVTLSSCQRGETYSPAEQSCVHFACEKTDCPELAVENASLNCSSSDRYHGAQCTVSCRTGYVLQIRRDDELIKSQTGPSVTVTCTEGKWNKQVACEPVDCSIPDHHQVYAASFSCPEGTTFGSQCSFQCRHPAQLKGNNSLLTCMEDGLWSFPEALCELMCLAPPPVPNADLQTARCRENKHKVGSFCKYKCKPGYHVPGSSRKSKKRAFKTQCTQDGSWQEGACVPVTCDPPPPKFHGLYQCTNGFQFNSECRIKCEDSDASQGLGSNVIHCRKDGTWNGSFHVCQEMQGQCSVPNELNSNLKLQCPDGYAIGSECATSCLDHNSESIILPMNVTVRDIPHWLNPTRVERVVCTAGLKWYPHPALIHCVKGCEPFMGDNYCDAINNRAFCNYDGGDCCTSTVKTKKVTPFPMSCDLQGDCACRDPQAQEHSRKDLRGYSHG

SEQ ID NO: 9993 - protein, 827 aa, Homo Sapiens
MMCLKILRISLAILAGWALCSANSELGWTRKKSLVEREHLNQVLLEGERCWLGAKVRRPRASPQHHLFGVYPSRAGNYLRPYPVGEQEIHHTGRSKPDTEGNAVSLVPPDLTENPAGLRGAVEEPAAPWVGDSPIGQSELLGDDDAYLGNQRSKESLGEAGIQKGSAMAATTTTAIFTTLNEPKPETQRRGWAKSRQRRQVWKRRAEDGQGDSGISSHFQPWPKHSLKHRVKKSPPEESNQNGGEGSYREAETFNSQVGLPILYFSGRRERLLLRPEVLAEIPREAFTVEAWVKPEGGQNNPAIIAGVFDNCSHTVSDKGWALGIRSGKDKGKRDARFFFSLCTDRVKKATILISHSRYQPGTWTHVAATYDGRHMALYVDGTQVASSLDQSGPLNSPFMASCRSLLLGGDSSEDGHYFRGHLGTLVFWSTALPQSHFQHSSQHSSGEEEATDLVLTASFEPVNTEWVPFRDEKYPRLEVLQGFEPEPEILSPLQPPLCGQTVCDNVELISQYNGYWPLRGEKVIRYQVVNICDDEGLNPIVSEEQIRLQHEALNEAFSRYNISWQLSVHQVHNSTLRHRVVLVNCEPSKIGNDHCDPECEHPLTGYDGGDCRLQGRCYSWNRRDGLCHVECNNMLNDFDDGDCCDPQVADVRKTCFDPDSPKRAYMSVKELKEALQLNSTHFLNIYFASSVREDLAGAATWPWDKDAVTHLGGIVLSPAYYGMPGHTDTMIHEVGHVLGLYHVFKGVSERESCNDPCKETVPSMETGDLCADTAPTPKSELCREPEPTSDTCGFTRFPGAPFTNYMSYTGITTVLFCFLLRIHGGL

SEQ ID NO: 9994 - protein, 1791 aa, Homo Sapiens
MMCLKILRISLAILAGWALCSANSELGWTRKKSLVEREHLNQVLLEGERCWLGAKVRRPRASPQHHLFGVYPSRAGNYLRPYPVGEQEIHHTGRSKPDTEGNAVSLVPPDLTENPAGLRGAVEEPAAPWVGDSPIGQSELLGDDDAYLGNQRSKESLGEAGIQKGSAMAATTTTAIFTTLNEPKPETQRRGWAKSRQRRQVWKRRAEDGQGDSGISSHFQPWPKHSLKHRVKKSPPEESNQNGGEGSYREAETFNSQVGLPILYFSGRRERLLLRPEVLAEIPREAFTVEAWVKPEGGQNNPAIIAGVFDNCSHTVSDKGWALGIRSGKDKGKRDARFFFSLCTDRVKKATILISHSRYQPGTWTHVAATYDGRHMALYVDGTQVASSLDQSGPLNSPFMASCRSLLLGGDSSEDGHYFRGHLGTLVFWSTALPQSHFQHSSQHSSGEEEATDLVLTASFEPVNTEWVPFRDEKYPRLEVLQGFEPEPEILSPLQPPLCGQTVCDNVELISQYNGYWPLRGEKVIRYQVVNICDDEGLNPIVSEEQIRLQHEALNEAFSRYNISWQLSVHQVHNSTLRHRVVLVNCEPSKIGNDHCDPECEHPLTGYDGGDCRLQGRCYSWNRRDGLCHVECNNMLNDFDDGDCCDPQVADVRKTCFDPDSPKRAYMSVKELKEALQLNSTHFLNIYFASSVREDLAGAATWPWDKDAVTHLGGIVLSPAYYGMPGHTDTMIHEVGHVLGLYHVFKGVSERESCNDPCKETVPSMETGDLCADTAPTPKSELCREPEPTSDTCGFTRFPGAPFTNYMSYTDDNCTDNFTPNQVARMHCYLDLVYQQWTESRKPTPIPIPPMVIGQTNKSLTIHWLPPISGVVYDRASGSLCGACTEDGTFRQYVHTASSRRVCDSSGYWTPEEAVGPPDVDQPCEPSLQAWSPEVHLYHMNMTVPCPTEGCSLELLFQHPVQADTLTLWVTSFFMESSQVLFDTEILLENKESVHLGPLDTFCDIPLTIKLHVDGKVSGVKVYTFDERIEIDAALLTSQPHSPLCSGCRPVRYQVLRDPPFASGLPVVVTHSHRKFTDVEVTPGQMYQYQVLAEAGGELGEASPPLNHIHGAPYCGDGKVSERLGEECDDGDLVSGDGCSKVCELEEGFNCVGEPSLCYMYEGDGICEPFERKTSIVDCGIYTPKGYLDQWATRAYSSHEDKKKCPVSLVTGEPHSLICTSYHPDLPNHRPLTGWFPCVASENETQDDRSEQPEGSLKKEDEVWLKVCFNRPGEARAIFIFLTTDGLVPGEHQQPTVTLYLTDVRGSNHSLGTYGLSCQHNPLIINVTHHQNVLFHHTTSVLLNFSSPRVGISAVALRTSSRIGLSAPSNCISEDEGQNHQGQSCIHRPCGKQDSCPSLLLDHADVVNCTSIGPGLMKCAITCQRGFALQASSGQYIRPMQKEILLTCSSGHWDQNVSCLPVDCGVPDPSLVNYANFSCSEGTKFLKRCSISCVPPAKLQGLSPWLTCLEDGLWSLPEVYCKLECDAPPIILNANLLLPHCLQDNHDVGTICKYECKPGYYVAESAEGKVRNKLLKIQCLEGGIWEQGSCIPVVCEPPPPVFEGMYECTNGFSLDSQCVLNCNQEREKLPILCTKEGLWTQEFKLCENLQGECPPPPSELNSVEYKCEQGYGIGAVCSPLCVIPPSDPVMLPENITADTLEHWMEPVKVQSIVCTGRRQWHPDPVLVHCIQSCEPFQADGWCDTINNRAYCHYDGGDCCSSTLSSKKVIPFAADCDLDECTCRDPKAEENQ

SEQ ID NO: 9995 - protein, 678 aa, Homo Sapiens
MAAPGPLPAAALSPGAPTPRELMHGVAGVTSRAGRDREAGSVLPAGNRGARKASRRSSSRSMSRDNKFSKKDCLSIRNVVASIQTKEGLNLKLISGDVLYIWADVIVNSVPMNLQLGGGPLSRAFLQKAGPMLQKELDDRRRETEEKVGNIFMTSGCNLDCKAVLHAVAPYWNNGAETSWQIMANIIKKCLTTVEVLSFSSITFPMIGTGSLQFPKAVFAKLILSEVFEYSSSTRPITSPLQEVHFLVYTNDDEGCQAFLDEFTNWSRINPNKARIPMAGDTQGVVGTVSKPCFTAYEMKIGAITFQVATGDIATEQVDVIVNSTARTFNRKSGVSRAILEGAGQAVESECAVLAAQPHRDFIITPGGCLKCKIIIHVPGGKDVRKTVTSVLEECEQRKYTSVSLPAIGTGNAGKNPITVADNIIDAIVDFSSQHSTPSLKTVKVVIFQPELLNIFYDSMKKRDLSASLNFQSTFSMTTCNLPEHWTDMNHQLFCMVQLEPGQSEYNTIKDKFTRTCSSYAIEKIERIQNAFLWQSYQVKKRQMDIKNDHKNNERLLFHGTDADSVPYVNQHGFNRSCAGKNAVSYGKGTYFAVDASYSAKDTYSKPDSNGRKHMYVVRVLTGVFTKGRAGLVTPPPKNPHNPTDLFDSVTNNTRSPKLFVVFFDNQAYPEYLITFTA

SEQ ID NO: 9996 - protein, 483 aa, Homo Sapiens
MAAPGPLPAAALSPGAPTPRELMHGVAGVTSRAGRDREAGSVLPAGNRGARKASRRSSSRSMSRDNKFSKKDCLSIRNVVASIQTKEGLNLKLISGDVLYIWADVIVNSVPMNLQLGGGPLSRAFLQKAGPMLQKELDDRRRETEEKVGNIFMTSGCNLDCKAVLHAVAPYWNNGAETSWQVATGDIATEQVDVIVNSTARTFNRKSGVSRAILEGAGQAVESECAVLAAQPHRDFIITPGGCLKCKIIIHVPGGKDVRKTVTSVLEECEQRKYTSVSLPAIGTGNLPEHWTDMNHQLFCMVQLEPGQSEYNTIKDKFTRTCSSYAIEKIERIQNAFLWQSYQVKKRQMDIKNDHKNNERLLFHGTDADSVPYVNQHGFNRSCAGKNAVSYGKGTYFAVDASYSAKDTYSKPDSNGRKHMYVVRVLTGVFTKGRAGLVTPPPKNPHNPTDLFDSVTNNTRSPKLFVVFFDNQAYPEYLITFTA

SEQ ID NO: 9997 - protein, 444 aa, Homo Sapiens
MLQRIGLIFLHNIVVVSNCFYFQAFLDEFTNWSRINPNKARIPMAGDTQGVVGTVSKPCFTAYEMKIGAITFQVATGDIATEQVDVIVNSTARTFNRKSGVSRAILEGAGQAVESECAVLAAQPHRDFIITPGGCLKCKIIIHVPGGKDVRKTVTSVLEECEQRKYTSVSLPAIGTGNAGKNPITVADNIIDAIVDFSSQHSTPSLKTVKVVIFQPELLNIFYDSMKKRDLSASLNFQSTFSMTTCNLPEHWTDMNHQLFCMVQLEPGQSEYNTIKDKFTRTCSSYAIEKIERIQNAFLWQSYQVKKRQMDIKNDHKNNERLLFHGTDADSVPYVNQHGFNRSCAGKNAVSYGKGTYFAVDASYSAKDTYSKPDSNGRKHMYVVRVLTGVFTKGRAGLVTPPPKNPHNPTDLFDSVTNNTRSPKLFVVFFDNQAYPEYLITFTA

SEQ ID NO: 9998 - protein, 375 aa, Homo Sapiens
MLQRIGLIFLHNIVVVSNCFYFQAFLDEFTNWSRINPNKARIPMAGDTQGVVGTVSKPCFTAYEMKIGAITFQVATGDIATEQVDVIVNSTARTFNRKSGVSRAILEGAGQAVESECAVLAAQPHRDFIITPGGCLKCKIIIHVPGGKDVRKTVTSVLEECEQRKYTSVSLPAIGTGNLPEHWTDMNHQLFCMVQLEPGQSEYNTIKDKFTRTCSSYAIEKIERIQNAFLWQSYQVKKRQMDIKNDHKNNERLLFHGTDADSVPYVNQHGFNRSCAGKNAVSYGKGTYFAVDASYSAKDTYSKPDSNGRKHMYVVRVLTGVFTKGRAGLVTPPPKNPHNPTDLFDSVTNNTRSPKLFVVFFDNQAYPEYLITFTA

SEQ ID NO: 9999 - protein, 397 aa, Homo Sapiens
MHHVFKDHQRGEKRGFLSPENKNCRRLELRRGCSCSWGLCSQALMASLAGSLLPGSDRSGVETSEYAQGGVSDLQEEGKNAINSPMSPALVDVHPEDTQLEENEERTMIDPTSKEDPKFKELVKVLLDWINDVLVEERIIVKQLEEDLYDGQVLQKLLEKLAGCKLNVAEVTQSEIGQKQKLQTVLEAVHDLLRPRGWALRWSVDSIHGKNLVAILHLLVSLAMHFRAPIRLPEHVTVQVVVVRKREGLLHSSHISEELTTTTEMMMGRFERDAFDTLFDHAPDKLSVVKKSLITFVNKHLNKLNLEVTELETQFADGVYLVLLMGLLEDYFVPLHHFYLTPESFDQKVHNVSFAFELMLDGGLKKPKARPEDVVNLDLKSTLRVLYNLFTKYKNVE

SEQ ID NO: 10000 - protein, 194 aa, Homo Sapiens
MPRLKCSGAVIAHCSLELLASSDPSASASQGARTTVSDLQEEGKNAINSPMSPALVDVHPEDTQLEENEERTMIDPTSKEDPKFKELVKVLLDWINDVLVEERIIVKQLEEDLYDGQVLQKLLEKLAGCKLNVAEVTQSEIGQKQKLQTVLEAVHDLLRPRGWALRWSVDSIHGKNLVAILHLLVSLAMHFRAP

SEQ ID NO: 10001 - protein, 327 aa, Homo Sapiens
MSDLQEEGKNAINSPMSPALVDVHPEDTQLEENEERTMIDPTSKEDPKFKELVKVLLDWINDVLVEERIIVKQLEEDLYDGQVLQKLLEKLAGCKLNVAEVTQSEIGQKQKLQTVLEAVHDLLRPRGWALRWSVDSIHGKNLVAILHLLVSLAMHFRAPIRLPEHVTVQVVVVRKREGLLHSSHISEELTTTTEMMMGRFERDAFDTLFDHAPDKLSVVKKSLITFVNKHLNKLNLEVTELETQFADGVYLVLLMGLLEDYFVPLHHFYLTPESFDQKVHNVSFAFELMLDGGLKKPKARPEDVVNLDLKSTLRVLYNLFTKYKNVE

SEQ ID NO: 10002 - protein, 289 aa, Homo Sapiens
MSPALVDVHPEDTQLEENEERTMIDPTSKEDPKFKELVKVLLDWINDVLVEERIIVKQLEEDLYDGQVLQKLLEKLAGCKLNVAEVTQSEIGQKQKLQTVLEAVHDLLRPRGWALRWSVDSIHGKNLVAILHLLVSLAMHFRAPIRLPEHVTVQVVVVRKREGLLHSSHISEELTTTTEMMMGRFERDAFDTLFDHAPDKLSVVKKFADGVYLVLLMGLLEDYFVPLHHFYLTPESFDQKVHNVSFAFELMLDGGLKKPKARPEDVVNLDLKSTLRVLYNLFTKYKNVE

SEQ ID NO: 10003 - protein, 364 aa, Homo Sapiens
MSSAPRSPTPRPRRMKKDESFLGKLGGTLARKRRAREVSDLQEEGKNAINSPMSPALVDVHPEDTQLEENEERTMIDPTSKEDPKFKELVKVLLDWINDVLVEERIIVKQLEEDLYDGQVLQKLLEKLAGCKLNVAEVTQSEIGQKQKLQTVLEAVHDLLRPRGWALRWSVDSIHGKNLVAILHLLVSLAMHFRAPIRLPEHVTVQVVVVRKREGLLHSSHISEELTTTTEMMMGRFERDAFDTLFDHAPDKLSVVKKSLITFVNKHLNKLNLEVTELETQFADGVYLVLLMGLLEDYFVPLHHFYLTPESFDQKVHNVSFAFELMLDGGLKKPKARPEDVVNLDLKSTLRVLYNLFTKYKNVE

SEQ ID NO: 10004 - protein, 114 aa, Homo Sapiens
MDKSLLLELPILLCCFRALSGSLSMRNDAVIEIVQCRMCHLQFPGEKCSRGRGICTATTEEACMVGRMFKRDGNPWLTFMGCLKNCADVKGIRWSVYLVNFRCCRSHDLCNEDL

SEQ ID NO: 10005 - protein, 126 aa, Homo Sapiens
MDKSLLLELPILLCCFRALSGSLSMRNDAVNEIVAVKNNFPVIEIVQCRMCHLQFPGEKCSRGRGICTATTEEACMVGRMFKRDGNPWLTFMGCLKNCADVKGIRWSVYLVNFRCCRSHDLCNEDL

SEQ ID NO: 10006 - protein, 113 aa, Homo Sapiens
MLVLFLLGTVFLLCPYWGELHDPIKATEIMCYECKKYHLGLCYGVMTSCSLKHKQSCAVENFYILTRKGQSMYHYSKLSCMTSCEDINFLGFTKRVELICCDHSNYCNLPEGV

SEQ ID NO: 10007 - protein, 70 aa, Homo Sapiens
MLVLFLLGTVFLLCPYWGELHDPIKGQSMYHYSKLSCMTSCEDINFLGFTKRVELICCDHSNYCNLPEGV

SEQ ID NO: 10008 - protein, 98 aa, Homo Sapiens
MNKHFLFLFLLYCLIVAVTSLQCITCHLRTRTDRCRRGFGVCTAQKGEACMLLRIYQRNTLQISYMVCQKFCRDMTFDLRNRTYVHTCCNYNYCNFKL

SEQ ID NO: 10009 - protein, 59 aa, Homo Sapiens
MRKMNTLLLVSLSFLYLKEGDKHMYSTHMCKYKCREEESSKRGLLRVTLCCDRNFCNVF

SEQ ID NO: 10010 - protein, 98 aa, Homo Sapiens
MRKMNTLLLVSLSFLYLKEVMGLKCNTCIYTEGWKCMAGRGTCIAKENELCSTTAYFRGDKHMYSTHMCKYKCREEESSKRGLLRVTLCCDRNFCNVF

SEQ ID NO: 10011 - protein, 125 aa, Homo Sapiens
MLGMSLASLHFLWQTLDYLSPIPFWPTFPSTSSPAQHFGPRLPSPDPTLFCSLLTSWPPRFSHLTQLHPRHQRILQQQQHSQTPREPHFLLTTLLRKCQWWVSLKGCSSWLKVPQPRSLGLSSQT

SEQ ID NO: 10012 - protein, 543 aa, Homo Sapiens
MNCLEGPGKTCGPLASEEELVSACQLEKEEENEGEEEEEEEDEEDLDPDLDPDLEEEENDLGDPAVLGAVHNTQRALLSSPGVKAPGMLGMSLASLHFLWQTLDYLSPIPFWPTFPSTSSPAQHFGPRLPSPDPTLFCSLLTSWPPRFSHLTQLHPRHQRILQQQQHSQTPSPPAKKPWSQQPDPYANLMTRKEKDWVIKVQMVQLQSAKPRLDDYYYQEYYQKLEKKQADEELLGRRNRVESLKLVTPYIPKAEAYESVVRIEGSLGQVAVSTCFSPRRAIDAVPHGTQEQDIEAASSQRLRVLYRIEKMFLQLLEIEEGWKYRPPPPCFSEQQSNQVEKLFQTLKTQEQNNLEEAADGFLQVLSVRKGKALVARLLPFLPQDQAVTILLAITHHLPLLVRRDVADQALQMLFKPLGKCISHLTLHELLQGLQGLTLLPPGSSERPVTVVLQNQFGISLLYALLSHGEQLVSLHSSLEEPNSDHTAWTDMVVLIAWEIAQMPTASLAEPLAFPSNLLPLFCHHVDKQLVQQLEARMEFAWIY

SEQ ID NO: 10013 - protein, 543 aa, Homo Sapiens; identical to SEQ ID NO: 10012

SEQ ID NO: 10014 - protein, 354 aa, Homo Sapiens
MTRKEKDWVIKVQMVQLQSAKPRLDDYYYQEYYQKLEKKQADEELLGRRNRVESLKLVTPYIPKAEAYESVVRIEGSLGQVAVSTCFSPRRAIDAVPHGTQEQDIEAASSQRLRVLYRIEKMFLQLLEIEEGWKYRPPPPCFSEQQSNQVEKLFQTLKTQEQNNLEEAADGFLQVLSVRKGKALVARLLPFLPQDQAVTILLAITHHLPLLVRRDVADQALQMLFKPLGKCISHLTLHELLQGLQGLTLLPPGSSERPVTVVLQNQFGISLLYALLSHGEQLVSLHSSLEEPNSDHTAWTDMVVLIAWEIAQMPTASLAEPLAFPSNLLPLFCHHVDKQLVQQLEARMEFAWIY

SEQ ID NO: 10015 - protein, 158 aa, Homo Sapiens
QALQMLFKPLGKCISHLTLHELLQGLQGLTLLPPGSSERPVTVVLQNQDRHGGSDCLGDSPNAYSLSGRTPSFPQQPTSPVLSPRGQTIGSAAGGQDGVCLDLLICLFWNTCMWEVESSDTSYIDYVYRDPESLKTFLMPLYIGEPFPIFISFLQKSK

SEQ ID NO: 10016 - protein, 188 aa, Homo Sapiens
  misc_feature (1)..(1): Xaa can be any naturally occurring amino acid
XENEGEEEEEEEDEEDLDPDLDPDLEEEENDLGDPAVLGAVHNTQRALLSSPGVKAPGMLGMSLASLHFLWQTLDYLSPIPFWPTFPSTSSPAQHFGPRLPSPDPTLFCSLLTSWPPRFSHLTQLHPRHQRILQQQQHSQTPREPHFLLTTLLRKCQWWVSLKGCSSWLKVPQPRSLGLSSQTPMLTS

SEQ ID NO: 10017 - protein, 304 aa, Homo Sapiens
MAGPCCVWGVVFFSCLSPAGHGGVNQLGGVFVNGRPLPDVVRQRIVELAHQGVRPCDISRQLRVSHGCVSKILGRYYETGSIKPGVIGGSKPKVATPKVVDKIAEYKRQNPTMFAWEIRDRLLAEGICDNDTVPSVSSINRIIRTKVQQPFHPTPDGAGTGVTAPGHTIVPSTASPPVSSASNDPVGSYSINGILGIPRSNDVSEGSVPNGDSQSGVDSLRKHLRADTFTQQQLEALDRVFERPSYPDVFQASEHIKSEQGNEYSLPALTPGLDEVKSSLSASTNPELGSNVSGTQTYPVVTGR

SEQ ID NO: 10018 - protein, 396 aa, Homo Sapiens
MDMHCKADPFSAMHPGHGGVNQLGGVFVNGRPLPDVVRQRIVELAHQGVRPCDISRQLRVSHGCVSKILGRYYETGSIKPGVIGGSKPKVATPKVVDKIAEYKRQNPTMFAWEIRDRLLAEGICDNDTVPSVSSINRIIRTKVQQPFHPTPDGAGTGVTAPGHTIVPSTASPPVSSASNDPVGSYSINGILGIPRSNGEKRKRDEDVSEGSVPNGDSQSGVDSLRKHLRADTFTQQQLEALDRVFERPSYPDVFQASEHIKSEQGNEYSLPALTPGLDEVKSSLSASTNPELGSNVSGTQTYPVVTGRDMASTTLPGYPPHVPPTGQGSYPTSTLAGMVPEAAVGPSSSLMSKPGRKLAEVPPCVQPTGASSPATRTATPSTRPTTRLGDSATPPY

SEQ ID NO: 10019 - protein, 394 aa, Homo Sapiens
MDMHCKADPFSAMHPGHGGVNQLGGVFVNGRPLPDVVRQRIVELAHQGVRPCDISRQLRVSHGCVSKILGRYYETGSIKPGVIGGSKPKVATPKVVDKIAEYKRQNPTMFAWEIRDRLLAEGICDNDTVPSVSSINRIIRTKVQQPFHPTPDGAGTGVTAPGHTIVPSTASPPVSSASNDPVGSYSINGILGIPRSNGEKRKRDEDVSEGSVPNGDSQSGVDSLRKHLRADTFTQQQLEALDRVFERPSYPDVFQASEHIKSEQGNEYSLPALTPGLDEVKSSLSASTNPELGSNVSGTQTYPVVTGRDMASTTLPGYPPHVPPTGQGSYPTSTLAGMVPGSEFSGNPYSHPQYTAYNEAWRFSNPALLSSPYYYSAAPRGSAPAAAAAAYDRH

SEQ ID NO: 10020 - protein, 214 aa, Homo Sapiens
MDMHCKADPFSAMHPGHGGVNQLGGVFVNGRPLPDVVRQRIVELAHQGVRPCDISRQLRVSHGCVSKILGRYYETGSIKPGVIGGSKPKVATPKVVDKIAEYKRQNPTMFAWEIRDRLLAEGICDNDTVPSVSSINRIIRTKVQQPFHPTPDGAGTGVTAPGHTIVPSTASPPVSSASNDPVGSYSINGILGIPRSNGEKRKRDEVEVYTDPAH

SEQ ID NO: 10021 - protein, 417 aa, Homo Sapiens
MDMHCKADPFSAMHPGHGGVNQLGGVFVNGRPLPDVVRQRIVELAHQGVRPCDISRQLRVSHGCVSKILGRYYETGSIKPGVIGGSKPKVATPKVVDKIAEYKRQNPTMFAWEIRDRLLAEGICDNDTVPSVSSINRIIRTKVQQPFHPTPDGAGTGVTAPGHTIVPSTASPPVSSASNDPVGSYSINGILGIPRSNGEKRKRDEVEVYTDPAHIRGGGGLHLVWTLRDVSEGSVPNGDSQSGVDSLRKHLRADTFTQQQLEALDRVFERPSYPDVFQASEHIKSEQGNEYSLPALTPGLDEVKSSLSASTNPELGSNVSGTQTYPVVTGRDMASTTLPGYPPHVPPTGQGSYPTSTLAGMVPGSEFSGNPYSHPQYTAYNEAWRFSNPALLSSPYYYSAAPRGSAPAAAAAAYDRH

SEQ ID NO: 10022 - protein, 393 aa, Homo Sapiens
MDMHCKADPFSAMHRHGGVNQLGGVFVNGRPLPDVVRQRIVELAHQGVRPCDISRQLRVSHGCVSKILGRYYETGSIKPGVIGGSKPKVATPKVVDKIAEYKRQNPTMFAWEIRDRLLAEGICDNDTVPSVSSINRIIRTKVQQPFHPTPDGAGTGVTAPGHTIVPSTASPPVSSASNDPVGSYSINGILGIPRSNGEKRKRDEDVSEGSVPNGDSQSGVDSLRKHLRADTFTQQQLEALDRVFERPSYPDVFQASEHIKSEQGNEYSLPALTPGLDEVKSSLSASTNPELGSNVSGTQTYPVVTGRDMASTTLPGYPPHVPPTGQGSYPTSTLAGMVPGSEFSGNPYSHPQYTAYNEAWRFSNPALLSSPYYYSAAPRGSAPAAAAAAYDRH

SEQ ID NO: 10023 - protein, 257 aa, Homo Sapiens
MAWSSKSWLCLIASSCPRDTLLPSAHHASPVPASHLTQVSNGCVSKILGRYYRTGVLEPKGIGGSKPRLATPPVVARIAQLKGECPALFAWEIQRQLCAEGLCTQDKTPSVSSINRVLRALQEDQGLPCTRLRSPAVLAPAVLTPHSGSETPRGTHPGTGHRNRTIFSPSQAEALEKEFQRGQYPDSVARGKLATATSLPEDTVRVWFSNRRAKWRRQEKLKWEMQLPGASQGLTVPRVAPGIISAQGPTVFMSRKY

SEQ ID NO: 10024 - protein, 257 aa, Homo Sapiens; identical to SEQ ID NO: 10023

SEQ ID NO: 10025 - protein, 341 aa, Homo Sapiens
MAWSSKSWLCLIASSCPRDTLLPSAHHASPVPASHLTQVSNGCVSKILGRYYRTGVLEPKGIGGSKPRLATPPVVARIAQLKGECPALFAWEIQRQLCAEGLCTQDKTPSVSSINRVLRALQEDQGLPCTRLRSPAVLAPAVLTPHSGSETPRGTHPGTGHRNRTIFSPSQAEALEKEFQRGQYPDSVARGKLATATSLPEDTVRVWFSNRRAKWRRQEKLKWEMQLPGASQGLTVPRVAPGIISAQQSPGSVPTAALPALEPLGPSCYQLCWATAPERCLSDTPPKACLKPCWGHLPPQPNSLDSGLLCLPCPSSHCHLASLSGSQALLWPGCPLLYGLE

SEQ ID NO: 10026 - protein, 348 aa, Homo Sapiens
MHQDGISSMNQLGGLFVNGRPLPLDTRQQIVRLAVSGMRPCDISRILKVSNGCVSKILGRYYRTGVLEPKGIGGSKPRLATPPVVARIAQLKGECPALFAWEIQRQLCAEGLCTQDKTPSVSSINRVLRALQEDQGLPCTRLRSPAVLAPAVLTPHSGSETPRGTHPGTGHRNRTIFSPSQAEALEKEFQRGQYPDSVARGKLATATSLPEDTVRVWFSNRRAKWRRQEKLKWEMQLPGASQGLTVPRVAPGIISAQQSPGSVPTAALPALEPLGPSCYQLCWATAPERCLSDTPPKACLKPCWDCGSFLLPVIAPSCVDVAWPCLDASLAHHLIGGAGKATPTHFSH

SEQ ID NO: 10027 - protein, 349 aa, Homo Sapiens
MHQDGISSMNQLGGLFVNGRPLPLDTRQQIVRLAVSGMRPCDISRILKVSNGCVSKILGRYYRTGVLEPKGIGGSKPRLATPPVVARIAQLKGECPALFAWEIQRQLCAEGLCTQDKTPSVSSINRVLRALQEDQGLPCTRLRSPAVLAPAVLTPHSGSETPRGTHPGTGHRNRTIFSPSQAEALEKEFQRGQYPDSVARGKLATATSLPEDTVRVWFSNRRAKWRRQEKLKWEMQLPGASQGLTVPRVAPGIISAQQSPGSVPTAALPALEPLGPSCYQLCWATAPERCLSDTPPKACLKPCWDCGSFLLPVIAPSCVDVAWPCLDASLAHHLIGGAGKATPTHFSHP

SEQ ID NO: 10028 - protein, 351 aa, Homo Sapiens
MHQDGISSMNQLGGLFVNGRPLPLDTRQQIVRLAVSGMRPCDISRILKVSNGCVSKILGRYYRTGVLEPKGIGGSKPRLATPPVVARIAQLKGECPALFAWEIQRQLCAEGLCTQDKTPSVSSINRVLRALQEDQGLPCTRLRSPAVLAPAVLTPHSGSETPRGTHPGTGHRNRTIFSPSQAEALEKEFQRGQYPDSVARGKLATATSLPEDTVRVWFSNRRAKWRRQEKLKWEMQLPGASQGLTVPRVAPGIISAQQSPGSVPTAALPALEPLGPSCYQLCWATAPERCLSDTPPKACLKPCWGHLPPQPNSLDSGLLCLPCPSSHCHLASLSGSQALLWPGCPLLYGLE

SEQ ID NO: 10029 - protein, 343 aa, Homo Sapiens
MNQLGGLFVNGRPLPLDTRQQIVRLAVSGMRPCDISRILKVSNGCVSKILGRYYRTGVLEPKGIGGSKPRLATPPVVARIAQLKGECPALFAWEIQRQLCAEGLCTQDKTPSVSSINRVLRALQEDQGLPCTRLRSPAVLAPAVLTPHSGSETPRGTHPGTGHRNRTIFSPSQAEALEKEFQRGQYPDSVARGKLATATSLPEDTVRVWFSNRRAKWRRQEKLKWEMQLPGASQGLTVPRVAPGIISAQQSPGSVPTAALPALEPLGPSCYQLCWATAPERCLSDTPPKACLKPCWGHLPPQPNSLDSGLLCLPCPSSHCHLASLSGSQALLWPGCPLLYGLE

SEQ ID NO: 10030 - protein, 423 aa, Homo Sapiens
MAAALRVAAVGARLSVLASGLRAAVRSLCSQAITVGAPVIGLNDSGGARIQEGVESLAGYADIFLRNVTASGVIPQISLIMGPCAGGAVYSPALTDFTFMVKDTSYLFITGPDVVKSVTNEDVTQEELGGAKTHTTMSGVAHRAFENDVDALCNLRDFFNYLPLSSQDPAPVRECHDPSDRLVPELDTIVPLESTKAYNMVDIIHSVVDEREFFEIMPNYAKNIIVGFARMNGRTVGIVGNQPKVASGCLDINSSVKGARFVRFCDAFNIPLITFVDVPGFLPGTAQEYGGIIRHGAKLLYAFAEATVPKVTVITRKAYGGAYDVMSSKHLCGDTNYAWPTAEIAVMGAKGAVEIIFKGHENVEAAQAEYIEKFANPFPAAVRGFVDDIIQPSSTRARICCDLDVLASKKVQRPWRKHANIPL

SEQ ID NO: 10031 - protein, 192 aa, Homo Sapiens [sequence omitted]

SEQ ID NO: 10032 - protein, 516 aa, Homo Sapiens
MAAALRVAAVGARLSVLASGLRAAVRSLCSQATSVNERIENKRRTALLGGGQRRIDAQHKRGKLTARERISLLLDPGSFVESDMFVEHRCADFGMAADKNKDFTVFGGSLSGAHAQKICKIMDQAITVGAPVIGLNDSGGARIQEGVESLAGYADIFLRNVTASGVIPQISLIMGPCAGGAVYSPALTDFTFMVKDTSYLFITGPDVVKSVTNEDVTQEELGGAKTHTTMSGVAHRAFENDVDALCNLRDFFNYLPLSSQDPAPVRECHDPSDRLVPELDTIVPLESTKAYNMVDIIHSVVDEREFFEIMPNYAKNIIVGFARMNGRTVGIVGNQPKVASGCLDINSSVKGARFVRFCDAFNIPLITFVDVPGFLPGTAQEYGGIIRHGAKLLYAFAEATVPKVTVITRKAYGGAYDVMSSKHLCGDTNYAWPTAEIAVMGAKGAVEIIFKGHENVEAAQAEYIEKFANPFPAAVRGFVDDIIQPSSTRARICCDLDVLASKKVQRPWRKHANIPL

SEQ ID NO: 10033 - protein, 539 aa, Homo Sapiens
MAAALRVAAVGARLSVLASGLRAAVRSLCSQATSVNERIENKRRTALLGGGQRRIDAQHKRGKLTARERISLLLDPGSFVESDMFVEHRCADFGMAADKNKFPGDSVVTGRGRINGRLVYVFSQDFTVFGGSLSGAHAQKICKIMDQAITVGAPVIGLNDSGGARIQEGVESLAGYADIFLRNVTASGVIPQISLIMGPCAGGAVYSPALTDFTFMVKDTSYLFITGPDVVKSVTNEDVTQEELGGAKTHTTMSGVAHRAFENDVDALCNLRDFFNYLPLSSQDPAPVRECHDPSDRLVPELDTIVPLESTKAYNMVDIIHSVVDEREFFEIMPNYAKNIIVGFARMNGRTVGIVGNQPKVASGCLDINSSVKGARFVRFCDAFNIPLITFVDVPGFLPGTAQEYGGIIRHGAKLLYAFAEATVPKVTVITRKAYGGAYDVMSSKHLCGDTNYAWPTAEIAVMGAKGAVEIIFKGHENVEAAQAEYIEKFANPFPAAVRGFVDDIIQPSSTRARICCDLDVLASKKVQRPWRKHANIPL

SEQ ID NO: 10034 - protein, 559 aa, Homo Sapiens
MAAALRVAAVGARLSVLASGLRAAVRSLCSQATSVNERIENKRRTALLGGGQRRIDAQHKRGKLTARERISLLLDPGSFVESDMFVEHRCADFGMAADKNKFPGDSVVTGRGRINGRLVYVFSQDFTVFGGSLSGAHAQKICKIMDQAITVGAPVIGLNDSGGARIQEGVESLAGYADIFLRNVTASGVIPQISLIMGPCAGGAVYSPALTDFTFMVKDTSYLFITGPDVVKSVTNEDVTQEELGGAKTHTTMSGVAHRAFENDVDALCNLRDFFNYLPLSSQDPAPVRECHDPSDRLVPELDTIVPLESTKAYNMVDIIHSVVDEREFFEIMPNYAKNIIVGFARMNGRTVGIVGNQPKVASDSISFTPWNYARRQYRPYFAGCLDINSSVKGARFVRFCDAFNIPLITFVDVPGFLPGTAQEYGGIIRHGAKLLYAFAEATVPKVTVITRKAYGGAYDVMSSKHLCGDTNYAWPTAEIAVMGAKGAVEIIFKGHENVEAAQAEYIEKFANPFPAAVRGFVDDIIQPSSTRARICCDLDVLASKKVQRPWRKHANIPL

SEQ ID NO: 10035 - protein, 303 aa, Homo Sapiens
MAAALRVAAVGARLSVLASGLRAAVRSLCSQATSVNERIENKRRTALLGGGQRRIDAQHKRGKLTARERISLLLDPGSFVESDMFVEHRCADFGMAADKNKFPGDSVVTGRGRINGRLVYVFSQDFTVFGGSLSGAHAQKICKIMDQAITVGAPVIGLNDSGGARIQEGVESLAGYADIFLRNVTASGVIPQISLIMGPCAGGAVYSPALTDFTFMVKDTSYLFITGPDVVKSVTNEDVTQEELGGAKTHTTMSGVAHRAFENDVDALCNLRDFFNYLPLSSQDPAPVRECHDPSPTFCLWLH

SEQ ID NO: 10036 - protein, 550 aa, Homo Sapiens
MAAALRVAAVGARLSVLASGLRAAVRSLCSQATSVNERIENKRRTALLGGGQRRIDAQHKRGKLTARERISLLLDPGSFVESDMFVEHRCADFGMAADKNKFPGDSVVTGRGRINGRLVYVFSQDFTVFGGSLSGAHAQKICKIMDQAITVGAPVIGLNDSGGARIQEGVESLAGYADIFLRNVTASGVIPQISLIMGPCAGGAVYSPALTDFTFMVKDTSYLFITGPDVVKSVTNEDVTQEELGGAKTHTTMSGVAHRAFENDVDALCNLRDFFNYLPLSSQDPAPVRECHDPSDRLVPELDTIVPLESTKAYNMVDIIHSVVDEREFFEIMPNYAKNIIVGFARMNGRTVGIVGNQPKVASGCLDINSSVKGARFVRFCDAFNIPLITFVDVPGFLPGTAQEYGGIIRHGAKLLYAFAEATVPKVTVITRKAYGGAYDVMSSKHLCGDTNYAWPTAEIAVMGAKGAVEIIFKGHENVEAAQAEYIEKFANPFPAAVRGFVDDIIQPSSTRARICCDLDVLASKKVRVQEVFHQVVQSGHRDGRGAVRW

SEQ ID NO: 10037 - protein, 405 aa, Homo Sapiens
MAAALRVAAVGARLSVLASGLRAAVRSLCSQATSVNERIENKRRTALLGGGQRRIDAQHKRGKLTARERISLLLDPGSFVESDMFVEHRCADFGMAADKNKFPGDSVVTGRGRINGRLVYVFSQDFTVFGGSLSGAHAQKICKIMDQAITVGAPVIGLNDSGGARIQEGVESLAGYADIFLRNVTASGVIPQISLIMGPCAGGAVYSPALTDFTFMVKDTSYLFITGPDVVKSVTNEDVTQEELGGAKTHTTMSGVAHRAFENDVDALCNLRDFFNYLPLSSQDPAPVRECHDPSDRLVPELDTIVPLESTKAYNMVDIIHSVVDEREFFEIMPNYAKNIIVGFARMNGRTVGIVGNQPKVASGCLDINSSVKGARFVRFCDAFNIPLITFVDVPGFLPGLWRCL

SEQ ID NO: 10038 - protein, 520 aa, Homo Sapiens
MAAALRVAAVGARLSVLASGLRAAVRSLCSQATSVNERIENKRRTALLGGGQRRIDAQHKRGKLTARERISLLLDPGSFVESDMFVEHRCADFGMAADKNKFPGDSVVTGRGRINGRLVYVFSQIMDQAITVGAPVIGLNDSGGARIQEGVESLAGYADIFLRNVTASGVIPQISLIMGPCAGGAVYSPALTDFTFMVKDTSYLFITGPDVVKSVTNEDVTQEELGGAKTHTTMSGVAHRAFENDVDALCNLRDFFNYLPLSSQDPAPVRECHDPSDRLVPELDTIVPLESTKAYNMVDIIHSVVDEREFFEIMPNYAKNIIVGFARMNGRTVGIVGNQPKVASGCLDINSSVKGARFVRFCDAFNIPLITFVDVPGFLPGTAQEYGGIIRHGAKLLYAFAEATVPKVTVITRKAYGGAYDVMSSKHLCGDTNYAWPTAEIAVMGAKGAVEIIFKGHENVEAAQAEYIEKFANPFPAAVRGFVDDIIQPSSTRARICCDLDVLASKKVQRPWRKHANIPL
